United States Patent Application Publication US 2017/0114356 A1 - sequence listing, part 8

SEQ ID NO: 9159 - DNA, 3886 bp, Zea Mays
gtttaccttgcaaggataaaaactcgattcgaatcgtctgcttctcgcagctaatgagactgcttgatccatgctgctacattgagtaataagtggaactgtgttgagatgatacaagatgttgattgctaaaaatgcttgtcactatgaatgagtagatagtacacttttagccttaagagagtcacacttaattttgacaaagttaaaatcttgatttagaaactcagctagtgcttttggcaaccaaacccctcagccaaacagctgcatatctagaggtagaggagtagactcctcacaccgggtaagtctagctgagtattagtatactcagccttgcttgtggcacaatttttgtaggtacctccttgctttggttgttggtgtgacttggccttcatccctgccaccgggatagatggtcgagtgggttattgcttccgcaggagaggaccaggtggagtagcgtggccaggcttcgccatgttactcggttttctccgttagttattcccgctgcattaaaatttatggttattatttctgaaactccaataatgtaatcactaatgatacttatcaaatttgtggtattatgttttattgtatttctctgtgcctcaccttcgagtgagctagtggtattcgatcctggttaagtggctttatcggactagatccgagggactgacgttttattccgatttaagtgtggtctagcctctaaggcgggacttaggcacttaagttggaataattcgggcggttccgccacatcttcgctctcgggaatttccggaggcctctccactacaattcaccggactgtccggtgtgcaccggacatgtccggtgctccaaggaaaggaggcctaaggaactcgccagcctcgggttttcactccagccgctccgctaaaattcaccggactgtccggtgtacaccggacagtccggtgtaacagcgggccaacggctacttcaggcgccaacggctacctgcagcgcatttaatgcgcgccagaagcgcgcagtcgtcaggcacgcgggagcaggcgcaccggacattgaacagtacatgtccggtgtgcaccggacatcaaagcgggcccagaagacagaaccccaacggtcgatccaacggctagttggtgacgtggctgtcgcaccggacatgtccggtgtgcaccggactgtccggtgcaccatacgacagacagctccaccaacggtcatgtttggtggttggggctataaataccccaaccactccaccattcatggcatccaagttttccagcttccaactactatacaagagctagcattcattgcaaagcacaccaaaaagagatcaaatcctctcccaactccacacaaagccctagtgactagtgagagtgatttgtagtgtttatttgaactcttgcacttggatcgcttctttttctttggcattctttcttgtgatcaaacactcacttgtaattgaggcaagagacaccaattgtgtggtggtccttgcgggaagttttgattcccaagtgatttgagaaagagaagctcactcggtccgagggaccgtttgagagagggaagggttgaaagagacccggcctttgtagcctcctcaacggggagtaggtttgagagaaccgaacctcggtaaaacaaatccgcatgtctcacttcattattcgcttgcgatttgttttgcgccctctctcgcggactctattatattactaacgctaacccggcttgtagttgtgattatttttgagaatttcagtttcgccctattcacccccccttaggcgactttcacttagaaatgaagaaaatagaaagaaaaataaaaaagaaaaagaataaaagcttacctgggccgactgcttcatttcggcccacctaaggtgactctcgcgccagcccactcgagccacgctgcgcaacgcccactgaggactggggcccgcgggtcagttcctcatcccgcgcgcgcgctcgatgcctctgccgcgcggggccagctcgtcagccactccgaccccttcactcagctcgcgcacgcctcgctgactcgtggacccaagccgtcggactccttttcatctccacgcgcgtcgggtgacttccatgtggggccctggtgtcagggttatcccctctgctgtcagctcgcgcgcgctgctaacaacctcgccgggatcttcgcgctgatggatcgggagggggaaacggcttacagggccacgtccgtgggtatttgagccgcccctccttgcccctctcatccacccgcaaactccccaccatactcgccacactcgcgatccgaaggtcgggcgcgccattgccgtaaagggcgggagaaagggggagctctgttgcagccgttcttcaccgacgtggtaaattgggggcgtgcgactgccctaccactttcgtggcatcctcgtggacaaaattggcatcgccgcggcataaagcgaagctcgaatcaaccgaggattcctcaccgggttgggcggtcaccatggccacacctcaccgtggccgaagcttggcgcagcgaaaaccgtggtaaacatcccatccctcgcttgtacttcatacccccatcgtgttgcaccaactcgaattgaagttagcttacaagaacccctggaattactcaccggaatctatgcgccgccgcggacccgctctactccgtggccagggcggtaacatcagtcaaacattaaattgggggctctatcgggttcgccctacctttggcttagtgtggcttggttggattggaaactcgggcggcgtgtggccgaatcgcacaaatccggcgatggtccgccgtgtgccctgggcggcgccaccttagctcgacaaaggaattgggggagacatctgggtcgtccgtctgttgatcgacggctcggattagaagatcgcgtaccgtttcatcctaaccgttgtgcgccgtcgatctgtggatgatcggcttaggtttgatttggggtatttagatttgtggccgttggatccatagtcgacgcacacgattagatctgggtggcgtcttggcttcgggccctcggatcttgatccagtggccattattcaataccggttcatataacacttgatctattttgagccctagattcctgatcggatggctcagattagaagttaccccttcgcgggtacgttttataaaagagcccccgcagaatcataaaaccaacccgccgtcctcactcactatttattgagtctagggaatcttctgcactagcccctgacctatctaggaatcgaggcccagtccagagcacgtttaaaatgtataaatgaattagtaaaatgtatttttaatacaaaaataattcctagaacttagttaattcatagaaaattcattttagctccaaatttagccattccaatttctaaaattttgtaataatattctttatcatttagtatcactgttttgacatgaaagcagtaataaaattaatttgtcatttaattctattttaagcacattaaatcttagaaaattcataacttgaattctataactccaaatttagtgattccagttcctatgatctcattttaatgtgtagatttttactgtatattttattcatctgtttggtgtgatgttgatcttggctatactatgtatgtattgtgttgatgcgagtagacgagcaagccactgtggaaactgaggttcaacaagtagagatagctgagcaggagctcattgaaggcaagttgtgtccttgatcacttacttttcccagccatgttcttattaattttaatgatctgcataggttaattttgatgggagcctttatgttac

SEQ ID NO: 9160 - DNA, 1517 bp, Zea Mays
cacccctcaaaaaatttccagccgccacagcttttccctgcctttcttcttcacggcagcaacaaccatcagggagccgtgctcctcccatggcgcctcctctccttcccttcctcgagcaagccagcagcaggcgcctctccccttcaggcatggcagcggcttcttctcctcccctctattctcctgggcgtgtgcagtagctccatggctgccgagctcttatccatggcgcggctcccctgttcccctgcgtctccctcctctccggcttccctcgcgcagcggcagcaagcatggagcttggctcctctcccctgcgccctacctttttccatagaaagcagcaggagctccacctcccatggcgcccttttttttcagccgtgcagctccctactccatgccgatgccccttctcttcccctgctcgttctccctcgcgcaacagcagccgggtcttcttcctcccctgctgtccacggcgcgcagcaaacagggagctcagctccatctcccctcacggcaggacacagcagcagctcgccccgcctctcctcgcagacgcagccctctcccatggcgcgctgcagcagatgccgtggagcattccctccatgcattgcgactcggtttccttcctgcgtgtgtgctgctgcgcctgcgccattgatgcttgctgggtgctcgacaaaatgtgcagcagccccgacggctccgcgcgctgtcggcttgctgttttattgcgcagtgagcagcacgccgtgatgcccgtcggtggtttgctgtttttgcgcagccccgccgccgtcgtcgttcgccccggagaggaaccccgtgtttggcgtggagaagaaggcaagccgctcgtcgatgtttgtagcgatgcacaaatcggaatcaccgtcattcttgcaaacgtcgattgggtttgtttatggaccgagagatgatgatcgagccagtgatgtggtgccaaccacaagacgcagttggtagacgacccgaaggatggacataaccagtggatgctcgccaagcgagtacctcccccccaacaaacactacttaagtgttaaattaaaggcaagccccggttttatacataacctgttatttatgctattttacttcacttaatgattgtaggattgattgtgcacttaagtgtaggaactgtttgaaaccctagttgcatgatctcaggatttcctattgagatgaatactagtatgctaggtcgagtagctgctttattaagtaggatctcggtagaagacgagtgatttttctagcactcgcgcgagatcaggacattgattgtatccactttcatatcgaactaatgttggttgtgggcaacaatccatggggattggttgtccacgggataaaaagttgaataaggattaaggtgtggtaccgtgagtcaagcgtttgaacgtactaaacacataccgagaaatatggtaaatcggtaagcctagtacctgagtgaacctgcccgcagactttac

SEQ ID NO: 9161 - DNA, 1677 bp, Zea Mays
ccaggaatcgaggcccagtccagagcacgtttaaaatgtataaatgaattagtaaatgtatttttaatacaaaaataattcctagaacttagttaattcatagaaaattcattttagctccaaatttagccattccaatttctaaaattttgtaataatattctttatcatttagtatcactgttttgacatgaaagcagtaataaaattaatttgtcatttaattctattttaagcacattaaatcttagaaaattcataacttgaattctataactccaaatttagtgattccagttcctatgatctcattttaatgtgtagatttttactgtatattttattcatctgtttggtgtgatgttgatcttggctatactatgtatgtattgtgttgatgcgagtagacgagcaagccactgtggaaactgaggttcaacaagtagagatagctgaggaggagctcattgaaggcaagttgtgtccttgatcacttacttttcccagccatgttcttattaattttaatgatctgcataggttaattttgatgggagcctttatgttacccagttttgattacctctataccttgttcacccctgaaacattttgggtagtacttgctattgctttatgtggattgggtatggagatacactactcaggattattttgttattatcttgttattattactgttcatgttaagatcattaaattaatgggaacatggagcgaccacccgggaaaacagtgctaccacaagggtttaatgggacgcccttggctgattaactaggaaagctagtggagggctaccttacccgaaaggggcaagggcagtaggggagtggtcagtgtagggaggtccttgtttgattttgctgcgatggcggtcaggcaagaaccctgcactggagcttcctataaactgtagcgggtagtctgaagctagtggaactttgtaaaggcctcgtagtgttaccctgcctcgcttccttggtagaggtgtatgggattcatgaccccttggcagatgggtaacacggcttgtgggtaaagatgcgcaacctctgcagagtgtaaaactagtatactagccgtgctcacggtcatgagcggctcggaccctcacatgattaattatggaacttaaattcaatttgacatttgcatcgcatttgggattattttactattattgttctttattattattaaggtttggtatttacttacacttagtaattgctaataaaatcttgaccaacttataaaagcaatgctcagcctcagcctttacttcattgattagcctcacactacatgaactcccacctttggtgagttcatgtcacattattccccacgacttgttgagctatgaacgtatgtgagctcactcttgctgtctcacaccccccccacaggagaagaacaggtggtcgaagaggagccgcctaacactgaggagttcgatctgatctaggtggcgtttctcagtcgacattggcgccgacgatccttagttcgttttatgtttacacttttattttgtaataagtcttccgctatgtaataaatactctgatgttttatgacatttatctctatacactctgttattatatatgtcgtcttctttggcgcatgtatgagatgcacccggctttg

SEQ ID NO: 9162 - DNA, 1149 bp, Zea Mays
cttggcgttattagtcctgccggccggcctggaggggaggatcgatcagcaaggccaatagccaatagccaggagccagtcgccagccagccagccagccgcataaatccatccatctcctccatcttgctctccctctccctgcaggccggcagccgctggaggcacagacgacaaggcatcggccccggatcgagcccgacccctcttctcgtctcgtctcgtctctgcgctgggaacgccggctgccatggctcagcagaagaacgcgcacgtgcccaagttcggcaactgggacagcgacggcaacgtgccgtacacgctcttcttcgagaacgcgcgcaagggcaagggagccggagccgccggcggcaggatgatcaaccccaacgaccccgccgagaacccggaggccttctccgtggccgcgccgtcgccgccgccgggccgccacgagcgccgccccagcgacgcgccgccgccgccgatgtcgcccaacccctactacgccgccgggtcgccgtaccaccgccacgccgccggcgagccgccaaggagggccgccgggtacagcgtcgaccagtcgccggcgcacccctacagctccgagagcgccgggtacggcctcgtcgccagctccgtcgaccgctcccgcgccaagggcgcctcgcgcggcaacgagacgccgacgaggggctcggcggtgcccaagttcggcgactgggacgccaacccggcgtcggcggacggctacacgcacatcttcaacaaggtgagggaggagaagcagacgacccaggcggggaagccagcggcgtacggcaaggacggcatgcgtaccaacggccccaagcagcacgacgacgacggctacgtctcatcgacgctggttcctctgggtctggggatgtaagtctggagaacgaggggcatgaaacgatctccatgatctttcctgtggtagattttcacttcaatttatgaagtgagacatagagttgctgtcatgttagaagtaagcattccattgttgcgttggttcttccgtattgaattgaatttacagtacatgtatcatgtatgtacgattgtacgcaggattggactctgaactccgaggtgaatatatgtgtgtttgtttggtgtcca

SEQ ID NO: 9163 - DNA, 3711 bp, Zea Mays
ccgaactctgctgccctcgtctcccggctagcggatgaggaagacgcccccgatgggggaggaggcggagggaagcccgcggaaaaaagctccccgcctggacgacgctgctcggactacggctcctgtggcgtcggcaccgagtccgacgcggaagacgccgccggagggggaggagacggagggaaacccgcggaacaaatctccccgcccggacgacgctgctcggactacggttcctgtggcgtcggcaccgagtccgacgcggaagacgccgccgaatggggaggaagcggagggaagcccgcggaagaaatctccccgcctggacgacgctgctcggactacggttcctgtggcgtcggcaccgagtccgacgcggaagacgccgccgaatggggaggagacggggggaagcccgcggaagaaatctccgcggcccgcggaggctctgcctgtggctatggttcctgtggaagcggcagtgggggccagcgatgagaagctgtgcaagtgcaaccacgccatcactgacagtgatatctgggaactggttcattcgctaacgaccaaggatgcgtggatttgctgtgcttgtcggcgcaaagacgagaagagggacctcttgatctgcgtgggatgctacagccatctctgctgtggggttgggtcaattgcttacccgtttgggcactctcgatcacacgccctgaagaagaagcactggtttgctgttctgtacagtgatccagaaagaggatactgcttcaagtgtaacgctgaggtgccaatgctgcgcaaatgtggagaagacggcaacgagggtggtcttgaactgatccgcgatattgtcagtcagttgccggatcaaccatctgttgattttccttcgcccgggaacacgccaccgaaggggaaggagacggagcggctggacgacgcggctcggactacggttcctgtggcgtcggcaccgagaccaacggtgcagacgccgccgaagggggaggaggcgggcttccggaacaaagctccgcggctggacgacgcggctctgattaccgttcctgtggcgtcggcaccgacactgacggggaagacgccgccgaagggggaggaggcacagggaagcccgcggaacaaagcttcgcggctggacgacgcggctctggctacaccgagaccgacggggacggcgccgccgaagggggaggaggcggagggaagcccgcggaacaaatctccgctgctgcaggacaaacggccctcggaggctctgcctgtggctaaggttgagtccaccgatgagaagcggtgcaagtgcaatcacgtcatcgatgttcttgatatccatggattggttggatcgctaacgaccaaggacgcatggatttgctgtgattgtcggagcgaagacgagaagttgatcttcaaagccaggcccgagaagagcgacctcttgatctgcgtgagatgctaccgccatctctgctgcggggttgggtcaattgcttacccatttgggcactctcgagcacacgccctgaagaaggagcactggtttgctgttctgtacagtgatccagaaagacgatactgcttcaagtgtaacgctgaggtgccaatgccggtcaaatctggagaagacggcaacgaggttgatattgaagtgatccgcgatattgtccgtcagttgccgtctcacccgtcatctgttgtcataagtccagtcataagtcaaaccgagccggaggtcatcaatccaggagaggaggaagtagcagaaagcgccccatctgggtttgttgtggctgtggatcctgcagatagatggccttgctatgagtccaaatcatctgatgcgcaaggctatgctatcaaagggataccaaatctcggaaacacatgctacctgagtgcagtattgcagtgcctgtttgtgcttggtaagctgcgagaaaggatgttaacactggatggtccaaaaagtctcattaccgaggtactcgaggagctttttttggaggcaagtgctgcaggaggcgtccttaatccgattaaacttttgaattgtttaaatctgcgtgatccttcgggatttcaaattggaactatggaagacagccacgacttgcttacggccttgcgcgctatttggaatgaaagcgacaagaataataacaagcaaagtgatgcacctacaatgatggattcgatttttaggtttgagatggctcggacactgtcctgcaaaaaatgtggtcattcgtctgctgctgttcgctatcctttcgaggacctgttattgggtttcccatcaaaggggcatccaaccaaaagtgctgcattaccacaaacaagtgagagtcccggatgggccggatctcgaaagagagtgattgctcgtcaattatttccagaagacgtgcagggaagcgtggattcagaggtgtttgatgtggaaaccttggaagttgattttactgaagtgcagcgtatcagtcaaagcaaggatgctgtacagagtcctttgcagattcaggatgggaagcctgttgattcagagacagcagattcaatatttattgaagacttgatattgcagttttgtgatgatcatcagatgcaatggcgctgtccaaattgtgccaaggatcatgaggagccaagtgccagtgaaagtaaaaatggtgagcagatggtgggaagcggcaaagaagacacaacagttgttggggaccagattgaacaatcagacaggaaagcaaggcacagtaaagaatctgaatgtcacggaggtaatctttcagctgcaaaacagactgagctgttgggaaccaaccaaactgcagatgacagcaaacaacttatgatgcatccggagaacgtgaaggaatcagagcagaaagatgatggtggagataatattatgattcatcgttttgccacgcttccacctgtattaactcttcagcttaagagaaccagccaccacatagttgggagcaaaataagtgaccatgtgagatttatggagtaccttgatgtagagcgattcatggaccccagctgtgccgacaaaggtagcaccctctttcgtctagctgctgttgtagtgcacattggcatgggatccttgaagtccggacactacattgcgtacgttagagcaagaaagcttggatgtcagcaagaggaggcctcatggttttgtgcagacgacagtcagatcagacgagtcactattgaacaagttctcaacagtcaggcctatattcttttctatgagaggatggaagaccaggacgtttctggcatgacacgtcagaactgaagaatgcagtgatagaacaagcagatgagtgagataagcagaccttctctctcgaccgcaaggatctagtctagtcagtgttcatagtaagacaggctcttgaccaagctcatttttgtcgctgggcttgaaacttactctgtaactttgtaccaaatcggaggttctttctgatcttgtcaactcagctgatctggtctttccgttgcttcgcatttgaggatgaaactgtgaatagaatagtggtgagatcggtgatacgggctttgtaaagtttctgtcggatgatattgttacatgataatggtttacactgcctcttcatgttttgaggtttccctgaaatcgaaaagagcaggtacgagagaatgttacat

SEQ ID NO: 9164 - DNA, 3600 bp, Zea Mays
ccgaccccgaactctgctgccctcgtctcccggctagcggatgaggaagacgcccccgatgggggaggaggcggagggaagcccgcggaaaaaagctccccgcctggacgacgctgctcggactacggctcctgtggcgtcggcaccgagtccgacgcggaagacgccgccggagggggaggagacggagggaaacccgcggaacaaatctccccgcccggacgacgctgctcggactacggttcctgtggcgtcggcaccgagtccgacgcggaagacgccgccgaatggggaggaagcggagggaagcccgcggaagaaatctccccgcctggacgacgctgctcggactacggttcctgtggcgtcggcaccgagtccgacgcggaagacgccgccgaatggggaggagacggggggaagcccgcggaagaaatctccgcggcccgcggaggctctgcctgtggctatggttcctgtggaagcggcagtgggggccagcgatgagaagctgtgcaagtgcaaccacgccatcactgacagtgatatctgggaactggttcattcgctaacgaccaaggatgcgtggatttgctgtgcttgtcggcgcaaagacgagaagagggacctcttgatctgcgtgggatgctacagccatctctgctgtggggttgggtcaattgcttacccgtttgggcactctcgatcacacgccctgaagaagaagcactggtttgctgttctgtacagtgatccagaaagaggatactgcttcaagtgtaacgctgaggtgccaatgctgcgcaaatgtggagaagacggcaacgagggtggtcttgaactgatccgcgatattgtcagtcagttgccggatcaaccatctgttgattttccttcgcccgggaacacgccaccgaaggggaaggagacggagcggctggacgacgcggctcggactacggttcctgtggcgtcggcaccgagaccaacggtgcagacgccgccgaagggggaggaggcgggcttccggaacaaagctccgcggctggacgacgcggctctgattaccgttcctgtggcgtcggcaccgacactgacggggaagacgccgccgaagggggaggaggcacagggaagcccgcggaacaaagcttcgcggctggacgacgcggctctggctacaccgagaccgacggggacggcgccgccgaagggggaggaggcggagggaagcccgcggaacaaatctccgctgctgcaggacaaacggccctcggaggctctgcctgtggctaaggttgagtccaccgatgagaagcggtgcaagtgcaatcacgtcatcgatgttcttgatatccatggattggttggatcgctaacgaccaaggacgcatggatttgctgtgattgtcggagcgaagacgagaagttgatcttcaaagccaggcccgagaagagcgacctcttgatctgcgtgagatgctaccgccatctctgctgcggggttgggtcaattgcttacccatttgggcactctcgagcacacgccctgaagaaggagcactggtttgctgttctgtacagtgatccagaaagacgatactgcttcaagtgtaacgctgaggtgccaatgccggtcaaatctggagaagacggcaacgaggttgatattgaagtgatccgcgatattgtccgtcagttgccgtctcacccgtcatctgttgtcataagtccagtcataagtcaaaccgagccggaggtcatcaatccaggagaggaggaagtagcagaaagcgccccatctgggtttgttgtggctgtggatcctgcagatagatggccttgctatgagtccaaatcatctgatgcgcaaggctatgctatcaaagggataccaaatctcggaaacacatgctacctgagtgcagtattgcagtgcctgtttgtgcttggtaagctgcgagaaaggatgttaacactggatggtccaaaaagtctcattaccgaggtactcgaggagctttttttggaggcaagtgctgcaggaggcgtccttaatccgattaaacttttgaattgtttaaatctgcgtgatccttcgggatttcaaattggaactatggaagacagccacgacttgcttacggccttgcgcgctatttggaatgaaagcgacaagaataataacaagcaaagtgatgcacctacaatgatggattcgatttttaggtttgagatggctcggacactgtcctgcaaaaaatgtggtcattcgtctgctgctgttcgctatcctttcgaggacctgttattgggtttcccatcaaaggggcatccaaccaaaagtgctgcattaccacaaacaaattttactgaagtgcagcgtatcagtcaaagcaaggatgctgtacagagtcctttgcagattcaggatgggaagcctgttgattcagagacagcagattcaatatttattgaagacttgatattgcagttttgtgatgatcatcagatgcaatggcgctgtccaaattgtgccaaggatcatgaggagccaagtgccagtgaaagtaaaaatggtgagcagatggtgggaagcggcaaagaagacacaacagttgttggggaccagattgaacaatcagacaggaaagcaaggcacagtaaagaatctgaatgtcacggaggtaatctttcagctgcaaaacagactgagctgttgggaaccaaccaaactgcagatgacagcaaacaacttatgatgcatccggagaacgtgaaggaatcagagcagaaagatgatggtggagataatattatgattcatcgttttgccacgcttccacctgtattaactcttcagcttaagagaaccagccaccacatagttgggagcaaaataagtgaccatgtgagatttatggagtaccttgatgtagagcgattcatggaccccagctgtgccgacaaaggtagcaccctctttcgtctagctgctgttgtagtgcacattggcatgggatccttgaagtccggacactacattgcgtacgttagagcaagaaagcttggatgtcagcaagaggaggcctcatggttttgtgcagacgacagtcagatcagacgagtcactattgaacaagttctcaacagtcaggcctatattcttttctatgagaggatggaagaccaggacgtttctggcatgacacgtcagaactgaagaatgcagtgatagaacaagcagatgagtgagataagcagaccttctctctcgaccgcaaggatctagtctagtcagtgttcatagtaagacaggctcttgaccaagctcatttttgtcgctgggcttgaaacttactctgtaactttgtaccaaatcggaggttctttctgatcttgtcaactcagctgatctggtctttccgttgcttcgcatttgaggatgaaactgtgaatagaatagtggtgagatcggtgatacgggctttgtaaagtttctgtcggatgatattgttacatgataatggtttacactgcctcttcatgttttgaggtttccctgaaatcgaaaagagcaggtacgagagaatgttacat

SEQ ID NO: 9165 - DNA, 3708 bp, Zea Mays
cctctccctctcggcctcgccgacgccgaccccgaactctgctgccctcgtctcccggctagcggatgaggaagacgcccccgatgggggaggaggcggagggaagcccgcggaaaaaagctccccgcctggacgacgctgctcggactacggctcctgtggcgtcggcaccgagtccgacgcggaagacgccgccggagggggaggagacggagggaaacccgcggaacaaatctccccgcccggacgacgctgctcggactacggttcctgtggcgtcggcaccgagtccgacgcggaagacgccgccgaatggggaggaagcggagggaagcccgcggaagaaatctccccgcctggacgacgctgctcggactacggttcctgtggcgtcggcaccgagtccgacgcggaagacgccgccgaatggggaggagacggggggaagcccgcggaagaaatctccgcggcccgcggaggctctgcctgtggctatggttcctgtggaagcggcagtgggggccagcgatgagaagctgtgcaagtgcaaccacgccatcactgacagtgatatctgggaactggttcattcgctaacgaccaaggatgcgtggatttgctgtgcttgtcggcgcaaagacgagaagagggacctcttgatctgcgtgggatgctacagccatctctgctgtggggttgggtcaattgcttacccgtttgggcactctcgatcacacgccctgaagaagaagcactggtttgctgttctgtacagtgatccagaaagaggatactgcttcaagtgtaacgctgaggtgccaatgctgcgcaaatgtggagaagacggcaacgagggtggtcttgaactgatccgcgatattgtcagtcagttgccggatcaaccatctgttgattttccttcgcccgggaacacgccaccgaaggggaaggagacggagcggctggacgacgcggctcggactacggttcctgtggcgtcggcaccgagaccaacggtgcagacgccgccgaagggggaggaggcgggcttccggaacaaagctccgcggctggacgacgcggctctgattaccgttcctgtggcgtcggcaccgacactgacggggaagacgccgccgaagggggaggaggcacagggaagcccgcggaacaaagcttcgcggctggacgacgcggctctggctacaccgagaccgacggggacggcgccgccgaagggggaggaggcggagggaagcccgcggaacaaatctccgctgctgcaggacaaacggccctcggaggctctgcctgtggctaaggttgagtccaccgatgagaagcggtgcaagtgcaatcacgtcatcgatgttcttgatatccatggattggttggatcgctaacgaccaaggacgcatggatttgctgtgattgtcggagcgaagacgagaagttgatcttcaaagccaggcccgagaagagcgacctcttgatctgcgtgagatgctaccgccatctctgctgcggggttgggtcaattgcttacccatttgggcactctcgagcacacgccctgaagaaggagcactggtttgctgttctgtacagtgatccagaaagacgatactgcttcaagtgtaacgctgaggtgccaatgccggtcaaatctggagaagacggcaacgaggttgatattgaagtgatccgcgatattgtccgtcagttgccgtctcacccgtcatctgttggtaagctttcccccgacattgctctttgtggtcccatggctttgcttcttgaatccccggtgtcattcttgacctcacagcagggtttcatgttttctgatgtttttcatcaatccagtcataagtccagtcataagtcaaaccgagccggaggtcatcaatccaggagaggaggaagtagcagaaagcgccccatctgggtttgttgtggctgtggatcctgcagatagatggccttgctatgagtccaaatcatctgatgcgcaaggctatgctatcaaagggataccaaatctcggaaacacatgctacctgagtgcagtattgcagtgcctgtttgtgcttggtaagctgcgagaaaggatgttaacactggatggtccaaaaagtctcattaccgaggtactcgaggagctttttttggaggcaagtgctgcaggaggcgtccttaatccgattaaacttttgaattgtttaaatctgcgtgatccttcgggatttcaaattggaactatggaagacagccacgacttgcttacggccttgcgcgctatttggaatgaaagcgacaagaataataacaagcaaagtgatgcacctacaatgatggattcgatttttaggtttgagatggctcggacactgtcctgcaaaaaatgtggtcattcgtctgctgctgttcgctatcctttcgaggacctgttattgggtttcccatcaaaggggcatccaaccaaaagtgctgcattaccacaaacaaattttactgaagtgcagcgtatcagtcaaagcaaggatgctgtacagagtcctttgcagattcaggatgggaagcctgttgattcagagacagcagattcaatatttattgaagacttgatattgcagttttgtgatgatcatcagatgcaatggcgctgtccaaattgtgccaaggatcatgaggagccaagtgccagtgaaagtaaaaatggtgagcagatggtgggaagcggcaaagaagacacaacagttgttggggaccagattgaacaatcagacaggaaagcaaggcacagtaaagaatctgaatgtcacggaggtaatctttcagctgcaaaacagactgagctgttgggaaccaaccaaactgcagatgacagcaaacaacttatgatgcatccggagaacgtgaaggaatcagagcagaaagatgatggtggagataatattatgattcatcgttttgccacgcttccacctgtattaactcttcagcttaagagaaccagccaccacatagttgggagcaaaataagtgaccatgtgagatttatggagtaccttgatgtagagcgattcatggaccccagctgctgttgtagtgcacattggcatgggatccttgaagtccggacactacattgcgtacgttagagcaagaaagcttggatgtcagcaagaggaggcctcatggttttgtgcagacgacagtcagatcagacgagtcactattgaacaagttctcaacagtcaggcctatattcttttctatgagaggatggaagaccaggacgtttctggcatgacacgtcagaactgaagaatgcagtgatagaacaagcagatgagtgagataagcagaccttctctctcgaccgcaaggatctagtctagtcagtgttcatagtaagacaggctcttgaccaagctcatttttgtcgctgggcttgaaacttactctgtaactttgtaccaaatcggaggttctttctgatcttgtcaactcagctgatctggtctttccgttgcttcgcatttgaggatgaaactgtgaatagaatagtggtgagatcggtgatacgggctttgtaaagtttctgtcggatgatattgttacatgataatggtttacactgcctcttcatgttttgaggtttccctgaaatcgaaaagagcaggtacgagagaatgttacat

SEQ ID NO: 9166 - DNA, 4221 bp, Zea Mays
caaacccctccacctctccctctcggcctcgccgacgccgaccccgaactctgctgccctcgtctcccggctagcggatgaggaagacgcccccgatgggggaggaggcggagggaagcccgcggaaaaaagctccccgcctggacgacgctgctcggactacggctcctgtggcgtcggcaccgagtccgacgcggaagacgccgccggagggggaggagacggagggaaacccgcggaacaaatctccccgcccggacgacgctgctcggactacggttcctgtggcgtcggcaccgagtccgacgcggaagacgccgccgaatggggaggaagcggagggaagcccgcggaagaaatctccccgcctggacgacgctgctcggactacggttcctgtggcgtcggcaccgagtccgacgcggaagacgccgccgaatggggaggagacggggggaagcccgcggaagaaatctccgcggcccgcggaggctctgcctgtggctatggttcctgtggaagcggcagtgggggccagcgatgagaagctgtgcaagtgcaaccacgccatcactgacagtgatatctgggaactggttcattcgctaacgaccaaggatgcgtggatttgctgtgcttgtcggcgcaaagacgagaagagggacctcttgatctgcgtgggatgctacagccatctctgctgtggggttgggtcaattgcttacccgtttgggcactctcgatcacacgccctgaagaagaagcactggtttgctgttctgtacagtgatccagaaagaggatactgcttcaagtgtaacgctgaggtgccaatgctgcgcaaatgtggagaagacggcaacgagggtggtcttgaactgatccgcgatattgtcagtcagttgccggatcaaccatctgttgattttccttcgcccgggaacacgccaccgaaggggaaggagacggagcggctggacgacgcggctcggactacggttcctgtggcgtcggcaccgagaccaacggtgcagacgccgccgaagggggaggaggcgggcttccggaacaaagctccgcggctggacgacgcggctctgattaccgttcctgtggcgtcggcaccgacactgacggggaagacgccgccgaagggggaggaggcacagggaagcccgcggaacaaagcttcgcggctggacgacgcggctctggctacaccgagaccgacggggacggcgccgccgaagggggaggaggcggagggaagcccgcggaacaaatctccgctgctgcaggacaaacggccctcggaggctctgcctgtggctaaggttgagtccaccgatgagaagcggtgcaagtgcaatcacgtcatcgatgttcttgatatccatggattggttggatcgctaacgaccaaggacgcatggatttgctgtgattgtcggagcgaagacgagaagttgatcttcaaagccaggcccgagaagagcgacctcttgatctgctgatccagaaagacgatactgcttcaagtgtaacgctgaggtgccaatgccggtcaaatctggagaagacggcaacgaggttgatattgaagtgatccgcgatattgtccgtcagttgccgtctcacccgtcatctgttgtcataagtccagtcataagtcaaaccgagccggaggtcatcaatccaggagaggaggaagtagcagaaagcgccccatctgggtttgttgtggctgtggatcctgcagatagatggccttgctatgagtccaaatcatctgatgcgcaaggctatgctatcaaagggataccaaatctcggaaacacatgctacctgagtgcagtattgcagtgcctgtttgtgcttggtaagctgcgagaaaggatgttaacactggatggtccaaaaagtctcattaccgaggtactcgaggagctttttttggaggcaagtgctgcaggaggcgtccttaatccgattaaacttttgaattgtttaaatctgcgtgatccttcgggatttcaaattggaactatggaagacagccacgacttgcttacggccttgcgcgctatttggaatgaaagcgacaagaataataacaagcaaagtgatgcacctacaatgatggattcgatttttaggtttgagatggctcggacactgtcctgcaaaaaatgtggtcattcgtctgctgctgttcgctatcctttcgaggacctgttattgggtttcccatcaaaggggcatccaaccaaaagtgctgcattaccacaaacaagtgagagtcccggatgggccggatctcgaaagagagtgattgctcgtcaattatttccagaagacgtgcagggaagcgtggattcagaggtgtttgatgtggaaaccttggaagttggtgagtttatgattgatcatgcacttattaaaatgccttgactgcagatgttggaggtactctagagtcctcctaggtcattccacttttcaagatcgaaatgaaaatgctggaactacggaacactctgaaattggaattcttattggttatcttgctgaacataagaaaaacgtttcattttttggaatatgtatcctacacttgttaactggagaaaatggtttgagggccctttgcacatatggacagaagaaaaaaaatcaggaaaacctttgggacgtatatacaaaagtgagcaggaactttgagaagtgctaacacaacagtgttgtttgtagtgtagtagataaaactaccactagaataaataccttgagactttgagtccttgtcgccatataataaattgttgctccacttaatcatgtgcctgggatcctcgaaaagaaagctacttcgaatttggaggataaagatcctaaaaaaatatgtagaggatgaggatgccagttgctggttgcatgatgttgatactgcagacaaaaataaatagtatatatgcttgattctgcagattttactgaagtgcagcgtatcagtcaaagcaaggatgctgtacagagtcctttgcagattcaggatgggaagcctgttgattcagagacagcagattcaatatttattgaagacttgatattgcagttttgtgatgatcatcagatgcaatggcgctgtccaaattgtgccaaggatcatgaggagccaagtgccagtgaaagtaaaaatggtgagcagatggtgggaagcggcaaagaagacacaacagttgttggggaccagattgaacaatcagacaggaaagcaaggcacagtaaagaatctgaatgtcacggaggtaatctttcagctgcaaaacagactgagctgttgggaaccaaccaaactgcagatgacagcaaacaacttatgatgcatccggagaacgtgaaggaatcagagcagaaagatgatggtggagataatattatgattcatcgttttgccacgcttccacctgtattaactcttcagcttaagagaaccagccaccacatagttgggagcaaaataagtgaccatgtgagatttatggagtaccttgatgtagagcgattcatggaccccagctgtgccgacaaaggtagcaccctctttcgtctagctgctgttgtagtgcacattggcatgggatccttgaagtccggacactacattgcgtacgttagagcaagaaagcttggatgtcagcaagaggaggcctcatggttttgtgcagacgacagtcagatcagacgagtcactattgaacaagttctcaacagtcaggcctatattcttttctatgagaggatggaagaccaggacgtttctggcatgacacgtcagaactgaagaatgcagtgatagaacaagcagatgagtgagataagcagaccttctctctcgaccgcaaggatctagtctagtcagtgttcatagtaagacaggctcttgaccaagctcatttttgtcgctgggcttgaaacttactctgtaactttgtaccaaatcggaggttctttctgatcttgtcaactcagctgatctggtctttccgttgcttcgcatttgaggatgaaactgtgaatagaatagtggtgagatcggtgatacgggctttgtaaagtttctgtcggatgatattgttacatgataatggtttacactgcctcttcatgttttgaggtttccctgaaatcgaaaagagcaggtacgagagaatgttacat

SEQ ID NO: 9167 - DNA, 3847 bp, Zea Mays
cttctctctccaaacccctccacctctccctctcggcctcgccgacgccgaccccgaactctgctgccctcgtctcccggctagcggatgaggaagacgcccccgatgggggaggaggcggagggaagcccgcggaaaaaagctccccgcctggacgacgctgctcggactacggctcctgtggcgtcggcaccgagtccgacgcggaagacgccgccggagggggaggagacggagggaaacccgcggaacaaatctccccgcccggacgacgctgctcggactacggttcctgtggcgtcggcaccgagtccgacgcggaagacgccgccgaatggggaggaagcggagggaagcccgcggaagaaatctccccgcctggacgacgctgctcggactacggttcctgtggcgtcggcaccgagtccgacgcggaagacgccgccgaatggggaggagacggggggaagcccgcggaagaaatctccgcggcccgcggaggctctgcctgtggctatggttcctgtggaagcggcagtgggggccagcgatgagaagctgtgcaagtgcaaccacgccatcactgacagtgatatctgggaactggttcattcgctaacgaccaaggatgcgtggatttgctgtgcttgtcggcgcaaagacgagaagagggacctcttgatctgcgtgggatgctacagccatctctgctgtggggttgggtcaattgcttacccgtttgggcactctcgatcacacgccctgaagaagaagcactggtttgctgttctgtacagtgatccagaaagaggatactgcttcaagtgtaacgctgaggtgccaatgctgcgcaaatgtggagaagacggcaacgagggtggtcttgaactgatccgcgatattgtcagtcagttgccggatcaaccatctgttgattttccttcgcccgggaacacgccaccgaaggggaaggagacggagcggctggacgacgcggctcggactacggttcctgtggcgtcggcaccgagaccaacggtgcagacgccgccgaagggggaggaggcgggcttccggaacaaagctccgcggctggacgacgcggctctgattaccgttcctgtggcgtcggcaccgacactgacggggaagacgccgccgaagggggaggaggcacagggaagcccgcggaacaaagcttcgcggctggacgacgcggctctggctacaccgagaccgacggggacggcgccgccgaagggggaggaggcggagggaagcccgcggaacaaatctccgctgctgcaggacaaacggccctcggaggctctgcctgtggctaaggttgagtccaccgatgagaagcggtgcaagtgcaatcacgtcatcgatgttcttgatatccatggattggttggatcgctaacgaccaaggacgcatggatttgctgtgattgtcggagcgaagacgagaagttgatcttcaaagccaggcccgagaagagcgacctcttgatctgcgtgagatgctaccgccatctctgctgcggggttgggtcaattgcttacccatttgggcactctcgagcacacgccctgaagaaggagcactggtttgctgttctgtacagtgatccagaaagacgatactgcttcaagtgtaacgctgaggtgccaatgccggtcaaatctggagaagacggcaacgaggttgatattgaagtgatccgcgatattgtccgtcagttgccgtctcacccgtcatctgttggtaagctttcccccgacattgctctttgtggtcccatggctttgcttcttgaatccccggtgtcattcttgacctcacagcagggtttcatgttttctgatgtttttcatcaatccagtcataagtccagtcataagtcaaaccgagccggaggtcatcaatccaggagaggaggaagtagcagaaagcgccccatctgggtttgttgtggctgtggatcctgcagatagatggccttgctatgagtccaaatcatctgatgcgcaaggctatgctatcaaagggataccaaatctcggaaacacatgctacctgagtgcagtattgcagtgcctgtttgtgcttggtaagctgcgagaaaggatgttaacactggatggtccaaaaagtctcattaccgaggtactcgaggagctttttttggaggcaagtgctgcaggaggcgtccttaatccgattaaacttttgaattgtttaaatctgcgtgatccttcgggatttcaaattggaactatggaagacagccacgacttgcttacggccttgcgcgctatttggaatgaaagcgacaagaataataacaagcaaagtgatgcacctacaatgatggattcgatttttaggtttgagatggctcggacactgtcctgcaaaaaatgtggtcattcgtctgctgctgttcgctatcctttcgaggacctgttattgggtttcccatcaaaggggcatccaaccaaaagtgctgcattaccacaaacaagtgagagtcccggatgggccggatctcgaaagagagtgattgctcgtcaattatttccagaagacgtgcagggaagcgtggattcagaggtgtttgatgtggaaaccttggaagttgattttactgaagtgcagcgtatcagtcaaagcaaggatgctgtacagagtcctttgcagattcaggatgggaagcctgttgattcagagacagcagattcaatatttattgaagacttgatattgcagttttgtgatgatcatcagatgcaatggcgctgtccaaattgtgccaaggatcatgaggagccaagtgccagtgaaagtaaaaatggtgagcagatggtgggaagcggcaaagaagacacaacagttgttggggaccagattgaacaatcagacaggaaagcaaggcacagtaaagaatctgaatgtcacggaggtaatctttcagctgcaaaacagactgagctgttgggaaccaaccaaactgcagatgacagcaaacaacttatgatgcatccggagaacgtgaaggaatcagagcagaaagatgatggtggagataatattatgattcatcgttttgccacgcttccacctgtattaactcttcagcttaagagaaccagccaccacatagttgggagcaaaataagtgaccatgtgagatttatggagtaccttgatgtagagcgattcatggaccccagctgctgttgtagtgcacattggcatgggatccttgaagtccggacactacattgcgtacgttagagcaagaaagcttggatgtcagcaagaggaggcctcatggttttgtgcagacgacagtcagatcagacgagtcactattgaacaagttctcaacagtcaggcctatattcttttctatgagaggatggaagaccaggacgtttctggcatgacacgtcagaactgaagaatgcagtgatagaacaagcagatgagtgagataagcagaccttctctctcgaccgcaaggatctagtctagtcagtgttcatagtaagacaggctcttgaccaagctcatttttgtcgctgggcttgaaacttactctgtaactttgtaccaaatcggaggttctttctgatcttgtcaactcagctgatctggtctttccgttgcttcgcatttgaggatgaaactgtgaatagaatagtggtgagatcggtgatacgggctttgtaaagtttctgtcggatgatattgttacatgataatggtttacactgcctcttcatgttttgaggtttccctgaaatcgaaaagagcaggtacgagagaatgttacat

SEQ ID NO: 9168 - DNA, 2593 bp, Zea Mays
ctcttttccgttcctttttaactcctcggccatcccgagcgcacgcgggtcgcccggctggctgcccccgctgctctcctctcctccgagatcccggcaccgtcctgtcccgccgcgccgacagctccccgcccagactgctgcacgcgcggatctagcgtcgccttccgctccgctgcgatgcatatacgcgccgtcgccgccgccgccgcacttgtcctcctcctcgccctctccgtccccgcccccgtctccgccgccgaccaggatgctaatggcgctgccgggaatggcactggcgtcggcgccgaccgcctggaccgccgcaccaagatgttcctccaccacacggtgcgcggggccgcggccggggcgcacgacacggggctggggctcctcgacgccttcttcgccagcctgtccatgatcgtcgtcagcgagattggcgatgagacgttcatcatcgcggcgctgatggcgatgcggcaccccaagtcgacggtgctctcgggcgcactgtcggcgcttgtagttatgacggtgctgtctactggactaggcaggattgttccgaatttgatatcgaggaagcacactaacagcgcggcgacaggtatggcttatctgaatgtcaccttattgtgtactattgataaaggtgatccaatgtttagagatcctagtggttggggatcaaatcagggtaacagatggatggccccaattgaagcactgataaacatattaaccactaacaccgatgactacttgaccttcaagtagctgaagtggtacactagatgtgacatatctgcatctaatcagatcagagtttaggtgctacactttttattctagtcccataatataagggcgactccaatggctagctatttcactggctagattcactctctttcttatgtggatagaaaaatgcagggaaaacaagaatagctagcgacgagcaaatagataggagatttcacgtattctaagaaactgagtgtattacgtgtggggccatgtactagtggtaagataaattactatttttattcttatctcagctccacatcagctagctatttgagacagctattgcagacgccctaaggcgtgctctctatatatatgcatacatcgatgtagtagtatagagagaattaaatacatttgttagtctttgaattagaggtgattatgccttatatagtgggacggagggagtagatatgtatgcttcaaagtcaatgcttgtatataattgtagtgggtgcaatcatttgctagattgttccattacccaaggacagtaataaaaagggcagatctattgtcggaggctcccacatgaatggaatatgaggaaagggtaaaccgatgcaagccttcctgtcacaaatgcggagaggctgcttcgtccaatgacagtaatcataagaaaaatccaaattttagtaacttgggccaagaaaggacatttgctgcttgtttgtgcaactaatggccttccaaggtcttatcgatgtatatgtaccatttggacatgaatattctgaaacttgtgattcttaagatattgtaacaatcttgatgtcatatcagttctatagcatttacgagtagcagcgcaatctgatatcttctcttttgttgttttgtgcttcagtcctctatgcattttttgggctacggctcctgtacatcgcttggaggtcagattccaaggcatcacagaagaaggaaatagaagaggtatgtggatttttcttacatcaaattgttcacatttttccatgctaagcatcagaccggttacaatgttcgtaggatatgcctgtgcttgaaatatgatatttagctgcttgtgtccagagttattacagcacctcattgttcagacttcaggctgcccattggttgtcagtagactgttatttgtcatgttcctttttcagactacgcatcttttgttccttgacatatacaggtagaggaaaagctggaagcaggccaagggaagtcaacatttcgacgtgttttctcgagattctgcactcctattttcctggagtcatttgtgttgaccttcttggcggagtggggcgaccgaagtcagatagctacaatagcgctggcgacccacaagaacgcggtcggagtcgctacgggagcgaccttggggcacaccatctgcacgtcgatcgcggtggtgggcggcagcatgctggcctccaagatatctcagggcacggtcgccaccgtcggaggcctcctcttccttgggttctctctttcgtcgtatttctacccgccattgtagtaccaccctgtcatgcgagccccctatttgtttcttggccagcttcctcattgatccagtgacccttgtcctgcggcattttttttcctgtactagtaaagcatacatggatatgtgtagtaggtagggatatatacgatcattgccaatgtataccatacaagtcatgtcatggattcaaaaacagacggaagagctttttgtcacgaattcaaaaacagacggaagagcctttgtcacgaattcaaaaatgtaacctgtatatac

SEQ ID NO: 9169 - DNA, 1044 bp, Zea Mays
ccgaaacgacacctcacctcaccaccgccaccttccagcagccccccaccggtccaccgcgcgtccccatcggcggcggtagggcagaacagaacaccggagatggagcgggagcgcggcgcgtcggcggcgctgtgggggcacgcgcacctcccactgctggcgcgcgccgggtccaaggagtcggtcgagtacatcctgcaggcgctctggcgcacgcgccgcacgggcctcgacgccgccgaccgcaccgtcgcccgcgacgccctccagctctcctccgacgccgagctcgaccctctgctggtgtgcctgaggatactgatcagacggtgcgtcaacgaggacttcgccaaggacgacatccccaagctcttccccgaggaggtgccccccgagctgcagaagctgctcaccttgctgctgcagaagttccagccggagtggcaggcggatgccgccaaggatcaggaagccgcgctgcattccagcgcggcagagtgccaatcgaaccaaaatggagacacgtcagagcaccgagatgctgctaatgcagagaacggtgcagcacctgttaagggttctctagaatcaggacagaaagaagtgaagaagtctccgttagctaaggattctttggacaaaatgctgaaggacttgttctcaaccagggaccaaatggcaactgatggcaggaacaccggtcacgaactcacgatggggtagctggcagcacttagggcctgtatggctaatccattgctcatcagtaatttggcatatcaatgcttcgttgttttccttcgatctagatcactgacacccacgtcgcacggcagctgcattccgttgttgttagcgagaatgttaatgctaactacttcctccgttcttttttatttatcgtggtttagtttatttttatttgttgcggtttagttcattcaaaaatgaactagagagctacaaatatttgaaccgaggtagtatatcattgcctactgaaattgccattcccacggctgaaggggatatatatgttca

SEQ ID NO: 9170 - DNA, 2241 bp, Zea Mays
ccctaaataaggatgtttcacgaagcagagacatgcgatttttttctgcctttacattgctttagccatggtagtgagatgcctactgcagaatacacaagtcaactgccaggtcatgttgacgagggtgatcatggggtaaatgccacacaatggctgcataatgaacctgtacttgtcactataagtggtgatggcagtgttggaatgtgggatgctacactaggtcaaccttatgtcagacatatcatcgctcatactcgatgtgctaatgcggttactgtagcccctaacgacaaatacctctgcacaagaggaagtgatcagaaagttgttttatatcatgatagaagtgggcgtacacatcttaattggtgtctttcacaccctctgcaaggaaatggttgatatgctgccagaaatcgtagaattgttctgctaacatgctggggagttctctgagtcaggcagctgaacttttgcagaaacttggctgctccagatggatgtggagccaggactcgtattgaagcctctgcttgatggacggctgaagcttgtgttgggccttaacattattgaattctcatgcctctttacaagtagagtctgtatctttttattctcctgtaaagaaatgtttatgaaagcaatgtcatcctgactggtagtaggtctctattcttggatactgtttggatatggggggttggaatccaaatccttaggatttatttcaactttgaactaaattcctagagcaagccccttatttgagcaccctttatgagctagattatgtgattccatgtaccaacaaccaattgacgaataactactcacccgttgcctgtatttctcttcttctttttctttgagcgtgaacatgtagtctttcagcattgctagaagcgggagctgcagaagcttatgttagtagttttgttcaagaaattaagactttctgtcatttggaatcagtacttgataatcaatctagctgactttcatgtctactttgattttgtaatgaaatgctctaaattatggttccagtacaagaaatttgctgtgcaggttgcctcttgcttgtttttctatgtacaggaatttgccagtttgaacatgataccgttttgccagtttgccagtttttctatgtactggcaaattcttgtttttctagttttgccggtttgaacatgataccgtttcttccatgccttgccatgtgcaaaatagacttaacttcttagcaccagcctacaagtatgttctcttcactgtcacttttgctttcacgatcaggatcaactattctaatacctctgttgtaaactagctttgtcctaagtgaaatatcttaaatttgatcaagtctatagaaaaatgcacccaacatctacagcgtcaaattaatttcattaaattctccatgaaatttgccttaatagtgcatttatttaagagtaagagtaaaatttgaacctgtagatgttaatctgcttgtctaaaaagtgttcaagttagagaaatttgatttaggacaaagctataggaaactataatttggaacggagggagagcattcattattatacttaataccctcagatgatggccttggaagaatgctgttgtgtcaacgatgctgtagcataattacaaactataagaaatgatcatatggcttcccttcaggttcttagtggcctaccgcctacctttttttctactttctactctctttagtttttgtttttacttgattacctctattcaattttgcatacgtaatctattgtgttattcagtttgctgttgcaaataagcatattcacaaggttgctttacaggagaaggttgaattgatgaaaccaacgttacaatgctgccaccttatccggtgactgccctgccaaaaatacctagcctctatccataacttacaaaggtgtgaatttgaaatgcttctatgtgtcactacaataccaaaattgttacatttgttcagtattttggtcactgaagtatgaaagtttaattctttgtagagcaatataaaatcatggtagtagttcaagaagaagctactagttgcattttaaaaaaaaggaaaacatgggacgatctagtttagtctaggataaatatttacgacaagttaaaatccaaattttgaaaggatgatttcggatcaggtgattatgttttcagttcattgggtcgcacctcatcata

SEQ ID NO: 9171 - DNA, 95 bp, Zea Mays
cttgtcagtgggatctggttgtgaggttacatctgtttcatttagcaactgtggcacttatttttctgcttctagcacatcaaataatactttag

SEQ ID NO: 9172 - DNA, 751 bp, Zea Mays
atggaccaatggggtagcgaaacgcgtcctgacaatttgttccgatcctcttatggttacgacccgcctgccgtccgctgccacacagcagcggagttagtgactacgcaatcggtcgagctcgtcgtgaggctcttccgctcttggtcggtggtgctgtttcgcgtcctgggaaaaatggatgcggaggcggcgagaaggaagcaggtggcgcctccgcaggagaagaggaagcgcggccggctggagctgcggcggatccaggaccggacgagccggcaggtgcgcttctccaagcgccggagcgggctgttcaagaaggcccacgagctctccgtgctgtgcgacgccgaggtcgcgatggtcgtcttctcccccgccggccgcctctatcactacgcctccctaggcaccagcattgagaaaacattttgtcgttactgggaccttgccaacacagacattgatctcaatatcgaggcgcgagactcgagggacaactataatacacaggaagaagaaaccatggaccatctctttgtcccttgtgtgtttacaagagagttttggtttcatcttctaagaccttttggcttggaatgaccagctccacagccagggatgccttcattcatgaattggtgggagcagatctcaggagtcacagttggtttacttggaaaaggcctcaactctttaatttccttgggagcttggacaatttggaaggttcaaaacaaatgtgtattcg

SEQ ID NO: 9173 - DNA, 539 bp, Zea Mays
atggaccaatggggtagcgaaacgcgtcctgacaatttgttccgatcctcttatggttacgacccgcctgccgtccgctgccacacagcagcggagttagtgactacgcaatcggtcgagctcgtcgtgaggctcttccgctcttggtcggtggtgctgtttcgcgtcctgggaaaaatggatgcggaggcggcgagaaggaagcaggtggcgcctccgcaggagaagaggaagcgcggccggctggagctgcggcggatccaggaccggacgagccggcaggtgcgcttctccaagcgccggagcgggctgttcaagaaggcccacgagctctccgtgctgtgcgacgccgaggtcgcgatggtcgtcttctcccccgccggccgcctctatcactacgcctccctaggcaccagcattgagaaaacattttgtcgttactgggaccttgccaacacagacattgatctcaatatcgaggcgcgagactcgagggacaactataatacacagtgaagggaaccatccaatctgtatcc

SEQ ID NO: 9174 - DNA, 558 bp, Zea Mays
atggaccaatggggtagcgaaacgcgtcctgacaatttgttccgatcctcttatggttacgacccgcctgccgtccgctgccacacagcagcggagttagtgactacgcaatcggtcgagctcgtcgtgaggctcttccgctcttggtcggtggtgctgtttcgcgtcctgggaaaaatggatgcggaggcggcgagaaggaagcaggtggcgcctccgcaggagaagaggaagcgcggccggctggagctgcggcggatccaggaccggacgagccggcaggtgcgcttctccaagcgccggagcgggctgttcaagaaggcccacgagctctccgtgctgtgcgacgccgaggtcgcgatggtcgtcttctcccccgccggccgcctctatcactacgcctccctaggcaccagcttttgactcgatcgatatggataaactggattttcgtcgagagccgtgcgggagcagtagtttactacttgctgtggctgccactgcaagaacacaccgcagccgcagcagctgcaccgaggcgagcagttttagaccgtc

SEQ ID NO: 9175 - DNA, 437 bp, Zea Mays
atggaccaatggggtagcgaaacgcgtcctgacaatttgttccgatcctcttatggttacgacccgcctgccgtccgctgccacacagcagcggagttagtgactacgcaatcggtcgagctcgtcgtgaggctcttccgctcttggtcggtggtgctgtttcgcgtcctgggaaaaatggatgcggaggcggcgagaaggaagcaggtggcgcctccgcaggagaagaggaagcgcggccggctggagctgcggcggatccaggaccggacgagccggcaggtgcgcttctccaagcgccggagcgggctgttcaagaaggcccacgagctctccgtgctgtgcgacgccgaggtcgcgatggtcgtcttctcccccgccggccgcctctatcactacgcctccctaggcaccagatttattgcgttgacgaccgc

SEQ ID NO: 9176 - DNA, 1086 bp, Zea Mays
atggcagagcggcgacggaaggtcgacggcggcaagatgggcgtggcggtcttcggggcgcggtgcaccctgcggtatgagatggacctgcagttcttcaacatccctggcaacagcaagatgctgtccctactcaaagcaaggtggcagaaggaccagtgttgatattggtaaatcatgcgcaaatgggtgtgctggaatgatggagaacaatagggaacataaaattgctcttgttgctactggattagctactggaatcgcttcagcctgctggattggaccccgttgtgttcttccgatgatcaatcagtcaatcacaaattcaaaccatacaaatcaactcaatatccagcatgcttctggaagtgtgttcaaggggtggagtgaggagaagatatattttgctcccacttacaactactcttgcaactcagattcttatgctggagagactgccacatcaaagaaaaagaggagaaccccagcctggtgtgatagaatactatggcatggagatggtattgcacagttgtcctacttccggggggaatctcaattctctgaccatcgtcctgtttgtgggacatttactgttgaggttaaaaggctagatggctaatcaaagcggcgcccatcaaacaccaacattagaatcggtgctgaagagttgttgccgccaagagacaagcataactaaggtgatctagatggatgaaattgtcgacaaggccattagcatcatgcaggttacctcaaagcatctcatgtatatccgcaaggagaagctgcactcagggaaggcattgagtgcaatagaggtgaaggaactatgcgaagcccttgaagcgattgctgaagatttggaccaagattcactcttgtgccagagtttggtgtagtcctcgattataaactgtgtactatgttaatgtaatgacatagtttgtatgatacagatcgtagtgatgttgtttgaagctatttgtatgaacttttcctactatcttgtatgaattatgatgtctgatgtagtttgtatgaactatgtcatattatgttgaaggaagctattgcatgccctta

SEQ ID NO: 9177 - DNA, 1029 bp, Zea Mays
caacagctgatgtatttatcaactttgcatccttccaaagaagggcctgcctcgatggcgccatggcagagcggcgacggaaggtcgacggcggcaagatgggcgtggcggtcttcggggcgcggtgcaccctgcggtatgagatggacctgcagttcttcaacatccctggcaacagcaagatgctgtccctacgtggcagaaggaccagtgttgatattggtaaatcatgcgcaaatgggtgtgctggaatgatggagaacaatagggaacataaaattgctcttgttgctactggattagctactggaatcgcttcagcctgctggattggaccccgttgtgttcttccgatgatcaatcagtcaatcacaaattcaaaccatacaaatcaactcaatatccagcatgcttctggaagtgtgttcaaggggtggagtgaggagaagatatattttgctcccacttacaactactcttgcaactcagattcttatgctggagagactgccacatcaaagaaaaagaggagaaccccagcctggtgtgatagaatactatggcatggagatggtattgcacagttgtcctacttccggggggaatctcaattctctgaccatcgtcctgtttgtgggacatttactgttgagatggatgaaattgtcgacaaggccattagcatcatgcaggttacctcaaagcatctcatgtatatccgcaaggagaagctgcactcagggaaggcattgagtgcaatagaggtgaaggaactatgcgaagcccttgaagcgattgctgaagatttggaccaagattcactcttgtgccagagtttggtgtagtcctcgattataaactgtgtactatgttaatgtaatgacatagtttgtatgatacagatcgtagtgatgttgtttgaagctatttgtatgaacttttcctactatcttgtatgaattatgatgtctgatgtagtttgtatgaactatgtcatattatgttgaaggaagctattgcatgccctta

SEQ ID NO: 9178 - DNA, 1116 bp, Zea Mays
gcacacccaacagctgatgtatttatcaactttgcatccttccaaagagcggcgacggaaggtcgacggcggcaagatgggcgtggcggtcttcggggcgcggtgcaccctgcggtatgagatggacctgcagttcttcaacatccctggcaacagcaagatgctgtccctacgtggcagaaggaccagtgttgatattggtaaatcatgcgcaaatgggtgtgctggaatgatggagaacaatagggaacataaaattgctcttgttgctactggattagctactggaatcgcttcagcctgctggattggaccccgttgtgttcttccgatgatcaatcagtcaatcacaaattcaaaccatacaaatcaactcaatatccagcatgcttctggaagtgtgttcaaggggtggagtgaggagaagatatattttgctcccacttacaactactcttgcaactcagattcttatgctggagagactgccacatcaaagaaaaagaggagaaccccagcctggtgtgatagaatactatggcatggagatggtattgcacagttgtcctacttccggggggaatctcaattctctgaccatcgtcctgtttgtgggacatttactgttgaggttaaaaggctagatggctaatcaaagcggcgcccatcaaacaccaacattagaatcggtgctgaagagttgttgccgccaagagacaagcataactaaggtgatctagatggatgaaattgtcgacaaggccattagcatcatgcaggttacctcaaagcatctcatgtatatccgcaaggagaagctgcactcagggaaggcattgagtgcaatagaggtgaaggaactatgcgaagcccttgaagcgattgctgaagatttggaccaagattcactcttgtgccagagtttggtgtagtcctcgattataaactgtgtactatgttaatgtaatgacatagtttgtatgatacagatcgtagtgatgttgtttgaagctatttgtatgaacttttcctactatcttgtatgaattatgatgtctgatgtagtttgtatgaactatgtcatattatgttgaaggaagctattgcatgccctta

SEQ ID NO: 9179 - DNA, 1017 bp, Zea Mays
gcacacccaacagctgatgtatttatcaactttgcatccttccaaagagcggcgacggaaggtcgacggcggcaagatgggcgtggcggtcttcggggcgcggtgcaccctgcggtatgagatggacctgcagttcttcaacatccctggcaacagcaagatgctgtccctactcaaagcaaggtggcagaaggaccagtgttgatattggtaaatcatgcgcaaatgggtgtgctggaatgatggagaacaatagggaacataaaattgctcttgttgctactggattagctactggaatcgcttcagcctgctggattggaccccgttgtgttcttccgatgatcaatcagtcaatcacaaattcaaaccatacaaatcaactcaatatccagcatgcttctggaagtgtgttcaaggggtggagtgaggagaagatatattttgctcccacttacaactactcttgcaactcagattcttatgctggagagactgccacatcaaagaaaaagaggagaaccccagcctggtgtgatagaatactatggcatggagatggtattgcacagttgtcctacttccggggggaatctcaattctctgaccatcgtcctgtttgtgggacatttactgttgagatggatgaaattgtcgacaaggccattagcatcatgcaggttacctcaaagcatctcatgtatatccgcaaggagaagctgcactcagggaaggcattgagtgcaatagaggtgaaggaactatgcgaagcccttgaagcgattgctgaagatttggaccaagattcactcttgtgccagagtttggtgtagtcctcgattataaactgtgtactatgttaatgtaatgacatagtttgtatgatacagatcgtagtgatgttgtttgaagctatttgtatgaacttttcctactatcttgtatgaattatgatgtctgatgtagtttgtatgaactatgtcatattatgttgaaggaagctattgcatgccctta

SEQ ID NO: 9180 - DNA, 793 bp, Zea Mays
gtctcgcttcccctaatcacggcgtcggcggcgtcctcgaacgtcgcggggaggcggtgctcgggcgccagaaggtagtccacggacgccatactcaagcgactggagggacagtgcatcgcgtttaaacccttctctccttctcatccccacctccctcgcggatcactcaccgtcgtcgtcggtatctcattcgcccccctctcctcccttcctcgagtgagactcttctcgtgcccggaatccttactcgatatgtcattctacaggctgcagccgccgccgtgatgttgtccctccaacttccttaaaccctagcgccagcagcaggcaaccagcaccgacgaggaggaggagcgcggagtagaggggctccggcgaccgcatcggagatggcggcgagccatggcgcggatacgctcaagtccacctccatcaacgggcaaccgtctgtctcctcccacccatcaaatccaagcatcaggaggcactcacctttgacagcggccatccctcaaccctctgtagcatgtggcgccctcgctgcgaatctgtctttatgacagttgccatcctcgcatcccaaaccgtcgatgcccacccctaacatggttcctgacctccctgacaggtgactcctctgaaggatataacaagtgtgtaatgtatgaggagatggcggtgagctaggtactggagcagcggggactaaagctctagcggcatgaagatctcctctgactttgtttaactttcagaaataaaaaatggtgggatccttgtgaagtgtgat

SEQ ID NO: 9181 - DNA, 638 bp, Zea Mays
aagatagtttatcaaatcctgagatacctgaagggaacccctggcaagggattgtgttttagaccaaatcaacatatgaatttggatgggtattgtgatgcggactgggcgagcagtaaggatgatcggagatccacttctggatattgtgtatttgtgggaggtaatctggtttcatggagaagcaagaagcaagctgtggtatctcgatccactgcagaggctgaacatagagcaatggctctagcagtttgtgaaatgatatggttgaagagtctcttgaaggagcttcaagtgttgaagaatgagacaatgttgctccattgtgacaatgtggcagcaatcaacatagcaaataatccagttcagtttgatcgcatgaagcatgtggagattgataagttcttcatcaaagagaagattgatagtggtgctttgaagttgaagtatgtaaaatctcgtaatcaagtagcggatagtctcacaaaaggtttaggtcctaaggataatgagttggcatgtaacaagatgggaatgttaaatatatttggcccatcttgagggggagtgttggtgtattatgaacaagttgaagggtctatttgtaaagtggtaaagtataatagaaaagagtgagg

SEQ ID NO: 9182 - DNA, 1770 bp, Zea Mays
acccccgtccccccggcatccccgctgcccgcgaccataggccgctccgctccaccccgccgcgactttcgtcccagctccgccgcatctctcctcctccacctctaccccgccgctcgggccagctagcaggcatccactgcgccgcaaccgcgcgcagccagcagccagccagccatggagaagcgacggcgaggcagcggcggcgtgccgtccttggcggtggcggtgctggcggcgctcctggcggcggcctcgatgccgtcgccgccccgcgtggcggccgcgctgtcgccggactactacaaggacagctgcccgggcctggagtcgatcgtgcggtacgaggtggcgaggaagaagaacgagacggtggtcaccatcccggcgacgctccgcctcgtcttccacgactgcatgggctgcgacgccgccgtcctgatcgcgtccaagaacaacgacgccgagaaggacgcgccggacaacgagtcgctcgccggcgacggcttcgacaccatcaaccgggtcaaggcggccgtcgagaagaggtgccccggcgtggtgtcctgcgccgacatcatcgcgctcgccgccagagacgtcgtctacctggcggatggcccctactggcgcgtcgagctcggccgtctggacgggctcgattccagggccagcgacgtcaaggggaagctgccggacccggacatgcacgtcaaggacctcacgccggtgttccagcggaacggcttcacggaggtggacatggtcgcgctctccggcgcgcacaccgtcggcttcgcgcactgcagccgcttcaccgacaggctctacagctacggcggcgcgcggacggacccgtcgttcaaccccgcctacgcgtaccagctcaagcaggcgtgccccatagacgtcggccccaccatcgccgtcaacatggaccccgtcagccccatcaggttcgacaacgcctactacgccaacctccaggacgggctggggctcttcacctccgaccaggtgctctacgccgacgaggcgaccaggcccatcgtcgacatgttcgccgccagccagaaggacttcttcgatgctttcgtcgccgccatgctcaagctggggaggctaggggtgaagacggggaaggacggagagatcagaagagtctgcactgccttcaaccattagtagaggcctctcctgcgtgcagcagcgtttgtaatccagattatctcaagctcatgctgtttggagttcgatcgagatgcgtatactgagattgatgattgatcatttttctttttcttctttttttgttgcatacacttgccaaagcttgaaggtgttctttctcctctgtttgtttcttccttttttttcttttcttctttaataacctttttaccttacttttttttgggtgcaatttttgtacagactgaagagtgtaataccatgaacaacttgaagatttttaattgaaaaaggttaatctgactatatgcacggccaatataataaagaaaaggttactttggctcgggctcggttttgtctaagtgcaatgctgccacatgatcttatttttaattttcttctgaaataatgatcatctgcagaataattgaggtcgataaaactgcaattccaaaagagaagtggatgttgttgattaattggttggccagtttgaagaactttggcacatgaaagagaagagaacaagatatcagagcatgtttattgagtaaaccatatgccgcgtgattggac

SEQ ID NO: 9183 - DNA, 1125 bp, Zea Mays
ctggacgccttctacatttgggcctgtataatgcggtggtaggcccaacgtttaggccgcaggcctggttgccaaagccagagacggagacggagaggggcctagagcccatctcgcgtcgaacaatgggaaagaactccttccttcacagttcacgcggacggatatctcgtctcggtcagttcgcttcgtgagttatctttatctcctctcgatcgatcgcttcctccatcgaggcggtaaagcgccgcccagatcgccggaagcaagcggcgacctcaccagctccgagcagcagcaggttaaggatcctaatggcgctcaagtccgtgattcccgagataagactagtgacaagtttgagttcatagttcagaagagaggcgtccatcgcttctgcttcacgaacaaatccccatatcacgaaacgatagacttcgatgttcatgttggccatttttcatatttcgagcagcatgccaaagatgagcattttgcaccactttttgagcaaataggcaagttggatgaggcactttacaatattcagttcgaacagcactggctagaggcccagactgaccgtcaagcaatattgaacgagaacatgagcaggagggcagtccataaggcgctcttcgagtcagcggcgctgatcgccgccagcgtcatccaagtctacctcctgcgccggctcttcgagcgcaagctggggacgtctcgggtttaaggcaacagtagccaacttgcccttcgcagccaccatgatcacaccgacataaccgttacgaattcgaatggttgctagatcagctaaataccacatgtttgtggacttcagttacatgtaatattttttttgtgattccacagatgagaactcttcaaagtttaaaccgtcgatttagccttcattctgcctcagcattttatcgccttgtttctgtagtagcaaccagtaacaacaaggttgcctgtagtctgtacaagatagtagaggtttttttttctgtgctggttgtacgacacaactgtgaatgacttgccgtagacggatactatactgtacgctcgatgcgcccattgttttcagagaataaatggctgtgcagaattgaaggcggc

SEQ ID NO: 9184 - DNA, 2017 bp, Zea Mays
gtcacgttacgtgggcgacggtgattgtttggcggagcgagtgttccagacgtgcctgtcaaaaccctaatccgcaggacggacgggcaagagcccacgaagcctccatcacgccggatccgacgtcccagacgtgaccacgtggcgcggaaagacgctcctataaaaccgccgctcagtttcaaagctctcgtcgccgccaccactctcccagcctctcttactctccgccgtcgccctgctcgcccgaagcagccgccggcaaaatggccccgaagagaggcggtagggcgccggtccccgccaagaagaaggcggtggtgacgaacccgctcttcgagaagaggccgaagcagtttgggatcggcggcgcccttccgcccaagaaggacctccaccgcttcgtcaagtggcccaaggtcgtgcgcatccagcgccagcgccgcatcctcaagcagcgcctcaaggtgcccccggcgctcaaccagttcacacgtaccctcgacaagaaccttgcaacaaacttgttcaagatgcttcttaagtaccgccccgaggacaaagctgccaagaaggagaggctcttgaagagggcccaggctgaaaacgaggggaaaactgttgagtcaaagaaaccaattgttgtgaagtacggccttaaccatgtgacttacctcatcgagcagagcaaggcccagctggttgtcatagctcatgatgttgatccgatcgagctggtcgtgtggctcccggccctttgcaggaaaatggaggttccatactgcattgtcaagggaaaagcacgccttggatcgatcgttcacaagaagactgcatctgttctttgcttgaccaccgtcaagaacgaggacaagcttgagttcagcaaaatcctggaggctatcaaggctaacttcaacgacaagtttgatgaggtcaggaagaagtggggtggtggtatcatgggctccaaatcacaggcgaaaaccaaggccagggaaaagctgcttgccaaggaagctgcccagcggatgacctaagtcttgtcctgttaaattaaaattttcgtgtacttgcgatcgtgtgcaatcacggtggttgtcagatctagtttttgagagttttgcttcagggagagacaccgagtcaccgaccatgacagaaagacatcatgtaagaattcaaagttttggttctgtaccatctagttcatgtgaatcatcttctatgatggctatgatgtttatgcgcatagctatttcagaattaaatgtcattttatcatgtattgccgcctgcaatttgcatgatttgacttcctacagtacgaacgaatgtacctgaaggttttcctccaagctgatgaaatggccagatttctgctgcactgtacctgctgtaatgtaatgagatttatgcacttgtaacggtatgatatttaccatgcgactgatatgatatttacaatgctgcttcactatttcctaacctacgtgagattttatatatgtacaaggcccagggctttattatgttcttcgattacggtttacgagtaggatctgatgagtctcaggccctggaacgagctcttgagcaggctgccaaggacggacaccgcgccgccctcggcctcgtgcttgacgggcgcgtcgtggccgccgcgcttcaccctcagcacggcgtgcccgagctgctcccccaccgcgtccatggtcctgccgtcgacggggttgccgtacgcgtccgacacgtagaacgtgtcctcggccttgccgtccctggtcgtgatcgccgcccggatgatggagaggctgttctcccggaacacgcgcgtgatctccgacagcagccccaccctgtcctccgtccacacctctagctccagcccctgctcagtcgtgaacagcaacgatgttactagcaagaggccatgctggtgggtcgacgaacgagggagatcatacatacgttggacgcgcgcctctcgacggcggcctctaggcaccggacgagg

SEQ ID NO: 9185 - DNA, 1775 bp, Zea Mays
ttgttttttttttttttggtttttatcgccccgaagagaggcggtagggcgccggtccccgccaagaagaaggcggtggtgacgaacccgctcttcgagaagaggccgaagcagtttgggatcggcggcgcccttccgcccaagaaggacctccaccgcttcgtcaagtggcccaaggtcgtgcgcatccagcgccagcgccgcatcctcaagcagcgcctcaaggtgcccccggcgctcaaccagttcacacgtaccctcgacaagaaccttgcaacaaacttgttcaagatgcttcttaagtaccgccccgaggacaaagctgccaagaaggagaggctcttgaagagggcccaggctgaaaacgaggggaaaactgttgagtcaaagaaaccaattgttgtgaagtacggccttaaccatgtgacttacctcatcgagcagagcaaggcccagctggttgtcatagctcatgatgttgatccgatcgagctggtcgtgtggctcccggccctttgcaggaaaatggaggttccatactgcattgtcaagggaaaagcacgccttggatcgatcgttcacaagaagactgcatctgttctttgcttgaccaccgtcaagaacgaggacaagcttgagttcagcaaaatcctggaggctatcaaggctaacttcaacgacaagtttgatgaggtcaggaagaagtggggtggtggtatcatgggctccaaatcacaggcgaaaaccaaggccagggaaaagctgcttgccaaggaagctgcccagcggatgacctaagtcttgtcctgttaaattaaaattttcgtgtacttgcgatcgtgtgcaatcacggtggttgtcagatctagtttttgagagttttgcttcagggagagacaccgagtcaccgaccatgacagaaagacatcatgtaagaattcaaagttttggttctgtaccatctagttcatgtgaatcatcttctatgatggctatgatgtttatgcgcatagctatttcagaattaaatgtcattttatcatgtattgccgcctgcaatttgcatgatttgacttcctacagtacgaacgaatgtacctgaaggttttcctccaagctgatgaaatggccagatttctgctgcactgtacctgctgtaatgtaatgagatttatgcacttgtaacggtatgatatttaccatgcgactgatatgatatttacaatgctgcttcactatttcctaacctacgtgagattttatatatgtacaaggcccagggctttattatgttcttcgattacggtttacgagtaggatctgatgagtctcaggccctggaacgagctcttgagcaggctgccaaggacggacaccgcgccgccctcggcctcgtgcttgacgggcgcgtcgtggccgccgcgcttcaccctcagcacggcgtgcccgagctgctcccccaccgcgtccatggtcctgccgtcgacggggttgccgtacgcgtccgacacgtagaacgtgtcctcggccttgccgtccctggtcgtgatcgccgcccggatgatggagaggctgttctcccggaacacgcgcgtgatctccgacagcagccccaccctgtcctccgtccacacctctagctccagcccctgctcagtcgtgaacagcaacgatgttactagcaagaggccatgctggtgggtcgacgaacgagggagatcatacatacgttggacgcgcgcctctcgacggcggcctctaggcaccggacgagg

SEQ ID NO: 9186 - DNA, 316 bp, Zea Mays
ctcgggtccaaaccacacacaaacacatcagcattcagcaatagctaatcgagcatcgtcgccttagctcctctcctctcctctccgtcgtcgtggaacttctctccgccggctgtcatatatataaaggagaagaagagaacagcaactctagctagccggccggcctccgtcgtcgccggcgtcgtcgactagctagctaactctcgatctccagttcctgcccccgcgccccacgcccggccgtcgtcgtcagcaatggcaggaggcttcttctccatggctcacccggccgtcaccctctccggcatcgcag

SEQ ID NO: 9187 - DNA, 1741 bp, Zea Mays
gagacgggagacgacaagcgcgcacgtcccaaagccaaactcccagagcgaggaggtggaggacggacgggaggaggagaggagagagcccaccacccgcgaccgcgaccgcgacctaacccggagacctccctaggctagctcccctcccagaccccaggctctcccacccacctttcccctctccctccctcctccccgtcccacgccgccgcacccccgcctggctgcttgggtggcaatcggccgtagaggaggagggtgtaggagcttgatccgggccacctgccccctgcgccgtcgggatgtacgtgccgccgccgcccaccggcggcgccggcgagcagcctagggtttaccaggtctggcggggaagcaacgaattcttcttgcagggaagattcatatttgggcctgatgtgagatctgtgtttctcactatgttcctcatcatcgcaccagtggttgtcttctgtgtgttcgtcgcaaggcatctcataaatgatttccccgatagctggggaatctcagtgatggtagtagtggttgtcttcactgtttatgatttgacgctgcttctttgtacctctggtagagatcctggtataatacctcggaatactcatcctcctgaacctgaatccattgatgggatcaatgatacaggtgttcagactccacaacaatttcgtttgcctcgcacaaaggaagttgttgtaaatgggatcagtgtacgggtaaaatactgtgatacttgcatgttgtaccgaccacctcgatgctcacactgttccatttgcaataactgtgtggaacggtttgatcatcactgtccatgggtcggccagtgcataggactgcgtaattatcggttcttctatatgtttgtatcctcgacaacattgctctgcctgtatgtatttgccttctgttgggtgtatgtgatcaagattagagcagctgagcacttgtcaatttggaaggccttgttgaagacaccagcatcaattgttctgattatctactgttttctttgtgtatggtttgtgggtggtttatctgtcttccatttgtacctgatgggcactaaccagacaacatacgagaatttcaggtatcgctatgaccggcgcgataatccatataacagaggtactctgaacaattttctagagatattctgcaccgctatccccccttcgaagaacaatttccgggcaagggtgacagtagagcaagggctgcagcaaacacgctcacagtctaggggtttcatgagccccagcatgggcaagccaaccatcggagagcttgagatgggcaggaagccagtagtaccttgggacgagccaaggacggcagctgatatcagggacttggaagcagggttcgggggcatgtttgacgagaaagagggcagagtagcccacgcatccccagatctgagcagagatctcccagcagagtttgtggaagggcgaactggcatgcactcgaggcagtcaagttgggttcagagaggaggcgatgcgagtgaagcgtcggcgctgcaaatggctactgtccataccgccgaagatagcaaccatgtcccctggagtggcacacgttagcctgacaaaaaggcgggggaaaaaaaaaaggagaggaactacggtgtgtttcggttgtgtctcgaggttgcgacgaatgctgtgcttggtttgccacaacgctgctgtgctttgggtgaaagcacctg

SEQ ID NO: 9188 - DNA, 1969 bp, Zea Mays
gagacgggagacgacaagcgcgcacgtcccaaagccaaactcccagagcgaggaggtggaggacggacgggaggaggagaggagagagcccaccacccgcgaccgcgaccgcgacctaacccggagacctccctaggctagctcccctcccagaccccaggctctcccacccacctttcccctctccctccctcctccccgtcccacgccgccgcacccccgcctggctgcttgggtggcaatcggccgtagaggaggagggtgtaggagcttgatccgggccacctgccccctgcgccgtcgggatgtacgtgccgccgccgcccaccggcggcgccggcgagcagcctagggtttaccaggtctggcggggaagcaacgaattcttcttgcagggaagattcatatttgggcctgatgtgagatctgtgtttctcactatgttcctcatcatcgcaccagtggttgtcttctgtgtgttcgtcgcaaggcatctcataaatgatttccccgatagctggggaatctcagtgatggtagtagtggttgtcttcactgtttatgatttgacgctgcttctttgtacctctggtgttcagactccacaacaatttcgtttgcctcgcacaaaggaagttgttgtaaatgggatcagtgtacgggtaaaatactgtgatacttgcatgttgtaccgaccacctcgatgctcacactgttccatttgcaataactgtgtggaacggtttgatcatcactgtccatgggtcggccagtgcataggactgcgtaattatcggttcttctatatgtttgtatcctcgacaacattgctctgcctgtatgtatttgccttctgttgggtgtatgtgatcaagattagagcagctgagcacttgtcaatttggaaggccttgttgaagacaccagcatcaattgttctgattatctactgttttctttgtgtatggtttgtgggtggtttatctgtcttccatttgtacctgatgggcactaaccagacaacatacgagaatttcaggtatcgctatgaccggcgcgataatccatataacagaggtactctgaacaattttctagagatattctgcaccgctatccccccttcgaagaacaatttccgggcaagggtgacagtagagcaagggctgcagcaaacacgctcacagtctaggggtttcatgagccccagcatgggcaagccaaccatcggagagcttgagatgggcaggaagccagtagtaccttgggacgagccaaggacggcagctgatatcagggacttggaagcagggttcgggggcatgtttgacgagaaagagggcagagtagcccacgcatccccagatctgagcagagatctcccagcagagtttgtggaagggcgaactggcatgcactcgaggcagtcaagttgggttcagagaggaggcgatgcgagtgaagcgtcggcgctgcaaatggctactgtccataccgccgaagatagcaaccatgtcccctggagtggcacacgttagcctgacaaaaaggcgggggaaaaaaaaaaggagaggaactacggtgtgtttcggttgtgtctcgaggtgggtgctggtggcgatgtcgtctcgaagtgaactgccatgtgtttattaccacgtgtgccagggcaaggccctggatcattttgtaatccgaaacacaagcttgctgctgtagtctcatctcatgcctggtagatcaccagatccctgctgtggttgttttttttttgtttttggtttggcttgttttgttttgcttgtttgtctgtttgggtgtgtgtttcaacaaaatgaagtagccgacgagcctaagctcccgacaggtctggataatgtatatgtatataactatattattagcaggttgcgacgaatgctgtgcttggtttgccacaacgctgctgtgctttgggtgaaagcacctg

SEQ ID NO: 9189 - DNA, 744 bp, Zea Mays
ataaggataaaaaaaagattgtcccaatactttactagccggcggcggccgcatcccaattcccacatccccttctgcaatcaaaaaccgagctagggttttagggggagacagagaagcagagggaggctccatggacaaccccgagatgcagcgattcattcagaggttcctcgacatgagcgtgctgattgccaaacgcttcgagatgcagtgaggcgtcgtcactcgaagctgttgcctggtcaatcgccctaagcttttcctttgatttgaggttccattgaggactttcggacgattcaacacagagtttagtgttttttttatgtcttacccactgccctgtttaggcaacgtgttaaagtgtgtttgagcctattgaaattggatttgtacacctcctgctcttaaacaagatctctcatggcatacctgtcagcatcctaggtacttcgatttcagtttggtgagctcggatatcaggcgaaggagatctatgagatgtaagatatagtttcgcccactggtactattttccattgccagataaaattgtcatcgtcaaggaataaacagtggagaccattctcctcgacgggtgcgactttgagcacgggctcgtcgtcatggagttgtacatgctgattatttgcccctagaatgacaatcatttcctaccattaccatcaacatagtataccgagtgtagtagccacgagtagactaaaagaaaaatataaa

SEQ ID NO: 9190 - DNA, 3720 bp, Zea Mays
taacacagagcccaacgcatatatgcagcaacgactgcgctgttacgcatggattcaggttccttccttcctcctcgcttcatgaagagatattacaaagacactaattaaggacacgtacgacgacgacctctgcatataatgcaggttacaaatttgacaatatacatatatattgggcttctgaaacctcaagtacagtagaagctgctgacgcgagtagtaggtacgtagtaattaatttgctgttaactaataatccggccggtagtagggcgtcatgcttctctcactaattaaattacactgcattacattacacgtacagagtgcaaaagaaagaaagagataaagaaaagaaaaactagttaacaacaaataatgttgggtcggaggagaagtgcgtgtggatgggttgttcccccttatccgtaactcagcttgatcacatcctctcttcgagatcgaggtcgaggccggccgcacacgtacggcatgcacagcacagctgcgcgcgcgacgagctggtggcggtatacatatacgtacgtacgttcttgactgcatgttgtggccagccggcacgtacggtcggttctgctagctagctagctaagctagctgctgacctcgtccaggtccgagctcgacgcatccgtgacgcagctgctgctagcggacggcggcggcgacgcttctcgctgcctcctcctcggcctgttgccgcccttctggaagacgcggcagacgacccactctccttgcgcctgagccaggctgcagccctgcgtggatatataagatgaccaagaccagtgaccagcgtcaacgacaagcgaaacaaaagcgcggggcacagttggtctgtcagtggatcggagcatcttgctattgtgcaagctgaagctgaagggagagactatactgtagactctgtagtctggtgtgtagcggtctactagctgcaggaggccggcgctgccgatcagagagcagctacagctactactaccacagtgagtgacgaattaagcaaagcgatgtgtactgtgcggatcaattcaatagtcgatgtgtttacttcaactccatccgatcgatgaccagcgggtactgctcgtgcacgcaggtactgtgcggcggcatgcggcagatgcatgcagtagtatttgcaggctaatcaaggcgtcgtcgtcgtcgtcgtcagaattaaagtgccagcggttcaggcgctgctgcttcggttgattggttgttggttggccatggacctacctctacggtgtggtgtggtggtggggcgagggacaagcagagagagatcacggcggaatccggccggccgggcggccggtccatctgagctgcaagcagcagtacttactggttaagtacagctaccactcggtgtcggcataaatttgcaaccaccagggcatatatatgtgcgatgtgattcattatccgtcaccgtacgtacccaaaccagttttcttcatctttttttttccctggacaccgacaacgagctttctttttcgggttcttgaaataaacccattaaccaagcatgatttttcttcttttctttaacaagataaaagtctcatacaggagcacatacatagcttaattaacatcagcaggtttgctcattcattagtggaccaagtttattagggctaattgaaattaatataatggagagagagagagagagagagagagagagagagagagagagagagagagagatgcccatacatagcgtgatcatgccagaacgacatgtccgattagtaggtaggaagatgccaagatggatgtgtgccagaatgaaccaccgtctatctactcgcaggccggccggccgagctattctatcaatttctatccccagcatcgctaataaactcacctgctactgctagctgcttcatcccggcctcgctgtacatgcatctcatcatctctctaggcgctagcagctagctacatgttcgtgatatgatccctctcttctcgtatccctcaaaaaaaatcatcccttctcgtaatctcacaatcgatctcaggtagtcaggtactgctggtatcatgtcactagctagctagctagctagatgtttgcagttactgacctaattagcgtaactttgagggcttaatataccctatatataatactctattactgagtccctgaactttgccactgtaaccagatcagtcatcaaaagatctacatgcatgacttgttacgtatgacttctgagggggagggagggagggagagagagagagagagagagagaggcaaagaggttgaagcatgcacgcggcgtatatggagaagagaagagtcactcacgttcttgtgcagcggcgcggcgaggcggtactcgtgcatgacccagccggtcttcagggccgccgacggcaacgccgccgtcttcttccggcggcggggcacgaacgtcatcgccctcttcacgcccaccaggaggctccctccgccacacgggcggggcagcaccaccggcttctccttccccgacggcttccaccgcccgcccgcggccgccctgctaccagtaccagcgccgctgctcttgccgccgctcgccggccgcaccgcgaagaagtatttctccccctcgctcctcgtatctgctggagacaggcagcgcaaaagaagaagaacaaaaagattggacctttagttctttctctcctagtccttcccagcatagcagtgacagacacaaacgatagatgttcgttggaggcgtcatcgcgtggtggcgtgtactagtaccaggggcagagacggcgacgacgtcccaggggtcgcggctgtagaggtcgcggaagacggggatgacggcggcggggagcggcacgccgatggccttgcgccggaggtactgcaccacgagctcctcgtccgtggggcggaaccggaaccccggcgggagctgccggagcgcctccacgccgccgccgccgtgcctcaccagcaccggggctctctccgccgacatgtccccaaagaaattccttttatcaccgactactgctactgtgctgctgctgctgctacacagctagtacacagctaacgagctagctagcacgcacctgcgcgtgcactgctagctagctctagctgccgctacgcaccacagcttagctctagctgctataagctacctacctcctgccagtttggcacaggggcaagcaactgtagcagcagagctcgagcttgttcggtcacttggcgcgcgcaggacgcgtgcagttgctcggagcgtccatggcgagccgagagattgaacagagagacagggagggagagactgagagcggttgggggaggtctgcgtgcgtgtgttttccagggtgaggagggaggctctggagaagagagaggggaaaagggcggctttatagggtgccctgttgcgtcgatcttactccatctatcctcctcccttcctcagcaggcagctgaacgtctgtacgccatcgatcaggcatccagcccggccggcgaagtccaccgtcgctcgcgcgccggtttcgtgaactccttccagaatctcccacgaagctagatgtgaattgcaaactactgttacttgctccatgtctttttttttattttacctgtagccagcgggttacaaattacaattcatccaccgatactgaaca

SEQ ID NO: 9191 - DNA, 447 bp, Zea Mays
ctttgcacgagttcgggggagcccagcccaagcaggcgccgccgacgaccgcgggggcggaagacgagtccgcgtcccgcgcgctgtcgcgctcgcatgcgagctgacgacggccagccacatcacgagagcgcggtggcggacaaagatgcggttttttaagaatcccggaaactaataaactgactgcggcggcccgcagttccgtgtaaagcttaagaacagacagaggtgggcggtgttgttgcttccgtcgtcggtgttggtgttgctcgtgccgcgcatcgagtcaaggtgtgccgtggacgagaggatgccggtcgccgcgaaaaggatactgcggctgagggcacagcagagagaaagactgcaagaccgatgcgagagaaggtttcaaattcttcatcgaaaccacctgtccatatgactggtagtggtaggcctaat

SEQ ID NO: 9192 - DNA, 472 bp, Zea Mays
ctttgcacgagttcgggggagcccagcccaagcaggcgccgccgacgaccgcgggggcggaagacgagtccgcgtcccgcgcgctgtcgcgctcgcatgcgagctgacgacggccagccacatcacgagagcgcggtggcggacaaagatgcggttttttaagaatcccggaaactaataaactgactgcggcggcccgcagttccgtgtaaagcttaagaacagacagaggtgggcggtgttgttgcttccgtcgtcggtgttggtgttgctcgtgccgcgcatcgagtcaaggtgtgccgtggacgagaggatgccggtcgccgcgaaaaggatactgcggctgagggcacagcagagagaaagactgcaagaccgatgcgagccctgaacagtcgaagcgccgccgttgggttatacgggttaagccgcaataagcctgcttttaacattgtgggctgctctgcaagat

SEQ ID NO: 9193 - DNA, 516 bp, Zea Mays
tagggtaattcgagatgaaaaagggaaattcctgctaggaatgtctcctcgtaaccgccccatttatgctttgtttgggtactctagtatccacccaaatccatatgtattgatatggattggagtataaattaatttaattttacattccaatgcacctcaacatatgtggattgtgatgcatactagagtatctaaacaagacctgtggattgtgatgcatactagagtatctaaacaagacctttgaagaaaatccatgcacccttgtccttgttccctaccacagagaaggaattttctccgtgcctaaccccaacgaggatcgaggacccaatggcgatcccagtacctgtcccctccgacacaataatagaccaagtcaaatttacctaatcactgcatatgaatataagaaagcaatgatatatgcattcataacatcaaacaaaactaatcttgaatatatgtctaaaatttgaacaaacagaaacaagaacaaagaaagaatatgac

SEQ ID NO: 9194 - DNA, 1359 bp, Zea Mays
ggactcgatatggtcccatatatatacggtgagcaccgggagcaacaaacggaaggtgaggtcatgtgctgcgtcgacgatggatggaccaacgacctccgggaaccacaaccacgtacccgcttcagcttcaggtccaggagcagcgctcaccagggagatctccttcggggatcagacggtgtccgcccccgcggccgagaccgagaggcctgccgccgtgaggatcgacagcgagacgcttgcgcagaacagggacagcgccatgcagcggtacagggagaagaagaagaaccgcaggtacgagaagcacatccggtacgagtcgaggaagctgcgggcggacacgaggaagcgggtgaaagggcggttcgtcaagtcgaccgaagcactcaacgccgccagatacaacggatgaggcagccatatatatatatatatatgcatggcctgcgggcggatgagtttgctgcgcgcctgcgttattacgtgcggtagttacctcacggagaggtaggtactgctacctggaggtgctacgtatgtatggcgcggccggaatcgctacgcacgcggcccaagtttaattttgcgttgaagctatagcgatcgtggccattgttgggcagtcaactccagagattgcacggtactgcttgtttgtaacagacgaccctccctttccccttttttctctgttgttgccgtcatccccaccagaacagaaagtatgtagcttacctacagcaccgatttaccatgcatgcatgcatctggtcttaacgagctactacggtcgtcgtcgagcgcgtgatgcgttagttcgcagtgaagttgttctgttttgtttatactactactacggtagagacggcagacggcgaaccgcccgctgggctcgttcccccacaaggccaccgaccctatggcggtcgacgccgcctgcaggttcaccgtgaactgatggacgacggagacgatcgatagattagattagatggcagccatgaataatgaacggtagattagatgacagccgccatgcatgaataataacgcacctggtcccatgtggtgcagccagtgcttgctgacgagcttcttcgcgtagacggccgtgtgagcagcgcgtaggcggcgcaggcggagttcgttgatccccctgcaatggacaagtggtttcaatacaatgttatgcatcgacagcaagaaggctatagcagatcccaacgattaactaataatctgggctgggccatattggtttacgtgtacgtactcccagacggcgaatatctatcttcaattaaggtgaggacgatgccccagcggtcctgcctgttggtggccacgaccacg

SEQ ID NO: 9195 - DNA, 1605 bp, Zea Mays
cgagaaatgcagtcaagatctcgggtgggtgagtgggtagattaccatatgggacttcaatttaggacggtcaaggcatcacgatgagaaatctgctcttgaagttggatacggttctaaccatggcggctttatgattaagagttacagtgacatgcttaaggacatttcttcggggacaacgaaagatctggaagatatttatgactcaagatactgctcaaccgccgaagatatcatgtcctctaatatctgtcagttgtcatcgaaaaatgtgagcaccgggagcaacaaacggaaggtgaggtcatgtgctgcgtcgacgatggatggaccaacgacctccgggaaccacaaccacgtacccgcttcagcttcaggtccaggagcagcgctcaccagggagatctccttcggggatcagacggtgtccgcccccgcggccgagaccgagaggcctgccgccgtgaggatcgacagcgagacgcttgcgcagaacagggacagcgccatgcagcggtacagggagaagaagaagaaccgcaggtacgagaagcacatccggtacgagtcgaggaagctgcgggcggacacgaggaagcgggtgaaagggcggttcgtcaagtcgaccgaagcactcaacgccgccagatacaacggatgaggcagccatatatatatatatatatgcatggcctgcgggcggatgagtttgctgcgcgcctgcgttattacgtgcggtagttacctcacggagaggtaggtactgctacctggaggtgctacgtatgtatggcgcggccggaatcgctacgcacgcggcccaagtttaattttgcgttgaagctatagcgatcgtggccattgttgggcagtcaactccagagattgcacggtactgcttgtttgtaacagacgaccctccctttccccttttttctctgttgttgccgtcatccccaccagaacagaaagtatgtagcttacctacagcaccgatttaccatgcatgcatgcatctggtcttaacgagctactacggtcgtcgtcgagcgcgtgatgcgttagttcgcagtgaagttgttctgttttgtttatactactactacggtagagacggcagacggcgaaccgcccgctgggctcgttcccccacaaggccaccgaccctatggcggtcgacgccgcctgcaggttcaccgtgaactgatggacgacggagacgatcgatagattagattagatggcagccatgaataatgaacggtagattagatgacagccgccatgcatgaataataacgcacctggtcccatgtggtgcagccagtgcttgctgacgagcttcttcgcgtagacggccgtgtgagcagcgcgtaggcggcgcaggcggagttcgttgatccccctgcaatggacaagtggtttcaatacaatgttatgcatcgacagcaagaaggctatagcagatcccaacgattaactaataatctgggctgggccatattggtttacgtgtacgtactcccagacggcgaatatctatcttcaattaaggtgaggacgatgccccagcggtcctgcctgttggtggccacgaccacg

SEQ ID NO: 9196 - DNA, 1740 bp, Zea Mays
gccacctcacctacggctgacacgtggggagcgggaggtatccgctgttctgcggcgcgtgatatgggacttcaatttaggacggtcaaggcatcacgatgagaaatctgctcttgaagttggatacggttctaaccatggcggctttatgattaagagttacagtgacatgcttaaggacatttcttcggggacaacgaaagatctggaagatatttatgactcaagatactgctcaaccgccgaagatatcatgtcctctaatatctgtcagttgtcatcgaaaaatgtgagcaccgggagcaacaaacggaaggtgaggtcatgtgctgcgtcgacgatggatggaccaacgacctccgggaaccacaaccacgtacccgcttcagcttcaggtccaggagcagcgctcaccagggagatctccttcggggatcagacggtgtccgcccccgcggccgagaccgagaggcctgccgccgtgaggatcgacagcgagacgcttgcgcagaacagggacagcgccatgcagcggtacagggagaagaagaagaaccgcaggcacggatccatgagctgatcttgatgacccttacctacctagcttgcctgctgcgacttgtgcggtattaagaataggctgttacatgttgtgtcccatcatatcgttcgtgtccgcaggtacgagaagcacatccggtacgagtcgaggaagctgcgggcggacacgaggaagcgggtgaaagggcggttcgtcaagtcgaccgaagcactcaacgccgccagatacaacggatgaggcagccatatatatatatatatatgcatggcctgcgggcggatgagtttgctgcgcgcctgcgttattacgtgcggtagttacctcacggagaggtaggtactgctacctggaggtgctacgtatgtatggcgcggccggaatcgctacgcacgcggcccaagtttaattttgcgttgaagctatagcgatcgtggccattgttgggcagtcaactccagagattgcacggtactgcttgtttgtaacagacgaccctccctttccccttttttctctgttgttgccgtcatccccaccagaacagaaagtatgtagcttacctacagcaccgatttaccatgcatgcatgcatctggtcttaacgagctactacggtcgtcgtcgagcgcgtgatgcgttagttcgcagtgaagttgttctgttttgtttatactactactacggtagagacggcagacggcgaaccgcccgctgggctcgttcccccacaaggccaccgaccctatggcggtcgacgccgcctgcaggttcaccgtgaactgatggacgacggagacgatcgatagattagattagatggcagccatgaataatgaacggtagattagatgacagccgccatgcatgaataataacgcacctggtcccatgtggtgcagccagtgcttgctgacgagcttcttcgcgtagacggccgtgtgagcagcgcgtaggcggcgcaggcggagttcgttgatccccctgcaatggacaagtggtttcaatacaatgttatgcatcgacagcaagaaggctatagcagatcccaacgattaactaataatctgggctgggccatattggtttacgtgtacgtactcccagacggcgaatatctatcttcaattaaggtgaggacgatgccccagcggtcctgcctgttggtggccacgaccacg

SEQ ID NO: 9197 - DNA, 2921 bp, Zea Mays
cgttgttttattgttttgttttgcttaattttcttgccaccatgtcatcatccatgaaaaaatatgtaatgttcaattctttaggattatactgtttctttatcttttttgaacctgcttatattatttgtttctcattatttattactctttccccacataagagtagagttgagctcaatgtcgtcagttcctctactgagcatactgaattttcatcttctttccagggcctgtaatgaccaaatttacaattgccttaagagaaattggaacatacaaggaagtcctgcgctcccaggttgagcacatgttaaatgacagattactgaattttgttgacattgatttgcatgatgtgaaggatgctcataagcgctttgacaaggctagcctctcatatgaccagattcgtgaaaagtacctatcattgaagaaaggtacccgaccggacataacaacagcaattgaagatgagcttcacagtgctagatcttcatttgagcaagctcgtttcaacctggtcacttcactttcccatgtcgaggcaaagaagagatttgaatttttggaggctgttagtgcgacaatggattcacatcttcgttattttaaacaaggatatgaactattgcatcaaatggagccatatattaatcagacaattggcagaagttcacataaacagatcgaggcagttatgcagtcaacttcaaaaggcaaggtagagaccatccgtcaaggttatctttcgaaaagatcttcaaacttgagagccgactggaaaagaaggttcttcgtacttgatagtcgaggaatgctgtactactatcgaaaacaaattactcggccacctgctggttgttccatgcaaagaaacgttaacccccctgaacatggttctgggttgttgagcagattgttctcttctcattaccatatacatgatgaaaagtctgtcgcacgtcatactgtaaatttgttgacatcgaccattaaagttgatgctgagcaatcagatttgaggttctgtttcagaattatttcacccacaaagatctacacattgcaggcagagagtgcagtagatcagatggactggattgaaaagataactggtgttattgcctctttactgagctcacaatcgccagaacagtgttttatgtcaagccctaagggcagtggtcatgataggagtaccagtgatggaagctcctttacaagttcagtggaatttgaaccttccgtaatcgatgatttagtactggagaagtactctggaaatgggcagcatgatgtaataagaggcacacatcatcacagaaccagcatgaaacctgaaaaaccaattgacttgcttaggaaagttgatggcaataatatgtgtgctgactgtggtgctttggaacctgattgggcatcattaaaccttggcgcacttctatgcatagagtgttctggggtgcaccgaaatcttggagtgcatatatcaaaggttagatctctgacacttgatgtcagagtttgggagccatcagtaatcaatctctttcagtcattaggcaacatgtttgtcaacaatatttgggaagacatgttgccagatgataattcaagtgctgatggatcagacacatcacagtacctctctgttagcaagcctaaacacaaagatgtattctctgccaaggagaagtttattcatgccaagtatgtagacaaagagtttatacggaagcgtagcatggatgagaatcaattagctgagcagatgtggaatagtgtagctgcaaatgacaagaaaacagcatacagtctcattgtgagatcacgtgccaatgtaaatttagtttacggagagatgccttctagcccatttttgactcttggaaaggcacttcagcaagagcaaccggtttcaccgcctgatggaagtcctaaatttttcgattgcaattcacatgacaagatttctcctcgggagcccctttcccctgctagcacgagttcacgcacagatgacatggaggacggttgcgaaggtctttccttgctccatcttgcatgccgtgttgcagacgttgggatggttgaattacttttgcagtatggtgctagtgtaaatatgaatgattctaggggtcggacaccccttcatcactgcattttgaaaggaagacatcggcatgcaaagcttctcctctccagaggggctgattcacaagccatggatcgagatggtaggacagcattgcagtatgcaatcgatggtggaacaagcgacgaagacattcttgcattgttagaggatcatagtagatgatcttgcaaccacaccttcagtaaattgaggttctcttggtgtggtcaactcaactaagaccttgttcggttagctctcaatccatgtggattgagtgtgattgggtgggttcaaatcccaaacaagtcaaagttcttctaatttttttccaatcctatccaatccatgtataatgggaataaccgaacaagacctaacagggatccagccccgctcggtcctagcttgtcgtgcagacaatccgaattcatggcatgaaagcaacctatgtacatgtcgttctagggcttcagtatcatgatgcgcatgttgtttctttccccgccgtttgcttgtttagcatcagtggtccttatttagtcatctggcaaacggtttggttttgtttgctgcaggtgatgcatagtaagcttgtaaatggagttgcttctcttaattttctagtcatcttttatcatgaagtagatgtggcattctaatgaaagatggttgtacatattgagatgtgctgttgtggcatatatgaaatattggcatggtgtggatggtatatacgaaagttgtgcttgcttaatcagaatatattgcattgttg

SEQ ID NO: 9198 - DNA, 3174 bp, Zea Mays
atcttttgtcgtacactgacactaacttgacgcacaatgtgaattctacttaccaattaaaagaatgaggtttgaagcagtttaatttattttctgcagttgggtttcaatttctcactaaagcagatgtgcttcttggaataagttatggtatacaatcacttgaggagagtgctgaattgctgagagagagatgtttgaagttccataaaggttgccgtaagtatactgaaggactaggggaagcatacgatggagatattgcatttgccagctcacttgaaacatttggaggaggccacaatgatccaatgagtgtcgcttttggtgggcctgtaatgaccaaatttacaattgccttaagagaaattggaacatacaaggaagtcctgcgctcccaggttgagcacatgttaaatgacagattactgaattttgttgacattgatttgcatgatgtgaaggatgctcataagcgctttgacaaggctagcctctcatatgaccagattcgtgaaaagtacctatcattgaagaaaggtacccgaccggacataacaacagcaattgaagatgagcttcacagtgctagatcttcatttgagcaagctcgtttcaacctggtcacttcactttcccatgtcgaggcaaagaagagatttgaatttttggaggctgttagtgcgacaatggattcacatcttcgttattttaaacaaggatatgaactattgcatcaaatggagccatatattaatcagattcttgcttatgcacagcaatcacgagaaagagcaaacaaggaacaagcttctctcgtagagaggatgcatgagtacaaaaggcagatagaccgggaaagtcggtcttctataaatggtttgaatgattcttataatggtgatcgaatgcagacaattggcagaagttcacataaacagatcgaggcagttatgcagtcaacttcaaaaggcaaggtagagaccatccgtcaaggttatctttcgaaaagatcttcaaacttgagagccgactggaaaagaaggttcttcgtacttgatagtcgaggaatgctgtactactatcgaaaacaaattactcggccacctgctggttgttccatgcaaagaaacgttaacccccctgaacatggttctgggttgttgagcagattgttctcttctcattaccatatacatgatgaaaagtctgtcgcacgtcatactgtaaatttgttgacatcgaccattaaagttgatgctgagcaatcagatttgaggttctgtttcagaattatttcacccacaaagatctacacattgcaggcagagagtgcagtagatcagatggactggattgaaaagataactggtgttattgcctctttactgagctcacaatcgccagaacagtgttttatgtcaagccctaagggcagtggtcatgataggagtaccagtgatggaagctcctttacaagttcagtggaatttgaaccttccgtaatcgatgatttagtactggagaagtactctggaaatgggcagcatgatgtaataagaggcacacatcatcacagaaccagcatgaaacctgaaaaaccaattgacttgcttaggaaagttgatggcaataatatgtgtgctgactgtggtgctttggaacctgattgggcatcattaaaccttggcgcacttctatgcatagagtgttctggggtgcaccgaaatcttggagtgcatatatcaaaggttagatctctgacacttgatgtcagagtttgggagccatcagtaatcaatctctttcagtcattaggcaacatgtttgtcaacaatatttgggaagacatgttgccagatgataattcaagtgctgatggatcagacacatcacagtacctctctgttagcaagcctaaacacaaagatgtattctctgccaaggagaagtttattcatgccaagtatgtagacaaagagtttatacggaagcgtagcatggatgagaatcaattagctgagcagatgtggaatagtgtagctgcaaatgacaagaaaacagcatacagtctcattgtgagatcacgtgccaatgtaaatttagtttacggagagatgccttctagcccatttttgactcttggaaaggcacttcagcaagagcaaccggtttcaccgcctgatggaagtcctaaatttttcgattgcaattcacatgacaagatttctcctcgggagcccctttcccctgctagcacgagttcacgcacagatgacatggaggacggttgcgaaggtctttccttgctccatcttgcatgccgtgttgcagacgttgggatggttgaattacttttgcagtatggtgctagtgtaaatatgaatgattctaggggtcggacaccccttcatcactgcattttgaaaggaagacatcggcatgcaaagcttctcctctccagaggggctgattcacaagccatggatcgagatggtaggacagcattgcagtatgcaatcgatggtggaacaagcgacgaagacattcttgcattgttagaggatcatagtagatgatcttgcaaccacaccttcagtaaattgaggttctcttggtgtggtcaactcaactaagaccttgttcggttagctctcaatccatgtggattgagtgtgattgggtgggttcaaatcccaaacaagtcaaagttcttctaatttttttccaatcctatccaatccatgtataatgggaataaccgaacaagacctaacagggatccagccccgctcggtcctagcttgtcgtgcagacaatccgaattcatggcatgaaagcaacctatgtacatgtcgttctagggcttcagtatcatgatgcgcatgttgtttctttccccgccgtttgcttgtttagcatcagtggtccttatttagtcatctggcaaacggtttggttttgtttgctgcaggtgatgcatagtaagcttgtaaatggagttgcttctcttaattttctagtcatcttttatcatgaagtagatgtggcattctaatgaaagatggttgtacatattgagatgtgctgttgtggcatatatgaaatattggcatggtgtggatggtatatacgaaagttgtgcttgcttaatcagaatatattgcattgttg

SEQ ID NO: 9199 - DNA, 3252 bp, Zea Mays
atttccaccacctcgcaccaggctccactcctctccttcccttccctccccctttcgctcccctcctcgctcgcctcgcttctcgccgagccacccgaccaattcccccgccccccgcgcgcccagatcgccgccattcccttccccgccctgccgcgacgatcccgctgccaccgcaccttctccctcccgtcgtcctcccctccccgcagctggcggtcggtcggtcggacggaggaagccacagccggcggccagagagcgccgcagcgtgcccgcggatgggctggtaggaggcggcggcggcggtgactgtgttagcggcggcggcggcagccatgtatttcgccaaactcgatgactcgcccatgttccggacgcagatacaatcacttgaggagagtgctgaattgctgagagagagatgtttgaagttccataaaggttgccgtaagtatactgaaggactaggggaagcatacgatggagatattgcatttgccagctcacttgaaacatttggaggaggccacaatgatccaatgagtgtcgcttttggtgggcctgtaatgaccaaatttacaattgccttaagagaaattggaacatacaaggaagtcctgcgctcccaggttgagcacatgttaaatgacagattactgaattttgttgacattgatttgcatgatgtgaaggatgctcataagcgctttgacaaggctagcctctcatatgaccagattcgtgaaaagtacctatcattgaagaaaggtacccgaccggacataacaacagcaattgaagatgagcttcacagtgctagatcttcatttgagcaagctcgtttcaacctggtcacttcactttcccatgtcgaggcaaagaagagatttgaatttttggaggctgttagtgcgacaatggattcacatcttcgttattttaaacaaggatatgaactattgcatcaaatggagccatatattaatcagacaattggcagaagttcacataaacagatcgaggcagttatgcagtcaacttcaaaaggcaaggtagagaccatccgtcaaggttatctttcgaaaagatcttcaaacttgagagccgactggaaaagaaggttcttcgtacttgatagtcgaggaatgctgtactactatcgaaaacaaattactcggccacctgctggttgttccatgcaaagaaacgttaacccccctgaacatggttctgggttgttgagcagattgttctcttctcattaccatatacatgatgaaaagtctgtcgcacgtcatactgtaaatttgttgacatcgaccattaaagttgatgctgagcaatcagatttgaggttctgtttcagaattatttcacccacaaagatctacacattgcaggcagagagtgcagtagatcagatggactggattgaaaagataactggtgttattgcctctttactgagctcacaatcgccagaacagtgttttatgtcaagccctaagggcagtggtcatgataggagtaccagtgatggaagctcctttacaagttcagtggaatttgaaccttccgtaatcgatgatttagtactggagaagtactctggaaatgggcagcatgatgtaataagaggcacacatcatcacagaaccagcatgaaacctgaaaaaccaattgacttgcttaggaaagttgatggcaataatatgtgtgctgactgtggtgctttggaacctgattgggcatcattaaaccttggcgcacttctatgcatagagtgttctggggtgcaccgaaatcttggagtgcatatatcaaaggttagatctctgacacttgatgtcagagtttgggagccatcagtaatcaatctctttcagtcattaggcaacatgtttgtcaacaatatttgggaagacatgttgccagatgataattcaagtgctgatggatcagacacatcacagtacctctctgttagcaagcctaaacacaaagatgtattctctgccaaggagaagtttattcatgccaagtatgtagacaaagagtttatacggaagcgtagcatggatgagaatcaattagctgagcagatgtggaatagtgtagctgcaaatgacaagaaaacagcatacagtctcattgtgagatcacgtgccaatgtaaatttagtttacggagagatgccttctagcccatttttgactcttggaaaggcacttcagcaagagcaaccggtttcaccgcctgatggaagtcctaaatttttcgattgcaattcacatgacaagatttctcctcgggagcccctttcccctgctagcacgagttcacgcacagatgacatggaggacggttgcgaaggtctttccttgctccatcttgcatgccgtgttgcagacgttgggatggttgaattacttttgcagtatggtgctagtgtaaatatgaatgattctaggggtcggacaccccttcatcactgcattttgaaaggaagacatcggcatgcaaagcttctcctctccagaggggctgattcacaagccatggatcgagatggtaggacagcattgcagtatgcaatcgatggtggaacaagcgacgaagacattcttgcattgttagaggatcatagtagatgatcttgcaaccacaccttcagtaaattgaggttctcttggtgtggtcaactcaactaagaccttgttcggttagctctcaatccatgtggattgagtgtgattgggtgggttcaaatcccaaacaagtcaaagttcttctaatttttttccaatcctatccaatccatgtataatgggaataaccgaacaagacctaacagggatccagccccgctcggtcctagcttgtcgtgcagacaatccgaattcatggcatgaaagcaacctatgtacatgtcgttctagggcttcagtatcatgatgcgcatgttgtttctttccccgccgtttgcttgtttagcatcagtggtccttatttagtcatctggcaaacggtttggttttgtttgctgcaggtgatgcatagtaagcttgtaaatggagttgcttctcttaattttctagtcatcttttatcatgaagtagatgtggcattctaatgaaagatggttgtacatattgagatgtgctgttgtggcatatatgaaatattggcatggtgtggatggtatatacgaaagttgtgcttgcttaatcagaatatattgcattgttg

SEQ ID NO: 9200 - DNA, 3862 bp, Zea Mays
aaaatagcaaatttctcgcccctggagaggacgcggtcatggcgtgcccccaggcgccgcacgccgcgggacgaggaggatgggggcggggctggaccctagcccgagcttcggcggctgctcggaccccgtgttggtggagctatccatgggcggggactactaccgcgcctgctgcggcgagcccgactccgatatccccgaggggcccaagctgccctgcgttggggacaagacttgcactgatctagtgcaaattctagtcgtggccgtctgtaccgctctggggggatcagacagtgcagcggcgcagttgagtgttggttacttggtgttcaagttgtgctgtctaggacgaaaaggtggttattgctcaaaagggaactactcgacagtgaaactggttcaccatattcttgtaacaagtgaattgaagaatttgtcccataagttggccaaacaccacagggttcccactaaagagcctctttcctcttcagcagccgagtttcagtctggcagccccattttacaagagaaaattaagttgctcggcgaacaatatggtgctttaagacgggcacgtggagatggaaactgcttttatcgaagctttatttatgttttcctacctggtagtatctgcagtgtacttttcacaaatattatcgttcataattcaggctatgatcctttcttatatttgcttacaggaacacatcctagagagacaagacaaagctgaggttgatcacatcatggtaaaaattgaggaatgcaagaaagaagacactcctgtctcttggatatattgagttcacttttgaggatttctttgcgatacaatcacttgaggagagtgctgaattgctgagagagagatgtttgaagttccataaaggttgccgtaagtatactgaaggactaggggaagcatacgatggagatattgcatttgccagctcacttgaaacatttggaggaggccacaatgatccaatgagtgtcgcttttggtgggcctgtaatgaccaaatttacaattgccttaagagaaattggaacatacaaggaagtcctgcgctcccaggttgagcacatgttaaatgacagattactgaattttgttgacattgatttgcatgatgtgaaggatgctcataagcgctttgacaaggctagcctctcatatgaccagattcgtgaaaagtacctatcattgaagaaaggtacccgaccggacataacaacagcaattgaagatgagcttcacagtgctagatcttcatttgagcaagctcgtttcaacctggtcacttcactttcccatgtcgaggcaaagaagagatttgaatttttggaggctgttagtgcgacaatggattcacatcttcgttattttaaacaaggatatgaactattgcatcaaatggagccatatattaatcagattcttgcttatgcacagcaatcacgagaaagagcaaacaaggaacaagcttctctcgtagagaggatgcatgagtacaaaaggcagatagaccgggaaagtcggtcttctataaatggtttgaatgattcttataatggtgatcgaatgcagacaattggcagaagttcacataaacagatcgaggcagttatgcagtcaacttcaaaaggcaaggtagagaccatccgtcaaggttatctttcgaaaagatcttcaaacttgagagccgactggaaaagaaggttcttcgtacttgatagtcgaggaatgctgtactactatcgaaaacaaattactcggccacctgctggttgttccatgcaaagaaacgttaacccccctgaacatggttctgggttgttgagcagattgttctcttctcattaccatatacatgatgaaaagtctgtcgcacgtcatactgtaaatttgttgacatcgaccattaaagttgatgctgagcaatcagatttgaggttctgtttcagaattatttcacccacaaagatctacacattgcaggcagagagtgcagtagatcagatggactggattgaaaagataactggtgttattgcctctttactgagctcacaatcgccagaacagtgttttatgtcaagccctaagggcagtggtcatgataggagtaccagtgatggaagctcctttacaagttcagtggaatttgaaccttccgtaatcgatgatttagtactggagaagtactctggaaatgggcagcatgatgtaataagaggcacacatcatcacagaaccagcatgaaacctgaaaaaccaattgacttgcttaggaaagttgatggcaataatatgtgtgctgactgtggtgctttggaacctgattgggcatcattaaaccttggcgcacttctatgcatagagtgttctggggtgcaccgaaatcttggagtgcatatatcaaaggttagatctctgacacttgatgtcagagtttgggagccatcagtaatcaatctctttcagtcattaggcaacatgtttgtcaacaatatttgggaagacatgttgccagatgataattcaagtgctgatggatcagacacatcacagtacctctctgttagcaagcctaaacacaaagatgtattctctgccaaggagaagtttattcatgccaagtatgtagacaaagagtttatacggaagcgtagcatggatgagaatcaattagctgagcagatgtggaatagtgtagctgcaaatgacaagaaaacagcatacagtctcattgtgagatcacgtgccaatgtaaatttagtttacggagagatgccttctagcccatttttgactcttggaaaggcacttcagcaagagcaaccggtttcaccgcctgatggaagtcctaaatttttcgattgcaattcacatgacaagatttctcctcgggagcccctttcccctgctagcacgagttcacgcacagatgacatggaggacggttgcgaaggtctttccttgctccatcttgcatgccgtgttgcagacgttgggatggttgaattacttttgcagtatggtgctagtgtaaatatgaatgattctaggggtcggacaccccttcatcactgcattttgaaaggaagacatcggcatgcaaagcttctcctctccagaggggctgattcacaagccatggatcgagatggtaggacagcattgcagtatgcaatcgatggtggaacaagcgacgaagacattcttgcattgttagaggatcatagtagatgatcttgcaaccacaccttcagtaaattgaggttctcttggtgtggtcaactcaactaagaccttgttcggttagctctcaatccatgtggattgagtgtgattgggtgggttcaaatcccaaacaagtcaaagttcttctaatttttttccaatcctatccaatccatgtataatgggaataaccgaacaagacctaacagggatccagccccgctcggtcctagcttgtcgtgcagacaatccgaattcatggcatgaaagcaacctatgtacatgtcgttctagggcttcagtatcatgatgcgcatgttgtttctttccccgccgtttgcttgtttagcatcagtggtccttatttagtcatctggcaaacggtttggttttgtttgctgcaggtgatgcatagtaagcttgtaaatggagttgcttctcttaattttctagtcatcttttatcatgaagtagatgtggcattctaatgaaagatggttgtacatattgagatgtgctgttgtggcatatatgaaatattggcatggtgtggatggtatatacgaaagttgtgcttgcttaatcagaatatattgcattgttg

SEQ ID NO: 9201 - DNA, 1503 bp, Zea Mays
aaaatagcaaatttctcgcccctggagaggacgcggtcatggcgtgcccccaggcgccgcacgccgcgggacgaggaggatgggggcggggctggaccctagcccgagcttcggcggctgctcggaccccgtgttggtggagctatccatgggcggggactactaccgcgcctgctgcggcgagcccgactccgatatccccgaggggcccaagctgccctgcgttggggacaaggagcctctttcctcttcagcagccgagtttcagtctggcagccccattttacaagagaaaattaaggaacacatcctagagagacaagacaaagctgaggttgatcacatcatggtaaaaattgaggaatgcaagaaagaagacactcctgtctcttggatatattgagttcacttttgaggatttctttgcggtaagtttgttcagtggttattttttgtgtatttctctgagtcatacgttttctgttagggcggctttccagtttatttgtctacattatctactgtttgtgggtttgtctacttaattgtcacaaccgtttccagatgatttttttgtgtatttgcatagatgaattggtttacaagctgtctgaagtctgtatctgtagaacaggtttggtttggattactgtggtgcatgtgcatgcttcttgtcaatccttcgaggctcagatatgctgatttttatgtggaaagttaactaagttgcaacttgtttattttagtctggaatactaaccagcctgtcttctaaaggacatgagctttcagctagagacatagcatgtcacccaaagttttttctaccgtactcgagactttttgtgatagaaagaaaaaaaaaaagagacgcagcagatcaatcagtttgacgaagacatggccttgcgattggtctggggctcagcagaggcgagaatgaagaacgggtctcagctagtcagctgccaagtacgctgtgccttcccggcacctgaaagaagcaagcacattttcgactccgtttggtggtctatctttctgtttccacagtcagggtggttgggtggctggccggctgggtgttgctggagtgctgctgctctctgtctcttttcgttctgggcccttttcgctgcttaggtaggttccccgtgtcacgccatccaactcgcaaggagatagatagacagcgatcgtgcttcgttcatatcctcggaagacagcggtcatgcttcgttcatatgagcaaggaggaggaggcgtccaatcttggatcggaccacgcagttcagttcctcacaagcaacgaaaaccaaactaattgtgcaagaatgatgtaatcctcctccggggaagaaggcgtcttatgcgtgcgttctaattttttttggttaaggattagaggatgagggagttaataagtggcaggcagatggcgccaaattgtttgaaaccttgtagctgattagtcgcaatttttatgcgtggcgtacgggtaaa

SEQ ID NO: 9202 - DNA, 1704 bp, Zea Mays
aaaatagcaaatttctcgcccctggagaggacgcggtcatggcgtgcccccaggcgccgcacgccgcgggacgaggaggatgggggcggggctggaccctagcccgagcttcggcggctgctcggaccccgtgttggtggagctatccatgggcggggactactaccgcgcctgctgcggcgagcccgactccgatatccccgaggggcccaagctgccctgcgttggggacaagacttgcactgatctagtgcaaattctagtcgtggccgtctgtaccgctctggggggatcagacagtgcagcggcgcagttgagtgttggttacttggtgttcaagttgtgctggagcctctttcctcttcagcagccgagtttcagtctggcagccccattttacaagagaaaattaagttgctcggcgaacaatatggtgctttaagacgggcacgtggagatggaaactgcttttatcgaagctttatttatgttttcctacctggaacacatcctagagagacaagacaaagctgaggttgatcacatcatggtaaaaattgaggaatgcaagaaagaagacactcctgtctcttggatatattgagttcacttttgaggatttctttgcggtaagtttgttcagtggttattttttgtgtatttctctgagtcatacgttttctgttagggcggctttccagtttatttgtctacattatctactgtttgtgggtttgtctacttaattgtcacaaccgtttccagatgatttttttgtgtatttgcatagatgaattggtttacaagctgtctgaagtctgtatctgtagaacaggtttggtttggattactgtggtgcatgtgcatgcttcttgtcaatccttcgaggctcagatatgctgatttttatgtggaaagttaactaagttgcaacttgtttattttagtctggaatactaaccagcctgtcttctaaaggacatgagctttcagctagagacatagcatgtcacccaaagttttttctaccgtactcgagactttttgtgatagaaagaaaaaaaaaaagagacgcagcagatcaatcagtttgacgaagacatggccttgcgattggtctggggctcagcagaggcgagaatgaagaacgggtctcagctagtcagctgccaagtacgctgtgccttcccggcacctgaaagaagcaagcacattttcgactccgtttggtggtctatctttctgtttccacagtcagggtggttgggtggctggccggctgggtgttgctggagtgctgctgctctctgtctcttttcgttctgggcccttttcgctgcttaggtaggttccccgtgtcacgccatccaactcgcaaggagatagatagacagcgatcgtgcttcgttcatatcctcggaagacagcggtcatgcttcgttcatatgagcaaggaggaggaggcgtccaatcttggatcggaccacgcagttcagttcctcacaagcaacgaaaaccaaactaattgtgcaagaatgatgtaatcctcctccggggaagaaggcgtcttatgcgtgcgttctaattttttttggttaaggattagaggatgagggagttaataagtggcaggcagatggcgccaaattgtttgaaaccttgtagctgattagtcgcaatttttatgcgtggcgtacgggtaaa

SEQ ID NO: 9203 - DNA, 1385 bp, Zea Mays
aaaatagcaaatttctcgcccctggagaggacgcggtcatggcgtgcccccaggcgccgcacgccgcgggacgaggaggatgggggcggggctggaccctagcccgagcttcggcggctgctcggaccccgtgttggtggagctatccatgggcggggactactaccgcgcctgctgcggcgagcccgactccgatatccccgaggggcccaagctgccctgcgttggggacaaggagcctctttcctcttcagcagccgagtttcagtctggcagccccattttacaagagaaaattaagttgctcggcgaacaatatggtgctttaagacgggcacgtggagatggaaactgcttttatcgaagctttatttatgttttcctacctggaacacatcctagagagacaagacaaagctgaggttgatcacatcatggtaaaaattgaggaatgcaagaaagaagacactcctgtctcttggatatattgagttcacttttgaggatttctttgcggtttggtttggattactgtggtgcatgtgcatgcttcttgtcaatccttcgaggctcagatatgctgatttttatgtggaaagttaactaagttgcaacttgtttattttagtctggaatactaaccagcctgtcttctaaaggacatgagctttcagctagagacatagcatgtcacccaaagttttttctaccgtactcgagactttttgtgatagaaagaaaaaaaaaaagagacgcagcagatcaatcagtttgacgaagacatggccttgcgattggtctggggctcagcagaggcgagaatgaagaacgggtctcagctagtcagctgccaagtacgctgtgccttcccggcacctgaaagaagcaagcacattttcgactccgtttggtggtctatctttctgtttccacagtcagggtggttgggtggctggccggctgggtgttgctggagtgctgctgctctctgtctcttttcgttctgggcccttttcgctgcttaggtaggttccccgtgtcacgccatccaactcgcaaggagatagatagacagcgatcgtgcttcgttcatatcctcggaagacagcggtcatgcttcgttcatatgagcaaggaggaggaggcgtccaatcttggatcggaccacgcagttcagttcctcacaagcaacgaaaaccaaactaattgtgcaagaatgatgtaatcctcctccggggaagaaggcgtcttatgcgtgcgttctaattttttttggttaaggattagaggatgagggagttaataagtggcaggcagatggcgccaaattgtttgaaaccttgtagctgattagtcgcaatttttatgcgtggcgtacgggtaaa

SEQ ID NO: 9204 - DNA, 1320 bp, Zea Mays
aaaatagcaaatttctcgcccctggagaggacgcggtcatggcgtgcccccaggcgccgcacgccgcgggacgaggaggatgggggcggggctggaccctagcccgagcttcggcggctgctcggaccccgtgttggtggagctatccatgggcggggactactaccgcgcctgctgcggcgagcccgactccgatatccccgaggggcccaagctgccctgcgttggggacaaggagcctctttcctcttcagcagccgagtttcagtctggcagccccattttacaagagaaaattaagttgctcggcgaacaatatggtgctttaagacgggcacgtggagatggaaactgcttttatcgaagctttatttatgttttcctacctggtagtatctgcagtgtacttttcacaaatattatcgttcataattcaggctatgatcctttcttatatttgcttacaggaacacatcctagagagacaagacaaagctgaggttgatcacatcatggtaaaaattgaggaatgcaagaaagaagacactcctgtctcttggatatattgagttcacttttgaggatttctttgcggacatgagctttcagctagagacatagcatgtcacccaaagttttttctaccgtactcgagactttttgtgatagaaagaaaaaaaaaaagagacgcagcagatcaatcagtttgacgaagacatggccttgcgattggtctggggctcagcagaggcgagaatgaagaacgggtctcagctagtcagctgccaagtacgctgtgccttcccggcacctgaaagaagcaagcacattttcgactccgtttggtggtctatctttctgtttccacagtcagggtggttgggtggctggccggctgggtgttgctggagtgctgctgctctctgtctcttttcgttctgggcccttttcgctgcttaggtaggttccccgtgtcacgccatccaactcgcaaggagatagatagacagcgatcgtgcttcgttcatatcctcggaagacagcggtcatgcttcgttcatatgagcaaggaggaggaggcgtccaatcttggatcggaccacgcagttcagttcctcacaagcaacgaaaaccaaactaattgtgcaagaatgatgtaatcctcctccggggaagaaggcgtcttatgcgtgcgttctaattttttttggttaaggattagaggatgagggagttaataagtggcaggcagatggcgccaaattgtttgaaaccttgtagctgattagtcgcaatttttatgcgtggcgtacgggtaaa

SEQ ID NO: 9205 - DNA, 1591 bp, Zea Mays
aaaatagcaaatttctcgcccctggagaggacgcggtcatggcgtgcccccaggcgccgcacgccgcgggacgaggaggatgggggcggggctggaccctagcccgagcttcggcggctgctcggaccccgtgttggtggagctatccatgggcggggactactaccgcgcctgctgcggcgagcccgactccgatatccccgaggggcccaagctgccctgcgttggggacaaggagcctctttcctcttcagcagccgagtttcagtctggcagccccattttacaagagaaaattaagttgctcggcgaacaatatggtgctttaagacgggcacgtggagatggaaactgcttttatcgaagctttatttatgttttcctacctggaacacatcctagagagacaagacaaagctgaggttgatcacatcatggtaaaaattgaggaatgcaagaaagaagacactcctgtctcttggatatattgagttcacttttgaggatttctttgcggtaagtttgttcagtggttattttttgtgtatttctctgagtcatacgttttctgttagggcggctttccagtttatttgtctacattatctactgtttgtgggtttgtctacttaattgtcacaaccgtttccagatgatttttttgtgtatttgcatagatgaattggtttacaagctgtctgaagtctgtatctgtagaacaggtttggtttggattactgtggtgcatgtgcatgcttcttgtcaatccttcgaggctcagatatgctgatttttatgtggaaagttaactaagttgcaacttgtttattttagtctggaatactaaccagcctgtcttctaaaggacatgagctttcagctagagacatagcatgtcacccaaagttttttctaccgtactcgagactttttgtgatagaaagaaaaaaaaaaagagacgcagcagatcaatcagtttgacgaagacatggccttgcgattggtctggggctcagcagaggcgagaatgaagaacgggtctcagctagtcagctgccaagtacgctgtgccttcccggcacctgaaagaagcaagcacattttcgactccgtttggtggtctatctttctgtttccacagtcagggtggttgggtggctggccggctgggtgttgctggagtgctgctgctctctgtctcttttcgttctgggcccttttcgctgcttaggtaggttccccgtgtcacgccatccaactcgcaaggagatagatagacagcgatcgtgcttcgttcatatcctcggaagacagcggtcatgcttcgttcatatgagcaaggaggaggaggcgtccaatcttggatcggaccacgcagttcagttcctcacaagcaacgaaaaccaaactaattgtgcaagaatgatgtaatcctcctccggggaagaaggcgtcttatgcgtgcgttctaattttttttggttaaggattagaggatgagggagttaataagtggcaggcagatggcgccaaattgtttgaaaccttgtagctgattagtcgcaatttttatgcgtggcgtacgggtaaa

SEQ ID NO: 9206 - DNA, 1246 bp, Zea Mays
tattcaacctgagagcgctgtaacagccttgacagtatgaagcttttgcatatgcggggtttctgaaaacacgcagacatatatcagtttggcaccgaatcagcctcgagatgaataaataacattgcaaataaatatttatcaccaaagatcctaatacgactgatgatacaaatatgaagaatataagagttaataatatgatttctaggatatacattgttattgccacaatcgtgaagcctagaatagttaatcatgcaaattttttggtacatacataagctggaaggactaaacaactcgttgcctaaatatcttgtctcactcaacctacatctttgacgttacggttgggcataaaggactattgcgacgatgacaatgtttagaagataataggaaactaatattaggtaaattgaagtggtcgctgttacggaaaaaaatataaccaacaaataaatggtacccaaattctcataacatataggcaggcatcattgccatcaaaactaagtgtgtacagtcaaactaaagttgtggacgggaaagaagggttggctccaacataattttttttttctcgaacgcgcaggagaactgcgccccattatatatttaaacagaaaaaggggtggtcttaaaagaccaatacaactccaacataatcagtgacaggtaggtaattttcgcgaaaatttagaagaacaacaggtaaaatcatgagctagggtgctgtaaaatttgtactagacaaaagctgcattgggaaagtcaaccctttgttgtcttttggcattttgggaagccaaaccagtttgaaaaaaaacccaactaaagggggcctaataaagatcaggttcacttaggcttttcgagcaacctccctatatcactccctatctcactacctatttcaaatttcactctgtaaacagtgcagtctacagtgcaaaacattgttttgcacgtccatatatatgctccgctggagatggccttagtgccttactgcagagggataaagagagtacaaatgcagaatgcagatcaccacagctttttacagtaacttgtgaaattaaggaaatccagtagctaacaaattttgaaggtttacaaaaatattctatgctgattagaagtaagaaagttatatttaaataatgaaatcaatgaacacacccgtccatggaaagtagcaattaccaactgcttggtcatatcaaatgttaaagtctaa

SEQ ID NO: 9207 - DNA, 3746 bp, Zea Mays
cgatgtcttccagctgcttcgcgtgtgtttgctcagtggggaaaaacatgggaggctgaaggccaagctgggactggacgagagcacgacgaggcaggcaatgcagctcttgaaggagaccaataacattctcaagtccagcatgtcttccttgggcggcggatcgcccgaggagatcgagaggttctggtctgcctgtgttctgtactgtgtgtcaaggctcagtaaagcggggaggtcgaaggaagatggcagtgtctcactttgccagattctgagggcatctaagctgaacattgtggattttttcaaggagatgccacagttctgcataaaggttgcacacattttgactggcctatatggttcagattgggaaaaaaggcttgagttgaaggaactgcaagcgaatgttgtccatttaagcttgctaagcagttactacaaacgtgcataccaggagctattcttgtcaaatgatggcaagagttcagacaattcttcagaatcaaataaccaagaggcttctgattattatcgctttggatggttgctctttttagtcctaagaatccaaacattcagcagattcaaggatcttgtgacatccacgaacgaactggtttctgtgttggctgtacttatcattcatgttcctgtgcgactaaggaatttcgatataaaggattcatcctactttggtaagaagtcagataggggagtcagtcttattgcttctctttgtgaaaaacatcatacctcagaagatgagttgagcaaagcactggagaagacaaatactctcataatggatattctgaaaaagaagccatgcccagctacttcagcatgccaacaggataatttgtctttcatcgatccagaaggcttgacagtttttaaggatttgcttcagggagactcattgaaaccaagtctgataatcctggaaaaggaatatgaaaatgcaattaacacaaaaggtgagctagatgagcgcatgtttgctaatgatgaggacagtttacttggtagtggaagcctttcaggtggagccattaatttaccaggcacaaagagaaagtatgatgttatggcctcacctgcaaaatcaatatcaagcccaaatccaatgtctcctccacgcttttgtctatctcctaaaggaaacggcttttgcaactcaaagatggctcctagcactccagtgagcacagccatgacaactgccaagtggcttcggaatacagtatctccccttccatcaagaccttctggggaactgttgcgcttcttctcggcctgtgacaaggatctaacagatgacattgcacacagagctgggattatacttggagccatattcacgagcagttcttttggtgaacgaatctgtactagtatgcgaagcgcaagtaggatggatgctatctggacagagcaaagaaaaatggaagctcttaagctatattatagggtcctcgaatctatgtgtagggcagagtcacagatcttgagtgggaacaatcttacatcacttttgtctaatgaacgtttccatcggtgtatgattgcatgttctgcggagttagttcttgcaactcacaagactgtcactatgatgttcccagctgtgctggagaagactggcattacagcatttgacttgagtaaagtcatagagggttttgttcggcatgaagatacactcccaagagagttaaagcgccatctgaattctcttgaggaacggcttctggaaagcatggcatgggagaaagggtcatcaatgtacaattccttaatcgttgcgaggccggcactgtctgtagaaataagccggttaggtttactggctgaaccaatgccatcgcttgatgcaattgcagcacatcataacatctcattgggtggcctgccacctcttcccttccagaaacaggagcgtttgcaagacaaagatgaagtcaggtctcccaaaagggcatgcactgagaggagaaacgtgctggtggacagcaattcattgcggtcaccagtgaaggatattattaaaccaaagttaccacctctccaatcagcttttgcaagtccaacaaggccgaatcctgcagcgggaggcgaaacgtgtgcagagacaggaataggcgtgttctttagcaagatatcgaagctcgcagccattagaatcagaagtctctgtgaaagactgcagcttccccagcaagttctggaacgggtgtattcccttgtgcagcaaatccttagccaacagactggccttttcttcaacaggcacattgaccagatcatactatgcagcatatatggagttgccaagatctctcaactggaactttcattcaaggagattattttcggctacaggaaacaacctcagtgcaagccacaagttttccgaagcgtctatgttcattggcccccaagaagccgtaacgggaaaacaggagaagaccacgtcgacatcatcactttctacaacgaagtattcattcctgccgtcaagtccttgttggtggaggtagggcctggcgccagcgccagtccaaagaagaaagaagaggaaaaaggtcctgctgatgtaggtccattcccagaatctccccggctggctcggttcccgaacctccccgacatgtctccaaagaaggtttctgctacccataacgtgtacgtctcaccgctacggtcatcgaagatggacactcttctgtccccgagctccaagagctactacgcgtgcgtcggcgagagcacctacgcgttccagagcccctccaaggacctgaaggctatcaacaaccgcctaaacagtgtgtccggcgggaagaaagtcagcggccggctgaacttcgacgtcgtcagcgatctggtcgtggccagtagcctcggcagtgaccgtgacgccaagcctgcggccgatcctgccaagacgacgccggtgaagtgcgagccatctgactcgtgatcgtcgtcgactctgatgaggcccttgttatagattgttatgtttcagatactcgtgagttagtagatggtaactagacgaggaggcccttgtttctgtttgcgtcttttctttttttgacgtgggaaacatctctgcgagcagctctacgttgtgtaaaatatatataaagaaagctgccccgatggctccccttaacccaactcgcgttgtagggagatgacaagcaccatggccatgtaacttcatagaggttttgagagagctgtgtaaatgcaagatggccatgtatcaacagcggatattttgttcgtggccgttttactgtcaggtggcggcggcctgtcagcagcgcgtccctgactggttcgtaaatggacacctgccattactgttcttgtacatgcccatcgcctcgcggtgcaaggattcaaccagagtgccggccgtgccgatgtcaatgttaaaaaaggcgacgacgaactattccgtccgggagaacacgtctccgttggttttttttgacggccgtgccgatgtcaatgttcaaaaaggcgacgacgaactattccgtccgggagaacacgtctccgttgtttttttttgacgaaggggcgaagcctctatttcatgtaatacccactttgtaagaaaagtctaaaaagagaaattatattactttatagctatatgtgttattcatgtttatcgttttacgtgaacaccacatataacaaaaaaataaatgacaaaagac

SEQ ID NO: 9208 - DNA, 231 bp, Zea Mays
aaaagtaatcttcccttgaagattccatggcgtagtaggacagatgaaaattgtgaaaacaacttaaaacaaaaacatactttaaatagcaatgagcggtgcatgtagagaccgataggcaactttctaagatgaagcacaacagatcctatacttgatttaatggctgcaatgcactctttccatcattgaagcaacttttcttcattggaagttgtaccccttaatgat

SEQ ID NO: 9209 - DNA, 1373 bp, Zea Mays
  misc_feature (1373)..(1373): n is a, c, g, or t
acgcttggcagttggcaagcagcgagtggggggagacagccaactctctatcctcttcccccctcgtccatccccatcccaccgccttgctctcccctctccacttccagctgtccatggctgcagcagcgtgctcctctgcctcgccgctcctcctcccctcagggccgagacatgcgtcggcctccagggcgtggtttctcggcggcaggagcagggcgctgagatcagaggcgccgtgctgctgcaaggccgccgccgcccgtggaagcgctccgcaatgcgggacggtcggtggtggcagcagcagcacccggagggggctgctaggcgtggccctgggagcctctgccttggggctggccgcgtttgacgccgtcgccgccgggttgccgccggaggagaagcccaagctctgcgacgccgcctgcgaaggcgagctcgaaaatgttggttgagcctccgtgcgtatattatcctttgtttatgcttgttggtgtttttccgttgacgggtgaaaaggattaaaggagtagtgatggcaacaattgataggggctggtttcagaaaattgggcacctgcctgcctggaccagtcagtaaatatttccttcaattctgcaaattttgaggtctcaacgtattcagcaacatacaatttctagagcaatgcgtagctggaatttgactatttgagacacgatcacctccccatacatcagtatggagagacatgccttgttccaaaatgacatatagtgagttaaatgctaaatctgagtgacataatgatatccatccaggtgcctatggtaactacagaatccggactgcagtacaaggatatcaaagtgggcgaagggcctagcccacccgttggtttccaggttgcagcaaattatgttgctatggtgccaactgggcagatattcgacaggtgggattcggatagctgatgcctgacgtccagctagagatctgggattttatctctacttcgtttgcaaaacacaactcaactaattattgtcttcacaatcagcttgcagacttagaatctgttcctgtagaattttgttgtttattaggccttgggggatggaagccattctagttcttactgttcttcgctgctctgtgatgcagttcgctggagaaaggtcagccctacatattccgtgttggatcagggcaggtgatcaaggggcttgatgagggaattttgtcgatgaaggttggaggactacgtcggctgtacatacctgggccattagcgttcccctaagggtctttactttctgctcctgggaaggccaagagtacccccaaccagccctgtcgttgtcgacgtcaatttactgtacataccagn

SEQ ID NO: 9210 - DNA, 1377 bp, Zea Mays
  misc_feature (1377)..(1377): n is a, c, g, or t
acgcttggcagttggcaagcagcgagtggggggagacagccaactctctatcctcttcccccctcgtccatccccatcccaccgccttgctctcccctctccacttccagctgtccatggctgcagcagcgtgctcctctgcctcgccgctcctcctcccctcagggccgagacatgcgtcggcctccagggcgtggtttctcggcggcaggagcagggcgctgagatcagaggcgccgtgctgctgcaaggccgccgccgcccgtggaagcgctccgcaatgcgggacggtcggtggtggcagcagcagcacccggagggggctgctaggcgtggccctgggagcctctgccttggggctggccgcgtttgacgccgtcgccgccgggttgccgccggaggagaagcccaagctctgcgacgccgcctgcgaaggcgagctcgaaaatgttggttgagcctccgtgcgtatattatcctttgtttatgcttgttggtgtttttccgttgacgggtgaaaaggattaaaggagtagtgatggcaacaattgataggggctggtttcagaaaattgggcacctgcctgcctggaccagtcagtaaatatttccttcaattctgcaaattttgaggtctcaacgtattcagcaacatacaatttctagagcaatgcgtagctggaatttgactatttgagacacgatcacctccccatacatcagtatggagagacatgccttgttccaaaatgacatatagtgagttaaatgctaaatctgagtgacataatgatatccatccaggtgcctatggtaactacagaatccggactgcagtacaaggatatcaaagtgggcgaagggcctagcccacccgttggtttccaggttgcagcaaattatgttgctatggtgccaactgggcagatattcgacaggtgggattcggatagctgatgcctgacgtccagctagagatctgggattttatctctacttcgtttgcaaaacacaactcaactaattattgtcttcacaatcagcttgcagacttagaatctgttcctgtagaattttgttgtttattaggccttgggggatggaagccattctagttcttactgttcttcgctgctctgtgatgcagttcgctggagaaaggtcagccctacatattccgtgttggatcagggcaggtgatcaaggggcttgatgagggaattttgtcgatgaaggttggaggactacgtcggctgtacatacctgggccagtgattagcgttcccctaagggtctttactttctgctcctgggaaggccaagagtacccccaaccagccctgtcgttgtcgacgtcaatttactgtacataccagn

SEQ ID NO: 9211 - DNA, 734 bp, Zea Mays
  misc_feature (734)..(734): n is a, c, g, or t
acgcttggcagttggcaagcagcgagtggggggagacagccaactctctatcctcttcccccctcgtccatccccatcccaccgccttgctctcccctctccacttccagctgtccatggctgcagcagcgtgctcctctgcctcgccgctcctcctcccctcaggtgcctatggtaactacagaatccggactgcagtacaaggatatcaaagtgggcgaagggcctagcccacccgttggtttccaggttgcagcaaattatgttgctatggtgccaactgggcagatattcgacaggtgggattcggatagctgatgcctgacgtccagctagagatctgggattttatctctacttcgtttgcaaaacacaactcaactaattattgtcttcacaatcagcttgcagacttagaatctgttcctgtagaattttgttgtttattaggccttgggggatggaagccattctagttcttactgttcttcgctgctctgtgatgcagttcgctggagaaaggtcagccctacatattccgtgttggatcagggcaggtgatcaaggggcttgatgagggaattttgtcgatgaaggttggaggactacgtcggctgtacatacctgggccattagcgttcccctaagggtctttactttctgctcctgggaaggccaagagtacccccaaccagccctgtcgttgtcgacgtcaatttactgtacataccagn

SEQ ID NO: 9212 - DNA, 1033 bp, Zea Mays
  misc_feature (1033)..(1033): n is a, c, g, or t
acgcttggcagttggcaagcagcgagtggggggagacagccaactctctatcctcttcccccctcgtccatccccatcccaccgccttgctctcccctctccacttccagctgtccatggctgcagcagcgtgctcctctgcctcgccgctcctcctcccctcagggccgagacatgcgtcggcctccagggcgtggtttctcggcggcaggagcagggcgctgagatcagaggcgccgtgctgctgcaaggccgccgccgcccgtggaagcgctccgcaatgcgggacggtcggtggtggcagcagcagcacccggagggggctgctaggcgtggccctgggagcctctgccttggggctggccgcgtttgacgccgtcgccgccgggttgccgccggaggagaagcccaagctctgcgacgccgcctgcgaaggcgagctcgaaaatgttggttgagcctccgtgcctatggtaactacagaatccggactgcagtacaaggatatcaaagtgggcgaagggcctagcccacccgttggtttccaggttgcagcaaattatgttgctatggtgccaactgggcagatattcgacaggtgggattcggatagctgatgcctgacgtccagctagagatctgggattttatctctacttcgtttgcaaaacacaactcaactaattattgtcttcacaatcagcttgcagacttagaatctgttcctgtagaattttgttgtttattaggccttgggggatggaagccattctagttcttactgttcttcgctgctctgtgatgcagttcgctggagaaaggtcagccctacatattccgtgttggatcagggcaggtgatcaaggggcttgatgagggaattttgtcgatgaaggttggaggactacgtcggctgtacatacctgggccattagcgttcccctaagggtctttactttctgctcctgggaaggccaagagtacccccaaccagccctgtcgttgtcgacgtcaatttactgtacataccagn

SEQ ID NO: 9213 - DNA, 1027 bp, Zea Mays
  misc_feature (1027)..(1027): n is a, c, g, or t
ctggtcgccacgcttggcagttggcaagcagcgagtggggggagacagccaactctctatcctcttcccccctcgtccatccccatcccaccgccttgctctcccctctccacttccagctgtccatggctgcagcagcgtgctcctctgcctcgccgctcctcctcccctcagggccgagacatgcgtcggcctccagggcgtggtttctcggcggcaggagcagggcgctgagatcagaggcgccgtgctgctgcaaggccgccgccgcccgtggaagcgctccgcaatgcgggacggtcggtggtggcagcagcagcacccggagggggctgctaggcgtggccctgggagcctctgccttggggctggccgcgtttgacgccgtcgccgccgggttgccgccggaggagaagcccaagctctgcgacgccgcctgcgaaggcgagctcgaaaatgtgcctatggtaactacagaatccggactgcagtacaaggatatcaaagtgggcgaagggcctagcccacccgttggtttccaggttgcagcaaattatgttgctatggtgccaactgggcagatattcgacaggtgggattcggatagctgatgcctgacgtccagctagagatctgggattttatctctacttcgtttgcaaaacacaactcaactaattattgtcttcacaatcagcttgcagacttagaatctgttcctgtagaattttgttgtttattaggccttgggggatggaagccattctagttcttactgttcttcgctgctctgtgatgcagttcgctggagaaaggtcagccctacatattccgtgttggatcagggcaggtgatcaaggggcttgatgagggaattttgtcgatgaaggttggaggactacgtcggctgtacatacctgggccattagcgttcccctaagggtctttactttctgctcctgggaaggccaagagtacccccaaccagccctgtcgttgtcgacgtcaatttactgtacataccagn

SEQ ID NO: 9214 - DNA, 851 bp, Zea Mays
  misc_feature (851)..(851): n is a, c, g, or t
gtaaaccaacgccagattctggtcgccacgcttggcagttggcaagcagcgagtggggggagacagccaactctctatcctcttcccccctcgtccatccccatcccaccgccttgctctcccctctccacttccagctgtccatggctgcagcagcgtgctcctctgcctcgccgctcctcctcccctcagggccgagacatgcgtcggcctccagggcgtggtttctcggcggcaggagcagggcgctgagatcagaggcgccgtgctgctgcaaggccgccgccgcccgtggaagcgctccgcaatgcgggacggtcggtggtggcagcagcagcacccggagggggctgctaggcgtggccctgggagcctctgccttggggctggccgcgtttgacgccgtcgccgccgggttgccgccggaggagaagcccaagctctgcgacgccgcctgcgaaggcgagctcgaaaatgttggttgagcctccgtgcctatggtaactacagaatccggactgcagtacaaggatatcaaagtgggcgaagggcctagcccacccgttggtttccaggttgcagcaaattatgttgctatggtgccaactgggcagatattcgacagttcgctggagaaaggtcagccctacatattccgtgttggatcagggcaggtgatcaaggggcttgatgagggaattttgtcgatgaaggttggaggactacgtcggctgtacatacctgggccattagcgttcccctaagggtctttactttctgctcctgggaaggccaagagtacccccaaccagccctgtcgttgtcgacgtcaatttactgtacataccagn

SEQ ID NO: 9215 - DNA, 3413 bp, Zea Mays
cctaggtaactgtaacttgaaactcttttgcaactgaatttataataaaataataataaagaaggttttggggcttcctcgactgacctgcccatacttggaactccactccagtttactaccctcctccgtcgaaagcgacgcctcaccgcaacacaaggccgcccgcggacactgggtcggcggggcccgcacctccttggctcctttccacgcagcttttccacagcacagttgccatctgtcctcgccggcgcaggagcagcctgccctgcctcgcgtgcgaccctcctctgctttttagagagagacagcgagcacgcgcagaggagaggagagagaagcaccacgcctcccaggctcccagcgcgcacgcaccagggtccaggagaggaggacaccgtcgcctcctggttggttcatctcgtcagtcgtcaccgcctcctgcagccaaccggcggggattcctgtcctggatgcgacaaggccagcaggagagaccctccccctctccttcttctccctgagcaggaagcggaaagccttccgcgcttttcaaagatcgtaggccgcacgcctgcagcagccgccgactcagggcgagcgttgagaggaggacgaagaagagactgaagaagagcagaccgaagtgaggccggaggaagggatcgggccttgcgggattcggcagtccatcacgaggtaaatgcggcgctaggagctgcagcgatggcgtcgctggtacccggggtcctcctcaagctcctgcagcacatgaacagcgacgtcaaggtcgcgggcgagcaccggtcgtcgctgctccaggtcgtcagcatcgtgcccgcgctcgccgggagcgacctgttcaccaaccaggggttctacctcaaggtgtccgactcgtcgcacgccacctacgtgtcgctgccggacgagcagcacgacctcatcctcagcgacgtcatccagctggggcagttcgtccatgtcgaccgtctcgaggcagccaccccggtgccgatcctcaggggggtcaggccggtcccgggccgccatgcctgcgtcggcagcccggaggatcttgtggtgaccagctcctccacttttcttcttggcagcggcaaggccgcccaagcctcctccaccaatggtagttccaaggatgccggtgccctgtcgctagagaaagagcagggcaggttagagaagatcaatgctcctcccaagagcaacggcacagagagcaagaagccccagctcaccaagtcgaactccaacctctcgaaacaggcgctcaatggcctcctctcggacaagaaggacgtggttagctcgaaggcaaaatcaaccagcgctaggtcgacgccgtcttccccgaccagcgcccattctctgcctgcgtcgttcgataaattctcgagtgacatgaaacagagagtgagaaccaaaggagcagagaaatcgccgccgtcaaggctgtccttgctagaaaaggctgcgtctgtgttgaaggccactacggcagggaggaagtcctccctgggtaactccattagtaacaccttgttgagcttcgaatctgggcccaaggccttgagaagaagctgggaagggaaagcagatgcaaaggacaaaggcaattcggattcaaagcctgccaaagctgaaaagaagtctgaaaatcgaagctcttcggtaagtgtcaacaatgccatgtcatatacagcatgggtatataatacttgtgaagttttcatcaatgtaggatcaacaacatcaattctgaacgttttcatcaatatatgatcaagaacctgaccatatgtgtctcttgttaggaacatgtagactgtagtattgcttcaactcatcagtgcccctattaatgtcttatgtccatgcagcatgtttagtaaataacctttgttgattctcccatgttcagactcccagacgaaaatcattagcagaagagaaaccatcgaataaggatgacagtaagattctgactccacccaggaagagctcagcgagtgctcctgcagacgattccgacaaagttgtgaacaacaagctttcttctcctataaggaggacatcaggggttttaaataacccgaatgtcactaatctagtgaaggttgctgcaagtaacaggaaactgacagatgctagcgcttcgtggacaacgcttcctccatcactcgttaaactagggaaggagcttctgaagtacagggatgcagcacaaatggctgctgttgaagccatgcaagaagcttctgcggcagagagcatcgttcgatgtttaagctcgtacgcggaggtgagctcgtcggcggaggagcagaacccacagcaggctgtcgagcagttcctcgctctgcatggagcaatctctcgagccaccatcgtcaccgagtctctaaccaaggccacgaccacggtctccaccgcgacttcaccagatcaatcagcagccggcgatgcgtcaacagccgacgaggaaaccatggctgtcgcggcggagcgccgccgccgggcagcctcctgggtcggcgccggcctcgccaccgatctctccgccttctccctctacaacctgaaacccgccccagccagtgtcatctccccgctggccgtcgtgctcgtggacgagtcagccaagccggcggcggcgaaggcagtgccgcccgcgaagtcgcggctgtccccggcgaaggggaggttgaaagctggttccgcggccgccgccgccgccgccgccgctgcggcggcggcagcagtgcctccgcctgaatgggagcggggaggcggcgcggaggagcggggcgagcttgcgcggcggctcggggacgaggcacgggcgtggttcctggcgttcgtggagcggttcctggacgcggacgttgcggcggccgcgccgtgggaccgcgaccgcgccgcgaggatgctcccgcagcttaagcgcgtcaacgactggctgagcgagatcgggaagtcggcagagatggcgccgcatccgccaccggaagcggacggcgaagcggcggcacccactgccaacggcggcgcggccagcggcgtgccggaggagacgatagagaggctcaggaagaagatctacgagtacctcctcaccaacgtggactctgctgccgccgtgctcggcggctgcgagatggcgccggcaccggtggcgaacgggaagaaggggtgacgatagtgggccgcgaaggaaggcccaattgggccgttaacttggctgagccaaaacatgggccggtctggatttaaatgtaaaaatgggctggattgagattgcagtggttgttttggtacttttttctggtgttacagaaagtaaaaaaaatatatttttgtccctctctccttcaattctgaaaccgaaa

SEQ ID NO: 9216 - DNA, 3065 bp, Zea Mays
cctaggtaactgtaacttgaaactcttttgcaactgaatttataataaaataataataaagaaggttttggggcttcctcgactgacctgcccatacttggaactccactccagtttactaccctcctccgtcgaaagcgacgcctcaccgcaacacaaggccgcccgcggacactgggtcggcggggcccgcacctccttggctcctttccacgcagcttttccacagcacagttgccatctgtcctcgccggcgcaggagcagcctgccctgcctcgcgtgcgaccctcctctgctttttagagagagacagcgagcacgcgcagaggagaggagagagaagcaccacgcctcccaggctcccagcgcgcacgcaccagggtccaggagaggaggacaccgtcgcctcctggttggttcatctcgtcagtcgtcaccgcctcctgcagccaaccggcggggattcctgtcctggatgcgacaaggccagcaggagagaccctccccctctccttcttctccctgagcaggaagcggaaagccttccgcgcttttcaaagatcgtaggccgcacgcctgcagcagccgccgactcagggcgagcgttgagaggaggacgaagaagagactgaagaagagcagaccgaagtgaggccggaggaagggatcgggccttgcgggattcggcagtccatcacgaggtaaatgcggcgctaggagctgcagcgatggcgtcgctggtacccggggtcctcctcaagctcctgcagcacatgaacagcgacgtcaaggtcgcgggcgagcaccggtcgtcgctgctccaggtcgtcagcatcgtgcccgcgctcgccgggagcgacctgttcaccaaccaggggttctacctcaaggtgtccgactcgtcgcacgccacctacgtgtcgctgccggacgagcagcacgacctcatcctcagcgacgtcatccagctggggcagttcgtccatgtcgaccgtctcgaggcagccaccccggtgccgatcctcaggggggtcaggccggtcccgggccgccatgcctgcgtcggcagcccggaggatcttgtggtgaccagctcctccacttttcttcttggcagcggcaaggccgcccaagcctcctccaccaatggtagttccaaggatgccggtgccctgtcgctagagaaagagcagggcaggttagagaagatcaatgctcctcccaagagcaacggcacagagagcaagaagccccagctcaccaagtcgaactccaacctctcgaaacaggcgctcaatggcctcctctcggacaagaaggacgtggttagctcgaaggcaaaatcaaccagcgctaggtcgacgccgtcttccccgaccagcgcccattctctgcctgcgtcgttcgataaattctcgagtgacatgaaacagagagtgagaaccaaaggagcagagaaatcgccgccgtcaaggctgtccttgctagaaaaggctgcgtctgtgttgaaggccactacggcagggaggaagtcctccctgggtaactccattagtaacaccttgttgagcttcgaatctgggcccaaggccttgagaagaagctgggaagggaaagcagatgcaaaggacaaaggcaattcggattcaaagcctgccaaagctgaaaagaagtctgaaaatcgaagctcttcgactcccagacgaaaatcattagcagaagagaaaccatcgaataaggatgacagtaagattctgactccacccaggaagagctcagcgagtgctcctgcagacgattccgacaaagaaactgacagatgctagcgcttcgtggacaacgcttcctccatcactcgttaaactagggaaggagcttctgaagtacagggatgcagcacaaatggctgctgttgaagccatgcaagaagcttctgcggcagagagcatcgttcgatgtttaagctcgtacgcggaggtgagctcgtcggcggaggagcagaacccacagcaggctgtcgagcagttcctcgctctgcatggagcaatctctcgagccaccatcgtcaccgagtctctaaccaaggccacgaccacggtctccaccgcgacttcaccagatcaatcagcagccggcgatgcgtcaacagccgacgaggaaaccatggctgtcgcggcggagcgccgccgccgggcagcctcctgggtcggcgccggcctcgccaccgatctctccgccttctccctctacaacctgaaacccgccccagccagtgtcatctccccgctggccgtcgtgctcgtggacgagtcagccaagccggcggcggcgaaggcagtgccgcccgcgaagtcgcggctgtccccggcgaaggggaggttgaaagctggttccgcggccgccgccgccgccgccgccgctgcggcggcggcagcagtgcctccgcctgaatgggagcggggaggcggcgcggaggagcggggcgagcttgcgcggcggctcggggacgaggcacgggcgtggttcctggcgttcgtggagcggttcctggacgcggacgttgcggcggccgcgccgtgggaccgcgaccgcgccgcgaggatgctcccgcagcttaagcgcgtcaacgactggctgagcgagatcgggaagtcggcagagatggcgccgcatccgccaccggaagcggacggcgaagcggcggcacccactgccaacggcggcgcggccagcggcgtgccggaggagacgatagagaggctcaggaagaagatctacgagtacctcctcaccaacgtggactctgctgccgccgtgctcggcggctgcgagatggcgccggcaccggtggcgaacgggaagaaggggtgacgatagtgggccgcgaaggaaggcccaattgggccgttaacttggctgagccaaaacatgggccggtctggatttaaatgtaaaaatgggctggattgagattgcagtggttgttttggtacttttttctggtgttacagaaagtaaaaaaaatatatttttgtccctctctccttcaattctgaaaccgaaa

SEQ ID NO: 9217 - DNA, 3396 bp, Zea Mays
cctaggtaactgtaacttgaaactcttttgcaactgaatttataataaaataataataaagaaggttttggggcttcctcgactgacctgcccatacttggaactccactccagtttactaccctcctccgtcgaaagcgacgcctcaccgcaacacaaggccgcccgcggacactgggtcggcggggcccgcacctccttggctcctttccacgcagcttttccacagcacagttgccatctgtcctcgccggcgcaggagcagcctgccctgcctcgcgtgcgaccctcctctgctttttagagagagacagcgagcacgcgcagaggagaggagagagaagcaccacgcctcccaggctcccagcgcgcacgcaccagggtccaggagaggaggacaccgtcgcctcctggttggttcatctcgtcagtcgtcaccgcctcctgcagccaaccggcggggattcctgtcctggatgcgacaaggccagcaggagagaccctccccctctccttcttctccctgagcaggaagcggaaagccttccgcgcttttcaaagatcgtaggccgcacgcctgcagcagccgccgactcagggcgagcgttgagaggaggacgaagaagagactgaagaagagcagaccgaagtgaggccggaggaagggatcgggccttgcgggattcggcagtccatcacgaggtaaatgcggcgctaggagctgcagcgatggcgtcgctggtacccggggtcctcctcaagctcctgcagcacatgaacagcgacgtcaaggtcgcgggcgagcaccggtcgtcgctgctccaggtcgtcagcatcgtgcccgcgctcgccgggagcgacctgttcaccaaccaggggttctacctcaaggtgtccgactcgtcgcacgccacctacgtgtcgctgccggacgagcagcacgacctcatcctcagcgacgtcatccagctggggcagttcgtccatgtcgaccgtctcgaggcagccaccccggtgccgatcctcaggggggtcaggccggtcccgggccgccatgcctgcgtcggcagcccggaggatcttgtggtgaccagctcctccacttttcttcttggcagcggcaaggccgcccaagcctcctccaccaatggtagttccaaggatgccggtgccctgtcgctagagaaagagcagggcaggttagagaagatcaatgctcctcccaagagcaacggcacagagagcaagaagccccagctcaccaagtcgaactccaacctctcgaaacaggcgctcaatggcctcctctcggacaagaaggacgtggttagctcgaaggcaaaatcaaccagcgctaggtcgacgccgtcttccccgaccagcgcccattctctgcctgcgtcgttcgataaattctcgagtgacatgaaacagagagtgagaaccaaaggagcagagaaatcgccgccgtcaaggctgtccttgctagaaaaggctgcgtctgtgttgaaggccactacggcagggaggaagtcctccctgggtaactccattagtaacaccttgttgagcttcgaatctgggcccaaggccttgagaagaagctgggaagggaaagcagatgcaaaggacaaaggcaattcggattcaaagcctgccaaagctgaaaagaagtctgaaaatcgaagctcttcggtaagtgtcaacaatgccatgtcatatacagcatgggtatataatacttgtgaagttttcatcaatgtaggatcaacaacatcaattctgaacgttttcatcaatatatgatcaagaacctgaccatatgtgtctcttgttaggaacatgtagactgtagtattgcttcaactcatcagtgcccctattaatgtcttatgtccatgcagcatgtttagtaaataacctttgttgattctcccatgttcagactcccagacgaaaatcattagcagaagagaaaccatcgaataaggatgacagtaagattctgactccacccaggaagagctcagcgagtgctcctgcagacgattccgacaaagttgtgaacaacaagctttcttctcctataaggaggacatcaggggttttaaataacccgaatgtcactaatctagtgaaggttgctgcaagtaacaggaaactgacagatgctagcgcttcgtggacaacgcttcctccatcactcgttaaactagggaagggatgcagcacaaatggctgctgttgaagccatgcaagaagcttctgcggcagagagcatcgttcgatgtttaagctcgtacgcggaggtgagctcgtcggcggaggagcagaacccacagcaggctgtcgagcagttcctcgctctgcatggagcaatctctcgagccaccatcgtcaccgagtctctaaccaaggccacgaccacggtctccaccgcgacttcaccagatcaatcagcagccggcgatgcgtcaacagccgacgaggaaaccatggctgtcgcggcggagcgccgccgccgggcagcctcctgggtcggcgccggcctcgccaccgatctctccgccttctccctctacaacctgaaacccgccccagccagtgtcatctccccgctggccgtcgtgctcgtggacgagtcagccaagccggcggcggcgaaggcagtgccgcccgcgaagtcgcggctgtccccggcgaaggggaggttgaaagctggttccgcggccgccgccgccgccgccgccgctgcggcggcggcagcagtgcctccgcctgaatgggagcggggaggcggcgcggaggagcggggcgagcttgcgcggcggctcggggacgaggcacgggcgtggttcctggcgttcgtggagcggttcctggacgcggacgttgcggcggccgcgccgtgggaccgcgaccgcgccgcgaggatgctcccgcagcttaagcgcgtcaacgactggctgagcgagatcgggaagtcggcagagatggcgccgcatccgccaccggaagcggacggcgaagcggcggcacccactgccaacggcggcgcggccagcggcgtgccggaggagacgatagagaggctcaggaagaagatctacgagtacctcctcaccaacgtggactctgctgccgccgtgctcggcggctgcgagatggcgccggcaccggtggcgaacgggaagaaggggtgacgatagtgggccgcgaaggaaggcccaattgggccgttaacttggctgagccaaaacatgggccggtctggatttaaatgtaaaaatgggctggattgagattgcagtggttgttttggtacttttttctggtgttacagaaagtaaaaaaaatatatttttgtccctctctccttcaattctgaaaccgaaa

SEQ ID NO: 9218 - DNA, 4174 bp, Zea Mays
ataaaacgaaactagaataaaatctctacaacagcctaggtaactgtaacttgaaactcttttgcaactgaatttataataaaataataataaagaaggttttggggcttcctcgactgacctgcccatacttggaactccactccagtttactaccctcctccgtcgaaagcgacgcctcaccgcaacacaaggccgcccgcggacactgggtcggcggggcccgcacctccttggctcctttccacgcagcttttccacagcacagttgccatctgtcctcgccggcgcaggagcagcctgccctgcctcgcgtgcgaccctcctctgctttttagagagagacagcgagcacgcgcagaggagaggagagagaagcaccacgcctcccaggctcccagcgcgcacgcaccagggtccaggagaggaggacaccgtcgcctcctggttggttcatctcgtcagtcgtcaccgcctcctgcagccaaccggcggggattcctgtcctggatgcgacaaggccagcaggagagaccctccccctctccttcttctccctgagcaggaagcggaaagccttccgcgcttttcaaagatcgtaggccgcacgcctgcagcagccgccgactcagggcgagcgttgagaggaggacgaagaagagactgaagaagagcagaccgaagtgaggccggaggaagggatcgggccttgcgggattcggcagtccatcacgaggtgtgtttgcttctcctcctccttacccatcgtcttctcgtctcgactcccatcaccttctcgtctctagagtcgagactggcggccatgcgctagtacccgtatccctttccggacccaattgaatgcccttgcgacgaacaacgccgtccttactcattgtagccaccgtttctagtacacctctttactagttcacctcctcctccttacggcactgtgctctgcctttgctgttggcttcacaagattgtttgctttcttgttaattagcatgggaaaaaaaagggtgaaatctgttttgatctacctgaacttgttgctcatttcgctcgccaaggctaccgacatgctcatctggatttgctgctctggttgtaaagccgcgcgcgcgcagcctttatttgcattaggtagcttggagtgatccgcttttgccatggctaccgacaacatcattgttctctcagaaggctccactgcttagcctacatattggagtggggttactgaaccagggctcaacactgcgcaggtaaatgcggcgctaggagctgcagcgatggcgtcgctggtacccggggtcctcctcaagctcctgcagcacatgaacagcgacgtcaaggtcgcgggcgagcaccggtcgtcgctgctccaggtcgtcagcatcgtgcccgcgctcgccgggagcgacctgttcaccaaccaggggttctacctcaaggtgtccgactcgtcgcacgccacctacgtgtcgctgccggacgagcagcacgacctcatcctcagcgacgtcatccagctggggcagttcgtccatgtcgaccgtctcgaggcagccaccccggtgccgatcctcaggggggtcaggccggtcccgggccgccatgcctgcgtcggcagcccggaggatcttgtggtgaccagctcctccacttttcttcttggcagcggcaaggccgcccaagcctcctccaccaatggtagttccaaggatgccggtgccctgtcgctagagaaagagcagggcaggttagagaagatcaatgctcctcccaagagcaacggcacagagagcaagaagccccagctcaccaagtcgaactccaacctctcgaaacaggcgctcaatggcctcctctcggacaagaaggacgtggttagctcgaaggcaaaatcaaccagcgctaggtcgacgccgtcttccccgaccagcgcccattctctgcctgcgtcgttcgataaattctcgagtgacatgaaacagagagtgagaaccaaaggagcagagaaatcgccgccgtcaaggctgtccttgctagaaaaggctgcgtctgtgttgaaggccactacggcagggaggaagtcctccctgggtaactccattagtaacaccttgttgagcttcgaatctgggcccaaggccttgagaagaagctgggaagggaaagcagatgcaaaggacaaaggcaattcggattcaaagcctgccaaagctgaaaagaagtctgaaaatcgaagctcttcggtaagtgtcaacaatgccatgtcatatacagcatgggtatataatacttgtgaagttttcatcaatgtaggatcaacaacatcaattctgaacgttttcatcaatatatgatcaagaacctgaccatatgtgtctcttgttaggaacatgtagactgtagtattgcttcaactcatcagtgcccctattaatgtcttatgtccatgcagcatgtttagtaaataacctttgttgattctcccatgttcagactcccagacgaaaatcattagcagaagagaaaccatcgaataaggatgacagtaagattctgactccacccaggaagagctcagcgagtgctcctgcagacgattccgacaaagttgtgaacaacaagctttcttctcctataaggaggacatcaggggttttaaataacccgaatgtcactaatctagtgaaggttgctgcaagtaacaggaaactgacagatgctagcgcttcgtggacaacgcttcctccatcactcgttaaactagggaaggtatttgccagctgagcccctgtgttgctgttgacgttctacgcatatacattaccaaagaaaataatggctgtgataattattttagaaaaaaaagaaggggacgatagtatatcatttcaccacatggtaggggaatgcttccggttattcatttggtgtttaagcttaatgagatgtctgttgtcataggagcttctgaagtacagggatgcagcacaaatggctgctgttgaagccatgcaagaagcttctgcggcagagagcatcgttcgatgtttaagctcgtacgcggaggtgagctcgtcggcggaggagcagaacccacagcaggctgtcgagcagttcctcgctctgcatggagcaatctctcgagccaccatcgtcaccgagtctctaaccaaggccacgaccacggtctccaccgcgacttcaccagatcaatcagcagccggcgatgcgtcaacagccgacgaggaaaccatggctgtcgcggcggagcgccgccgccgggcagcctcctgggtcggcgccggcctcgccaccgatctctccgccttctccctctacaacctgaaacccgccccagccagtgtcatctccccgctggccgtcgtgctcgtggacgagtcagccaagccggcggcggcgaaggcagtgccgcccgcgaagtcgcggctgtccccggcgaaggggaggttgaaagctggttccgcggccgccgccgccgccgccgccgctgcggcggcggcagcagtgcctccgcctgaatgggagcggggaggcggcgcggaggagcggggcgagcttgcgcggcggctcggggacgaggcacgggcgtggttcctggcgttcgtggagcggttcctggacgcggacgttgcggcggccgcgccgtgggaccgcgaccgcgccgcgaggatgctcccgcagcttaagcgcgtcaacgactggctgagcgagatcgggaagtcggcagagatggcgccgcatccgccaccggaagcggacggcgaagcggcggcacccactgccaacggcggcgcggccagcggcgtgccggaggagacgatagagaggctcaggaagaagatctacgagtacctcctcaccaacgtggactctgctgccgccgtgctcggcggctgcgagatggcgccggcaccggtggcgaacgggaagaaggggtgacgatagtgggccgcgaaggaaggcccaattgggccgttaacttggctgagccaaaacatgggccggtctggatttaaatgtaaaaatgggctggattgagattgcagtggttgttttggtacttttttctggtgttacagaaagtaaaaaaaatatatttttgtccctctctccttcaattctgaaaccgaaa

SEQ ID NO: 9219 - DNA, 2620 bp, Zea Mays
gatgctcagcacacttatatgatgcattgttctctcagttttttccagcctgtataatgataagacacagggagcaactgcatgagcgggagcaatacattcttgaactagaaatgaaactcaatgacaaggatagagaactaaatgctctgaagattgatcatcaaacggtgtgggcaaatcaagatcttattagagaacagaccaaagagctggcaactgtcagaagggaacgcgacaactctgaagctgaaagagcccaacatcttacacaaattcatgagctccaagaacatctgcgagaaaaagaaagccagttcattgcattagaggaacagcatagggctgctcaagacaacattctttacaaagatgagcagttgagggaagcccatgcttgggtatctcaagttcgagaaatggatgctttgcagtctcaatccctacaagttgagttacgtgagcgcatggagcaatttaatcaatattggattagctcccagcagcagtatgctgaaatgcagcggagtcttctccatacaatacaacaactccagcaagaattaactgaggcaagggaacagtctggtgcacaaaaagatggtccacaagtttctcgggaagggtcagctgaatcatcactagttcaaagcatgggaaacagcgtggcttcaaatggtagtgcaactgcagatgggaaccagcaattgttgaaaaataatggaagcgtggatgtctctgttcaggccaatagtgcctcagctgtacctgttccttcttccctactgggaatcggtggtccggctgcgcatatcgctgcgatgcatgcttttatgattcatcctcaaggcattcctcaacccttagtagcatcacccaactctggtgttcctcaatttggcagttttcagtctcagtctacaattcaaccaaattcacaatggccaaatcagcaggaagtacaaaatgtctcacaaccacaagatgaaacaaactatcagacatcccaatcagaccggactgttttacaacaaggcgctattaatactgatgagttgtcctcaaagccaagccaggatagtcagccagaccatcttaatgcccatgtgaaacaacagcagagccctgcaagtgcacctactgaatcaactcatgaacttactgttgttgaagcgaatgtagctgaacatgtatcttgtgacgaacaacaaaaaatcttaaacgaacaggattcactgtcaaatatgaacaaccatattggaatagttgagcatctagagcaaaataccgaatccaaggtttctatggatgaaagagctgcatctgataagcaacctgaacctgtatctaggcagcataaacatttgaactttcctccgttcactacccagattcacttgaaaaagagtgcaacagagaatcctaatgttgtaaatcaggttgatataatgaaatcagttgcaggtggttttagttcgcagttacctcgtgcaccaaaggaaccttctctcctagatgagagatctctattggcttgcattgtacgtgcagttcctgctgggactgagggtggaatcaggataagttcaactctgccaaataggcttgggaaaatgttggctccccttcactggcatgactataagaagcaatacgggaagctcgacgattttgtggctagtcatccagagctgtttgtgattgagggagacttcattcaccttcgtgatggagcacagcagattatttctgccactacagctgctgcaaaaatagctgctgcgacagcatcttctgcctcttactcatccttactgccttctgttgccgttactcctgtggcacaaaatactcggcaaaagaggaggcccgcagttgattccagatcatcaaatgcaattccctctggaaacggcttcacagatcaatttaacatcattcagggtgtcagcgacgtaacaatttcaggcaaagtaagaaatatccaagataatggcttcatagatgaagttcgcactgggcagccatccgtgctcacagctgctactgccaacggagcaagacatgacaaatgtgcaaataataccagacatggttatggtggaaaacaacaggggaggcgatgatgctgttggaattggaaaccatgcgagtggcgatgatgcggttggggaaaccatacgagtgacgatgctttggcttcgaaatgatggtgaagatgacctggattaaagttattctagattcattttttattttgcactattggtcttcacagagcctgtatggttgggggccttgttttggcaaagctgtactgatatatccctaccccaagaatcagaagcctgccaaagttttgcgactatgtacctcgtctgcgcttgtgtattgtggtgcacttgaatgatgcgaatgttatatcgaatccccgtccttgatcgtgatgttcttgaacgttcacctctgggaaattaactcgcatggtgagctgagctcgtgatcggtggcatggtcgatccaaggtcgggtgtcattgttgtatggtcgagctggacatgtaggctctgttactatttaggtaactatttagaccttattccaaaaagttagtagagat

SEQ ID NO: 9220 - DNA, 2628 bp, Zea Mays
gatgctcagcacacttatatgatgcattgttctctcagttttttccagcctgtataatgataagacacagggagcaactgcatgagcgggagcaatacattcttgaactagaaatgaaactcaatgacaaggatagagaactaaatgctctgaagattgatcatcaaacggtgtgggcaaatcaagatcttattagagaacagaccaaagagctggcaactgtcagaagggaacgcgacaactctgaagctgaaagagcccaacatcttacacaaattcatgagctccaagaacatctgcgagaaaaagaaagccagttcattgcattagaggaacagcatagggctgctcaagacaacattctttacaaagatgagcagttgagggaagcccatgcttgggtatctcaagttcgagaaatggatgctttgcagtctcaatccctacaagttgagttacgtgagcgcatggagcaatttaatcaatattggattagctcccagcagcagtatgctgaaatgcagcggagtcttctccatacaatacaacaactccagcaagaattaactgaggcaagggaacagtctggtgcacaaaaagatggtccacaagtttctcgggaagggtcagctgaatcatcactagttcaaagcatgggaaacagcgtggcttcaaatggtagtgcaactgcagatgggaaccagcaattgttgaaaaataatggaagcgtggatgtctctgttcaggccaatagtgcctcagctgtacctgttccttcttccctactgggaatcggtggtccggctgcgcatatcgctgcgatgcatgcttttatgattcatcctcaaggcattcctcaacccttagtagcatcacccaactctggtgttcctcaatttggcagttttcagtctcagtctacaattcaaccaaattcacaatggccaaatcagcaggaagtacaaaatgtctcacaaccacaagatgaaacaaactatcagacatcccaatcagaccggactgttttacaacaaggcgctattaatactgatgagttgtcctcaaagccaagccaggatagtcagccagaccatcttaatgcccatgtgaaacaacagcagagccctgcaagttgttgaagcgaatgtagctgaacatgtatcttgtgacgaacaacaaaaaatcttaaacgaacaggattcactgtcaaatatgaacaaccatattggaatagttgagcatctagagcaaaataccgaatccaaggatgaaagagctgcatctgataagcaacctgaacctgtatctaggcagcataaacatttgaactttcctccgttcactacccagattcacttgaaaaagagtgcaacagagaatcctaatgttgtaaatcaggttgatataatgaaatcagttgcaggtggttttagttcgcagttacctcgtgcaccaaaggaaccttctctcctagatgagagatctctattggcttgcattgtacgtgcagttcctgctgggactgagggtggaatcaggataagttcaactctgccaaataggcttgggaaaatgttggctccccttcactggcatgactataagaagcaatacgggaagctcgacgattttgtggctagtcatccagagctgtttgtgattgagggagacttcattcaccttcgtgatggagcacagcagattatttctgccactacagctgctgcaaaaatagctgctgcgacagcatcttctgcctcttactcatccttactgccttctgttgccgttactcctgtggcacaaaatactcggcaaaagaggaggcccgcagttgattccagatcatcaaatgcaattccctctggaaacggcttcacagatcaatttaacatcattcagggtgtcagcgacgtaacaatttcaggcaaagtaagaaatatccaagataatggcttcatagatgaagttcgcactgggcagccatccgtgctcacagctgctactgccaacggagcaagacatgacaaatgtgcaaataataccagacatggttatggtggaaaacaacaggggaggaccactgggacgacatacctttccagaagatgaaccaactttcactgggcgatgatgctgttggaattggaaaccatgcgagtggcgatgatgcggttggggaaaccatacgagtgacgatgctttggcttcgaaatgatggtgaagatgacctggattaaagttattctagattcattttttattttgcactattggtcttcacagagcctgtatggttgggggccttgttttggcaaagctgtactgatatatccctaccccaagaatcagaagcctgccaaagttttgcgactatgtacctcgtctgcgcttgtgtattgtggtgcacttgaatgatgcgaatgttatatcgaatccccgtccttgatcgtgatgttcttgaacgttcacctctgggaaattaactcgcatggtgagctgagctcgtgatcggtggcatggtcgatccaaggtcgggtgtcattgttgtatggtcgagctggacatgtaggctctgttactatttaggtaactatttagaccttattccaaaaagttagtagagat

SEQ ID NO: 9221 - DNA, 2652 bp, Zea Mays
gatgctcagcacacttatatgatgcattgttctctcagttttttccagcctgtataatgataagacacagggagcaactgcatgagcgggagcaatacattcttgaactagaaatgaaactcaatgacaaggatagagaactaaatgctctgaagattgatcatcaaacggtgtgggcaaatcaagatcttattagagaacagaccaaagagctggcaactgtcagaagggaacgcgacaactctgaagctgaaagagcccaacatcttacacaaattcatgagctccaagaacatctgcgagaaaaagaaagccagttcattgcattagaggaacagcatagggctgctcaagacaacattctttacaaagatgagcagttgagggaagcccatgcttgggtatctcaagttcgagaaatggatgctttgcagtctcaatccctacaagttgagttacgtgagcgcatggagcaatttaatcaatattggattagctcccagcagcagtatgctgaaatgcagcggagtcttctccatacaatacaacaactccagcaagaattaactgaggcaagggaacagtctggtgcacaaaaagatggtccacaagtttctcgggaagggtcagctgaatcatcactagttcaaagcatgggaaacagcgtggcttcaaatggtagtgcaactgcagatgggaaccagcaattgttgaaaaataatggaagcgtggatgtctctgttcagtgcctcagctgtacctgttccttcttccctactgggaatcggtggtccggctgcgcatatcgctgcgatgcatgcttttatgattcatcctcaaggcattcctcaacccttagtagcatcacccaactctggtgttcctcaatttggcagttttcagtctcagtctacaattcaaccaaattcacaatggccaaatcagcaggaagtacaaaatgtctcacaaccacaagatgaaacaaactatcagacatcccaatcagaccggactgttttacaacaaggcgctattaatactgatgagttgtcctcaaagccaagccaggatagtcagccagaccatcttaatgcccatgtgaaacaacagcagagccctgcaagtgcacctactgaatcaactcatgaacttactgttgttgaagcgaatgtagctgaacatgtatcttgtgacgaacaacaaaaaatcttaaacgaacaggattcactgtcaaatatgaacaaccatattggaatagttgagcatctagagcaaaataccgaatccaaggatgaaagagctgcatctgataagcaacctgaacctgtatctaggcagcataaacatttgaactttcctccgttcactacccagattcacttgaaaaagagtgcaacagagaatcctaatgttgtaaatcaggttgatataatgaaatcagttgcaggtggttttagttcgcagttacctcgtgcaccaaaggaaccttctctcctagatgagagatctctattggcttgcattgtacgtgcagttcctgctgggactgagggtggaatcaggataagttcaactctgccaaataggcttgggaaaatgttggctccccttcactggcatgactataagaagcaatacgggaagctcgacgattttgtggctagtcatccagagctgtttgtgattgagggagacttcattcaccttcgtgatggagcacagcagattatttctgccactacagctgctgcaaaaatagctgctgcgacagcatcttctgcctcttactcatccttactgccttctgttgccgttactcctgtggcacaaaatactcggcaaaagaggaggcccgcagttgattccagatcatcaaatgcaattccctctggaaacggcttcacagatcaatttaacatcattcagggtgtcagcgacgtaacaatttcaggcaaagtaagaaatatccaagataatggcttcatagatgaagttcgcactgggcagccatccgtgctcacagctgctactgccaacggagcaagacatgacaaatgtgcaaataataccagacatggttatggtggaaaacaacaggggaggaccactgggacgacatacctttccagaagatgaaccaactttcactgggcgatgatgctgttggaattggaaaccatgcgagtggcgatgatgcggttggggaaaccatacgagtgacgatgctttggcttcgaaatgatggtgaagatgacctggattaaagttattctagattcattttttattttgcactattggtcttcacagagcctgtatggttgggggccttgttttggcaaagctgtactgatatatccctaccccaagaatcagaagcctgccaaagttttgcgactatgtacctcgtctgcgcttgtgtattgtggtgcacttgaatgatgcgaatgttatatcgaatccccgtccttgatcgtgatgttcttgaacgttcacctctgggaaattaactcgcatggtgagctgagctcgtgatcggtggcatggtcgatccaaggtcgggtgtcattgttgtatggtcgagctggacatgtaggctctgttactatttaggtaactatttagaccttattccaaaaagttagtagagat

SEQ ID NO: 9222 - DNA, 2750 bp, Zea Mays
gttgaattgtactgttgaaatcgaaatggatgagcagtgtcatgccatgctcgtggagggtgtagctttgttggtatcattgcgctttttaacatatatgcagatggacaaatttgattagtagttgatgctcagcacacttatatgatgcattgttctctcagttttttccagcctgtataatgataagacacagggagcaactgcatgagcgggagcaatacattcttgaactagaaatgaaactcaatgacaaggatagagaactaaatgctctgaagattgatcatcaaacggtgtgggcaaatcaagatcttattagagaacagaccaaagagctggcaactgtcagaagggaacgcgacaactctgaagctgaaagagcccaacatcttacacaaattcatgagctccaagaacatctgcgagaaaaagaaagccagttcattgcattagaggaacagcatagggctgctcaagacaacattctttacaaagatgagcagttgagggaagcccatgcttgggtatctcaagttcgagaaatggatgctttgcagtctcaatccctacaagttgagttacgtgagcgcatggagcaatttaatcaatattggattagctcccagcagcagtatgctgaaatgcagcggagtcttctccatacaatacaacaactccagcaagaattaactgaggcaagggaacagtctggtgcacaaaaagatggtccacaagtttctcgggaagggtcagctgaatcatcactagttcaaagcatgggaaacagcgtggcttcaaatggtagtgcaactgcagatgggaaccagcaattgttgaaaaataatggaagcgtggatgtctctgttcaggccaatagtgcctcagctgtacctgttccttcttccctactgggaatcggtggtccggctgcgcatatcgctgcgatgcatgcttttatgattcatcctcaaggcattcctcaacccttagtagcatcacccaactctggtgttcctcaatttggcagttttcagtctcagtctacaattcaaccaaattcacaatggccaaatcagcaggaagtacaaaatgtctcacaaccacaagatgaaacaaactatcagacatcccaatcagaccggactgttttacaacaaggcgctattaatactgatgagttgtcctcaaagccaagccaggatagtcagccagaccatcttaatgcccatgtgaaacaacagcagagccctgttgttgaagcgaatgtagctgaacatgtatcttgtgacgaacaacaaaaaatcttaaacgaacaggattcactgtcaaatatgaacaaccatattggaatagttgagcatctagagcaaaataccgaatccaaggatgaaagagctgcatctgataagcaacctgaacctgtatctaggcagcataaacatttgaactttcctccgttcactacccagattcacttgaaaaagagtgcaacagagaatcctaatgttgtaaatcaggttgatataatgaaatcagttgcaggtggttttagttcgcagttacctcgtgcaccaaaggaaccttctctcctagatgagagatctctattggcttgcattgtacgtgcagttcctgctgggactgagggtggaatcaggataagttcaactctgccaaataggcttgggaaaatgttggctccccttcactggcatgactataagaagcaatacgggaagctcgacgattttgtggctagtcatccagagctgtttgtgattgagggagacttcattcaccttcgtgatggagcacagcagattatttctgccactacagctgctgcaaaaatagctgctgcgacagcatcttctgcctcttactcatccttactgccttctgttgccgttactcctgtggcacaaaatactcggcaaaagaggaggcccgcagttgattccagatcatcaaatgcaattccctctggaaacggcttcacagatcaatttaacatcattcagggtgtcagcgacgtaacaatttcaggcaaagtaagaaatatccaagataatggcttcatagatgaagttcgcactgggcagccatccgtgctcacagctgctactgccaacggagcaagacatgacaaatgtgcaaataataccagacatggttatggtggaaaacaacaggggaggaccactgggacgacatacctttccagaagatgaaccaactttcactgggcgatgatgctgttggaattggaaaccatgcgagtggcgatgatgcggttggggaaaccatacgagtgacgatgctttggcttcgaaatgatggtgaagatgacctggattaaagttattctagattcattttttattttgcactattggtcttcacagagcctgtatggttgggggccttgttttggcaaagctgtactgatatatccctaccccaagaatcagaagcctgccaaagttttgcgactatgtacctcgtctgcgcttgtgtattgtggtgcacttgaatgatgcgaatgttatatcgaatccccgtccttgatcgtgatgttcttgaacgttcacctctgggaaattaactcgcatggtgagctgagctcgtgatcggtggcatggtcgatccaaggtcgggtgtcattgttgtatggtcgagctggacatgtaggctctgttactatttaggtaactatttagaccttattccaaaaagttagtagagat

SEQ ID NO: 9223 - DNA, 3183 bp, Zea Mays
accacgctccggtcagcctcgcctcctttctccgtctcattcccccaatcccacgccagtcccgcaggaatccccacccaaattcccgtctccccgatcgccgcccttctcggtgcccgtaaaccctacccccggagtcgcccgtgcgctgtcgtgcccgcgttgccaccgtcggtggtccgcggcgcccgtaaccaaaacctaaccgcagcctgcagatcccgattccgcagggaggcgggagaggtgaaggccgcctcgccgcagatggagcccgcgggcgcgcgcaaggagtggcgcgccgtccccggctcctcgctccgctccaatggcgccgaggatgccgcggagcacgggaagctggggcagtcggaggaccgagctatctacgaggaaggggcgggtggactggaggacttctgcgccatcaccattgatgggagcggagggctcagcgaggacatcctgcagcagcgcctgcagagcgttgtgcggcaaagggagcagctgcagcaggtcgagatggagctgcgtgcgcaggccattgcacacccgcagatcattcaggcgcaacaaagcttccaggctacttccaaggaacatgccgcagctgtggccaagatcaaggagcaactgcatgagcgggagcaatacattcttgaactagaaatgaaactcaatgacaaggatagagaactaaatgctctgaagattgatcatcaaacggtgtgggcaaatcaagatcttattagagaacagaccaaagagctggcaactgtcagaagggaacgcgacaactctgaagctgaaagagcccaacatcttacacaaattcatgagctccaagaacatctgcgagaaaaagaaagccagttcattgcattagaggaacagcatagggctgctcaagacaacattctttacaaagatgagcagttgagggaagcccatgcttgggtatctcaagttcgagaaatggatgctttgcagtctcaatccctacaagttgagttacgtgagcgcatggagcaatttaatcaatattggattagctcccagcagcagtatgctgaaatgcagcggagtcttctccatacaatacaacaactccagcaagaattaactgaggcaagggaacagtctggtgcacaaaaagatggtccacaagtttctcgggaagggtcagctgaatcatcactagttcaaagcatgggaaacagcgtggcttcaaatggtagtgcaactgcagatgggaaccagcaattgttgaaaaataatggaagcgtggatgtctctgttcaggccaatagtgcctcagctgtacctgttccttcttccctactgggaatcggtggtccggctgcgcatatcgctgcgatgcatgcttttatgattcatcctcaaggcattcctcaacccttagtagcatcacccaactctggtgttcctcaatttggcagttttcagtctcagtctacaattcaaccaaattcacaatggccaaatcagcaggaagtacaaaatgtctcacaaccacaagatgaaacaaactatcagacatcccaatcagaccggactgttttacaacaaggcgctattaatactgatgagttgtcctcaaagccaagccaggatagtcagccagaccatcttaatgcccatgtgaaacaacagcagagccctgcaagtgcacctactgaatcaactcatgaacttactgttgttgaagcgaatgtagctgaacatgtatcttgtgacgaacaacaaaaaatcttaaacgaacaggattcactgtcaaatatgaacaaccatattggaatagatgaaagagctgcatctgataagcaacctgaacctgtatctaggcagcataaacatttgaactttcctccgttcactacccagattcacttgaaaaagagtgcaacagagaatcctaatgttgtaaatcaggttgatataatgaaatcagttgcaggtggttttagttcgcagttacctcgtgcaccaaaggaaccttctctcctagatgagagatctctattggcttgcattgtacgtgcagttcctgctgggactgagggtggaatcaggataagttcaactctgccaaataggcttgggaaaatgttggctccccttcactggcatgactataagaagcaatacgggaagctcgacgattttgtggctagtcatccagagctgtttgtgattgagggagacttcattcaccttcgtgatggagcacagcagattatttctgccactacagctgctgcaaaaatagctgctgcgacagcatcttctgcctcttactcatccttactgccttctgttgccgttactcctgtggcacaaaatactcggcaaaagaggaggcccgcagttgattccagatcatcaaatgcaattccctctggaaacggcttcacagatcaatttaacatcattcagggtgtcagcgacgtaacaatttcaggcaaagtaagaaatatccaagataatggcttcatagatgaagttcgcactgggcagccatccgtgctcacagctgctactgccaacggagcaagacatgacaaatgtgcaaataataccagacatggttatggtggaaaacaacaggggaggaccactgggacgacatacctttccagaagatgaaccaactttcactgggcgatgatgctgttggaattggaaaccatgcgagtggcgatgatgcggttggggaaaccatacgagtgacgatgctttggcttcgaaatgatggtgaagatgacctggattaaagttattctagattcattttttattttgcactattggtcttcacagagcctgtatggttgggggccttgttttggcaaagctgtactgatatatccctaccccaagaatcagaagcctgccaaagttttgcgactatgtacctcgtctgcgcttgtgtattgtggtgcacttgaatgatgcgaatgttatatcgaatccccgtccttgatcgtgatgttcttgaacgttcacctctgggaaattaactcgcatggtgagctgagctcgtgatcggtggcatggtcgatccaaggtcgggtgtcattgttgtatggtcgagctggacatgtaggctctgttactatttaggtaactatttagaccttattccaaaaagttagtagagat

SEQ ID NO: 9224 - DNA, 3180 bp, Zea Mays
accacgctccggtcagcctcgcctcctttctccgtctcattcccccaatcccacgccagtcccgcaggaatccccacccaaattcccgtctccccgatcgccgcccttctcggtgcccgtaaaccctacccccggagtcgcccgtgcgctgtcgtgcccgcgttgccaccgtcggtggtccgcggcgcccgtaaccaaaacctaaccgcagcctgcagatcccgattccgcagggaggcgggagaggtgaaggccgcctcgccgcagatggagcccgcgggcgcgcgcaaggagtggcgcgccgtccccggctcctcgctccgctccaatggcgccgaggatgccgcggagcacgggaagctggggcagtcggaggaccgagctatctacgaggaaggggcgggtggactggaggacttctgcgccatcaccattgatgggagcggagggctcagcgaggacatcctgcagcagcgcctgcagagcgttgtgcggcaaagggagcagctgcagcaggtcgagatggagctgcgtgcgcaggccattgcacacccgcagatcattcaggcgcaacaaagcttccaggctacttccaaggaacatgccgcagctgtggccaagatcaaggagcaactgcatgagcgggagcaatacattcttgaactagaaatgaaactcaatgacaaggatagagaactaaatgctctgaagattgatcatcaaacggtgtgggcaaatcaagatcttattagagaacagaccaaagagctggcaactgtcagaagggaacgcgacaactctgaagctgaaagagcccaacatcttacacaaattcatgagctccaagaacatctgcgagaaaaagaaagccagttcattgcattagaggaacagcatagggctgctcaagacaacattctttacaaagatgagcagttgagggaagcccatgcttgggtatctcaagttcgagaaatggatgctttgcagtctcaatccctacaagttgagttacgtgagcgcatggagcaatttaatcaatattggattagctcccagcagcagtatgctgaaatgcagcggagtcttctccatacaatacaacaactccagcaagaattaactgaggcaagggaacagtctggtgcacaaaaagatggtccacaagtttctcgggaagggtcagctgaatcatcactagttcaaagcatgggaaacagcgtggcttcaaatggtagtgcaactgcagatgggaaccagcaattgttgaaaaataatggaagcgtggatgtctctgttcaggccaatagtgcctcagctgtacctgttccttcttccctactgggaatcggtggtccggctgcgcatatcgctgcgatgcatgcttttatgattcatcctcaaggcattcctcaacccttagtagcatcacccaactctggtgttcctcaatttggcagttttcagtctcagtctacaattcaaccaaattcacaatggccaaatcagcaggaagtacaaaatgtctcacaaccacaagatgaaacaaactatcagacatcccaatcagaccggactgttttacaacaaggcgctattaatactgatgagttgtcctcaaagccaagccaggatagtcagccagaccatcttaatgcccatgtgaaacaacagcagagccctgttgttgaagcgaatgtagctgaacatgtatcttgtgacgaacaacaaaaaatcttaaacgaacaggattcactgtcaaatatgaacaaccatattggaatagttgagcatctagagcaaaataccgaatccaaggatgaaagagctgcatctgataagcaacctgaacctgtatctaggcagcataaacatttgaactttcctccgttcactacccagattcacttgaaaaagagtgcaacagagaatcctaatgttgtaaatcaggttgatataatgaaatcagttgcaggtggttttagttcgcagttacctcgtgcaccaaaggaaccttctctcctagatgagagatctctattggcttgcattgtacgtgcagttcctgctgggactgagggtggaatcaggataagttcaactctgccaaataggcttgggaaaatgttggctccccttcactggcatgactataagaagcaatacgggaagctcgacgattttgtggctagtcatccagagctgtttgtgattgagggagacttcattcaccttcgtgatggagcacagcagattatttctgccactacagctgctgcaaaaatagctgctgcgacagcatcttctgcctcttactcatccttactgccttctgttgccgttactcctgtggcacaaaatactcggcaaaagaggaggcccgcagttgattccagatcatcaaatgcaattccctctggaaacggcttcacagatcaatttaacatcattcagggtgtcagcgacgtaacaatttcaggcaaagtaagaaatatccaagataatggcttcatagatgaagttcgcactgggcagccatccgtgctcacagctgctactgccaacggagcaagacatgacaaatgtgcaaataataccagacatggttatggtggaaaacaacaggggaggaccactgggacgacatacctttccagaagatgaaccaactttcactgggcgatgatgctgttggaattggaaaccatgcgagtggcgatgatgcggttggggaaaccatacgagtgacgatgctttggcttcgaaatgatggtgaagatgacctggattaaagttattctagattcattttttattttgcactattggtcttcacagagcctgtatggttgggggccttgttttggcaaagctgtactgatatatccctaccccaagaatcagaagcctgccaaagttttgcgactatgtacctcgtctgcgcttgtgtattgtggtgcacttgaatgatgcgaatgttatatcgaatccccgtccttgatcgtgatgttcttgaacgttcacctctgggaaattaactcgcatggtgagctgagctcgtgatcggtggcatggtcgatccaaggtcgggtgtcattgttgtatggtcgagctggacatgtaggctctgttactatttaggtaactatttagaccttattccaaaaagttagtagagat

SEQ ID NO: 9225 - DNA, 1096 bp, Zea Mays
gaccacagccataaaaagtgctcccatgtacttgttggcatcaagtacagaatcgtgactcatttttgttctcaggaaaagtgtggagatcaccaaagccataacagttatctgaatggtcttgaatatatggactggagagtttcttttcagcagcagtacttcccttgaaaagcatgctttgaaaatattccatctggatattcggcgacttgcattcacttttaccacctttttctttccagtattgtttgaactgcactgtttgtcttctactagaagagggagataggacgtcctgaaggattgtgcaaaattttcaattgtatggtactgatacttgttttgatcaccagcccagtattgcttttggtccatcttagaggttacctggtcagtggccaattgagaaaacttgttacattgtttttgcaaaaggacatggaaaacttgttacattattttgcaaaagcacatgtattgcagaatagcgacattttacgctcctgcacataattatattcctctcctcatctcgtctcctactagggtatcagcacactcagacaggccaagtatctgcatacaatcaactgttactattgtatcatcaagcacattccaatgaccttcaaaatggaaagctcactatatgcaagacatgatggagatcatactggctaacataagcacgcaggatgctgggatccaagtctgtgcgcatgaggagacatgtaccttgacggccggatgaccccgcttacttcgtttatgattctcataggtcttttcctggtaacacacatatggacagacgtcgctaattcctgaaagcaaaataaactcatcatcagaaatctctctctctctctctctctttttccccgaatatgacctaccaactttgcattgtaaaacaaacacatgcatgccatacacttgtattttagctctcgctaaagcacgcagcagcgtaaccgtaacgaggcgcggtatcctttcgattctggactgaactccatgtgttcaattcgaactggcctaaggttgtctgcagatttacaaacccgcttacagtcgtgattttgtaattttt

SEQ ID NO: 9226 - DNA, 1076 bp, Zea Mays
gaccacagccataaaaagtgctcccatgtacttgttggcatcaagtacagaatcgtgactcatttttgttctcaggaaaagtgtggagatcaccaaagccataacagttatctgaatggtcttgaatatatggactggagagtttcttttcagcagcagtacttcccttgaaaagcatgctttgaaaatattccatctggatattcggcgacttgcattcacttttaccacctttttctttccagtattgtttgaactgcactgtttgtcttctactagaagagggagataggacgtcctgaaggattgtgcaaaattttcaattgtatggtactgatacttgttttgatcaccagcccagtattgcttttggtccatcttagaggttacctggtcagtggccaattgagaaaacttgttacattgtttttgcaaaaggacatggaaaacttgttacattattttgcaaaagcacatgtattgcagaatagcgacattttacgctcctgcacataattcacattccaatgaccttcaaaatggaaagctcactatatgcaagagtatgtcttaccgaattcgttattggttccgaacatcttagaagagaagttgattgtctccctcactgtcatctcagcatgatggagatcatactggctaacataagcacgcaggatgctgggatccaagtctgtgcgcatgaggagacatgtaccttgacggccggatgaccccgcttacttcgtttatgattctcataggtcttttcctggtaacacacatatggacagacgtcgctaattcctgaaagcaaaataaactcatcatcagaaatctctctctctctctctctctttttccccgaatatgacctaccaactttgcattgtaaaacaaacacatgcatgccatacacttgtattttagctctcgctaaagcacgcagcagcgtaaccgtaacgaggcgcggtatcctttcgattctggactgaactccatgtgttcaattcgaactggcctaaggttgtctgcagatttacaaacccgcttacagtcgtgattttgtaattttt

SEQ ID NO: 9227 - DNA, 1849 bp, Zea Mays
ctgctctatatttgggtcttctgtttcggtctgctgttggaggcctgcaactggtgtgttacagcccattttcggttcagagcaccgtatagatcgcttgttgaagacagccttacacacgaggtcctgctactatgatcgctgccaatcacttaatacagccagggaaatatgaagaaatcgagcatcagtatggtatgtcttgcccataaaaacatcacacagagctgaggattgcagcagttccattccatccatctctgaagattcaaaaactgaaacaatggcaaacaacacatttccattttctgaatcttaatcattacacattttgcaaaatccccttgaacctactcgtattccttcacataataaacacagttaataagtcactactatttcgtttctttgtactagtaatctatgcacacttttgcaacgggacaggtcgcccctttcttccctgccttttctacatttttgtcaggaagtggttactgtctgaccctaatcgtgtattacttgcagccatcgcatggtaaattggccagcagcggtggcggcttcctacctgcgctggaaattgaggtgcttgatggcgaggaagaagaggaaggcgaagaggccaatgattgcgagatggaggcaggtcaccagctcaaagtagcgatcctgcaggcctaggtacccctccaggaactcacgcaccgtctgcaccccgagccctggcaccaggatctgctccgtccggtctgcgagctgtgagaacatcagcccgtaaactgtccatgccgctggatcggcccagtacacccaccgccaccacacgggcatcagctgcagcaaattactcaactcatcagatgggtgtgtgtgataagtacctctctcgcgatgatgaagccagagaagacgttccagaagatgaagatgaggaacgacagccccatggcgatctcgatgttgggggtcagggccaccgtcatcatcccgtacagagtgtagtacatgaagctcatcaccaggtataggaagaaccagaagaacttggccgcagacagctggaacccaatcatcgggtacacaatcgatgagaagatcagcacttgcaccaacatgtaaggttgatcattgatgtgtgttgttacctgagcgatagcgtatgccatggtggagtacatgcctgccgccttttcacggtagagcacaactctctccattgccaccactggctgtaggatgctgcagttcatgaaacccaggaacaatgctgacccatatacgattccaacacattccaatgaccttcaaaatggaaagctcactatatgcaagagtatgtcttaccgaattcgttattggttccgaacatcttagaagagaagttgattgtctccctcactgtcatctcagcatgatggagatcatactggctaacataagcacgcaggatgctgggatccaagtctgtgcgcatgaggagacatgtaccttgacggccggatgaccccgcttacttcgtttatgattctcataggtcttttcctggtaacacacatatggacagacgtcgctaattcctgaaagcaaaataaactcatcatcagaaatctctctctctctctctctctttttccccgaatatgacctaccaactttgcattgtaaaacaaacacatgcatgccatacacttgtattttagctctcgctaaagcacgcagcagcgtaaccgtaacgaggcgcggtatcctttcgattctggactgaactccatgtgttcaattcgaactggcctaaggttgtctgcagatttacaaacccgcttacagtcgtgattttgtaattttt

SEQ ID NO: 9228 - DNA, 1701 bp, Zea Mays
ctgctctatatttgggtcttctgtttcggtctgctgttggaggcctgcaactggtgtgttacagcccattttcggttcagagcaccgtatagatcgcttgttgaagacagccttacacacgaggtcctgctactatgatcgctgccaatcacttaatacagccagggaaatatgaagaaatcgagcatcagtatggtatgtcttgcccataaaaacatcacacagagctgaggattgcagcagttccattccatccatctctgaagattcaaaaactgaaacaatggcaaacaacacatttccattttctgaatcttaatcattacacattttgcaaaatccccttgaacctactcgtattccttcacataataaacacagttaataagtcactactatttcgtttctttgtactagtaatctatgcacacttttgcaacgggacaggtcgcccctttcttccctgccttttctacatttttgtcaggaagtggttactgtctgaccctaatcgtgtattacttgcagccatcgcatggtaaattggccagcagcggtggcggcttcctacctgcgctggaaattgaggtgcttgatggcgaggaagaagaggaaggcgaagaggccaatgattgcgagatggaggcaggtcaccagctcaaagtagcgatcctgcaggcctaggtacccctccaggaactcacgcaccgtctgcaccccgagccctggcaccaggatctgctccgtccggtctgcgagctgtgagaacatcagcccgtaaactgtccatgccgctggatcggcccagtacacccaccgccaccacacgggcatcagctgcagcaaattactcaactcatcagatgggtgtgtgtgataagtacctctctcgcgatgatgaagccagagaagacgttccagaagatgaagatgaggaacgacagccccatggcgatctcgatgttgggggtcagggccaccgtcatcatcccgtacagagtgtagtacatgaagctcatcaccaggtataggaagaaccagaagaacttggccgcagacagctggaacccaatcatcgggtacacaatcgatgagaagatcagcacttgcaccaacatgtaagatattcctctcctcatctcgtctcctactagggtatcagcacactcagacaggccaagtatctgcatacaatcaactgttactattgtatcatcaagcacattccaatgaccttcaaaatggaaagctcactatatgcaagacatgatggagatcatactggctaacataagcacgcaggatgctgggatccaagtctgtgcgcatgaggagacatgtaccttgacggccggatgaccccgcttacttcgtttatgattctcataggtcttttcctggtaacacacatatggacagacgtcgctaattcctgaaagcaaaataaactcatcatcagaaatctctctctctctctctctctttttccccgaatatgacctaccaactttgcattgtaaaacaaacacatgcatgccatacacttgtattttagctctcgctaaagcacgcagcagcgtaaccgtaacgaggcgcggtatcctttcgattctggactgaactccatgtgttcaattcgaactggcctaaggttgtctgcagatttacaaacccgcttacagtcgtgattttgtaattttt

SEQ ID NO: 9229 - DNA, 1829 bp, Zea Mays
ctgctctatatttgggtcttctgtttcggtctgctgttggaggcctgcaactggtgtgttacagcccattttcggttcagagcaccgtatagatcgcttgttgaagacagccttacacacgaggtcctgctactatgatcgctgccaatcacttaatacagccagggaaatatgaagaaatcgagcatcagtatggtatgtcttgcccataaaaacatcacacagagctgaggattgcagcagttccattccatccatctctgaagattcaaaaactgaaacaatggcaaacaacacatttccattttctgaatcttaatcattacacattttgcaaaatccccttgaacctactcgtattccttcacataataaacacagttaataagtcactactatttcgtttctttgtactagtaatctatgcacacttttgcaacgggacaggtcgcccctttcttccctgccttttctacatttttgtcaggaagtggttactgtctgaccctaatcgtgtattacttgcagccatcgcatggtaaattggccagcagcggtggcggcttcctacctgcgctggaaattgaggtgcttgatggcgaggaagaagaggaaggcgaagaggccaatgattgcgagatggaggcaggtcaccagctcaaagtagcgatcctgcaggcctaggtacccctccaggaactcacgcaccgtctgcaccccgagccctggcaccaggatctgctccgtccggtctgcgagctgtgagaacatcagcccgtaaactgtccatgccgctggatcggcccagtacacccaccgccaccacacgggcatcagctgcagcaaattactcaactcatcagccagagaagacgttccagaagatgaagatgaggaacgacagccccatggcgatctcgatgttgggggtcagggccaccgtcatcatcccgtacagagtgtagtacatgaagctcatcaccaggtataggaagaaccagaagaacttggccgcagacagctggaacccaatcatcgggtacacaatcgatgagaagatcagcacttgcaccaacatgtaaggttgatcattgatgtgtgttgttacctgagcgatagcgtatgccatggtggagtacatgcctgccgccttttcacggtagagcacaactctctccattgccaccactggctgtaggatgctgcagttcatgaaacccaggaacaatgctgacccatatacgattccaaatattcctctcctcatctcgtctcctactagggtatcagcacactcagacaggccaagtatctgcatacaatcaactgttactattgtatcatcaagcacattccaatgaccttcaaaatggaaagctcactatatgcaagacatgatggagatcatactggctaacataagcacgcaggatgctgggatccaagtctgtgcgcatgaggagacatgtaccttgacggccggatgaccccgcttacttcgtttatgattctcataggtcttttcctggtaacacacatatggacagacgtcgctaattcctgaaagcaaaataaactcatcatcagaaatctctctctctctctctctctttttccccgaatatgacctaccaactttgcattgtaaaacaaacacatgcatgccatacacttgtattttagctctcgctaaagcacgcagcagcgtaaccgtaacgaggcgcggtatcctttcgattctggactgaactccatgtgttcaattcgaactggcctaaggttgtctgcagatttacaaacccgcttacagtcgtgattttgtaattttt

SEQ ID NO: 9230 - DNA, 1019 bp, Zea Mays
gaccacagccataaaaagtgctcccatgtacttgttggcatcaagtacagaatcgtgactcatttttgttctcaggaaaagtgtggagatcaccaaagccataacagttatctgaatggtcttgaatatatggactggagagtttcttttcagcagcagtacttcccttgaaaagcatgctttgaaaatattccatctggatattcggcgacttgcattcacttttaccacctttttctttccagtattgtttgaactgcactgtttgtcttctactagaagagggagataggacgtcctgaaggattgtgcaaaattttcaattgtatggtactgatacttgttttgatcaccagcccagtattgcttttggtccatcttagaggttacctggtcagtggccaattgagaaaacttgttacattgtttttgcaaaaggacatggaaaacttgttacattattttgcaaaagcacatgtattgcagaatagcgacattttacgctcctgcacataattatattcctctcctcatctcgtctcctactagggtatcagcacactcagacaggccaagtatctgcatacaatcaactgttactattgtatcatcaagcacattccaatgaccttcaaaatggaaagctcactatatgcaagagtatgtcttaccgaattcgttattggttccgaacatcttagaagagaagttgattgtctccctcactgtcatctcagcatgatggagatcatactggctaacataagcacgcaggtactgcggtgttgagtgattcatttcttctccattgtacatgacttttcccttgaactgttcacagtcattggcaacatatatttatgttagttgatgcttcacagtattgtctgtttttttttgcctctttttatgttgacaaatactttggttagcatgaaagcaactcagtgtaccttcaaagaagaatccagttttcctgccaacgcttttagaagagtcgtcttgcctgatccaggcgc

SEQ ID NO: 9231 - DNA, 1661 bp, Zea Mays
ctgctctatatttgggtcttctgtttcggtctgctgttggaggcctgcaactggtgtgttacagcccattttcggttcagagcaccgtatagatcgcttgttgaagacagccttacacacgaggtcctgctactatgatcgctgccaatcacttaatacagccagggaaatatgaagaaatcgagcatcagtatggtatgtcttgcccataaaaacatcacacagagctgaggattgcagcagttccattccatccatctctgaagattcaaaaactgaaacaatggcaaacaacacatttccattttctgaatcttaatcattacacattttgcaaaatccccttgaacctactcgtattccttcacataataaacacagttaataagtcactactatttcgtttctttgtactagtaatctatgcacacttttgcaacgggacaggtcgcccctttcttccctgccttttctacatttttgtcaggaagtggttactgtctgaccctaatcgtgtattacttgcagccatcgcatggtaaattggccagcagcggtggcggcttcctacctgcgctggaaattgaggtgcttgatggcgaggaagaagaggaaggcgaagaggccaatgattgcgagatggaggcaggtcaccagctcaaagtagcgatcctgcaggcctaggtacccctccaggaactcacgcaccgtctgcaccccgagccctggcaccaggatctgctccgtccggtctgcgagctgtgagaacatcagcccgtaaactgtccatgccgctggatcggcccagtacacccaccgccaccacacgggcatcagctgcagcaaattactcaactcatcagatgggtgtgtgtgataagtacctctctcgcgatgatgaagccagagaagacgttccagaagatgaagatgaggaacgacagccccatggcgatctcgatgttgggggtcagggccaccgtcatcatcccgtacagagtgtagtacatgaagctcatcaccaggtataggaagaaccagaagaacttggccgcagacagctggaacccaatcatcgggtacacaatcgatgagaagatcagcacttgcaccaacatgtaaggttgatcattgatgtgtgttgttacctgagcgatagcgtatgccatggtggagtacatgcctgccgccttttcacggtagagcacaactctctccattgccaccactggctgtaggatgctgcagttcatgaaacccaggaacaatgctgacccatatacgattccaagtgaatggggacgtccaatatccccagcgcaaccatggttggagatcatctgtttcagtgtgcagaatttgttagcaacttgttgcacagaatttttattagagtgtatgtcgtgtactcatgtttcatggtgtatgctaagctacattcacctaaccttttgatatgacgaatcctccaagtatgtatattgcaataagagctgcagtccctagcatgttggccatcacttgcgtccttcctatggccgctaagaagcgatacaggcccattgacatttgatgcatggaaaaaagtaccagaaagtgctggaagaacctgccataagcaatggagatcattttcttacttccgtctattgaagcaccag

SEQ ID NO: 9232 - DNA, 1656 bp, Zea Mays
ctgctctatatttgggtcttctgtttcggtctgctgttggaggcctgcaactggtgtgttacagcccattttcggttcagagcaccgtatagatcgcttgttgaagacagccttacacacgaggtcctgctactatgatcgctgccaatcacttaatacagccagggaaatatgaagaaatcgagcatcagtatggtatgtcttgcccataaaaacatcacacagagctgaggattgcagcagttccattccatccatctctgaagattcaaaaactgaaacaatggcaaacaacacatttccattttctgaatcttaatcattacacattttgcaaaatccccttgaacctactcgtattccttcacataataaacacagttaataagtcactactatttcgtttctttgtactagtaatctatgcacacttttgcaacgggacaggtcgcccctttcttccctgccttttctacatttttgtcaggaagtggttactgtctgaccctaatcgtgtattacttgcagccatcgcatggtaaattggccagcagcggtggcggcttcctacctgcgctggaaattgaggtgcttgatggcgaggaagaagaggaaggcgaagaggccaatgattgcgagatggaggcaggtcaccagctcaaagtagcgatcctgcaggcctaggtacccctccaggaactcacgcaccgtctgcaccccgagccctggcaccaggatctgctccgtccggtctgcgagctgtgagaacatcagcccgtaaactgtccatgccgctggatcggcccagtacacccaccgccaccacacgggcatcagctgcagcaaattactcaactcatcagatgggtgtgtgtgataagtacctctctcgcgatgatgaagccagagaagacgttccagaagatgaagatgaggaacgacagccccatggcgatctcgatgttgggggtcagggccaccgtcatcatcccgtacagagtgtagtacatgaagctcatcaccaggtataggaagaaccagaagaacttggccgcagacagctggaacccaatcatcgggtacacaatcgatgagaagatcagcacttgcaccaacatgttgatcattgatgtgtgttgttacctgagcgatagcgtatgccatggtggagtacatgcctgccgccttttcacggtagagcacaactctctccattgccaccactggctgtaggatgctgcagttcatgaaacccaggaacaatgctgacccatatacgattccaagtgaatggggacgtccaatatccccagcgcaaccatggttggagatcatctgtttcagtgtgcagaatttgttagcaacttgttgcacagaatttttattagagtgtatgtcgtgtactcatgtttcatggtgtatgctaagctacattcacctaaccttttgatatgacgaatcctccaagtatgtatattgcaataagagctgcagtccctagcatgttggccatcacttgcgtccttcctatggccgctaagaagcgatacaggcccattgacatttgatgcatggaaaaaagtaccagaaagtgctggaagaacctgccataagcaatggagatcattttcttacttccgtctattgaagcaccag

SEQ ID NO: 9233 - DNA, 1362 bp, Zea Mays
ctgctctatatttgggtcttctgtttcggtctgctgttggaggcctgcaactggtgtgttacagcccattttcggttcagagcaccgtatagatcgcttgttgaagacagccttacacacgaggtcctgctactatgatcgctgccaatcacttaatacagccagggaaatatgaagaaatcgagcatcagtatggtatgtcttgcccataaaaacatcacacagagctgaggattgcagcagttccattccatccatctctgaagattcaaaaactgaaacaatggcaaacaacacatttccattttctgaatcttaatcattacacattttgcaaaatccccttgaacctactcgtattccttcacataataaacacagttaataagtcactactatttcgtttctttgtactagtaatctatgcacacttttgcaacgggacaggtcgcccctttcttccctgccttttctacatttttgtcaggaagtggttactgtctgaccctaatcgtgtattacttgcagccatcgcatggtaaattggccagcagcggtggcggcttcctacctgcgctggaaattgaggtgcttgatggcgaggaagaagaggaaggcgaagaggccaatgattgcgagatggaggcaggtcaccagctcaaagtagcgatcctgcaggcctaggtacccctccaggaactcacgcaccgtctgcaccccgagccctggcaccaggatctgctccgtccggtctgcgagctgtgagaacatcagcccgtaaactgtccatgccgctggatcggcccagtacacccaccgccaccacacgggcatcagctgcagcaaattactcaactcatcagatgggtgtgtgtgataagtacctctctcgcgatgatgaagccagagaagacgttccagaagatgaagatgaggaacgacagccccatggcgatctcgatgttgggggtcagggccaccgtcatcatcccgtacagagtgtagtacatgaagctcatcaccaggtataggaagaaccagaagaacttggccgcagacagctggaacccaatcatcgggtacacaatcgatgagaagatcagcacttgcaccaacatgtaaggttgatcattgatgtgtgttgttacctgagcgatagcgtatgccatggtggagtacatgcctgccgccttttcacggtagagcacaactctctccattgccaccactggctgtaggatgctgcagttcatgaaacccaggaacaatgctgacccatatacgattccaaacaacagttcgtccagtgtctaccgtctttcgtactgttctcatgacgattgctgcagcacgagcatccaa

SEQ ID NO: 9234 - DNA, 1154 bp, Zea Mays
ctgctctatatttgggtcttctgtttcggtctgctgttggaggcctgcaactggtgtgttacagcccattttcggttcagagcaccgtatagatcgcttgttgaagacagccttacacacgaggtcctgctactatgatcgctgccaatcacttaatacagccagggaaatatgaagaaatcgagcatcagtatggtatgtcttgcccataaaaacatcacacagagctgaggattgcagcagttccattccatccatctctgaagattcaaaaactgaaacaatggcaaacaacacatttccattttctgaatcttaatcattacacattttgcaaaatccccttgaacctactcgtattccttcacataataaacacagttaataagtcactactatttcgtttctttgtactagtaatctatgcacacttttgcaacgggacaggtcgcccctttcttccctgccttttctacatttttgtcaggaagtggttactgtctgaccctaatcgtgtattacttgcagccatcgcatggtaaattggccagcagcggtggcggcttcctacctgcgctggaaattgaggtgcttgatggcgaggaagaagaggaaggcgaagaggccaatgattgcgagatggaggcaggtcaccagctcaaagtagcgatcctgcaggcctaggtacccctccaggaactcacgcaccgtctgcaccccgagccctggcaccaggatctgctccgtccggtctgcgagctgtgagaacatcagcccgtaaactgtccatgccgctggatcggcccagtacacccaccgccaccacacgggcatcagctgcagcaaattactcaactcatcagccagagaagacgttccagaagatgaagatgaggaacgacagccccatggcgatctcgatgttgggggtcagggccaccgtcatcatcccgtacagagtgtagtacatgaagctcatcaccaggtataggaagaaccagaagaacttggccgcagacagctggaacccaatcatcgggtacacaatcgatgagaagatcagcacttgcaccaacatgtaagacaacagttcgtccagtgtctaccgtctttcgtactgttctcatgacgattgctgcagcacgagcatccaa

SEQ ID NO: 9235 - DNA, 2570 bp, Zea Mays
gcctgggtgggggcaggggcatacggcgacggcgcctagacggctggaccgagagggaggcggcttgcccgcctagaggttgaacatgactttgatggcatcgcggccgcgggcgctgacctcgaaggcctcctccacgtcccgctgcgagaagccgaagcggtgggtgatgagcggcttgacgtccaccttgccgctgcgcaggaagtcgatgcacagcggccaggtgtccttgtaccggaacacgcccaccacgtccacctcccgcgccgccgccgccgtcaggggcagcgtcatctcgttgtggcccatcccgaccaggcacaccttcccgccgggccgcgtcgactccagcgccgtcgacatggtcttgctgaacccggcgcagtccaggctgacgtcgatgtccgagcccatggccgcgcggatgcgctccacctcgtccgccaggtcctccacgcggggcgacacccgcaccgccgcgtccgcgcccagcgacctggccacggccaggcggtggtcgtccacgtccacgaccaccacgcgcggcgcgccgaaggcccgcgccgccagcagcgacaccaggccgatggggccggcgcccaccacgagcacgcccgtctcgggccccacccccgcgcggcggcacgcgtgcacgcccacgctcagcggctcgcacatggcgccctcctccaggctcacaccgtcggggagcttgaagcacaggtcggccgggtgcaccacctggttcgccagcgagccgtgcaccggcggggtggcgaagaacttcatgtcctcgcacaggttgtaccgcccgcccttgcagtggcggcagcgccagcagctgacgcccggctccagcgccacgcggtcgcccacggacaggtgcatcacgccggcgcccacctcctcgaccacgcccgcgcactcgtgcccgatcaccatcggctccttcaccacgaagtgcgcgatgcgcatctcctgcgagaatcgatgatgcgtaaagggtcgaaatccattagccgtgcaacaattcccgcgccgtagaattacagagacatcggataggatcgcgcaccctgaggtagtgcacatcgctgccgcaaatccccactgccttcatgcgcacgcggacatcataagggcctgaaaatgccagccaaaattcactgtcagcatacttattattcagttgtaataagtactaatcttccgacctaaagaatttcctcacatggtatgcgaccagcctacaaaagttctgatattctattttgttttagcacttcaggccgtatttgattgctacttggaacagctacatccaccacacctaagtcctaaatgaaagctgttgataaactgcacctcagtagcattacacataagttcagttcttctgaactgagatatgcgctgtgcaacagcaagggtgttaccgtgttaataactatagaagctattcctgcagctcgaaacgacggcttcctgagtggctgcactcaggggtgctgtgcatcgctgagttcatagtggcatgtctcaaatgctcatttttaatatcacgtacaccttacagatgcaattctctccagtaaacgaaaagaaattgcgaacagcaaagtctgtatggcgcactactgattttatctaattcagatctgaactttgaagttactgcaaattctgtccttttatctatatctataccccatatacaacccaccagactaaactttgagaaacacttctaaccaaatcacctccaactcatgacctcctctaaattcatcaaacaaattgcacatatacataacacactttcaaaacaaacggttaaagtataacccttctctttcttattcaaacgtaataaccgatattattatatcattcttctttactcgtgcttttctcatgcctcacacatatagtacaattctcctctctccccgcgaccctgccacacctcccctcaccgccaccaccgggtcctccctccttccccgctcttcggaaccgtagcattagcacggttaatattctgctagcctattgaatgagtgggttcccttgtgctggagtagttaggatcttggaaaagatgcactgatgtttcctgtacacgcgatccagtgctgatgatactgtaactaccttgtgcaataaatagttcaatatcccccttcttttgaccatagatttttttaataaaaagaacataccgtttcctaaaaaacgaagaagaacatgccctactaattccatcccaaaagggaggaaaacgctgacgctgatccaaatcttcgatatagattcctgactacatattcgccatcgtgttcagcacgtgcaaacacgataagacaatgcaaaaaaagatgggaacttggcaacttgcaaggctgtactgcaggtgcagggtaccgatcgatttgataaaaaaaaaacttatcgatctctctgattcctagaacagagcaaacaataagcagcgagaaagaaggatggaaccgaggcacgtaccgacgggcgggagcttgaagggcatgatcttgagggtgttcttg

SEQ ID NO: 9236 - DNA, 805 bp, Zea Mays
atggcatggatgaccgctgtatgtgcttctgtcgtgctcaagtcatcacagagtttgaaggagtttaaaacacaagcaaccacattggcatcgcttcagcatcccaatttatgtaaactgataggctattatgcaaaagaagattctaatgaaaggatgttggtctatgaacggctttatcatggaagcttagataagctactctttggaagatcagatggtcgtttcatggactggtctaaacgtttgaaggttgccctaggtgctgccagaggccatgtacaacgagttctcaacttgaacatccaaatagataaaggtttcactgctaagctttcaggatatggttgtgttggcttcaataccgaggagatatctaatgcacctgtgtctgcagcaaacctttcggtggagaccttggagaagggtttactcactcagtttgtctattgctgcaacaagtcggggctggatcgttccaaagtaaatgtaaatggaggcgcgattgcccttggacaccctctgggtgcaacaggtgcccggttgcatggctactcttctgaatgaaatgaatcaccggggcagagactggagatttggtgttgtcaccatgtgtatcggatctcgaatgggggcaacagctgtgttcgagctgtgttcggcccgactggaggtatcgaccatcactcgtcactataacccgatggtgataggcgaccgggagcttccatgttattgcgttctgatacttgagacttttattatgactatgtatgagatattgtctcttattagtactggatga

SEQ ID NO: 9237 - DNA, 730 bp, Zea Mays
tgcagatctgtttcagcttgccagtgccatagctattgaggaagcaggtgtccccgaaatctgtatgatctatggaagggttgacgttattgcccttgacaatgcccgccaaaggggaggcttcctgggccgatagatggcttgacgaacaagcggtggctgtggagcccgcggcagcgcacaaggccatcgctgggttgtggcggggcaggagagatgagtgggggagactgggagagtgatgagccttttctgtaattgagacggactccaccaagatttgggtccagagtttgttttcacaatcaaacggtatcctcatgtatgtgcataaggaggaggatccctagaacttgattctttcctgtgcggccactgatggcatcctttatttgcgtcaaggatttccctcaagatttatgcatgcatgcgtggcacaaatttctttgctctcctaagtgggatttgagatcgtgtgaagctaagcttttcatcaagatggcacttgttgttatctatggatctatctaccccatacttccatggacaccggctactacaactgatgccaagtactgctgcatatatgctgcttgagctagatgctgctgcttcacacctgcttctgctagctggtaccaaacactgcatatatgctgcttcacgcctgcagaactgatggtgaattctatgtgtctgaactgaattgtatgaactcaagtgatgcttt

SEQ ID NO: 9238 - DNA, 1599 bp, Zea Mays
tacaactccatccatcaggcttaggccatccgagttcttttcagcgtccagttgtgcagggcggtcgcacacacaccacacacgcgccccgtccattccattctcatcgcgatcgaggtggcctggcactggtactggcactgccctcgctggccccaggccatggcctgtcttcgctagcttccttccttacagtataaatattttggtgcgccactgcgccagctccggcctgtcccttagttgtaccatcgtgtccttttcctcctacctcctccttggctggccctcttccccgtcttcctccctcttccttcgtctctccgtttcaagccctaccgacaggcatttgcttctgctccagtgatcagccccctcccctcctggcctcctctccacccggccaaaaactgatctttttttttcggttctggtaccatagctattagtagtcgtagcggctaacttgcaagccgattgtctctagcacgcaagtgtttttccctcccctgagattggtgggtgatcgagagttcgagacagtgtacacatacatactctgctcgtctgctgaggatcgatcgcttggtctcgttgttgcgtagataggtactagaggactatagctactagtaggactaggagaggatccgagggagagagagtaaggccaagatgatgcgcgcgaaccgggagcagagagtggccttctcgtcgacgaaggaggccgccgcggtgcccaaggaggaggtgtgggaggtccggcccggcgggatgctggtgcagaagcggagccccgacgcggacccgccccccggcggcgcgcccgtgcccaccatccgcgtcaaggtcaagttcaacggcgtctaccacgagatctacatcaactcccaggcatccttcggcgagctcaagaagctgctgtcggagaagacgggcctgcacccggacgaccagaaggtggtgtacaaggacaaggagagggactccaaggccatcgcccgcgccgccctcgacgtcgacaagctcgcaaccaaggtgtcggcgctggagacgatcgtgagcaagggcggcaaggtcgtggacgcggacgtggtgacgctgaccgaggcgctgatgaacgagctggtgaagctggactccgtcgccgccgaaggggaggtgaaggcggcgcggcgggcgcaggagaagcgggtgcagaagtacgtggagacgctggacgccatccgcgccaagaacaaggcggcggcggcggcggcgccggccaaggcccgcagcggcagcaacaaggcgcggccgccgcgcccgcccccggcttcggcgcacgcgcatcagagccagcagcagcgccggcagttccagccgccggcgccggtgtcgcagacccagacggcgagctgggagacgttcgacctcctgtcgtcagtgccgtcgacgtcggcggcccccgtgacgaccatggcccccgcgaccagcaccacgccgtccccgcgcttcgactgggagctcttctagatggctcctcaaggcgccagcctgccacacccccctggcctggcccccatctctcgccacttgtgtgcctgtccattggctcgg

SEQ ID NO: 9239 - DNA, 1660 bp, Zea Mays
ccctcttctctccgtccccacctactactcggcgcctctggtttctctccaagtctccatgctacgcgaccggaaacttccagaatctaccagtaccaccttcctctctctctctcactcttcctgcgcgacggtgcaccctagcccgatccgcggcgccgccatggtcgccgagcaggccaccaccactgtggctgtgggcgagccgccaactgccaccccgcagccggcggcggcagcggctgcggggcagaggtccgtgcccacgccgttcctcaccaagacgtaccagctggtggacgacccggcggtggacgacgtcatctcgtggaacgacgacgggtcggccttcatcgtgtggcggccggcggagttcgcgcgcgacctcctgcccaagtacttcaagcacaacaacttctctagtttcgtgcgccagctcaacacctacgaagatcgtgccggacaggtgggagttcgcgaacgactgcttccgccgaggggagaagcggctgctctgcgacatacaccgccggaaggtgacgctgccagtcgcggcggccacgagggcggtcacggtggtggcgaccatccccatggcgctgcccgtggactcgccggtgtactccggcgaggagcaggtgctgtcgtcaagctcgtcccccgagcccccgtcgctgctgcagcagcagccgacgccgtccgcgtctggctccggtgacatgggcgaggagaacgaacggctgcggcgggagaacgcgtggctcgcgcgcgagctcgggcagatgaagaagctgtgcaacaacatcctcctcctcatgtccaagtacgccgccactaagcagccggacgccgccaaggcggcggccgccgggaactgctccggcggcgagtcgtcgggcgccgccgcggcgcctccgcttccttcgatcctggagctcctgccctcctgccgccgcgaccccgcgtccgcggccgtcgacgcagcggcagcggcagcgggaacggagcacgaggttgatgaaaaggcgggcgctaggctgttcggcgtctccatcgggcggaaacgaatgcgggacgagagcagcggtcacggcggcggcggcgaggaccccgtgggccgctcggcggaggtgaaggcggagccggtggacgcgcgtctcgaccatcagcacagcgcgacggagccgcagtcgtggcccatttaccggcccaggccagtgtaccacccgctccgggcctgcagcggcttggtcagcgctgggagcgaccacgactggtccaacaactcgaggtgacttttgcttgcaagcccaatcgtccacaggttacaggttaaacttagaatgagagatcaagtgtttatgtagcaataactttttgttagtttatctcatattaccgcaagtttcgagtatcattcatgtatagcgatccattaaactagaggttaccttactgaggacgacttgaattaaagtcagttgtttaaactgctagtcagttatttagactgttatcgttgtatttcataatgttaagtaaccctaattagggttatgtgggtaaatatctgctttgcccctaaggggtctcacatctttatataagcaacttgtacaccacctcataagatagagaagagaaagaggccagaggccca

SEQ ID NO: 9240 - DNA, 1778 bp, Zea Mays
cttctaactgcagtctatagatgcgtgacaacccatttactgaactcttgagctagtatatcagacggagcgagtacaaagaacaaccaacaaactctgatttctccttgggaaaaagaaaaaacaaaggatcgaagtgaacaactaacactcaactattattagaccaaagcacacacttacttgaccaagcaaagacgcgtccatgtctatctatacgtgccttattaatttctatgcagccagccagtgactagtaacgaaacctattcgcatcgcatgtgtgcacaccaaaaatcagacgcaaacctcccgtttccgcttcagcggaagcaagctctgcttggccttggccggctgctccttcttgttgttgagcgccgctgcctcctcctgctcctcggcacggcggcggcagcagccgaggtgcgccgcgaggtcctccgcctccaccttcaccacgtccttgcgcaccccgatgtcggtgacgtaccggccggcgcagtacacgccggcggtgacggcggccacgccgagcgggccggcggcggccaggaggttgagcggggtggagaggagcgcggccagcggcacgccgacggcggacgcggcctgcccgctccgcccgatcccggttgcggcggcgggcagcagcgccgtcctgcagtagagcgcgaagtcctcgcagttgttcccgaacacgtcgtagtcgccgaagcagccgtgccggaggaggtgcatggcgcggcgcacggcggcggcgcccgcgtcggcgcgcgccgtggtgcacgtgcccccgcgcagcctggccaggaacgccgccgcggccgcgccgtactcgaagcggtgcgccgcgccgccgcgcaggaagcagtccaggcaggtcagcaccacgccgctgtcggggagttggaagccgcagtccgggagggaggcgggacacgcggcgccgtcgggcccctgctgcgagaggaggaggctgctggacgcggcgaccacggccgagtccaggcccgcgttgcccgcctccttcttacgcgtgaagtgcaccaccttgctgccgccgacgtagatccctgcatgatttgttgccgaatgagaacactattccgcatccatatgcatgccattctcttctcccccacacatgccagtgatgaaggatcaccccgtctaggaaggacgtccataatgtgcgggagcgggacaacaaaatgtcggtcccctacagcagctgcgcagagtgacaggaacagaacagggtgtggaagctttactttacgcttgcttgcttccggatgcagatcatcaatggccggtgaagtgaggagatgcaaaggaaaagagccatgcatgcgtggtaactctctcagtctcagctggacaaatgcatgggagcgcaaggacacaaagtcgaaaagcatgtgtctttgttggtcaccggatctgacgacgaccacgacggcgtaactaagacggtggtaacgattctttcgagcagagtgttccctgctgtacggatgcggcggaagtgcagagccaaacccaaaccaaccgccgcggaatcacccgcgaactcgctcgcttccttttccttgttgatgttgggcttcaacgacccacccggaaaatgagaatgccgcaattcagccattcaggcgtccccccgctgccggattgagaagactgaagaccagatgaggaagaggagggcggacgcgccgtaccgtggtgggagtaggtgtagccggcgcgccaggtgtagatgtggtccccgg

SEQ ID NO: 9241 - DNA, 1516 bp, Zea Mays
gatcctgtcaataatgaaagacgggaaaaagttaaagaggcaatgctccatgcttggagttcttatgttaagtatgcctggggaatggacgagcttcaggtttgtttagttggtactctgtattaattctgatctgcatttggttttacatttcctaactgattctagatctaaactgccttctgtcatttgctttgctcgcgttgattcccaaccacaatcgaagaatggtatcaacagctttggtggtcttggagcaacccttgttgactcacttgataccctatacataatgggcctgaaagatgaatttcagaaagctagagactgggtggcagagtcattagactttgacaaggattatgatgcgagtgtttttgaaacgaccataagggttgttggaggcctgcttagttcatacgatctatctggtgataaagtatttcttgataaggctaaagatattatagatcgactcttacctgcttgggatacaacatctggcatcccttataatagaataaacctagctcatggacgagccctaaatcctggatggactaacgcaattgctgagatcaattagtatggaagatccaaaggtgaagacgaaccaggaagctatcagtctcatgaagtcaatcaaggatccccaggcagcagcgaagtgaataagtgattgaccactaaagcgttggtaatgaagatcaaggatgatatctcttgcgttgtcatctatttccactgccgagttaccctctccaagataccgtgtttgttcagcaaattgtattggagtggaaatcacatgcttgttacaggttatgaatattttgagaaggaaggcaatcgagctattgtaatagatgaattagcttctgaattgggcctcagcccttcagtgccactacatgttgttctgtaagattggatcaggcatacggatgggaaattaagttttcttggatttgtcaagttgttgcatggcatgtccagcaggtccctatcaaagatgagatagttgtcgataatctctaacgacagcgcatgtttacaccgtcctgttgacttggttcacaggcaaattaacatggttaaagaatagtacgattggagcttgcctagcagcacctgatctgacactaatttaactataaagttatgtttattgttgcctgcctactgatcatttagtcgatagccgatagggaaataaaagaaaatctcacccatgtctgcagcatgtgatgtttctaacagccttagatgagacgtcatcttctgttatgattctgggaattttgtaatgcttctttcctcgaattggagcaagttagctgcaggttggcgtctggagcatggacataccactgtcattgtgacattgttactgtgtcattgttccaacagatgaaagtgtttgatatggtatgtcaggttctctatgtgtatatattgattgatgagatggaattgtgccatttttaaatatcggaatattaacatgtcaacttgc

SEQ ID NO: 9242 - DNA, 675 bp, Zea Mays
ccatattatagttcactttagctttattctaagtcagtttcctctaacttcggccaagtttatagaaaaatgtccggttggtgtttgatgagcccgagtctggagttacaatcataaagctcaaacaaactgatgtgccagaggaagacaagtatggaaattcaactgtggtagagaacaccgagagaggctggagagaactcatattccagcggatacgcggagtgttcggttttgggatctaaagaatctaaagaggcgatttggcatgaagttagatttcaaatttttacggggtcagaccatgcacgtcatagcaatccatgttttattcacccatttgttttccatgtccttaaacacagaacactgcatatcgtggggggtttaaaaacatctgttattcgaacgctgcaatgttgcttgctcccgaaatgagtcgacgctgatctgggttggttatcttgttgcaatgattaagaatgtgtgtcggtgtgaagcgttttagtggctatatactcggtcctcgtgttgtgttttcgttgcatttggacttcaattgagtcgctgtgtgctatagtaacgatcagatcatatccttgtctcgtgctcgtgccactcggaatctggcactctatactttctttattccagatgtgctgccatgatggtttt

SEQ ID NO: 9243 - DNA, 1909 bp, Zea Mays
caacaccgcactagcctagcctccccccgccgctcggccgaatagaatcgattccccctcctccgtcgctgtccggccgaccgcggagagcggagtcgatcgggggcgacaacgatggtggttagcgtggccgcgaccgggcccggcacggacgccgagccggtgagctccaccttcttcgcgtcccgctacgtccgcgacccactcccacggtaccggatgccggagcggtcgatcccgcgggaggcggcgcagcagatcatcagcgacgagctcatgctggacggcaacccgcgcctgaacctggcgtccttcgtcaccacgtggatggagcccgagtgcgacaagctcatcatggactccatcaacaagaactacgtcgacatggacgagtaccccgtcaccactgagctccagaaccgctgcgtaaacatgatagctcacctgttcaacgcgccgatcaaggaggacgagacagctattggggtcggaacagtgggatcctcggaagcgatcatgcttgcaggtctggcgttcaagaggaaatggcagaacaagaggaaggagcaggggaaaccgtgtgacagacccaacatcgtcaccggtgccaacgttcaggtctgctgggagaagtttgcaaggtattttgaggtggagctgaaggaggttaagctatcagaagggtactacgtcatggaccccgtcaaggctgttgagatggtggacgagaacactatctgtgtcgcggcgatcttggggtcgactctcaccggagagttcgaggatgtcaagcagttgaacgaccttcttacagagaagaacaaggaaactgggtgggacgtgcctatccacgtcgacgccgcgagcggagggttcatagcgcctttcctctaccctgagctcgagtgggacttcaggctgcctctggtgaagagcatcaatgtcagcgggcacaagtacggcctcgtctaccctggtgttggctgggtcatctggcggagcaaggatgatctgcctgaggagctcatcttccatatcaactacctggggacggaccagcctacgttcacgctcaacttctccaaaggttcctgtcagatcattgcgcagtactatcaactcattcgcctaggcttcgagaaacatcatggagaactgccaggagaacgcggcgatactgcgggagggcatcgcggcgacgggccggttcgacgtcctgtccaaggacgccggggtgccgctggtggccttctcgctcagggacagcagccggttcagcgtgttcgacgtctccgagaacctgcggcggttcggctggatcgtgccggcgtacacgatgccggccgacgcggagcacgtggcggtgctccgagtcgtcgtcagggaggacttcagccgcagcctcgccgaacggctggtctcggacgtccgcaagatcctgcgcgagctggacgcgcgcgcgacccacgccgtgagggtcgccaccgccaccgccgagcagtcgggcgacggcgtcgtggccaagaaaagcgtgctggagatcgagcgggaggtcgccgcgcgctggatgaacgccgtgaacaagaagaagacgggggtctgttgatgcgtcgtgggtcggagactgggaggtttcgccatggtagcttcgtctatatgtcgcgtgcttgtttgtgtctgtgcagggcgcttggatgcgttggtccagttccgcgtatgtgaacaaggtgtcgtatgcagtatgcaaatgttcaggatccaggaaccacaaataatggatgtaaatgttgggtttggtgccgtatgttgggtgtggagtatatttcttcgccaggtatttgctgtaatcctgtccctttacgttcgtgcactgcaatgagaataaaaaaaaaataagtgtcgttcacgg

SEQ ID NO: 9244 - DNA, 2120 bp, Zea Mays
caacaccgcactagcctagcctccccccgccgctcggccgaatagaatcgattccccctcctccgtcgctgtccggccgaccgcggagagcggagtcgatcgggggcgacaacgatggtggttagcgtggccgcgaccgggcccggcacggacgccgagccggtgagctccaccttcttcgcgtcccgctacgtccgcgacccactcccacggtaccggatgccggagcggtcgatcccgcgggaggcggcgcagcagatcatcagcgacgagctcatgctggacggcaacccgcgcctgaacctggcgtccttcgtcaccacgtggatggagcccgagtgcgacaagctcatcatggactccatcaacaagaactacgtcgacatggacgagtaccccgtcaccactgagctccagaaccgctgcgtaaacatgatagctcacctgttcaacgcgccgatcaaggaggacgagacagctattggggtcggaacagtgggatcctcggaagcgatcatgcttgcaggtctggcgttcaagaggaaatggcagaacaagaggaaggagcaggggaaaccgtgtgacagacccaacatcgtcaccggtgccaacgttcaggtctgctgggagaagtttgcaaggtattttgaggtggagctgaaggaggttaagctatcagaagggtactacgtcatggaccccgtcaaggctgttgagatggtggacgagaacactatctgtgtcgcggcgatcttggggtcgactctcaccggagagttcgaggatgtcaagcagttgaacgaccttcttacagagaagaacaaggaaactgggtgggacgtgcctatccacgtcgacgccgcgagcggagggttcatagcgcctttcctctaccctgagctcgagtgggacttcaggctgcctctggtgaagagcatcaatgtcagcgggcacaagtacggcctcgtctaccctggtgttggctgggtcatctggcggagcaaggatgatctgcctgaggagctcatcttccatatcaactacctggggacggaccagcctacgttcacgctcaacttctccaaaggttcctgtcagatcattgcgcagtactatcaactcattcgcctaggcttcgaggtactactgttcttcgatcggttcttcctcctcttgatcgaacattctgaatatatatgtgcaggggaacaaaagggggtgctgtctgatacgtttcttgagggcgagtcgtttttgtttctgttctcgctttgtgctgccgtaacagcctcccaatctggtcgggttttttttttttggtgccgcttctatctggtgtgtaggggtacagaaacatcatggagaactgccaggagaacgcggcgatactgcgggagggcatcgcggcgacgggccggttcgacgtcctgtccaaggacgccggggtgccgctggtggccttctcgctcagggacagcagccggttcagcgtgttcgacgtctccgagaacctgcggcggttcggctggatcgtgccggcgtacacgatgccggccgacgcggagcacgtggcggtgctccgagtcgtcgtcagggaggacttcagccgcagcctcgccgaacggctggtctcggacgtccgcaagatcctgcgcgagctggacgcgcgcgcgacccacgccgtgagggtcgccaccgccaccgccgagcagtcgggcgacggcgtcgtggccaagaaaagcgtgctggagatcgagcgggaggtcgccgcgcgctggatgaacgccgtgaacaagaagaagacgggggtctgttgatgcgtcgtgggtcggagactgggaggtttcgccatggtagcttcgtctatatgtcgcgtgcttgtttgtgtctgtgcagggcgcttggatgcgttggtccagttccgcgtatgtgaacaaggtgtcgtatgcagtatgcaaatgttcaggatccaggaaccacaaataatggatgtaaatgttgggtttggtgccgtatgttgggtgtggagtatatttcttcgccaggtatttgctgtaatcctgtccctttacgttcgtgcactgcaatgagaataaaaaaaaaataagtgtcgttcacgg

SEQ ID NO: 9245 - DNA, 1386 bp, Zea Mays
ctcctctctagctacgcacccacacagacacagtccaccactgctactccatggagacagcaggtcagacgacactccaggaaagcgctgtgcacgcccggaggcaggcggcgtgttggtggcctttggacaccacggcatgcagcagcttggacttggacgacgcgagcaccttcagcagcagcagcctcctccttggatgggaatgggatccacagctctgctgctttggtagtccccatgcccgagactctgagctcttcggccccacatcatccatggctgactgcgcccgtgtgataggcatggagtctccggtgtccgaggcgtcagcagcggcggccaccggggagctggacgatgaactactactcatgagcctgtggggcgagtgccacctcttcagttcctgcagcgctctcaaggagaagacggccacctcttcccaacgtactcctaagagtttacaatctgatgatgatcatcattccgatctgccgacatccccggccaagactactccggcgacggcacaagcagcagagccttcgcactgcgacgtggacctacgggccagttacaccggcggcgcccagcagcagcagcagcagcagcaccgaaccactcgtgccgccaacagctcgtcgaagcgctcggcgaccgaaccagaagagaaaggagcagaaggcggcaagaggagccgcaaggcgccgggctccaccgcggtggcggcgtacccgttcgccgtggtgaagcccggcggcgcggacggcggggtgacgctcgccgacatcaaccggtggatcctcacgccgccggctcgccccgtccggcaccccgtgggggagttcgcgtgcgccccacgcgtgtcggctgccaaccggccggggccgtcgggcaggacggtggccggcttcaccaggctccgcaccgctggcagaggcacgataaccatcgtgaggacaagaggctaattaaatttggtgactgaagtgaaaactagtgactagctagctggttgtattgttcgtgccgacaagagcaaagtagatcgctgcagagggctttttcagaaactgggttgggtagtggttgtggttgtaccagcggacaagaaggctcgtactgagaaattgtacatttgtaccatttgggtagatggttgctgtctttatgcttcaacacctgaaagttcacgcaaccgtgcaagttacggcgctgtagatttaggctcaacaagacgtataacacctaatatgctttgcaatatgctttcatgtatgtctataaatatagattctctctgtaatttgtgttcttcggttgatagtggatctgtttactcgtggttgttcgctcctccatattggagggaattttccacgt

SEQ ID NO: 9246 - DNA, 1361 bp, Zea Mays
agaccctcctctctagctacgcacccacacagacacagtccaccactgctactccatggagacagcaggtcagacgacactccaggaaagcgctgtgcacgcccggaggcaggcggcgtgttggtggcctttggacaccacggcatgcagcagcttggacttggacgacgcgagcaccttcagcagcagcagcctcctccttggatgggaatgggatccacagctctgctgctttggtagtccccatgcccgagactctgagctcttcggccccacatgcatggagtctccggtgtccgaggcgtcagcagcggcggccaccggggagctggacgatgaactactactcatgagcctgtggggcgagtgccacctcttcagttcctgcagcgctctcaaggagaagacggccacctcttcccaacgtactcctaagagtttacaatctgatgatgatcatcattccgatctgccgacatccccggccaagactactccggcgacggcacaagcagcagagccttcgcactgcgacgtggacctacgggccagttacaccggcggcgcccagcagcagcagcagcagcagcaccgaaccactcgtgccgccaacagctcgtcgaagcgctcggcgaccgaaccagaagagaaaggagcagaaggcggcaagaggagccgcaaggcgccgggctccaccgcggtggcggcgtacccgttcgccgtggtgaagcccggcggcgcggacggcggggtgacgctcgccgacatcaaccggtggatcctcacgccgccggctcgccccgtccggcaccccgtgggggagttcgcgtgcgccccacgcgtgtcggctgccaaccggccggggccgtcgggcaggacggtggccggcttcaccaggctccgcaccgctggcagaggcacgataaccatcgtgaggacaagaggctaattaaatttggtgactgaagtgaaaactagtgactagctagctggttgtattgttcgtgccgacaagagcaaagtagatcgctgcagagggctttttcagaaactgggttgggtagtggttgtggttgtaccagcggacaagaaggctcgtactgagaaattgtacatttgtaccatttgggtagatggttgctgtctttatgcttcaacacctgaaagttcacgcaaccgtgcaagttacggcgctgtagatttaggctcaacaagacgtataacacctaatatgctttgcaatatgctttcatgtatgtctataaatatagattctctctgtaatttgtgttcttcggttgatagtggatctgtttactcgtggttgttcgctcctccatattggagggaattttccacgt

SEQ ID NO: 9247 - DNA, 2533 bp, Zea Mays
gaggccacacacgagtttaccaagcggacacacgcgagtacatccggcgcccaccatcagccatgtgaagacagttaccttccctttgcaatccaactatatatagagatcaacgtcaaaaggaaccttaggctttgtaaacgactaacataggttgtgcaacctgtgcaatcatccatctcagtccaccagtcagctacccaacaaacaattttgcctcaatttgttgagccgttggcacgaagggtgtggcctctgtgcggtgatcccttgaccatgtcgattctgcacgatgactattggagtgatctaacacacctcttttttgtgcatgttgaccgtgtgaggaacacattggaggaattaagaaggagctcatgaatctgaccgtactggccatagttaggcaagcaatcgaccctatggtgaagttactagaaagcacatatgttggacgcttattagataagttttcccttccactgctcggcatatgtttgacacaagtgtattggttgtcttcagttgtctcatttattcactccatggtacaatgcttcaatttattcattgctaaacatatggagtagtggttgccttgttatgcgtattgattggattaaactttataagatagtatctgtcaatgataaatacctttatctgtatgaaaccatgagcaatcagatgttatacaaaattcttatggattaaagtgttaaatgtgaatctaacataaagtggacacattactaaattactcttttactgaacttatttcgaagccaaaattagaaattcaatcttccatcacttgagtatgtgtgtccttagatgacaaagtgaagctcttctctgtacaactttcatcaggtattgcaagcatatccatggttttggtgcctttaggaatcaatgcagtgtcacttggatactcttttttgtccctaggaaagggcattgctaaacatatggagtagtgggcgctttgttatgagcattgattggtttaaaatttataagatagtatctatgaatgataaataccattatctgtatgaaaccatgagcaatctcagatgttatacgaaattcttatggattaaagtattaaatatgaatcttgcataaaatggacataatactaaattactcctgtaccgaacttatttcgaagccaaaattagaaattcaatcttccatcgcatgatttcatttaataaaaattcaagaccataatatgtgcacactcatgcaatggcattcctccatatacaatgcctcggttttcctccctgcagtctgtgcccacctcatcgagtttcagctgtcttctcatgctgcgttgactttgctcaagcagcggaggaggagaggatgaggaaggagttcgaggtagagggtaggactctagcccaaaaggagaaatcagaggcaattgactccaatgtcattactccagagacgcaaacacgcagttcgtgtttgtactatatacgaaactttagtactacatacagttcagacttaaacacacgcttggatggcagtttatcaaggtgtttactagatttataaaattattctcaatcatagttagttactaaccgatatgttgtgtgtattcttcaagaaatattgtctgattccaatgtccttgaaaagagagagcacaaaaatttgtcatacatctgcctgcagcgcaatcttcctcactacaccaaaatgcttaacttcctagggcctaaaccgtaggaagttagctcaaaactcttagaagttatacaaaccgtcggaagttagccgaaaccgtcggaagttagcccgtcggaacaaattggtcggaagttaggctaacttccgacgggctctcggaagttaaggaaacttccgagagggccgtccgcctctcagaagttaatgattaacttccgagagggcgcttccctctcggaagttaagtgctgacgccgtccagcacgggctaacgccgtccaggcctggctttgatcccaatacacgacattgcttttatggcctggtaagtttacctcattttaaaatcactagcggtttctgtttaagctaaatctgtgttacaccttacccactctattttccaagacactgaattgattattatttctctagcaactaatgaggttcacttctcaaatttaagagaggtaaaacttcttattggtctttgttggaaagtatatttatacacatctagctatgtccaagttctggacccgaattttgtcctattcatggtaaattaggagtaatcccataattacataattcaactaatttacatgtgttctccatgccagggcaaccagtggtcaagttgcgcatttggttcggtgggaccttcgcccgtcctgcatgttatgggactctcaaaaacttgcactttccattacttgtacagagtctaacagatggccttactgctgatacacgataactgtttatatcgcggtcggggtttcaagactatggatagcttcatgctcattgtatt

SEQ ID NO: 9248 - DNA, 659 bp, Zea Mays
ctcttcaactttctgtcagtgttacacagtagtagcgttgacatctatatctatgcagcatctggcaaaactagctcatggtaggagattttggtatccttgtgcggtcaggcttcacggtatctaaggccctattcttcaatttcctctctgcgttggttgctcttgctggaacagcactagcattgtctttgggtaaagatccgggacattcctccctgattgagggtttcaccgccggtggtttcatttacattgctgtcgcgggagtcctaccacagatgaacgaccagaaaacaaccatcaagagctcagtagctcagctgatctccctggcaatggggatgctggtcgctctaggcatttctctggtagaataatctgaatccccatttcaccacttgcagctttaggtccaaccgagttaccccaagtcgatataatgctctagcagctccagactagaagcagggttttctgatcctctcgatatatagtaccaaaaagttttttttttttgaaattttggcatctggttatagattgcctcgcatcggtgttatttgaaggcaacccgtcgcactaactgaatactgtacaactttatggccggctggctgatgtcggctcataataaaataagtataaaaaagctaaaa

SEQ ID NO: 9249 - DNA, 1312 bp, Zea Mays
aatccatttacattttggcaaagaaaaaaagaggatggtacgaacttgagagtttccaagttttgtgaacaaaaaagcatctaaggcaaatgtgcatagaaaattcttgtggaacataacagtttttttaggaagcatagcctatgtgaaactaaaaaatagcagacaaatttggttcagtcaaaggaaatgtcgaggcacactttatcagatgttttatggcaaaatgtggaacagagcacctcatcgggtatacaacttatctcttaaaagtatgggaaagccaaattatgaaagctaaatgatggctctaagaaagcgtggtgtgttacatctatggttacaattcaagcactgaatatgttatgaaaaagagcaccgagtaaaggagaatcaaaattgcaatgtgtgtcggtaaaagaaatagtcgaagggcaacatcaaccaatttgccacatttggtgaaaagctaaagggaaaggttttgacactcaagaggagctcatccaaagccactgatggagaagccaccaattctggaagggatcctgcccctgaaaaagcaccatcaatttcaaactctaacttagtgtttggctacctcaaccttttctcagatggtgttcataacttcactgatgggatggctctcgggagtgcctttctgctgcatggttctgttggtggctggtctaggactttatttctgcttgcacatgaacttccccaagaggtaggagattttggtatccttgtgcggtcaggcttcacggtatctaaggccctattcttcaatttcctctctgcgttggttgctcttgctggaacagcactagcattgtctttgggtaaagatccgggacattcctccctgattgagggtttcaccgccggtggtttcatttacattgctgtcgcgggagtcctaccacagatgaacgaccagaaaacaaccatcaagagctcagtagctcagctgatctccctggcaatggggatgctggtcgctctaggcatttctctggtagaataatctgaatccccatttcaccacttgcagctttaggtccaaccgagttaccccaagtcgatataatgctctagcagctccagactagaagcagggttttctgatcctctcgatatatagtaccaaaaagttttttttttttgaaattttggcatctggttatagattgcctcgcatcggtgttatttgaaggcaacccgtcgcactaactgaatactgtacaactttatggccggctggctgatgtcggctcataataaaataagtataaaaaagctaaaa

SEQ ID NO: 9250 - DNA, 1838 bp, Zea Mays
gtctatagacctggatgtggtgagtggtgatgctcgggtggtgattggcattgtcactcgggctcttctttgttctcgtcgtcgtggtcaccatagagcgcgtctgcaagcgctcccaccccaaaaccccgcggacgcaccgacgcgcgagccataatgcgccgccaaagcctcgccaccgtactgctgctcctggtggccgccgcggccctggccgcccccgccgctgggcactttgagtcctcctgccccttctacgaccacggcggccacggcgaaccacacgaacgccacgaccatggccacagctgcggcggcggcgcggaccatgagcaccaccatcaccatcaccacggccatggacacggcgagatccagcggctgctcccggaggagatggcggaggaggcggatctcgagctcgagtccttcggttacgaagaccatgaccacggccaccaccaccaccaccaccatcaccacagccacggcgacatggagacatcgcccatgggcgtgtggctgagcgcgatggggtgctcgctgctgttaaggggaaaccgtctaaggccatagtggattcgcttgcagtgtttggggcaggagctatgcttggagattcatttcttcatcagctgccacatgcttttggtggagggcattctcactcgcatgatcatgagggtcatgatcatgctcatgctcatgagcatgcacatgcacactcactgcaagatctatctgtgggtttgtctgtactatttggcattgtactgttttttattgtcgagaagattgtgaggtatgttgaagacaattctcaaaatggggctcatagcatgggtcatgggcaccatcatcataatcataaacggcacgattctagcgataaagccaaattgaattaccaaaagagtgatactgatggtaaagacattgatcatgctgaagaggaaccttcggttaatgataccactggaaaaataagtgatggccatgaatcagaagctactatacgcaagaggagctcatccaaagccactgatggagaagccaccaattctggaagggatcctgcccctgaaaaagcaccatcaatttcaaactctaacttagtgtttggctacctcaaccttttctcagatggtgttcataacttcactgatgggatggctctcgggagtgcctttctgctgcatggttctgttggtggctggtctaggactttatttctgcttgcacatgaacttccccaagaggtaggagattttggtatccttgtgcggtcaggcttcacggtatctaaggccctattcttcaatttcctctctgcgttggttgctcttgctggaacagcactagcattgtctttgggtaaagatccgggacattcctccctgattgagggtttcaccgccggtggtttcatttacattgctgtcgcgggagtcctaccacagatgaacgaccagaaaacaaccatcaagagctcagtagctcagctgatctccctggcaatggggatgctggtcgctctaggcatttctctggtagaataatctgaatccccatttcaccacttgcagctttaggtccaaccgagttaccccaagtcgatataatgctctagcagctccagactagaagcagggttttctgatcctctcgatatatagtaccaaaaagttttttttttttgaaattttggcatctggttatagattgcctcgcatcggtgttatttgaaggcaacccgtcgcactaactgaatactgtacaactttatggccggctggctgatgtcggctcataataaaataagtataaaaaagctaaaa

SEQ ID NO: 9251 - DNA, 1778 bp, Zea Mays
gtgtctatagacctggatgtggtgagtggtgatgctcgggtggtgattggcattgtcactcgggctcttctttgttctcgtcgtcgtggtcaccatagagcgcgtctgcaagcgctcccaccccaaaaccccgcggacgcaccgacgcgcgagccataatgcgccgccaaagcctcgccaccgtactgctgctcctggtggccgccgcggccctggccgcccccgccgctgggcactttgagtcctcctgccccttctacgaccacggcggccacggcgaaccacacgaacgccacgaccatggccacagctgcggcggcggcgcggaccatgagcaccaccatcaccatcaccacggccatggacacggcgagatccagcggctgctcccggaggagatggcggaggaggcggatctcgagctcgagtccttcggttacgaagaccatgaccacggccaccaccaccaccaccaccatcaccacagccacggcgacatggagacatcgcccatgggcgtgtggctgagcgcgatggggtgctcgctgctggtcagtatggcgtcccttgtctgcctcgtcctcttgccggtcatcttctttaaggggaaaccgtctaaggccatagtggattcgcttgcagtgtttggggcaggagctatgcttggagattcatttcttcatcagctgccacatgcttttgttggcattgtactgttttttattgtcgagaagattgtgaggtatgttgaagacaattctcaaaatggggctcatagcatgggtcatgggcaccatcatcataatcataaacggcacgattctagcgataaagccaaattgaattaccaaaagagtgatactgatggtaaagacattgatcatgctgaagaggaaccttcggttaatgataccactggaaaaataagtgatggccatgaatcagaagctactatacgcaagaggagctcatccaaagccactgatggagaagccaccaattctggaagggatcctgcccctgaaaaagcaccatcaatttcaaactctaacttagtgtttggctacctcaaccttttctcagatggtgttcataacttcactgatgggatggctctcgggagtgcctttctgctgcatggttctgttggtggctggtctaggactttatttctgcttgcacatgaacttccccaagaggtaggagattttggtatccttgtgcggtcaggcttcacggtatctaaggccctattcttcaatttcctctctgcgttggttgctcttgctggaacagcactagcattgtctttgggtaaagatccgggacattcctccctgattgagggtttcaccgccggtggtttcatttacattgctgtcgcgggagtcctaccacagatgaacgaccagaaaacaaccatcaagagctcagtagctcagctgatctccctggcaatggggatgctggtcgctctaggcatttctctggtagaataatctgaatccccatttcaccacttgcagctttaggtccaaccgagttaccccaagtcgatataatgctctagcagctccagactagaagcagggttttctgatcctctcgatatatagtaccaaaaagttttttttttttgaaattttggcatctggttatagattgcctcgcatcggtgttatttgaaggcaacccgtcgcactaactgaatactgtacaactttatggccggctggctgatgtcggctcataataaaataagtataaaaaagctaaaa

SEQ ID NO: 9252 - DNA, 2475 bp, Zea Mays
gggaccctaagtgtctatagacctggatgtggtgagtggtgatgctcgggtggtgattggcattgtcactcgggctcttctttgttctcgtcgtcgtggtcaccatagagcgcgtctgcaagcgctcccaccccaaaaccccgcggacgcaccgacgcgcgagccataatgcgccgccaaagcctcgccaccgtactgctgctcctggtggccgccgcggccctggccgcccccgccgctgggcactttgagtcctcctgccccttctacgaccacggcggccacggcgaaccacacgaacgccacgaccatggccacagctgcggcggcggcgcggaccatgagcaccaccatcaccatcaccacggccatggacacggcgagatccagcggctgctcccggaggagatggcggaggaggcggatctcgagctcgagtccttcggttacgaagaccatgaccacggccaccaccaccaccaccaccatcaccacagccacggcgacatggagacatcgcccatgggcgtgtggctgagcgcgatggggtgctcgctgctggtcagtatggcgtcccttgtctgcctcgtcctcttgccggtcatcttctttaaggggaaaccgtctaaggccatagtggattcgcttgcagtgtttggggcaggagctatgcttggagattcatttcttcatcagctgccacatgcttttggtggagggcattctcactcgcatgatcatgagggtcatgatcatgctcatgctcatgagcatgcacatgcacactcactgcaagatctatctgtgggtttgtctgtactatttggcattgtactgttttttattgtcgagaagattgtgaggtatgttgaagacaattctcaaaatggggctcatagcatgggtcatgggcaccatcatcataatcataaacggcacgattctagcgataaagccaaattgaattaccaaaagagtgatactgatggtaaagacattgatcatgctgaagaggaaccttcggttaatgataccactggaaaaataagtgatggccatgaatcagaagctactatacgcaaggtatatgtaactgaactctgcttcggatgcaaaacatagaaagtatctggtatattttcccaaggcactgcaatccatttacattttggcaaagaaaaaaagaggatggtacgaacttgagagtttccaagttttgtgaacaaaaaagcatctaaggcaaatgtgcatagaaaattcttgtggaacataacagtttttttaggaagcatagcctatgtgaaactaaaaaatagcagacaaatttggttcagtcaaaggaaatgtcgaggcacactttatcagatgttttatggcaaaatgtggaacagagcacctcatcgggtatacaacttatctcttaaaagtatgggaaagccaaattatgaaagctaaatgatggctctaagaaagcgtggtgtgttacatctatggttacaattcaagcactgaatatgttatgaaaaagagcaccgagtaaaggagaatcaaaattgcaatgtgtgtcggtaaaagaaatagtcgaagggcaacatcaaccaatttgccacatttggtgaaaagctaaagggaaaggttttgacactcaaggttgaatagaggagctcatccaaagccactgatggagaagccaccaattctggaagggatcctgcccctgaaaaagcaccatcaatttcaaactctaacttagtgtttggctacctcaaccttttctcagatggtgttcataacttcactgatgggatggctctcgggagtgcctttctgctgcatggttctgttggtggctggtctaggactttatttctgcttgcacatgaacttccccaagaggtaggagattttggtatccttgtgcggtcaggcttcacggtatctaaggccctattcttcaatttcctctctgcgttggttgctcttgctggaacagcactagcattgtctttgggtaaagatccgggacattcctccctgattgagggtttcaccgccggtggtttcatttacattgctgtcgcgggagtcctaccacagatgaacgaccagaaaacaaccatcaagagctcagtagctcagctgatctccctggcaatggggatgctggtcgctctaggcatttctctggtagaataatctgaatccccatttcaccacttgcagctttaggtccaaccgagttaccccaagtcgatataatgctctagcagctccagactagaagcagggttttctgatcctctcgatatatagtaccaaaaagttttttttttttgaaattttggcatctggttatagattgcctcgcatcggtgttatttgaaggcaacccgtcgcactaactgaatactgtacaactttatggccggctggctgatgtcggctcataataaaataagtataaaaaagctaaaa

SEQ ID NO: 9253 - DNA, 1442 bp, Zea Mays
tcctcccgtttcatcagatccaagaaaccaacctcgctaggctagctaaccacaagaaagatcgcgcgctgcgagaggcgccggccatgagttcctgcgtcgccccccgcgttctcatcgtgtcgcgtcgcactgtccgcaagaacaagttcgtcgacttcgtcggtgagtaccacctggacctcatcgtgggctacggcgcggtgccggtgatcgtgccgcgcgtggcgggcgtggacgcgctgctggactcattcgagcccatccacggcgtgctcctctgcgagggcgaggacgtcgacccgtccctttacgagtccgctgacgacgccgacggctcgctctctccggagcagctggaggccatgcggcgcctgcacccgagcgacgtggccatcgaccgcgagaaggactccatcgagctccgcctcgcgcgccgctgcctcgagcgtaacatcccctacctcggcatctgccgcggctcgcaggttctcaacgtcgcctgcggcgggtcgctgtaccaggacctggagcacgaactggttcggcccgccgcgcaggtccagcacatcaactacggcgactacgacgggcaccgccacccgctaccaccaccagggcgtgcggcggctggcgcagcggttcgtgcccatggcgatcgcaccggacgggctcgtcgaggggttctacgacccggacacgtacaaccccggcgagggcaggttcatcgtgggcctccagttccacccggagcgcatgcgcaagcccggctccgacgagttcgactaccccggctgcgccagggcgtaccaggagttcgtccgcgccgtggtcgcgtaccaggagaagacggcggctccgccgcacctgcccctcagcgcacccctccccgcgtcaccgaagctgagcaaggagatgatgaggcggcgcaaggtcatcccccggagcttctcgctcgccatggacatgtacctatccgacagccacaccaagccggcggagaagcgcgaccacgaagccggcgccgagttcctcgagtcgaacacggcgtcggtgagcgcgtggcaggagaagcggctgaagcagatgggcgccacggcgcggaacgcgtcggggtacctcaacggcgtcaaggtgaacggcgtacgcgaggcggcggcgcgggcactcatggcggagatgagcgtgaaccagctatccgacctcgccaccttctaccagaccatgggcaagatctgctctgaggtgcttgacaccaagctgcagggttagcacccgaaaatgaatctgcagaatgaagactgagcgtgaagtatagcaaatacatgatgttattggacgataaatcaatgttgttaagccaaatggctattgttattaggccctcgttggatacatatatcaaactttagtcgtggatactagttagaagtattaaatat

SEQ ID NO: 9254 - DNA, 1962 bp, Zea Mays
atgttggacagccttgatctcaacctctgcacggaggatgaccgagatgaagacaataatgcccttctctgtgatataaccgacaaagacgattccagcgactcgaggttgttcatgcaccagaccaagcccgagccgcaggtgcaccgggagtctaggacctcgagctgggaacatcggaccacaactatgctgagcaagatcagcgacatcaggctggcacggctgaggccaccgtccgtcgccgatatcgtgacacactaccaggtgacattcaccgccagaactttctgctacatcgatccggagtaccaatggcagatccaagaaaccaacctcgctaggctagctaaccacaagaaagatcgcgcgctgcgagaggcgccggccatgagttcctgcgtcgccccccgcgttctcatcgtgtcgcgtcgcactgtccgcaagaacaagttcgtcgacttcgtcggtgagtaccacctggacctcatcgtgggctacggcgcggtgccggtgatcgtgccgcgcgtggcgggcgtggacgcgctgctggactcattcgagcccatccacggcgtgctcctctgcgagggcgaggacgtcgacccgtccctttacgagtccgctgacgacgccgacggctcgctctctccggagcagctggaggccatgcggcgcctgcacccgagcgacgtggccatcgaccgcgagaaggactccatcgagctccgcctcgcgcgccgctgcctcgagcgtaacatcccctacctcggcatctgccgcggctcgcaggttctcaacgtcgcctgcggcgggtcgctgtaccaggacctggagcacgaactggttcggcccgccgcgcaggtccagcacatcaactacggcgactacgacgggcaccgccacccgttgatggtgaacagctaccaccaccagggcgtgcggcggctggcgcagcggttcgtgcccatggcgatcgcaccggacgggctcgtcgaggggttctacgacccggacacgtacaaccccggcgagggcaggttcatcgtgggcctccagttccacccggagcgcatgcgcaagcccggctccgacgagttcgactaccccggctgcgccagggcgtaccaggagttcgtccgcgccgtggtcgcgtaccaggagaagacggcggctccgccgcacctgcccctcagcgcacccctccccgcgtcaccgaagctgagcaaggagatgatgaggcggcgcaaggtcatcccccggagcttctcgctcgccatggacatgtacctatccggcagccacaccaagccggcggagaagcgcgaccacgaagccggcgccgagttcctcgagtcgaacacggcgtcggtgagcgcgtggcaggagaagcggctgaagcagatgggcgccacggcgcggaacgcgtcggggtacctcaacagcgtcaaggtgaacggcgtacgcgaggcggcggcgcgggcactcatggcggagatgagcgtgaaccagctgtccgacctcgccaccttctaccaaaccatgggcaagatctgctctgaggtgcttgacaccaagctgcagggttagcacccgaaaatgaatctgcagaatgaagactgagcgtgaagtatagcaaatacatgatgttattggacgataaatcaatgttgttaagccaaatgttgttaagccaaatggctattgttattggacgataactttagtcgtggatactagttagaagtattaaatatagtctaattataaaactaattatatagattaggactaaacgataagacagatctattaaaccttattagtccataattcgtttatgtgatgccacaataaacatttgtattcgctgactataaattatttagtgttaataaattcttctcgtcgtttaatgttcatcttggtaattagttttataaaaatactatatctaaactt

SEQ ID NO: 9255 - DNA, 1653 bp, Zea Mays
ctagacctttcaagaacgaacgctgtgctgctcagatcagaccgtgtctgcctcaaagcgatgccaggacgccacgtccaagcaaagcacccgatgccattgccacctcccagcactcacgcgtgagcgtgactataaaaaacgcaccctctgcatccgcccccgtctgcctgccctaccgaatctttcgccgtcccatcagcccagcaattcttcgctgttcgaggacccctcggtttcgaccgaagcccagcaagccgaccacacaccgctgccgttggttccgtcccaagagatgggcaagtcctggtcgctcatcagccacctccacaccgtcgccgggccaagcatcaccctgctgtaccctctgtacgcgtcggtgtgcgcgatggagagcccgtccaaggcggacgacgagcagtggctgtcatactggatcatacactccttcgtcaccctcctggagatgctcgccgagccgctcctccactgggtacccgtgtggtacccggccaaggtgctgttcgcggcgtggctggcgctgccgcagttcaagggcgcctccttcgtctacgagaagctcgtcagggaacagctccggaactaccgcgccagatacccgcgcaagggcgccgccgccgccgccgtcggcggcgacgacgacgaccataaggtgcacatagccaagtgaaagcgtgtggagacgacgcaggagctgaccggagatcatcacaggaacttctgtagatctggtgttccaaggtgttcattcgatgtatcatcctacgtatctctgtaactcttgtggactgccggtgtcgcgtaatgtatctgaactcttcgtgagtgcgatggaacccccctccccttgcagcacgagatgcttctgtaagaacgataacatgtagacaagccaagcgcctcagctccttaagtgaaattctctactactactactactataatgcaccagctttgtgcacggatgaattcatgcatcgtgcccatccccacccaaggactagattcaagtcaactacatgctatgcattacaacaagcatctgttgcttgcacaaatggataaatggcataaagggaataaaaattgggctagataaatggcataaagggaataaaaattgggctattgctatggtgcagaaacaagacagtactgcaatttgtctagatttagtgcctaaaaatatcgaagctgtggtcatagactaattctcttcccccttcgagatactatgatcacaccatgtccctattgcctgatatagtctagtgaagtccaaaccatatatactcaccttctcaaaaggagccatatatatatactcaccttctcaaaaggatacgagatatgtaggacacgatgagatcgaaaaacaagttcagtccatgtttgataatggcattatttcagtaagttgtcaaaaagtgttagttcatttgctaccctagtcgtattaggtgaaagaaaaaggatggcacatgaagattttgcatagactacatgaaattgaatgatgtaacagtatggaacaaatttcatatgctagttattgatgaatttaattcttggatgaactggtcggtgctaagttttttttagtatggaataaatttcatatgctagttattg

SEQ ID NO: 9256 - DNA, 585 bp, Zea Mays
tcggagtgcgcccgtcgacggtcgaccgtcggtccgccctccatggcttcaccgtttgggtacgactagccagccagagccagcatcgtcgtcgagcgccggctcgcccctcggcgactcgaccagccgggagccgctagtgcctagttggccagtaagagtgtcgtggtgacagtcgggcagtgtcgcggtgaggtagtcgacctgatgtcctccattccaatttcccagtcgaggcaggcgtcgatgttcttgagtgcagcctcctcgagcccggagaggtatcaatggccctccttgagcatcgaatggatcccatagcccgccatagagccgagccccaccatcatcgtctctggctaggtgtggggcgttggtatggcggtaggggacagcgccgaaggagaggtggattgggggagcggcggacggaggcgcgagcagtgaaggactggctgcagcccacgcgctgcggacggggcgagcggctaggggagttgcgagcggtgagcggttgggggaggcgtttgcgggcggcgcacgatgatttcagcgcgaccgggggagtgacggtttcggggcgag

SEQ ID NO: 9257 - DNA, 304 bp, Zea Mays
ctcggatctcggcaagttgggctaggaaggtgcggattaacttgagaaaattgagcaactcaaaagaaaacatgtgaagtgtttttgatccatgcatgtatggccataagcaggggcagatattaggcctgggccacctgggccgtggcccgggtcgtagcccaaaaacattcttatatatgtatagatttttggtaaaaaaaaccctaaatgggcctcaaaggcctgcaactcgcagccttcaatcccaattcccaggccccctatcgttttgttgcctgggcagtgggcacgctcgacgcag

SEQ ID NO: 9258 - DNA, 292 bp, Zea Mays
gacaggaaacagttctaaaattttcggacagcaaactgcaaattttggacaggaaccgaaacctcacatatatgtggcagttttgctgaacttctggcaagttttacagctgcaattcaaacaatagccttacccatttgcttcaagaatattttccacttactaaataagtgttgctgctagaatggccgagtgcttttgctgctggattttgtccaaacatgcaccctttcttttccctcaagtaagagctgctggaaaggctcctgttaagaaacagtctgctaggaac

SEQ ID NO: 9259 - DNA, 3526 bp, Zea Mays
ctgaccttgatggagccgtcgacgcatccgttctctgctttccctcctctctgtctgtctctctctctctctctctctcgccaaacctacctctctggctctcactaactctcacggcgacggcacggcgggtcggcactcgacagccatgacggggcagcccacccatggcacggcggcgcgatggccttggcccctggctccggccgggcgaggtggcatcggcacgggcttggccggctccacggtgcgcacgcggccagcccccaggcgcacgcgactccgccagcgcgagcttggtgggtcctcggcgcacggcggctccatcggcgcggaagcgctcggacgccgccccctatgtgcgcagcgctcggacgacttccccggccaccgtatccaatcacaatgcccaacgctcctctcgcactgctcgcgcaccgccaagggctggcctgctctgcgcaactgacggcgcctgcttgtgggtgcaaccacgagggctgagggatggagctagctcgtctcgtgcttggccgaacaagtgcagttgccgtcgtggagcggaatcagcgccacaactgtcagattggaaggcgccacgaggctggctggcacgtagagatgcaagggaatccgattctttacagggatgagaaaatttttccctcacaagaatgtaaattgagaacggagacggcgacaggtaaggtttcgtcatcctcatttctcgcgggacccgttaaaactacatgtgatgatatttttttataatagttaataataaaaataaataattatcttgtaaggagatcattcattatataaatatgtttatttagatgtgcatataatgattttttatattaaatgacaatattttctattaataacaaagaacgtacgttctaattataatttaagcagagatgagcatcctcatgtgaaattcttttcttcgtgaggacagagatggtgagctattccctgccgaggaattcctgttgctatctctactgggacgccgacaatcgtggccgtggtgcaaggggtagctgtaaaactcaaaatcttatgtcgggttttattaaagtctctctaaaagaatcgggttaaaacatctttaataatatatttctttctttataaactatacttccctaaagtaaataaatagtaatattaaattttggtaagcgcaaaaagttagagtttcgaactagttcatccaagaaaaaggaaataatagaaatgtcttctttaaattaagtgaatactcttttcattaaaggttgcatctagaagcatttatttaaacagttagcaaatgaataagtaaaatgtagttgcgtctcatgcgggtcttgtctgtgcataaaaaaacttgaaatgcaaaacttagatcagaattcaaatttgaatttgaatctaataacatgaaacaaaacagaaaacaaaaagaatgaaaaaatggaaacaacacttgggccatctctacaccctgtcggtccaaactccaaaccatactcatcccatgtgtcccatctcttgtttacactcatgtcggcccagttgagtgcctggtgccgcacgcgagctaacgggtcgctgacggcgggggccacttgccggtttttgtctcctccgcctctggcaggtggggcccactcgtcggcctcactaccgcctcactctaccaagctcgtcttctccacgaatctgtttcaacagatgccgtattcgccgtcgtctccatgaaatccggtgcccccacaacaacctctgtttatctcggccgagatgagattctccctagtgtataaatcccgaaggccgtgttccctcgtaacctgctcccgcaaaccacaccgaggcgccacgaggggggagggaagcagggagatggcaccatcactactcgtgcacaccatcaaccgagccccagctaacacagcaggaggttcgccggtgcacatcggtcatgctgtgggccggccatggggagacaggagcttggcgcgacgggattgctcgccgctgttgctgcgcctccaaggaaccgtggttcagcgagggcagtgttctgcgcattccaaccgccgataattaaccctcacccgtgttcattgtggtcttccatcgtgtatcactggtcaaatcagaatttagggctaaggatcgagggatggtgtggtccggccatggctccgccgtgggggttgacggcgccaccgcgtctggccactgagtggtggtggcgctcgtgggccgttaatcgatcaaccaacgactaggatcaggggaacacataccccttcgcttggattgggtccaagccgttagattgagatttgaggatggagattagatcatgactttcttaaaatctgaactgttgttggtagatccggtggtgtaggttacgtactgtttcgactttatgataaattcgatatggaccgtaggatcctatctgggcggctcgggatgccgatatagcttcggtcgcagccattttataaaagagaccccataaatttattaaatcaacttgccctccctaggcagagaaaatcctacatcaaggtccctggactttgcatttaagcccctagaagataattttaggtataaaaatgatcctaaataacctagaaagttataagtttcataacttttgtgtcctaactctgatttaagcctttcaagttctgttagctttgtaataatattgcataagcttccattacattattttatcaaataacatgttttcaaaaataaatattcatttaatctatgcttagtatattattccttctaatcaaagttaatgcatccataactatagtttgactaaaatgtaacctctagtcaagttataacctaaaattaaagataaattagttatttatttgtcataaccttactgacttatattaatcaaacctagattatagttctcctggttgatcacctaaaacatagaaagcccataactctctcatgttaacacctgattctagtggttctcgaacctacgttcttgtagcatcgcgtagaatattcttacgtagtttgttcgcatgtttggtgtaatgttatttttatgtactccttgtctatttgtatgtattgctataggtagcagcgaggtcacgagaaacccgaataccaacttggtgaagtacatggaatttcaagtcacaggcaagttgtgcccttgatcactcttctttacccaattatgttcttgttaatcattatgatctgtatagattaattttgatgggacctattggtaccttggattgggggtaccccttactacagcatgaaggcgcgatgcccatgcgactatccctagtcacatggtgaacagcgcctggctccaccacgtggatggctccagggtcgccatgtggccagagagagcgatacactccaagatgccaactgtggatccggacccccatgggaaagtgttggacccctacatgtagaccggacctccgaggcaaggtctagg

SEQ ID NO: 9260 - DNA, 1541 bp, Zea Mays
gggctgtcctgcccttcttcccacggttcacggctgattgagtcggccactgcccacgccacccaaaaactcatggccagcgctgtctgcggcgtcaccgcgcgcgcccacctgccttccgccgtccctgcagccgcaagaaagctcttcttccgctgcagggccgcgtccaccatgaacgaggcatcggcgagctcgccggacgccgaggagaagaagacgacgactgtcttcgtggccggctcgacggggcgcaccggcaagctcgttgtggagaagctgctggccaagggattcggcgtcgtcgccggtacgacggacgtgagcagggcccgcggcagcctgccccaggaccccaaccttcagctcgtcagggctgacgttacggagggcgtcgacaagctggtggaggccgtgcgcggcgtcgatgctgtcgtctgcgcgacgggattccggcggtcctttgacccttttgctccgtggaaggtagacaactttggcacagtgaacctggttgaagcatgcagaaaggctggcgtagcaagattcgtactcgtcagctccattttagtaaatggggccgccatgggtcaacttctgaatccagcctacattgtgctcaatctacttggcttaacactggtcgcaaagctacaggcagagaatcacatcaggaaatcaggaatagattacactatcgtaaggcctggagggctgacagatcaacccccaacagggaatatagtcatggaacctgaggacactctttattcgggatccatatctcggagccaggttgctgaagtagcggttgaagcactggtgtgtccagagtcttcctacaaagttgttgagattatcgcccgtactgatgctccaaatcgctctctgaaggatatgtacgctgcaattaagcaaaattgactgctctatttttttgacaggatggttagtttgttatacaaccatgaatcaatgaagaacacttatagtctatgtatttggcattcgacagtatatttttgactcgcgaaaatctcctgaagccttcagtctaggccggctagttcacctctaaaaccggtcagaccgggtgtccaacatcagctagactggccaaaacatcaacagacttttctatgactacgggggaaagaagagcaagatctaatctgctagcaacaagtcaggttttgagaacactaaggggaaggaggatcacatcgacccttcaatccaaagaacaccaaccatcctacattgatagaagttcttgatgatcttcatcagaagattgaagccaagtctactgccaatctaaaggctttcttaaagagttaatgattagtgagacaaggttactcaattcgtgagcctaacttcaataattctattgtttctacatctgctataccagaggtaaagattgatgaaaaggttctgtttcgggcgacccattggcttaggttttgggcatatttgcagagggttgaagaccaggagataatcaaggagacgtgtcgacggattgaagtcgcatc

SEQ ID NO: 9261 - DNA, 1367 bp, Zea Mays
gggctgtcctgcccttcttcccacggttcacggctgattgagtcggccactgcccacgccacccaaaaactcatggccagcgctgtctgcggcgtcaccgcgcgcgcccacctgccttccgccgtccctgcagccgcaagaaagctcttcttccgctgcagggccgcgtccaccatgaacgaggcatcggcgagctcgccggacgccgaggagaagaagacgacgactgtcttcgtggccggctcgacggggcgcaccggcaagctcgttgtggagaagctgctggccaagggattcggcgtcgtcgccggtacgacggacgtgagcagggcccgcggcagcctgccccaggaccccaaccttcagctcgtcagggctgacgttacggagggcgtcgacaagctggtggaggccgtgcgcggcgtcgatgctgtcgtctgcgcgacgggattccggcggtcctttgacccttttgctccgtggaaggtagacaactttggcacagtgaacctggttgaagcatgcagaaaggctggcgtagcaagattcgtactcgtcagctccattttagtaaatggggccgccatgggtcaacttctgaatccagcctacattgtgctcaatctacttggcttaacactggtcgcaaagctacaggcagagaatcacatcaggaaatcaggaatagattacactatcgtaaggcctggagggctgacagatcaacccccaacagggaatatagtcatggaacctgaggacactctttattcgggatccatatctcggagccaggttgctgaagtagcggttgaagcactggtgtgtccagagtcttcctacaaagttgttgagattatcgcccgtactgatgctccaaatcgctctctgaaggatatgtacgctgcaattaagcaaaattgactgctctatttttttgacaggatgcatcaacagacttttctatgactacgggggaaagaagagcaagatctaatctgctagcaacaagtcaggttttgagaacactaaggggaaggaggatcacatcgacccttcaatccaaagaacaccaaccatcctacattgatagaagttcttgatgatcttcatcagaagattgaagccaagtctactgccaatctaaaggctttcttaaagagttaatgattagtgagacaaggttactcaattcgtgagcctaacttcaataattctattgtttctacatctgctataccagaggtaaagattgatgaaaaggttctgtttcgggcgacccattggcttaggttttgggcatatttgcagagggttgaagaccaggagataatcaaggagacgtgtcgacggattgaagtcgcatc

SEQ ID NO: 9262 - DNA, 1890 bp, Zea Mays
gggctgtcctgcccttcttcccacggttcacggctgattgagtcggccactgcccacgccacccaaaaactcatggccagcgctgtctgcggcgtcaccgcgcgcgcccacctgccttccgccgtccctgcagccgcaagaaagctcttcttccgctgcagggccgcgtccaccatgaacgaggcatcggcgagctcgccggacgccgaggagaagaagacgacgactgtcttcgtggccggctcgacggggcgcaccggcaagctcgttgtggagaagctgctggccaagggattcggcgtcgtcgccggtacgacggacgtgagcagggcccgcggcagcctgccccaggaccccaaccttcagctcgtcagggctgacgttacggagggcgtcgacaagctggtggaggccgtgcgcggcgtcgatgctgtcgtctgcgcgacgggattccggcggtcctttgacccttttgctccgtggaaggtagacaactttggcacagtgaacctggttgaagcatgcagaaaggctggcgtagcaagattcgtactcgtcagctccattttagtaaatggggccgccatgggtcaacttctgaatccagcctacattgtgctcaatctacttggcttaacactggtcgcaaagctacaggcagagaatcacatcaggaaatcaggaatagattacactatcgtaaggcctggagggctgacagatcaacccccaacagggaatatagtcatggaacctgaggacactctttattcgggatccatatctcggagccaggttgctgaagtagcggttgaagcactggatggttagtttgttatacaaccatgaatcaatgaagaacacttatagtctatgtatttggcattcgacagtatatttttgactcgcgaaaatctcctgaagccttcagtctaggccggctagttcacctctaaaaccggtcagaccgggtgtccaacatcagctagactggccaaaagttaagtgctcgttcccgtgaaacctggctagccgattttttcagattttgaaccggtttattcgaaatcgatttgtggatctatcttgacgtgaaaaaaattagagaatgcattttgaattgttaagaacgcatctactacatccttctaccctcacttatctatccaccttgttgtttgtcatgtcatcttgcaagatttaacggtgttctaagtggtcttgtcgatccaaggaaaacctctaaatacttgttctcgatgagatgagtcttcacaggaggtactcaggagtctaccaagcaaagaaaaggaccaacattagtctaactaacccctttatcgacaacgggatcaacattggtctaaccaaccccttgattggttttgttagtctgctatgttcttgttgtgatcaagattatttgtaaccatgggtgttctaacttttgctggtgtgtgatccaaatcagcatcaacagacttttctatgactacgggggaaagaagagcaagatctaatctgctagcaacaagtcaggttttgagaacactaaggggaaggaggatcacatcgacccttcaatccaaagaacaccaaccatcctacattgatagaagttcttgatgatcttcatcagaagattgaagccaagtctactgccaatctaaaggctttcttaaagagttaatgattagtgagacaaggttactcaattcgtgagcctaacttcaataattctattgtttctacatctgctataccagaggtaaagattgatgaaaaggttctgtttcgggcgacccattggcttaggttttgggcatatttgcagagggttgaagaccaggagataatcaaggagacgtgtcgacggattgaagtcgcatc

SEQ ID NO: 9263 - DNA, 1321 bp, Zea Mays
caagggctgtcctgcccttcttcccacggttcacggctgattgagtcggccactgcccacgccacccaaaaactcatggccagcgctgtctgcggcgtcaccgcgcgcgcccacctgccttccgccgtccctgcagccgcaagaaagctcttcttccgctgcagggccgcgtccaccatgaacgaggcatcggcgagctcgccggacgccgaggagaagaagacgacgactgtcttcgtggccggctcgacggggcgcaccggcaagctcgttgtggagaagctgctggccaagggattcggcgtcgtcgccggtacgacggacgtgagcagggcccgcggcagcctgccccaggaccccaaccttcagctcgtcagggctgacgttacggagggcgtcgacaagctggtggaggccgtgcgcggcgtcgatgctgtcgtctgcgcgacgggattccggcggtcctttgacccttttgctccgtggaaggtagacaactttggcacagtgaacctggttgaagcatgcagaaaggctggcgtagcaagattcgtactcgtcagctccattttagtaaatggggccgccatgggtcaacttctgaatccagcctacattgtgctcaatctacttggcttaacactggtcgcaaagctacaggcagagaatcacatcaggaaatcaggaatagattacactatcgtaaggcctggagggctgacagatcaacccccaacagggaatatagtcatggaacctgaggacactctttattcgggatccatatctcggagccaggttgctgaagtagcggttgaagcactggtgtgtccagagtcttcctacaaagttgttgagattatcgcccgtactgatgctccaaatcgctctctgaaggatatcatcaacagacttttctatgactacgggggaaagaagagcaagatctaatctgctagcaacaagtcaggttttgagaacactaaggggaaggaggatcacatcgacccttcaatccaaagaacaccaaccatcctacattgatagaagttcttgatgatcttcatcagaagattgaagccaagtctactgccaatctaaaggctttcttaaagagttaatgattagtgagacaaggttactcaattcgtgagcctaacttcaataattctattgtttctacatctgctataccagaggtaaagattgatgaaaaggttctgtttcgggcgacccattggcttaggttttgggcatatttgcagagggttgaagaccaggagataatcaaggagacgtgtcgacggattgaagtcgcatc

SEQ ID NO: 9264 - DNA, 1635 bp, Zea Mays
gagcaagggctgtcctgcccttcttcccacggttcacggctgattgagtcggccactgcccacgccacccaaaaactcatggccagcgctgtctgcggcgtcaccgcgcgcgcccacctgccttccgccgtccctgcagccgcaagaaagctcttcttccgctgcagggccgcgtccaccatgaacgaggcatcggcgagctcgccggacgccgaggagaagaagacgacgactgtcttcgtggccggctcgacggggcgcaccggcaagctcgttgtggagaagctgctggccaagggattcggcgtcgtcgccggtacgacggacgtgagcagggcccgcggcagcctgccccaggaccccaaccttcagctcgtcagggctgacgttacggagggcgtcgacaagctggtggaggccgtgcgcggcgtcgatgctgtcgtctgcgcgacgggattccggcggtcctttgacccttttgctccgtggaaggtagacaactttggcacagtgaacctggttgaagcatgcagaaaggctggcgtagcaagattcgtactcgtcagctccattttagtaaatggggccgccatgggtcaacttctgaatccagcctacattgtgctcaatctacttggcttaacactggtcgcaaagctacaggcagagaatcacatcaggaaatcaggaatagattacactatcgtaaggcctggagggctgacagatcaacccccaacagggaatatagtcatggaacctgaggacactctttattcgggatccatatctcggagccaggttgctgaagtagcggttgaagcactgtatatttttgactcgcgaaaatctcctgaagccttcagtctaggccggctagttcacctctaaaaccggtcagaccgggtgtccaacatcagctagactggccaaaagttaagtgctcgttcccgtgaaacctggctagccgattttttcagattttgaaccggtttattcgaaatcgatttgtggatctatcttgacgtgaaaaaaattagagaatgcattttgaattgttaagaacgcatctactacatccttctaccctcacttatctatccaccttgttgtttgtcatgtcatcttgcaagatttaacggtgttctaagtggtcttgtcgatccaaggaaaacctctaaatacttgttctcgatgagatgagtcttcacaggagcatcaacagacttttctatgactacgggggaaagaagagcaagatctaatctgctagcaacaagtcaggttttgagaacactaaggggaaggaggatcacatcgacccttcaatccaaagaacaccaaccatcctacattgatagaagttcttgatgatcttcatcagaagattgaagccaagtctactgccaatctaaaggctttcttaaagagttaatgattagtgagacaaggttactcaattcgtgagcctaacttcaataattctattgtttctacatctgctataccagaggtaaagattgatgaaaaggttctgtttcgggcgacccattggcttaggttttgggcatatttgcagagggttgaagaccaggagataatcaaggagacgtgtcgacggattgaagtcgcatc

SEQ ID NO: 9265 - DNA, 1311 bp, Zea Mays
ataacaattctgattacgcgactcgctgatcgccagcttgtggtcgcgatgccgtacaccggatatcctctagcgccttcccacaatcgcgcttctgcggttctgccgccgacgtccgcgccgccgacgtccgcgcccgcgtccctcgctgctttgccctctccaccctccgccatcaccgccgcggcgtccttctgtaccggatccgtcgcagccaccactccgcagatccgctgggttgacgtccacggagctgctccggggatgtcgtcctccgcttccagcgtcgagggcgacgccgccggagagttcacggaggtcgtaatcgtgcgtcacggcgagacgtcatggaacgcctcgcgcatcatacagggacacttggatgcagagcttaatgatattggaaggcagcaagctgttgcggttgctcatcgtctttctaaagaagtgaaaccagttgccatatactcttctgatctgaagcgagcagcagagactgcgcaaacaattgcaagaatttgcaatgtgccaaatcactgagagaaagacacattggagatctgcaaggcatgacgcttcaagatgctgctacagagaggccagaggcatacaaagcttttatgtcccacaagagaaatcaacaagttcctggtggtggagagagtcttgatcaactgtcggagcgatgtgtgtcttttctgtacgacattgttggtaaacacaaaggcatgtcgaagaaatgctactctgatgtttgcctgtgaggctgatgaacccaccaccgtctactgacacaggggagcgagttatcctggtttcacatggcggcaccatcagagagctctacagacacgtgagtcccacgaagccgctccacggcaaaatacacaacacgtcggtgagcgtcatcctcgtgtccgacgccaccggccggtgcatcgtcaagatgtgcggggacgtcagccacctccaggagacgggcgtcctggagaacgccttcggtggcgacaagacctccgcctgagattccaacattcatcacgcgccgagagctctcggcaattatcacgcgccgagtgagcgctcgtttcggccgtctttttttccactgtaccaatcatcctgttgctaccagtagtggtctagcggagaatgatgcacacttccccccgctgggaacgcggcgatttttgctggaacagttgaaggccgagccggggcgaatccttttggcctggccgtgcactgcttgctgaactgcacgtacgcatgtggagctgaaacgatctgcgttcgctcatgttcgtccac

SEQ ID NO: 9266 - DNA, 1231 bp, Zea Mays
ataacaattctgattacgcgactcgctgatcgccagcttgtggtcgcgatgccgtacaccggatatcctctagcgccttcccacaatcgcgcttctgcggttctgccgccgacgtccgcgccgccgacgtccgcgcccgcgtccctcgctgctttgccctctccaccctccgccatcaccgccgcggcgtccttctgtaccggatccgtcgcagccaccactccgcagatccgctgggttgacgtccacggagctgctccggggatgtcgtcctccgcttccagcgtcgagggcgacgccgccggagagttcacggaggtcgtaatcgtgcgtcacggcgagacgtcatggaacgcctcgcgcatcatacagggacacttggatgcagagcttaatgatattggaaggcagcaagctgttgcgtgaaaccagttgccatatactcttctgatctgaagcgagcagcagagactgcgcaaacaattgcaagaatttgcaatgtgccaaatgtcgtgttcgatccagcactgagagaaagacacattggagatctgcaaggcatgacgcttcaagatgctgctacagagaggccagaggcatacaaagcttttatgtcccacaagagaaatcaacaagttcctggtggtggagagagtcttgatcaactgtcggagcgatgtgtgtcttttctgtacgacattgttggtaaacacaaaggggagcgagttatcctggtttcacatggcggcaccatcagagagctctacagacacgtgagtcccacgaagccgctccacggcaaaatacacaacacgtcggtgagcgtcatcctcgtgtccgacgccaccggccggtgcatcgtcaagatgtgcggggacgtcagccacctccaggagacgggcgtcctggagaacgccttcggtggcgacaagacctccgcctgagattccaacattcatcacgcgccgagagctctcggcaattatcacgcgccgagtgagcgctcgtttcggccgtctttttttccactgtaccaatcatcctgttgctaccagtagtggtctagcggagaatgatgcacacttccccccgctgggaacgcggcgatttttgctggaacagttgaaggccgagccggggcgaatccttttggcctggccgtgcactgcttgctgaactgcacgtacgcatgtggagctgaaacgatctgcgttcgctcatgttcgtccac

SEQ ID NO: 9267 - DNA, 1293 bp, Zea Mays
ctttagaccttccttcggcaaaaaaaactacggcccatccgctaattttggctcggcccataacaattctgattacgcgactcgctgatcgccagcttgtggtcgcgatgccgtacaccggatatcctctagcgccttcccacaatcgcgcttctgcggttctgccgccgacgtccgcgccgccgacgtccgcgcccgcgtccctcgctgctttgccctctccaccctccgccatcaccgccgcggcgtccttctgtaccggatccgtcgcagccaccactccgcagatccgctgggttgacgtccacggagctgctccggggatgtcgtcctccgcttccagcgtcgagggcgacgccgccggagagttcacggaggtcgtaatcgtgcgtcacggcgagacgtcatggaacgcctcgcgcatcatacagggacacttggatgcagagcttaatgatattggaaggcagcaagctgttgcgaagtgaaaccagttgccatatactcttctgatctgaagcgagcagcagagactgcgcaaacaattgcaagaatttgcaatgtgccaaatgtcgtgttcgatccagcactgagagaaagacacattggagatctgcaaggcatgacgcttcaagatgctgctacagagaggccagaggcatacaaagcttttatgtcccacaagagaaatcaacaagttcctggtggtggagagagtcttgatcaactgtcggagcgatgtgtgtcttttctgtacgacattgttggtaaacacaaaggggagcgagttatcctggtttcacatggcggcaccatcagagagctctacagacacgtgagtcccacgaagccgctccacggcaaaatacacaacacgtcggtgagcgtcatcctcgtgtccgacgccaccggccggtgcatcgtcaagatgtgcggggacgtcagccacctccaggagacgggcgtcctggagaacgccttcggtggcgacaagacctccgcctgagattccaacattcatcacgcgccgagagctctcggcaattatcacgcgccgagtgagcgctcgtttcggccgtctttttttccactgtaccaatcatcctgttgctaccagtagtggtctagcggagaatgatgcacacttccccccgctgggaacgcggcgatttttgctggaacagttgaaggccgagccggggcgaatccttttggcctggccgtgcactgcttgctgaactgcacgtacgcatgtggagctgaaacgatctgcgttcgctcatgttcgtccac

SEQ ID NO: 9268 - DNA, 766 bp, Zea Mays
ataacaattctgattacgcgactcgctgatcgccagcttgtggtcgcgatgccgtacaccggatatcctctagcgccttcccacaatcgcgcttctgcggttctgccgccgacgtccgcgccgccgacgtccgcgcccgcgtccctcgctgctttgccctctccaccctccgccatcaccgccgcggcgtccttctgtaccggatccgtcgcagccaccactccgcagatccgctgggttgacgtccacggagctgctccggggatgtcgtcctccgcttccagcgtcgagggcgacgccgccggagagttcacggaggtcgtaatcgtgcgtcacggcgagacgtcatggaacgcctcgcgcatcatacagggacacttggatgcagagcttaatgatattggaaggcagcaagctgttgcggttgctcatcgtctttctaaagaagtgaaaccagttgccatatactcttctgatctgaagcgagcagcagagactgcgcaaacaattgcaagaatttgcaatgtgccaaatgtcgtgttcgatccagcactgagagaaagacacattggagatctgcaaggcatgacgcttcaagatgctgctacagagaggccagaggcatacaaagcttttatgtcccacaagagaaatcaacaagttcctggtggtggagagagtcttgatcaactgtcggagcgatgtgtgtcttttctgtacgacattgttggtaaacacaaagacacggctgcttgggtcgttttat

SEQ ID NO: 9269 - DNA, 1961 bp, Zea Mays
tcgccaccacaacgcaccacacaaagcgcagcagcccgcccgagagacaagcagccaaatcaagcctttatttacgatccggccggccgggatctagaccacctctctctcctcgtacgtagtcgttgagtctttgaggtcaatcgagcgaggtaaaatggcgcccgtctacgctgccgcggaccacggcaccaacggcggctccggcctgaccctgaacccggtggcgcgccgggcgctcagcctcgtcggcgcgcccaccacgccgtcgtcgtccacgccgccggcgtacgggagcatcgtcaccgtgctcagcatcgacggcggtggcgtgcgcgggatcatcccgggcaccatcctcgccttcctcgaggagaagctgcaggagtacgacgagcgaccggacgcgcggctcgccgactacttcgacgtcatcgccgggacgagcaccggcgggctggtcaccgccatgctcacggcgcccaacaaggacggccgcccgctcttcgccgccaaggacatcaacggcttctacctcgaccactgccccaggatcttcccgcccggcggcggcgccggcggtcctctgggcctgctcaagaagctgtcggggcccaagtacgacggcaagtacctccacgccctcgtccgggacctcctcggcgagaccagggtcagccaggcgctgcagaacatcgtcatccccaccttcgacatcaagctcttgcagcccaccgtcttctccaaatacgatgccatcaccgatgtttccaaggacgccctgctgtcggacgtgtgcatcagcacgtccgccgcgccgacctacctcccaggccaccagttccagaccacggacaaggacggcaaggcccgtgccttcaacctcatcgacggaggcgtcgcagcgaacaacccggtgagtcaacatgcatgtatacgtaccaacatgcataacataagggattaagggtcatgagatctactttgaattaagtagcttcagtctggatttaggatcccaataataatgctgagaaaatagaatcgagcgctattttttatgcatcgtctgcagtacttggagccagatatatatagatacctgtgtacgtagtgtattgtcaacgtacggcttgtaatagataaagaagaaatgggttttactaacagttcagttaatttattagagtcctagtaggcttatatatctgctgagttgacttctctatgaatcacgaaatatgcgccgaataaactcgagaaactcttgcgtgcagacgctgctggcgatgacggacgtgagcaagcagatcctgctgggcaacccggacttcttcccgatcaagccggcggactacggcaggttcatggtgctgtcgctgggcacaggctccgccaaggccgaggagaagttcgacgccgtgcagtccggcaagtggggcctcctggggtggctcagcagcaaggacaccacgccgatcatcgacagcttcagccaggccagcgccgacctcgtcgacatccacgcctccgtgctcttccaggcgctgcactcggagaggcagtacctccggatccaggacgacgagctcacgggacagacgtcgtccgtcgacgtgtccaccgaggagaacctcaaccgcctcgtcgacgtcggcagggggctgctgaagaagccggcgtgcaaggtgaacatcgagacgggcaagaacgagcccgacggcaagagaggcaccaacgaggatgaactcgtccgcttcgccaagatgctcgtacgggagcgccgggcaaggatccagaaaaaagaagccagcaacacactctagacagagctagctagcagagacaccaacacaaagtgtctactacatcatagtctaattaagcctcatgttgttctacaatccagtcatgcatgttatgtgtatccacttcaataattctttcaaagtgtctacccc

SEQ ID NO: 9270 - DNA, 975 bp, Zea Mays
ccgggactcggaggtgctactcagaagcctttaaccactagatgcataataaaggtgcacggcacatcgctgcagaatcgaggctgagggagaaagaattatctaagaagcacgaaattagcaagagactggctctctcttcagatgtttcccattcaaattctggcaatccacggaccagtgtttggcctaccaatatcaaagaaaaaccattgattgaggagacccggagggcaattctggaagcacagtcgagcagattcaatgatttccaaggcaagaaggtatcttgtgattcggaatggatgacaattacttcatcctttgactccaatgttgcttcttctgatgttcccaaggaactgtccactggaaatactggatcacgagaatggagctgtaaaggacaatcttttgctggaaatcagactcaagacaagttattttctgacagacaaacagaagttcgaaagcgccaggagcaagaactttggttcactgcttcaggctggaaacgggatggccatggaagatggtacagagatgaaaatgcaatcggaattgaactatcctatggcccatctgggagtattgaattcatcacaatgcaatatcaagttcaatctctccctacaaaaaatggtccaatcagattttgtcagactgtcagcttttctgatcaatggaaatgtcagatcatgttcctgttaaacttaaatgtttgtttcattgtgagccaaacctgtataatgatagttgagaaatacagtgtgtatttattttgtgaaaacatttagagatcagagaattccgttttcaaagatgtagtctaaacctgccattagtcactgtaaagataggcgatgcattttggttttggagcttgttttcagactaatattttatttgtaaggaaaataatgaagagcaaaaaaaaaaaagggggctataccatacagaactgatagattttca

SEQ ID NO: 9271 - DNA, 1186 bp, Zea Mays
accattacaaccactcaaccaaactccaccttaaatagctgtagtgttggctgcgcaaatcccggtctgatctagactgaggacgcgggccaaacaccaccatcactccacagcgtcggcgaggaagtcggcatgagcgtgttcggcggcgacagctgggcgcgtgatgcgcagcagcggaagcggcgtctcgacgagctcttgctacccatcacggcgccctcgtctccctcgacgcctgattccttcaagaagctccacaacggcaagctcgcctgcctcatctgcccccaccgccccgtcctcgacaccccgctcatgctctccatgcataataaaggtgcacggcacatcgctgcagaatcgaggctgagggagaaagaattatctaagaagcacgaaattagcaagagactggctctctcttcagatgtttcccattcaaattctggcaatccacggaccagtgtttggcctaccaatatcaaagaaaaaccattgattgaggagacccggagggcaattctggaagcacagtcgagcagattcaatgatttccaaggcaagaaggaactgtccactggaaatactggatcacgagaatggagctgtaaaggacaatcttttgctggaaatcagactcaagacaagttattttctgacagacaaacagaagttcgaaagcgccaggagcaagaactttggttcactgcttcaggctggaaacgggatggccatggaagatggtacagagatgaaaatgcaatcggaattgaactatcctatggcccatctgggagtattgaattcatcacaatgcaatatcaagttcaatctctccctacaaaaaatggtccaatcagattttgtcagactgtcagcttttctgatcaatggaaatgtcagatcatgttcctgttaaacttaaatgtttgtttcattgtgagccaaacctgtataatgatagttgagaaatacagtgtgtatttattttgtgaaaacatttagagatcagagaattccgttttcaaagatgtagtctaaacctgccattagtcactgtaaagataggcgatgcattttggttttggagcttgttttcagactaatattttatttgtaaggaaaataatgaagagcaaaaaaaaaaaagggggctataccatacagaactgatagattttca

SEQ ID NO: 9272 - DNA, 1238 bp, Zea Mays
accattacaaccactcaaccaaactccaccttaaatagctgtagtgttggctgcgcaaatcccggtctgatctagactgaggacgcgggccaaacaccaccatcactccacagcgtcggcgaggaagtcggcatgagcgtgttcggcggcgacagctgggcgcgtgatgcgcagcagcggaagcggcgtctcgacgagctcttgctacccatcacggcgccctcgtctccctcgacgcctgattccttcaagaagctccacaacggcaagctcgcctgcctcatctgcccccaccgccccgtcctcgacaccccgctcatgctctccatgcataataaaggtgcacggcacatcgctgcagaatcgaggctgagggagaaagaattatctaagaagcacgaaattagcaagagactggctctctcttcagatgtttcccattcaaattctggcaatccacggaccagtgtttggcctaccaatatcaaagaaaaaccattgattgaggagacccggagggcaattctggaagcacagtcgagcagattcaatgatttccaaggaactgtccactggaaatactggatcacgagaatggagctgtaaaggacaatcttttgctggaaatcagactcaagacaagttattttctgacagacaaacagaagttcgaaagcgccaggagcaagaactttggttcactgcttcaggctggaaacgggatggccatggaagatggtacagagatgaaaatgttgaatttgactcagatgaagatgatcctaacatctgtctctcctgatcatttgagaaggcaatcggaattgaactatcctatggcccatctgggagtattgaattcatcacaatgcaatatcaagttcaatctctccctacaaaaaatggtccaatcagattttgtcagactgtcagcttttctgatcaatggaaatgtcagatcatgttcctgttaaacttaaatgtttgtttcattgtgagccaaacctgtataatgatagttgagaaatacagtgtgtatttattttgtgaaaacatttagagatcagagaattccgttttcaaagatgtagtctaaacctgccattagtcactgtaaagataggcgatgcattttggttttggagcttgttttcagactaatattttatttgtaaggaaaataatgaagagcaaaaaaaaaaaagggggctataccatacagaactgatagattttca

SEQ ID NO: 9273 - DNA, 883 bp, Zea Mays
accattacaaccactcaaccaaactccaccttaaatagctgtagtgttggctgcgcaaatcccggtctgatctagactgaggacgcgggccaaacaccaccatcactccacagcgtcggcgaggaagtcggcatgagcgtgttcggcggcgacagctgggcgcgtgatgcgcagcagcggaagcggcgtctcgacgagctcttgctacccatcacggcgccctcgtctccctcgacgcctgattccttcaagaagctccacaacggcaagctcgcctgcctcatctgcccccaccgccccgtcctcgacaccccgctcatgctctccatgcataataaaggtgcacggcacatcgctgcagaatcgaggctgagggagaaagaattatctaagaagcacgaaattagcaagagactggctctctcttcagatgtttcccattcaaattctggcaatccacggaccagtgtttggcctaccaatatcaaagaaaaaccattgattgaggagacccggagggcaattctggaagcacagtcgagcagattcaatgatttccaaggcaagaaggtatcttgtgattcggaatggatgacaattacttcatcctttgactccaatgttgcttcttctgatgttcccaaggaactgtccactggaaatactggatcacgagaatggagctgtaaaggacaatcttttgctggaaatcagactcaagacaagttattttctgacagacaaacagaagttcgaaagcgccaggagcaagaactttggttcactgcttcaggctggaaacgggatggccatggaagatggtacagagatgaaaatggatgaaaatggatcggatactgcctctcccatatcctaacccact

SEQ ID NO: 9274 - DNA, 2088 bp, Zea Mays
cctgactgatgggtaccatcccaagtcaactaggaaggcctctttcttctcctttgcaacataggcagcagggtcttcttggggagaggtctaagatttctatgagtacactgaacaagaacattgtatccagtcagccgccccttgtttcatcatctgctgatttgactattccaaaggtaactgctacaccgtcgttactagcttcacctcatcagtctaccagtgtgtcaacgagtttgcatactggatttctgcgttctcgaagtacctcaggattgcctaggcaaccttcatatactactggatttgggactgctttaaatatagagacacttgttgctgtcgcggaacaaagagatacaccaattgagacacctccacctgaagttcaggacaagattctttttatgatcaacaatatatccatctcaaatatggaagctaaggcaaaggaatttaacgaggtcatacaggaacagtattatccttggtttgcacaatacatggtcatgaaaagggcaagcattgaatcaaatttccatgatctgtatctgaagttctttgataaagtaaactcaaaatccttgaacaaggaaatactgaaagccacatatgagaactgcaaggtcttgttaagatcagaccttatcaaatctagtcccgaggagcgctccttgctaaaaaacctaggcagttggttgggaaagttcaccattggtaggaatcaggcactaagggctataaggagattgatccaaaatctcttatcgtggagggttaatgttactaaattctttcaaatgcctaaaaatttgttgccagcccatgtatgccactggtgtggtacctggaaaggtgataaaatatgtagtagctgtaagaaagcaagatactgttctgagaaacatcaggcactgcattggggtactggtcataaaaatgattgcctccagataataagttcttccgctgcttcaaattcagttttgccaactgttggaaaagttcctgctaacacttcttggccagaatttgagataaaaatagactatgaaggtatatttgattccgatagtggtgatgagaataactcgaagttgttggtgatgcaaagacatgggaaacctgatgctatgatgcagtcatggatggatcaatttgaggttttgggtccattttctttcagaataacctctgttggacttctgcttatgcatcaatcattatatttatttaatgctgtctgggtaggccgattctgacaacaaatgctggacatcttttcaagagcgggtctcaagagcaccaaatcaagtgttgaggtattgtcgagaaccaaatgctaaacctctctgggcgttatcttctgggtgtccatcaaatgctgatatcccatcatgtagctactgtaaagatccattatgctatgaatttcaggttggccaaagttcatagaaaagagtattaagtattagtggcattgaggagatcaactataaaaatatatttcataaatgtatgagttgaaaatgatgttcatctattattgtaaatattattattctctataaatttgccaaatttaggatagtttgacgtagagcaactcaaaaacattatatttcaggatgggtctatttattattaacatcttatgtctgatcaccattggaagtagatctggcttggggtatagtagattgaatatagaggtacatggggtgtacaatatataggcaaggatcaagtttgacgtcggcaacgtggtcacggtgactggcgggaggaacaccgggcgtgtaggagtcatcaagaacagggagaagcacaagggcagctttgagaccatccacgtgctgcttggagatttttgctatgtctagttttctcctatttgttgtacaggaaaacatggaatagaattcaaatttggtggtcgcaaaagtgtggagactttaattcatacaaagttaggcttaacattagtgcaaacagttgtattttagtttagatttagagtacacttatgtatgcgttgtttgacaatgcttatgatatattgaatgatacttatttatattatat

SEQ ID NO: 9275 - DNA, 2041 bp, Zea Mays
cctgactgatgggtaccatcccaagtcaactaggaaggcctctttcttctcctttgcaacataggcagcagggtcttcttggggagaggtctaagatttctatgagtacactgaacaagaacattgtatccagtcagccgccccttgtttcatcatctgctgatttgactattccaaaggtaactgctacaccgtcgttactagcttcacctcatcagtctaccagtgtgtcaacgagtttgcatactggatttctgcgttctcgaagtacctcaggattgcctaggcaaccttcatatactactggatttgggactgctttaaatatagagacacttgttgctgtcgcggaacaaagagatacaccaattgagacacctccacctgaagttcaggacaagattctttttatgatcaacaatatatccatctcaaatatggaagctaaggcaaaggaatttaacgaggtcatacaggaacagtattatccttggtttgcacaatacatggtcatgaaaagggcaagcattgaatcaaatttccatgatctgtatctgaagttctttgataaagtaaactcaaaatccttgaacaaggaaatactgaaagccacatatgagaactgcaaggtcttgttaagatcagaccttatcaaatctagtcccgaggagcgctccttgctaaaaaacctaggcagttggttgggaaagttcaccattggtaggaatcaggcactaagggctataaggagattgatccaaaatctcttatcgtggagcccatgtatgccactggtgtggtacctggaaaggtgataaaatatgtagtagctgtaagaaagcaagatactgttctgagaaacatcaggcactgcattggggtactggtcataaaaatgattgcctccagataataagttcttccgctgcttcaaattcagttttgccaactgttggaaaagttcctgctaacacttcttggccagaatttgagataaaaatagactatgaaggtatatttgattccgatagtggtgatgagaataactcgaagttgttggtgatgcaaagacatgggaaacctgatgctatgatgcagtcatggatggatcaatttgaggttttgggtccattttctttcagaataacctctgttggacttctgcttatgcatcaatcattatatttatttaatgctgtctgggtaggccgattctgacaacaaatgctggacatcttttcaagagcgggtctcaagagcaccaaatcaagtgttgaggtattgtcgagaaccaaatgctaaacctctctgggcgttatcttctgggtgtccatcaaatgctgatatcccatcatgtagctactgtaaagatccattatgctatgaatttcaggttggccaaagttcatagaaaagagtattaagtattagtggcattgaggagatcaactataaaaatatatttcataaatgtatgagttgaaaatgatgttcatctattattgtaaatattattattctctataaatttgccaaatttaggatagtttgacgtagagcaactcaaaaacattatatttcaggatgggtctatttattattaacatcttatgtctgatcaccattggaagtagatctggcttggggtatagtagattgaatatagaggtacatggggtgtacaatatataggcaaggatcaagtttgacgtcggcaacgtggtcacggtgactggcgggaggaacaccgggcgtgtaggagtcatcaagaacagggagaagcacaagggcagctttgagaccatccacgtgctgcttggagatttttgctatgtctagttttctcctatttgttgtacaggaaaacatggaatagaattcaaatttggtggtcgcaaaagtgtggagactttaattcatacaaagttaggcttaacattagtgcaaacagttgtattttagtttagatttagagtacacttatgtatgcgttgtttgacaatgcttatgatatattgaatgatacttatttatattatat

SEQ ID NO: 9276 - DNA, 1991 bp, Zea Mays
cctgactgatgggtaccatcccaagtcaactaggaaggcctctttcttctcctttgcaacataggcagcagggtcttcttggggagaggtctaagatttctatgagtacactgaacaagaacattgtatccagtcagccgccccttgtttcatcatctgctgatttgactattccaaaggattgcctaggcaaccttcatatactactggatttgggactgctttaaatatagagacacttgttgctgtcgcggaacaaagagatacaccaattgagacacctccacctgaagttcaggacaagattctttttatgatcaacaatatatccatctcaaatatggaagctaaggcaaaggaatttaacgaggtcatacaggaacagtattatccttggtttgcacaatacatggtcatgaaaagggcaagcattgaatcaaatttccatgatctgtatctgaagttctttgataaagtaaactcaaaatccttgaacaaggaaatactgaaagccacatatgagaactgcaaggtcttgttaagatcagaccttatcaaatctagtcccgaggagcgctccttgctaaaaaacctaggcagttggttgggaaagttcaccattggtaggaatcaggcactaagggctataaggagattgatccaaaatctcttatcgtggagggttaatgttactaaattctttcaaatgcctaaaaatttgttgccagcccatgtatgccactggtgtggtacctggaaaggtgataaaatatgtagtagctgtaagaaagcaagatactgttctgagaaacatcaggcactgcattggggtactggtcataaaaatgattgcctccagataataagttcttccgctgcttcaaattcagttttgccaactgttggaaaagttcctgctaacacttcttggccagaatttgagataaaaatagactatgaaggtatatttgattccgatagtggtgatgagaataactcgaagttgttggtgatgcaaagacatgggaaacctgatgctatgatgcagtcatggatggatcaatttgaggttttgggtccattttctttcagaataacctctgttggacttctgcttatgcatcaatcattatatttatttaatgctgtctgggtaggccgattctgacaacaaatgctggacatcttttcaagagcgggtctcaagagcaccaaatcaagtgttgaggtattgtcgagaaccaaatgctaaacctctctgggcgttatcttctgggtgtccatcaaatgctgatatcccatcatgtagctactgtaaagatccattatgctatgaatttcaggttggccaaagttcatagaaaagagtattaagtattagtggcattgaggagatcaactataaaaatatatttcataaatgtatgagttgaaaatgatgttcatctattattgtaaatattattattctctataaatttgccaaatttaggatagtttgacgtagagcaactcaaaaacattatatttcaggatgggtctatttattattaacatcttatgtctgatcaccattggaagtagatctggcttggggtatagtagattgaatatagaggtacatggggtgtacaatatataggcaaggatcaagtttgacgtcggcaacgtggtcacggtgactggcgggaggaacaccgggcgtgtaggagtcatcaagaacagggagaagcacaagggcagctttgagaccatccacgtgctgcttggagatttttgctatgtctagttttctcctatttgttgtacaggaaaacatggaatagaattcaaatttggtggtcgcaaaagtgtggagactttaattcatacaaagttaggcttaacattagtgcaaacagttgtattttagtttagatttagagtacacttatgtatgcgttgtttgacaatgcttatgatatattgaatgatacttatttatattatat

SEQ ID NO: 9277 - DNA, 1230 bp, Zea Mays
ccacaaaaatttccttagcggcaaaaccttcgctctgcgccgccatcgcctgctcccgtccggccaccacatccgcccaggagctcgccgtcggggaggctgctcgaggagccacgctgtctctcccgcgccgcgaccttcgccctcgccgccgccatgatctgcgcgagtaatgcccctctccctccctcgcatgtctgtctactaaccctagcttctctgatccatcgtttcgtgagctaactcgtcccgtgtcgcttccctgtactctccggcgaggtgccggacaagccggtggtgtcgaagaagtcggggcttctcttcgagcggcggctcatcgagcgctacattgaggaccatggcaagtgccccatcaccaaggaggagcttactatggatgatatcgtgccggtcaagaccaacaaggattgcctaggcaaccttcatatactactggatttgggactgctttaaatatagagacacttgttgctgtcgcggaacaaagagatacaccaattgagacacctccacctgaagttcaggacaagattctttttatgatcaacaatatatccatctcaaatatggaagctaaggcaaaggaatttaacgaggtcatacaggaacagtattatccttggtttgcacaatacatggtcatgaaaagggcaagcattgaatcaaatttccatgatctgtatctgaagttctttgataaagtaaactcaaaatccttgaacaaggaaatactgaaagccacatatgagaactgcaaggtcttgttaagatcagaccttatcaaatctagtcccgaggagcgctccttgctaaaaaacctaggcagttggttgggaaagttcaccattggtaggaatcaggcactaagggctataaggagattgatccaaaatctcttatcgtggaggtactgcttctctgcattaaactcattggtagttggagacttggagttccaaaagctcccttaggctgtctagatcctttatttagtattgctctatattatttaatatgatatttctgtttcacctatgttttttggtaaaatttatgtgcttcctgaggtgtacaattcacttcaatcgattcaatttgtctgctcaaaatctttggagaattttttcttcaggcatatgagaaaggattgatgattgcggtcataccattcacttcaaagatccttgaaccttgccagtcaagtatcgc

SEQ ID NO: 9278 - DNA, 1196 bp, Zea Mays
gggcacccacggtttccaccaaagcgacgcgccccgcgacatggcggtggtgcgcctgcgcgtatctccacgcctccgctccattcccctcctgctctcccagccagacgccgctacagtccggcgtagtttcgcctgcgccagcgcctcccaagcccccgcacccgcgcgggctatggcggccccgtcctcctcatccgcgacgccctccccgtacacgacgctcgtcgggcgcgtgagctgcgagcgcgagatcaagcgcagcaagttcatcgccatcgcggccccggtccccaacgagcgtgccgccatggccttcctggatcaggtcaaggatccacgtgctacccataattgctgggcatacaagctgggagatcaattccgttacaacgatgacggtgaaccttctagtacagctgggaagccaatatactctgccatcatttcctctggcattgataaggtcatggtggttgtgattagatattttggaggcataaaactgggaaccggtggactggtgagggcttatggtggggttgcttctgaatgtcttaaagatgctcctacttgtcttgtgaaaccaaaggctcgtgtgggtatggaagtaccatttaatctgttgggaacagtctatcatcagctacaacatttcgaagctgaagatatcaaacaggactatgacactggaaaagatggtaccgttatggtcatgttcgaagtggaatatgaaaaaattgagaatcttggaaatgcagtgaactcagcttgcagtaggaagatagaactatatctataaaccacaatcacgggttaaggatgagtcatgtaggcaccagaaatattcagcgccttatccaagctaactgctagagtgctaggccatattgaactgctccagtgtaaactgtacagtcatctatcttttgaatttcaccatgaacattcttgttcattgcaaatattgaacaagcctggaaattgtccttcagggacacgttgccacaagtctcagaccaaaagtcagtattgcttccgttaccctctatcattccccttccttttagatagatatgtttaattttgaggagatcattccgcacaggggaattggtattttttagctttggtatatgcactaggaacatcatgctgccaatagtgttactggacaagaataatgtaggaatctc

SEQ ID NO: 9279 - DNA, 1102 bp, Zea Mays
gggcacccacggtttccaccaaagcgacgcgccccgcgacatggcggtggtgcgcctgcgcgtatctccacgcctccgctccattcccctcctgctctcccagccagacgccgctacagtccggcgtagtttcgcctgcgccagcgcctcccaagcccccgcacccgcgcgggctatggcggccccgtcctcctcatccgcgacgccctccccgtacacgacgctcgtcgggcgcgtgagctgcgagcgcgagatcaagcgcagcaagttcatcgccatcgcggccccggtccccaacgagcgtgccgccatggccttcctggatcaggtcaaggatccacgtgctacccataattgctgggcatacaagctgggagatcaattccgttacaacgatgacggtgaaccttctagtacagctgggaagccaatatactctgccatcatttcctctggcattgataaggtcatggtggttgtgattagatattttggaggcataaaactgggaaccggtggactggtgagggcttatggtggggttgcttctgaatgtcttaaagatgctcctacttgtcttgtgaaaccaaaggctcgtgtgggtatggaagtaccatttaatctgttgggaacagtctatcatcagctacaacatttcgaagctgaagatatcaaacaggactatgacactggaaaagatggtaccgttatggtcatgttcgaagtggaatatgaaaaaattgagaatcttggaaatgcagtgaactcagcttgcagtaggaagatagaactatatctataaaccacaatcacgggttaaggatgagtgtaagtgtggagacacgcaatcaacattcttgttcattgcaaatattgaacaagcctggaaattgtccttcagggacacgttgccacaagtctcagaccaaaagtcagtattgcttccgttaccctctatcattccccttccttttagatagatatgtttaattttgaggagatcattccgcacaggggaattggtattttttagctttggtatatgcactaggaacatcatgctgccaatagtgttactggacaagaataatgtaggaatctc

SEQ ID NO: 9280 - DNA, 906 bp, Zea Mays
cggaatccgggcacccacggtttccaccaaagcgacgcgccccgcgacatggcggtggtgcgcctgcgcgtatctccacgcctccgctccattcccctcctgctctcccagccagacgccgctacagtccggcgtagtttcgcctgcgccagcgcctcccaagcccccgcacccgcgcgggctatggcggccccgtcctcctcatccgcgacgccctccccgtacacgacgctcgtcgggcgcgtgagctgcgagcgcgagatcaagcgcagcaagttcatcgccatcgcggccccggtccccaacgagcgtgccgccatggccttcctggatcaggtcaaggatccacgtgctacccataattgctgggcatacaagctgggagatcaattccgttacaacgatgacggtgaaccttctagtacagctgggaagccaatatactctgccatcatttcctctggcattgataaggtcatggtggttgtgattagatattttggaggcataaaactgggaaccggtggactggtgagggcttatggtggggttgcttctgaatgtcttaaagatgctcctacttgtcttgtgaaaccaaaggctcgtgtgggtatggaagtaccatttaatctgttgggaacagtctatcatcagaacattcttgttcattgcaaatattgaacaagcctggaaattgtccttcagggacacgttgccacaagtctcagaccaaaagtcagtattgcttccgttaccctctatcattccccttccttttagatagatatgtttaattttgaggagatcattccgcacaggggaattggtattttttagctttggtatatgcactaggaacatcatgctgccaatagtgttactggacaagaataatgtaggaatctc

SEQ ID NO: 9281 - DNA, 1119 bp, Zea Mays
gggcacccacggtttccaccaaagcgacgcgccccgcgacatggcggtggtgcgcctgcgcgtatctccacgcctccgctccattcccctcctgctctcccagccagacgccgctacagtccggcgtagtttcgcctgcgccagcgcctcccaagcccccgcacccgcgcgggctatggcggccccgtcctcctcatccgcgacgccctccccgtacacgacgctcgtcgggcgcgtgagctgcgagcgcgagatcaagcgcagcaagttcatcgccatcgcggccccggtccccaacgagcgtgccgccatggccttcctggatcaggtcaaggatccacgtgctacccataattgctgggcatacaagctgggagatcaattccgttacaacgatgacggtgaaccttctagtacagctgggaagccaatatactctgccatcatttcctctggcattgataaggtcatggtggttgtgattagatattttggaggcataaaactgggaaccggtggactggtgagggcttatggtggggttgcttctgaatgtcttaaagatgctcctacttgtcttgtgaaaccaaaggctcgtgtgggtatggaagtaccatttaatctgttgggaacagtctatcatcagctacaacatttcgaagctgaagatatcaaacaggactatgacactggaaaagatggtaccgttatggtcatgttcgaagtggaatatgaaaaaattgagaatcttggaaatgcagtgaactcagcttgcagtaggaagatagaactatatctataaaccacaatcacgggttaaggatgagtgcaccagaaatattcagcgccttatccaagctaactgctagagtgctaggccatattgaactgctccagtgtaaactgtacagtcatctatcttttgaatttcaccatggtaattgtttcatgaccttttttttattatttgttttggttcattgtgttgacatgatggatggtatcttttctttaatatcagtcttcacggtaagccaccaatattttgatcttgagggacattcttgccttccaaatgtttttgtagctactattatgttctgaacgacatcggtgttc

SEQ ID NO: 9282 - DNA, 638 bp, Zea Mays
gcatgcactattcctcaaatttgcagaaccccagccgattgattgggagtactacagaaaaggaattggatcaaaagtggtggatatgtacaaagaggcttttgaaaattgctgaattaaaggaggctgagaaagagcatcagaaggagtcagaaaggatagagaaggaacttgctgaaatggaggaaatgaggaaaaagatcagtacaatgacagcagatgattactttgagaagtaccctgaactcaggaagaagtttgacgatgaaatccgtaacgataactggggatattgaagagattggagagaactcttatgatgccatttccatgtccgtgaagaaccaataattttcctgtgccctgaattgggtggtttccatagcatgtgcacggggtttgggtggaatgcctacagaatcgactgtgtcaagctttcttgattccgtagaaacatgttttgtttgacctcatcatagaggatctccgcttttatcgtacaaagattgtgatatgttcttagcttctttctacctgaataagaggatttctgcagacccttttccaactgactttctgtgacgcattggtctggatgcttaatttttttgttcggtgcaagtgtggcacttgtccta

SEQ ID NO: 9283 - DNA, 754 bp, Zea Mays
attcttgttcatttgctacgttatcttgaaagttcctgggaggcagctgaggcatgcactattcctcaaatttgcagaaccccagccgattgattgggagtactacagaaaaggaattggatcaaaagtggtggatatgtacaaagaggcttttgaaagcatcgagatcccgaagtacgtcgacacagttactccccagtacaagccaaagtttgatgctgtgattgctgaattaaaggaggctgagaaagagcatcagaaggagtcagaaaggatagagaaggaacttgctgaaatggaggaaatgaggaaaaagatcagtacaatgacagcagatgattactttgagaagtaccctgaactcaggaagaagtttgacgatgaaatccgtaacgataactggggatattgaagagattggagagaactcttatgatgccatttccatgtccgtgaagaaccaataattttcctgtgccctgaattgggtggtttccatagcatgtgcacggggtttgggtggaatgcctacagaatcgactgtgtcaagctttcttgattccgtagaaacatgttttgtttgacctcatcatagaggatctccgcttttatcgtacaaagattgtgatatgttcttagcttctttctacctgaataagaggatttctgcagacccttttccaactgactttctgtgacgcattggtctggatgcttaatttttttgttcggtgcaagtgtggcacttgtccta

SEQ ID NO: 9284 - DNA, 1011 bp, Zea Mays
aggcttcaggcgtggcatacagcccaacccaacaatcttcagacgcggactgtttcagcccatcgaacaagcgcagcggcggcggcgatagggagagaggagagagtctgcaggatccagcaggccgagggaggagtcagcggcgggccggagaatatgagcggcaacggcgcgaagaaggtggtcgatgcggcggtgaaggccggcaggacgatcatcgactgggacggcatggccaagttgctcgtcaccgacgaggcgcgcaaggagttcgccgccctccgccgcgctttcgatgacgtcaaccaccagctccagaccaagttctcccaggaaccccagccgattgattgggagtactacagaaaaggaattggatcaaaagtggtggatatgtacaaagaggcttttgaaagcatcgagatcccgaagtacgtcgacacagttactccccagtacaagccaaagtttgatgctgtgattgctgaattaaaggaggctgagaaagagcatcagaaggagtcagaaaggatagagaaggaacttgctgaaatggaggaaatgaggaaaaagatcagtacaatgacagcagatgattactttgagaagtaccctgaactcaggaagaagtttgacgatgaaatccgtaacgataactggggatattgaagagattggagagaactcttatgatgccatttccatgtccgtgaagaaccaataattttcctgtgccctgaattgggtggtttccatagcatgtgcacggggtttgggtggaatgcctacagaatcgactgtgtcaagctttcttgattccgtagaaacatgttttgtttgacctcatcatagaggatctccgcttttatcgtacaaagattgtgatatgttcttagcttctttctacctgaataagaggatttctgcagacccttttccaactgactttctgtgacgcattggtctggatgcttaatttttttgttcggtgcaagtgtggcacttgtccta

SEQ ID NO: 9285 - DNA, 1040 bp, Zea Mays
caaaacaggcttcaggcgtggcatacagcccaacccaacaatcttcagacgcggactgtttcagcccatcgaacaagttccttgttcggtcggaacgcagcgcagcggcggcggcgatagggagagaggagagagtctgcaggatccagcaggccgagggaggagtcagcggcgggccggagaatatgagcggcaacggcgcgaagaaggtggtcgatgcggcggtgaaggccggcaggacgatcatcgactgggacggcatggccaagttgctcgtcaccgacgaggcgcgcaaggagttcgccgccctccgccgcgctttcgatgacgtcaaccaccagctccagaccaagttctcccaggaaccccagccgattgattgggagtactacagaaaaggaattggatcaaaagtggtggatatgtacaaagaggcttttgaaagcatcgagatcccgaagtacgtcgacacagttactccccagtacaagccaaagtttgatgctgtgattgctgaattaaaggaggctgagaaagagcatcagaaggagtcagaaaggatagagaaggaacttgctgaaatggaggaaatgaggaaaaagatcagtacaatgacagcagatgattactttgagaagtaccctgaactcaggaagaagtttgacgatgaaatccgtaacgataactggggatattgaagagattggagagaactcttatgatgccatttccatgtccgtgaagaaccaataattttcctgtgccctgaattgggtggtttccatagcatgtgcacggggtttgggtggaatgcctacagaatcgactgtgtcaagctttcttgattccgtagaaacatgttttgtttgacctcatcatagaggatctccgcttttatcgtacaaagattgtgatatgttcttagcttctttctacctgaataagaggatttctgcagacccttttccaactgactttctgtgacgcattggtctggatgcttaatttttttgttcggtgcaagtgtggcacttgtccta

SEQ ID NO: 9286 - DNA, 2030 bp, Zea Mays
gtcaattccacaaatttgatagaatgaactcattcctcatattattactaattattagtttatgaggaatgaaatggtaatggatcaactcattccactccacaaaccaaacaaaaaagtgaggactgagaagatgatggactacctcattcctcaaaccaaacacaacaacaacaacaacaacaacaacaaagccttttgtcccaagcacgttggggtaggctagagatgaaaccccgtatgaaaacctcagagctcaacccccaaagaaaaaaggggaaacaaaggcaaaggagaaccgaaaaacgacgaaacggggaaacacataaaagagataaaacccacaagaaccagcaagatctaaatgggcacaagaaaaggtcaaacgattaaggaggaaaagcgaaactataaatcaaggttctggcacgtgaattgcacacttccaccccttcctatccacggcgagctctttatcaatatttcactccttcaggtccctcttcacagcctctgtccacgtcaaggttggtcgacctctacctctcttcacattctcgggacgcctaattattccgatatgcattggtgcctcttcaggtcttcgttggatatgtccaaaccatctcaaacgatgttgcataagcttctcctcaattggcgctacttctactctctctcgtatgacatcattccggactcggtctctccttgtgtggccacatatcaagcgcaacatacgcatctctgccacacatagttgttggacatgtcgaccaaacacactattagttttttattcaagatgcaaatcctatgagcgtgctaaaaagaagctgacaatagaagaagcaccgaatattctgactattgcactgaaaagatatcagtctggcaagtttggaaagatcagcaaagccatcagatttccagaaaccctcaacttggctcgctatatgaacccagatactgatgacatatcgccagtttacagcctctatgcagtggttgtccatcatgatgtcatgaatgctgccttctctggccattatgtatgttatgttaaagatacacagggaaagtggtttaaggcagacgacagccaggtgaaacctgtatctctggacaatgtcatgtcaaagtgtgcttatatgctgctgtatgcaaggctatgtcggacccagcacacccgaagcaggccaagcagagggtggttccaggaggaccaacatggcgaggaggttccttcaacgggcaccaagctggccagcggcacagcgacgacgcggaagacgacgacgccacacatgctgcatttgacgaatatagatacgcaccatattcgccttcagattctccgagccctagcgagagttcatccctcttcagcaactccgacgcagggtcgcacagcaccgacagcagcgagagcacgaggaactcgacaagcaccgaggagtacgagtacgtgttcggagccgctgatcagatgtaccgcgtgggaggggggacacctgtggagggtggctatccgacgtattcccgttcgaggtccagcttgaatgccagctcatcggggcgggaggcatacagcgcgggtacctacgctgagcacaggactcagggcggcggtcccggtgggctttgggttgagggcgatgagagcccgtccttgttatacactgacagaagtaaacagccgtcgaacagtacgttaagagaccagtataggcagttagataggagcgatgagcgaacatgaccctgggcaaaccaggggcggtgttttattgagaagaccatctagggacaggaccgcccagacattttattgatgttgcagggtttgggctgtagtctgtagagaaataaatagtgtaatgtagcctgtaatatgtatctcgctgcaaacgtgtaaaaaagggaagaggaatgtcgtagttcataaaagttaaatgcctagattgatgatatagttccgaggaacctgtaacaaaacgttgcattttgcatgtgatcggcggagtaga

SEQ ID NO: 9287 - DNA, 153 bp, Zea Mays
acctggaactctggagcgccgctagagagtaccgatgaactctggagcgccggtggagagtaccgatggccgagaacgcagacgagcggaggaagacgaggtttttggggggagagagcgcgagactggagacgttgggatggaggagagagc

SEQ ID NO: 9288 - DNA, 3105 bp, Zea Mays
ctcgctccgttccccttcaccactgcttgcctcgcctccctgcttcccccacctttgcttcttgtttgctccctgtcctctgtctgtattgtacgaggaggaaggcgacggggtggggagcgagagcgacccacctacgcacggccatggaggcgagcccggaggagggcagcgcttgcggctgcgtcgagggaagaacagggtggagacgagcagagggatggtggcagtgaagagatcgaagtgggcgactgggcgtcgtgttcgtgtggccgccgtcgagggcaaggctagaaagttcgcgtctgtgtggaaaagttcgtgtccgtactcgtgatcggcgccgaagctgtgaaacgcggggagagctaaaagggagtcaggttttaataaagaagattcagataagaaaatacgccaataagaaaatacaccatccctcctatgcccgccggcgacgggcgcggccaccgatgcctagcccgccgaaggaccgcccctccggccgcgtcggccgcctcctcaccgcgctccgcccctcccgcgccgggcccctccccgtccagaccggcttccccacctctctcgccgacctcgtcgtcaagaaccatggccgcctcaagaagcagccctccccgtcctccaagcgcgggaggcgcgccgccgccgccgcgacttctccttcgccgtccccatgcagtcccaccacctcaccgtcaccgtccccaccgtccgcctctccgcctcccccggtggccgctgccgcagtctcgccgtcggatcggccgcggcccgaccttccgccggcccagtcccctcgccgcgacagcggcctcggcctgggcttcctcgcggtcagcggcaaaacatgtatgaatatgtgtgtcgtacttgcgaacacatcgaagaagctaatgtccctcctgcaagaactcgacgacgcattgcctatccaggagtccaagacgcggacagggaaaagaggagaggatagaaaccaatggaggcgagcgtgcgaaagacgtgcacctcgaggaggcggtcttggggtccgtcgtagatgagcaggatgacgcgcgcgccggcaacctcgacgatgtaggaggtcgtggtggtgttgtgatcctgtcgcccgcgccattcgccaggtgcgagacgatgtcagggcgtccacaagaatcggacggcacctccgcccaagtcgccaccgcgggggttggaggaggaggaatcactgtcgtttagggtttgggatttttagagagagggtgcgaaaggaggagaatggagatagcggtggccgcgtgagaaagagtgcaaaaaacgagaagccgtaagcagttcgctcatgtcgttgggtcccaccacgtgaggcagagaagagaatcagacgcggtgtgcgtcgatgacgcgcgaggccggagcaaggaatctaacgcgcatcggctcgcgataggaaaataacccatgaagcgcggagaggcgtccaaaaggggtcaggttttaagaacttagataggatacaagatcttgggagcaatattccatatataccatctgaagttatactcatgttttgtgtgctactgattccacatgttatatataaaaaaaaaattgtatactactcaatggcacacaagaaataagtatagatttcgatagcacataggcaaattttcccaagatctttggggtctattggtctattgggtggttcgttggtcccggctcttggaatagcacatactagggaccaggcgtatcattctctctgctttattaattccttttcaagattcgagaggaccaatagtttggattcctgtcatgccggcgttctattaggtcattcttagtgtaagtgtcattgcacggttttaaaaagtgacacgtcaacttttgtttataaaaccgtgtattctgagtttcatccgtatgcaactccctctcctcccatgaaactattttcacctctcattataaatatcttcaaaagcgacacatcaacttttgtgatgaaaccgtgtatccggatgcaacccctctcctcccataaaactcttttcatctctctcattataaatatctttaaaagtgacacatcagcttttgtctatgaaaccgtgtattctgagtttcatctagatgaaacctctctcatcccataaaactctcgtcatctctctcgctataaatatcgtgtcatgttaacaaatatagcgacatattatcttatttaatagaatgaaactatgacacaactctcattagtaattgtcttatcgaaacctatcttttcaagattctagacggcatatggtgtcggtttttccttactggcggcgctccattgtccaagcctcgagggtgggcagttaactgggctcagaatgagcttatttcgggttactactggactcccggccgcatccccaaggcccaccattgcctcgttgtttcgatccaacggtcagtccagtactccagctccagaaggataaaagtggtaatccgaactgttagaacaaatttaatattttaaaatagatatatatataaaatttgatatttatcttttcttatgttatcaagcacattagtacaaatatgaataaaatattatataagttgttttatgtattatttgctccttacaacacaaaaagttgaaaaaattaccgaatttgtttccgaatccataccgaagtttatatctattatttgagaaaatgtaggatgaatttgaggtttaccttttatgaatcttaacaagttgaatgttaaaaataagaatacaaatttgtattgtatattctatatcctatttattcgcaatcaaagaaaaaactgattaccgaataaataccgtttccgaccgtttttatccctccaacctccagctcccggcctcccgtaccatggaaccttgcagagttgcagatcgagaaaagcgcgaatcagctcaacttacctcgcgagctagctcgatctaataataatttgttatacataaaattttaattagtatatattatcaatactaaatagacgattagtgtatcttttttttaagattactgtaaaaaattacatattttctat

SEQ ID NO: 9289 - DNA, 1900 bp, Zea Mays
cccaacaaaatcctcgtccttcgcgtcatctcgacgccacaactctccgagccccgctccgcaatagacccgtaagacgctgtctcgatccgtccccctacctcccccgccgccgacgctcgactcgatacattggagcaggaggcgccgccgccaaaacccaagctaggagtgggagattccgatcctccgcgcgcgcgcgcgcaccatggagccggtgccccggaagcgcaagggcgcgcccccggtgtgctccgccgccaggtccctccaagatttggcctcccgcaagcgcgcctgccgcggctccgtgccgcagcaatcccactgcaccgacgcccccgcccccgctgtggtgatgacggcccccgcggcgagcggcgcgtcggcgtcagcgggggtcctcccggggcgcgggctcaagcggaaggtgggctgcatcgacaacgccacgcggatcgggcggcggaagcggctggagaacgagtacgacctcggcgaggagatcgggcacggcaagttcggctccgtccgcgtctgccgccccaaggcccggacccggggcgaggaggagttcgcctgcaaggcgctgccgaagaacggcggtgacacggcccaccgcgaggtggagatcatgcagcacctctcgggccacccgggcgtcgtcacgctcagggccgtctttgaagacaccgacgccttctacctcgtcatggagctctgccacggcggacggctcctcgatgaggtggccagggagggtaaactctcagagcgccgcgccgccaatgtgatcaaggagctcatggcggtcctcaagtactgccacgagatgggcgtcgtgcatagggacgtcaagccggagaatgttctgctcaccaagtctggaaggttgaagcttgcagattttggattggccgtgcgagttgctgatggtgtgtcaagagtcgaagtggtgctaacttggtagttgcagtcgagttgttgtcatctggaggtagttgttacttccacggagttctggatatttgggttcacagcatcaatagattgacatcatgatggtcaggtcagcaattgactggtgttgctggcagcccggcatatctggcacctgaggttctactaggaaattactcccaaaaggtagatgtatgggctgccggggtgcttctgcatgttctgttgatgggcactcttccgttccaaggaaaatctgtcgaagctatctttgatgctataaagactgctgaacttgactttcacagcagtcagtgggcatctgtgtcactgcttgctcgtgatctcattggccgaatgcttaatcgagaggtctcttcaaggcccgatgccgaagatgttctccggcacccttgggtcttattctacactgattgcccgcagaaagctgaattctctaacctatggggtactaacaaaactgcagctcccatgattcatcaggagatagtcaggtttggttactgcgagtcttcatcttcaaaatcctcaagtgacaactctgaagagcgagatgaatgcggtatagttgacgcactggcgacagcaataacacaggtgaggatctcagagcccaagaggagtcggctgttcagcctacccaacgggttgttgccaccaagcaggaacagtctccgaacatgaagaggatgaatccgtgtgtggctttctaacttgacctacctagctcccatccccatgcatgtataaacgagataaacgagctctgtgattttatagatggaaaattttcaccgtggttgatgttttgcgattgctagctcgctgaggctgcaatcctctgtaaatatatcactgttgtcatcgtttctatacatcgatgatcaccgtaattgattcgattatttaggttttttcc

SEQ ID NO: 9290 - DNA, 2009 bp, Zea Mays
gaccgaaccccaacaaaatcctcgtccttcgcgtcatctcgacgccacaactctccgagccccgctccgcaatagacccgtaagacgctgtctcgatccgtccccctacctcccccgccgccgacgctcgactcgatacattggagcaggaggcgccgccgccaaaacccaagctaggagtgggagattccgatcctccgcgcgcgcgcgcgcaccatggagccggtgccccggaagcgcaagggcgcgcccccggtgtgctccgccgccaggtccctccaagatttggcctcccgcaagcgcgcctgccgcggctccgtgccgcagcaatcccactgcaccgacgcccccgcccccgctgtggtgatgacggcccccgcggcgagcggcgcgtcggcgtcagcgggggtcctcccggggcgcgggctcaagcggaaggtgggctgcatcgacaacgccacgcggatcgggcggcggaagcggctggagaacgagtacgacctcggcgaggagatcgggcacggcaagttcggctccgtccgcgtctgccgccccaaggcccggacccggggcgaggaggagttcgcctgcaaggcgctgccgaagaacggcggtgacacggcccaccgcgaggtggagatcatgcagcacctctcgggccacccgggcgtcgtcacgctcagggccgtctttgaagacaccgacgccttctacctcgtcatggagctctgccacggcggacggctcctcgatgaggtggccagggagggtaaactctcagagcgccgcgccgccaatgtgatcaaggagctcatggcggtcctcaagtactgccacgagatgggcgtcgtgcatagggacgtcaagccggagaatgttctgctcaccaagtctggaaggttgaagcttgcagattttggattggccgtgcgagttgctgatggtgtgtcaagagtcgaagtggtgctaacttggtagttgcagtcgagttgttgtcatctggaggtagttgttacttccacggagttctggatatttgggttcacagcatcaatagattgacatcatgatggtcaggtagtcaggtcattgttaacggtacatcggtcttgtggttctaagacatttgtgtgactaactggttttaaggccagtgaaaatttgctcatcaggaagtggtcagcaattgactggtgttgctggcagcccggcatatctggcacctgaggttctactaggaaattactcccaaaaggtagatgtatgggctgccggggtgcttctgcatgttctgttgatgggcactcttccgttccaaggaaaatctgtcgaagctatctttgatgctataaagactgctgaacttgactttcacagcagtcagtgggcatctgtgtcactgcttgctcgtgatctcattggccgaatgcttaatcgagaggtctcttcaaggcccgatgccgaagatgttctccggcacccttgggtcttattctacactgattgcccgcagaaagctgaattctctaacctatggggtactaacaaaactgcagctcccatgattcatcaggagatagtcaggtttggttactgcgagtcttcatcttcaaaatcctcaagtgacaactctgaagagcgagatgaatgcggtatagttgacgcactggcgacagcaataacacaggtgaggatctcagagcccaagaggagtcggctgttcagcctacccaacgggttgttgccaccaagcaggaacagtctccgaacatgaagaggatgaatccgtgtgtggctttctaacttgacctacctagctcccatccccatgcatgtataaacgagataaacgagctctgtgattttatagatggaaaattttcaccgtggttgatgttttgcgattgctagctcgctgaggctgcaatcctctgtaaatatatcactgttgtcatcgtttctatacatcgatgatcaccgtaattgattcgattatttaggttttttcc

SEQ ID NO: 9291 - DNA, 1690 bp, Zea Mays
ctccgatcgaccgaaccccaacaaaatcctcgtccttcgcgtcatctcgacgccacaactctccgagccccgctccgcaatagacccgtaagacgctgtctcgatccgtccccctacctcccccgccgccgacgctcgactcgatacattggagcaggaggcgccgccgccaaaacccaagctaggagtgggagattccgatcctccgcgcgcgcgcgcgcaccatggagccggtgccccggaagcgcaagggcgcgcccccggtgtgctccgccgccaggtccctccaagatttggcctcccgcaagcgcgcctgccgcggctccgtgccgcagcaatcccactgcaccgacgcccccgcccccgctgtggtgatgacggcccccgcggcgagcggcgcgtcggcgtcagcgggggtcctcccggggcgcgggctcaagcggaaggtgggctgcatcgacaacgccacgcggatcgggcggcggaagcggctggagaacgagtacgacctcggcgaggagatcgggcacggcaagttcggctccgtccgcgtctgccgccccaaggcccggacccggggcgaggaggagttcgcctgcaaggcgctgccgaagaacggcggtgacacggcccaccgcgaggtggagatcatgcagcacctctcgggccacccgggcgtcgtcacgctcagggccgtctttgaagacaccgacgccttctacctcgtcatggagctctgccacggcggacggctcctcgatgaggtggccagggagggtaaactctcagagcgccgcgccgccaatgtgatcaaggagctcatggcggtcctcaagtactgccacgagatgggcgtcgtgcatagggacgtcaagccggagaatgttctgctcaccaagtctggaaggttgaagcttgcagattttggattggccgtgcgagttgctgatggtcagcaattgactggtgttgctggcagcccggcatatctggcacctgaggttctactaggaaattactcccaaaaggtagatgtatgggctgccggggtgcttctgcatgttctgttgatgggcactcttccgttccaaggaaaatctgtcgaagctatctttgatgctataaagactgctgaacttgactttcacagcagtcagtgggcatctgtgtcactgcttgctcgtgatctcattggccgaatgcttaatcgagaggtctcttcaaggcccgatgccgaagatgttctccggcacccttgggtcttattctacactgattgcccgcagaaagctgaattctctaacctatggggtactaacaaaactgcagctcccatgattcatcaggagatagtcagcaataacacaggtgaggatctcagagcccaagaggagtcggctgttcagcctacccaacgggttgttgccaccaagcaggaacagtctccgaacatgaagaggatgaatccgtgtgtggctttctaacttgacctacctagctcccatccccatgcatgtataaacgagataaacgagctctgtgattttatagatggaaaattttcaccgtggttgatgttttgcgattgctagctcgctgaggctgcaatcctctgtaaatatatcactgttgtcatcgtttctatacatcgatgatcaccgtaattgattcgattatttaggttttttcc

SEQ ID NO: 9292 - DNA, 1731 bp, Zea Mays
ctcgtgctcgcgccccagttccactccgatcgaccgaaccccaacaaaatcctcgtccttcgcgtcatctcgacgccacaactctccgagccccgctccgcaatagacccgtaagacgctgtctcgatccgtccccctacctcccccgccgccgacgctcgactcgatacattggagcaggaggcgccgccgccaaaacccaagctaggagtgggagattccgatcctccgcgcgcgcgcgcgcaccatggagccggtgccccggaagcgcaagggcgcgcccccggtgtgctccgccgccaggtccctccaagatttggcctcccgcaagcgcgcctgccgcggctccgtgccgcagcaatcccactgcaccgacgcccccgcccccgctgtggtgatgacggcccccgcggcgagcggcgcgtcggcgtcagcgggggtcctcccggggcgcgggctcaagcggaaggtgggctgcatcgacaacgccacgcggatcgggcggcggaagcggctggagaacgagtacgacctcggcgaggagatcgggcacggcaagttcggctccgtccgcgtctgccgccccaaggcccggacccggggcgaggaggagttcgcctgcaaggcgctgccgaagaacggcggtgacacggcccaccgcgaggtggagatcatgcagcacctctcgggccacccgggcgtcgtcacgctcagggccgtctttgaagacaccgacgccttctacctcgtcatggagctctgccacggcggacggctcctcgatgaggtggccagggagggtaaactctcagagcgccgcgccgccaatgtgatcaaggagctcatggcggtcctcaagtactgccacgagatgggcgtcgtgcatagggacgtcaagccggagaatgttctgctcaccaagtctggaaggttgaagcttgcagattttggattggccgtgcgagttgctgatggtcagcaattgactggtgttgctggcagcccggcatatctggcacctgaggttctactaggaaattactcccaaaaggtagatgtatgggctgccggggtgcttctgcatgttctgttgatgggcactcttccgttccaaggaaaatctgtcgaagctatctttgatgctataaagactgctgaacttgactttcacagcagtcagtgggcatctgtgtcactgcttgctcgtgatctcattggccgaatgcttaatcgagaggtctcttcaaggcccgatgccgaagatgttctccggcacccttgggtcttattctacactgattgcccgcagaaagctgaattctctaacctatggggtactaacaaaactgcagctcccatgattcatcaggagatagtcagttgacgcactggcgacagcaataacacaggtgaggatctcagagcccaagaggagtcggctgttcagcctacccaacgggttgttgccaccaagcaggaacagtctccgaacatgaagaggatgaatccgtgtgtggctttctaacttgacctacctagctcccatccccatgcatgtataaacgagataaacgagctctgtgattttatagatggaaaattttcaccgtggttgatgttttgcgattgctagctcgctgaggctgcaatcctctgtaaatatatcactgttgtcatcgtttctatacatcgatgatcaccgtaattgattcgattatttaggttttttcc

SEQ ID NO: 9293 - DNA, 1930 bp, Zea Mays
cgccagtccgcgtcggttacggcgtgcggcaacgaacaatgaatccatgatagcgcagcagcgctcgtgctcgcgccccagttccactccgatcgaccgaaccccaacaaaatcctcgtccttcgcgtcatctcgacgccacaactctccgagccccgctccgcaatagacccgtaagacgctgtctcgatccgtccccctacctcccccgccgccgacgctcgactcgatacattggagcaggaggcgccgccgccaaaacccaagctaggagtgggagattccgatcctccgcgcgcgcgcgcgcaccatggagccggtgccccggaagcgcaagggcgcgcccccggtgtgctccgccgccaggtccctccaagatttggcctcccgcaagcgcgcctgccgcggctccgtgccgcagcaatcccactgcaccgacgcccccgcccccgctgtggtgatgacggcccccgcggcgagcggcgcgtcggcgtcagcgggggtcctcccggggcgcgggctcaagcggaaggtgggctgcatcgacaacgccacgcggatcgggcggcggaagcggctggagaacgagtacgacctcggcgaggagatcgggcacggcaagttcggctccgtccgcgtctgccgccccaaggcccggacccggggcgaggaggagttcgcctgcaaggcgctgccgaagaacggcggtgacacggcccaccgcgaggtggagatcatgcagcacctctcgggccacccgggcgtcgtcacgctcagggccgtctttgaagacaccgacgccttctacctcgtcatggagctctgccacggcggacggctcctcgatgaggtggccagggagggtaaactctcagagcgccgcgccgccaatgtgatcaaggagctcatggcggtcctcaagtactgccacgagatgggcgtcgtgcatagggacgtcaagccggagaatgttctgctcaccaagtctggaaggttgaagcttgcagattttggattggccgtgcgagttgctgatggtgtgtcaagagtcgaagtggtgctaacttggtagttgcagtcgagttgttgtcatctggaggtcagcaattgactggtgttgctggcagcccggcatatctggcacctgaggttctactaggaaattactcccaaaaggtagatgtatgggctgccggggtgcttctgcatgttctgttgatgggcactcttccgttccaaggaaaatctgtcgaagctatctttgatgctataaagactgctgaacttgactttcacagcagtcagtgggcatctgtgtcactgcttgctcgtgatctcattggccgaatgcttaatcgagaggtctcttcaaggcccgatgccgaagatgttctccggcacccttgggtcttattctacactgattgcccgcagaaagctgaattctctaacctatggggtactaacaaaactgcagctcccatgattcatcaggagatagtcaggtttggttactgcgagtcttcatcttcaaaatcctcaagtgacaactctgaagagcgagatgaatgcggtatagttgacgcactggcgacagcaataacacaggtgaggatctcagagcccaagaggagtcggctgttcagcctacccaacgggttgttgccaccaagcaggaacagtctccgaacatgaagaggatgaatccgtgtgtggctttctaacttgacctacctagctcccatccccatgcatgtataaacgagataaacgagctctgtgattttatagatggaaaattttcaccgtggttgatgttttgcgattgctagctcgctgaggctgcaatcctctgtaaatatatcactgttgtcatcgtttctatacatcgatgatcaccgtaattgattcgattatttaggttttttcc

SEQ ID NO: 9294 - DNA, 1832 bp, Zea Mays
cgccagtccgcgtcggttacggcgtgcggcaacgaacaatgaatccatgatagcgcagcagcgctcgtgctcgcgccccagttccactccgatcgaccgaaccccaacaaaatcctcgtccttcgcgtcatctcgacgccacaactctccgagccccgctccgcaatagacccgtaagacgctgtctcgatccgtccccctacctcccccgccgccgacgctcgactcgatacattggagcaggaggcgccgccgccaaaacccaagctaggagtgggagattccgatcctccgcgcgcgcgcgcgcaccatggagccggtgccccggaagcgcaagggcgcgcccccggtgtgctccgccgccaggtccctccaagatttggcctcccgcaagcgcgcctgccgcggctccgtgccgcagcaatcccactgcaccgacgcccccgcccccgctgtggtgatgacggcccccgcggcgagcggcgcgtcggcgtcagcgggggtcctcccggggcgcgggctcaagcggaaggtgggctgcatcgacaacgccacgcggatcgggcggcggaagcggctggagaacgagtacgacctcggcgaggagatcgggcacggcaagttcggctccgtccgcgtctgccgccccaaggcccggacccggggcgaggaggagttcgcctgcaaggcgctgccgaagaacggcggtgacacggcccaccgcgaggtggagatcatgcagcacctctcgggccacccgggcgtcgtcacgctcagggccgtctttgaagacaccgacgccttctacctcgtcatggagctctgccacggcggacggctcctcgatgaggtggccagggagggtaaactctcagagcgccgcgccgccaatgtgatcaaggagctcatggcggtcctcaagtactgccacgagatgggcgtcgtgcatagggacgtcaagccggagaatgttctgctcaccaagtctggaaggttgaagcttgcagattttggattggccgtgcgagttgctgatggtgtgtcaagagtcgaagtggtgctaacttggtagttgcagtcgagttgttgtcatctggaggtcagcaattgactggtgttgctggcagcccggcatatctggcacctgaggttctactaggaaattactcccaaaaggtagatgtatgggctgccggggtgcttctgcatgttctgttgatgggcactcttccgttccaaggaaaatctgtcgaagctatctttgatgctataaagactgctgaacttgactttcacagcagtcagtgggcatctgtgtcactgcttgctcgtgatctcattggccgaatgcttaatcgagaggtctcttcaaggcccgatgccgaagatgttctccgagatagtcaggtttggttactgcgagtcttcatcttcaaaatcctcaagtgacaactctgaagagcgagatgaatgcggtatagttgacgcactggcgacagcaataacacaggtgaggatctcagagcccaagaggagtcggctgttcagcctacccaacgggttgttgccaccaagcaggaacagtctccgaacatgaagaggatgaatccgtgtgtggctttctaacttgacctacctagctcccatccccatgcatgtataaacgagataaacgagctctgtgattttatagatggaaaattttcaccgtggttgatgttttgcgattgctagctcgctgaggctgcaatcctctgtaaatatatcactgttgtcatcgtttctatacatcgatgatcaccgtaattgattcgattatttaggttttttcc

SEQ ID NO: 9295 - DNA, 2811 bp, Zea Mays
tcgtctaggcacttgtttccaatactagttcttgtgggacagggagcaaccgccatcatccctgttcgtcatctctcccaccatcaacaccaacatgggcagcaacacggaaagggccaggaaggcgttgggcgccatgaagctgatcggtttctctaagaagcaggccatcccagtactcaaggaactcctcaaaatcttcaacaacaactgggagcccattgaggatgagagctaccgtgccctcgcagatgccatcctcgataggcaagacagcaagcaaacccctccctcccaacagggcacccaagcagcccatgcggacttggagcctcttagatcaacaagggacgatcggcaacaatatctttctgctagccttgatgacacatgtgaagatgataatgaaacacccctggtcaagaggcccaggatgggcaccgctaatttcagaccagagctgcagccaccacagcaatccagtgtttcaacccaaggtgctctgcctgcttcaccacaaacgagtcgtcggcaaactcggtccttgactgtagagccacacgctgctggccatgaatatcctttagctgtcaacgatgctctagttgtgaaagaacccaaaccagaaccacaaattgatagagcagaagattttgtggctggtcctaatgccacacaactcaatgatggatcttcagaacaaacttcgggttttggtgcaagaggcaacatagttcaccaagctcaaagtcttggcaggagcctgcaagcagccgcagtgtgcaagaatggggtagggtctacagttcaaaatactcatgagacttcgattgtggaggtggacgttgcttcctcagccaatggtgaggtgaagatgtcattgaaatgcagcttgggttcttcaaatttcagcattagtatggaggaggttttcaaaatggtggaggagaagtgccttcactcatacaagatgctaccttcagatctttctattggcaagctgctgagtgaggtatgccaatctgttgtgcagttgggcactatgcattctgaggttaatagggacagtggcagcttgcataatgaagtagttgttccatttgtgaagccaatctcttgtgaggctgctgtgggcataagtgatgatgtggctggtgggtcatcagtccttgaatcctcagaaccttgtttgcagaattcacttgttgcttggaatcctgagttggctcactgtaatcaaaagacaacccatgatactactgatatatccaaaggcgaagagcggcgccagttccatgttcttgtgcaagaataacagggggcgagttctcctatacacttgagggcctgcttaagacagcattccttgatgaatgtacctcagtgaatcatttcctacaagagcaccataggttctactgtccagtttgccctcttgaaagatctaagaacgaaggctcacctggtccatgtaaaggtcatattgtcagaaaattcattaaagaatgctggagtaaatgtggatgtggcatgcagtgtggaaaccgtgtgattcagcgtggtataacatgcaaattacaggtgttctttacacgtgagggtaaaggctggggagtacgcacagtggaagatctcccaagaggtgcctttgtctgtgaatatgttggagagatactaacaagtgctgaattgcatgaaagagcaattgagaatgcaagaaatggtaagcatatgcatcaagtgctcctggacgctggttggggttcaggtgtagtattgagggatgaggacgcttgtagccttgatggttcattttatgggaatgtcgggcggtttatcaaccaccggtatgtaggttacttgctcgtttttttttgctgtaaatatcttgccataatttgtgtattacagtcttttgtctgctactccgctatgtttttggtaacgaacatatgctatgactagatgctacaatgcaaatttagttcagatccctgtagaagttgagacgcccgatcatcattatcaccatctggcatttttcacgaacaagaaagtggaggcatttgaagagttaacttgggattatggcatcgattttgatgacatggaagggcccagtaaaccgttcagatgcatgtgtggaagtagatactgccgcgatccgaacaatccaaggaggatgggtagagcagctgctaagcgaaagtaggcagggagcgcggacttggttggagttgagcacaccaacttttgctgtgggggggtctggtttcgtgtttgatgtggagtaatgcagtaccatcacctcagctagtattaagtgtagataggtgtggatgattttggtgaatggtgttatggacggaaatgctgcaggctgagcgacctagtaacctatgccatgtagtggcatctaaattagcctgggattgtgtatgcgtaaaaagaacgcctaagacttaaccatgttattatgtcagcttggtacatggtgataaaaagaatctgaccatttcatgtcagccacaattcttgggacggtcggagagtgaactagtatgtcgctggtgcgttgcaggcctgtttggttgtatgcatattgtctaaaattagttgctcaaattgttgtcacatcttagcacgcgtaagtgaatcttcctttatttttaaaattcactgacgagtgagaccaacacggcaggagaaaccttaccacaattatagctataaatcaaacgtatatctaagctgttaaatctaactaatcttaggctatgttttgcttctcgtagatattgaaaatctaat

SEQ ID NO: 9296 - DNA, 2709 bp, Zea Mays
ctagagtgtagacggactgagggagagccctcctcgtctcctccgcccctcctccaggtttgcgtgagatcggcgagcgaatcacgcacacagctgtaggatggagtggggatttgctgtctctccctcttgattgcagtttaatcctttccatttcatccgtccgttcctcgtccacccgagtccgttgaccgttgaagtacagtgggacagggagcaaccgccatcatccctgttcgtcatctctcccaccatcaacaccaacatgggcagcaacacggaaagggccaggaaggcgttgggcgccatgaagctgatcggtttctctaagaagcaggccatcccagtactcaaggaactcctcaaaatcttcaacaacaactgggagcccattgaggatgagagctaccgtgccctcgcagatgccatcctcgataggcaagacagcaagcaaacccctccctcccaacagggcacccaagcagcccatgcggacttggagcctcttagatcaacaagggacgatcggcaacaatatctttctgctagccttgatgacacatgtgaagatgataatgaaacacccctggtcaagaggcccaggatgggcaccgctaatttcagaccagagctgcagccaccacagcaatccagtgtttcaacccaaggtgctctgcctgcttcaccacaaacgagtcgtcggcaaactcggtccttgactgtagagccacacgctgctggccatgaatatcctttagctgtcaacgatgctctagttgtgaaagaacccaaaccagaaccacaaattgatagagcagaagattttgtggctggtcctaatgccacacaactcaatgatggatcttcagaacaaacttcgggttttggtgcaagaggcaacatagttcaccaagctcaaagtcttggcaggagcctgcaagcagccgcagtgtgcaagaatggggtagggtctacagttcaaaatactcatgagacttcgattgtggaggtggacgttgcttcctcagccaatggtgaggtgaagatgtcattgaaatgcagcttgggttcttcaaatttcagcattagtatggaggaggttttcaaaatggtggaggagaagtgccttcactcatacaagatgctaccttcagatctttctattggcaagctgctgagtgagcgccagttccatgttcttgtgcaagaataacagggggcgagttctcctatacacttgagggcctgcttaagacagcattccttgatgaatgtacctcagtgaatcatttcctacaagagcaccataggttctactgtccagtttgccctcttgaaagatctaagaacgaaggctcacctggtccatgtaaaggtcatattgtcagaaaattcattaaagaatgctggagtaaatgtggatgtggcatgcagtgtggaaaccgtgtgattcagcgtggtataacatgcaaattacaggtgttctttacacgtgagggtaaaggctggggagtacgcacagtggaagatctcccaagaggtgcctttgtctgtgaatatgttggagagatactaacaagtgctgaattgcatgaaagagcaattgagaatgcaagaaatggtaagcatatgcatcaagtgctcctggacgctggttggggttcaggtgtagtattgagggatgaggacgcttgtagccttgatggttcattttatgggaatgtcgggcggtttatcaaccaccggtatgtaggttacttgctcgtttttttttgctgtaaatatcttgccataatttgtgtattacagtcttttgtctgctactccgctatgtttttggtaacgaacatatgctatgactagatgctacaatgcaaatttagttcagatccctgtagaagttgagacgcccgatcatcattatcaccatctggcatttttcacgaacaagaaagtggaggcatttgaagagttaacttgggattatggcatcgattttgatgacatggaagggcccagtaaaccgttcagatgcatgtgtggaagtagatactgccgcgatccgaacaatccaaggaggatgggtagagcagctgctaagcgaaagtaggcagggagcgcggacttggttggagttgagcacaccaacttttgctgtgggggggtctggtttcgtgtttgatgtggagtaatgcagtaccatcacctcagctagtattaagtgtagataggtgtggatgattttggtgaatggtgttatggacggaaatgctgcaggctgagcgacctagtaacctatgccatgtagtggcatctaaattagcctgggattgtgtatgcgtaaaaagaacgcctaagacttaaccatgttattatgtcagcttggtacatggtgataaaaagaatctgaccatttcatgtcagccacaattcttgggacggtcggagagtgaactagtatgtcgctggtgcgttgcaggcctgtttggttgtatgcatattgtctaaaattagttgctcaaattgttgtcacatcttagcacgcgtaagtgaatcttcctttatttttaaaattcactgacgagtgagaccaacacggcaggagaaaccttaccacaattatagctataaatcaaacgtatatctaagctgttaaatctaactaatcttaggctatgttttgcttctcgtagatattgaaaatctaat

SEQ ID NO: 9297 - DNA, 2931 bp, Zea Mays
cagcaagcaaacgctagagtgtagacggactgagggagagccctcctcgtctcctccgcccctcctccaggtttgcgtgagatcggcgagcgaatcacgcacacagctgtaggatggagtggggatttgctgtctctccctcttgattgcagtttaatcctttccatttcatccgtccgttcctcgtccacccgagtccgttgaccgttgaagtacagtgggacagggagcaaccgccatcatccctgttcgtcatctctcccaccatcaacaccaacatgggcagcaacacggaaagggccaggaaggcgttgggcgccatgaagctgatcggtttctctaagaagcaggccatcccagtactcaaggaactcctcaaaatcttcaacaacaactgggagcccattgaggatgagagctaccgtgccctcgcagatgccatcctcgataggcaagacagcaagcaaacccctccctcccaacagggcacccaagcagcccatgcggacttggagcctcttagatcaacaagggacgatcggcaacaatatctttctgctagccttgatgacacatgtgaagatgataatgaaacacccctggtcaagaggcccaggatgggcaccgctaatttcagaccagagctgcagccaccacagcaatccagtgtttcaacccaaggtgctctgcctgcttcaccacaaacgagtcgtcggcaaactcggtccttgactgtagagccacacgctgctggccatgaatatcctttagctgtcaacgatgctctagttgtgaaagaacccaaaccagaaccacaaattgatagagcagaagattttgtggctggtcctaatgccacacaactcaatgatggatcttcagaacaaacttcgggttttggtgcaagaggcaacatagttcaccaagctcaaagtcttggcaggagcctgcaagcagccgcagtgtgcaagaatggggtagggtctacagttcaaaatactcatgagacttcgattgtggaggtggacgttgcttcctcagccaatggtgaggtgaagatgtcattgaaatgcagcttgggttcttcaaatttcagcattagtatggaggaggttttcaaaatggtggaggagaagtgccttcactcatacaagatgctaccttcagatctttctattggcaagctgctgagtgaggtatgccaatctgttgtgcagttgggcactatgcattctgaggttaatagggacagtggcagcttgcataatgaagtagttgttccatttgtgaagccaatctcttgtgaggctgctgtgggcataagtgatgatgtggctggtgggtcatcagtccttgaatcctcagaaccttgtttgcagaattcacttgttgcttggaatcctgagttggctcactgtaatcaaaagacaacccatgatactactgatatatccaaaggcgaagagcggcgccagttccatgttcttgtgcaagaataacagggggcgagttctcctatacacttgagggcctgcttaagacagcattccttgatgaatgtacctcagtgaatcatttcctacaagagcaccataggttctactgtccagtttgccctcttgaaagatctaagaacgaaggctcacctggtccatgtaaaggtcatattgtcagaaaattcattaaagaatgctggagtaaatgtggatgtggcatgcagtgtggaaaccgtgtgattcagcgtggtataacatgcaaattacaggtgttctttacacgtgagggtaaaggctggggagtacgcacagtggaagatctcccaagaggtgcctttgtctgtgaatatgttggagagatactaacaagtgctgaattgcatgaaagagcaattgagaatgcaagaaatggtaagcatatgcatcaagtgctcctggacgctggttggggttcaggtgtagtattgagggatgaggacgcttgtagccttgatggttcattttatgggaatgtcgggcggtttatcaaccaccgtcttttgtctgctactccgctatgtttttggtaacgaacatatgctatgactagatgctacaatgcaaatttagttcagatccctgtagaagttgagacgcccgatcatcattatcaccatctggcatttttcacgaacaagaaagtggaggcatttgaagagttaacttgggattatggcatcgattttgatgacatggaagggcccagtaaaccgttcagatgcatgtgtggaagtagatactgccgcgatccgaacaatccaaggaggatgggtagagcagctgctaagcgaaagtaggcagggagcgcggacttggttggagttgagcacaccaacttttgctgtgggggggtctggtttcgtgtttgatgtggagtaatgcagtaccatcacctcagctagtattaagtgtagataggtgtggatgattttggtgaatggtgttatggacggaaatgctgcaggctgagcgacctagtaacctatgccatgtagtggcatctaaattagcctgggattgtgtatgcgtaaaaagaacgcctaagacttaaccatgttattatgtcagcttggtacatggtgataaaaagaatctgaccatttcatgtcagccacaattcttgggacggtcggagagtgaactagtatgtcgctggtgcgttgcaggcctgtttggttgtatgcatattgtctaaaattagttgctcaaattgttgtcacatcttagcacgcgtaagtgaatcttcctttatttttaaaattcactgacgagtgagaccaacacggcaggagaaaccttaccacaattatagctataaatcaaacgtatatctaagctgttaaatctaactaatcttaggctatgttttgcttctcgtagatattgaaaatctaat

SEQ ID NO: 9298 - DNA, 2624 bp, Zea Mays
cagcaagcaaacgctagagtgtagacggactgagggagagccctcctcgtctcctccgcccctcctccaggtttgcgtgagatcggcgagcgaatcacgcacacagctgtaggatggagtggggatttgctgtctctccctcttgattgcagtttaatcctttccatttcatccgtccgttcctcgtccacccgagtccgttgaccgttgaagtacagtgggacagggagcaaccgccatcatccctgttcgtcatctctcccaccatcaacaccaacatgggcagcaacacggaaagggccaggaaggcgttgggcgccatgaagctgatcggtttctctaagaagcaggccatcccagtactcaaggaactcctcaaaatcttcaacaacaactgggagcccattgaggatgagagctaccgtgccctcgcagatgccatcctcgataggcaagacagcaagcaaacccctccctcccaacagggcacccaagcagcccatgcggacttggagcctcttagatcaacaagggacgatcggcaacaatatctttctgctagccttgatgacacatgtgaagatgataatgaaacacccctggtcaagaggcccaggatgggcaccgctaatttcagaccagagctgcagccaccacagcaatccagtgtttcaacccaaggtgctctgcctgcttcaccacaaacgagtcgtcggcaaactcggtccttgactgtagagccacacgctgctggccatgaatatcctttagctgtcaacgatgctctagttgtgaaagaacccaaaccagaaccacaaattgatagagcagaagattttgtggctggtcctaatgccacacaactcaatgatggatcttcagaacaaacttcgggttttggtgcaagaggcaacatagttcaccaagctcaaagtcttggcaggagcctgcaagcagccgcagtgtgcaagaatggggtagggtctacagttcaaaatactcatgagacttcgattgtggaggtggacgttgcttcctcagccaatggtgaggtgaagatgtcattgaaatgcagcttgggttcttcaaatttcagcattagtatggaggaggttttcaaaatggtggaggagaagtgccttcactcatacaagatgctaccttcagatctttctattggcaagctgctgagtgagaattcacttgttgcttggaatcctgagttggctcactgtaatcaaaagacaacccatgatactactgatatatccaaaggcgaagagcggcgccagttccatgttcttgtgcaagaataacagggggcgagttctcctatacacttgagggcctgcttaagacagcattccttgatgaatgtacctcagtgaatcatttcctacaagagcaccataggttctactgtccagtttgccctcttgaaagatctaagaacgaaggctcacctggtccatgtaaaggtcatattgtcagaaaattcattaaagaatgctggagtaaatgtggatgtggcatgcagtgtggaaaccgtgtgattcagcgtggtataacatgcaaattacaggtgttctttacacgtgagggtaaaggctggggagtacgcacagtggaagatctcccaagaggtgcctttgtctgtgaatatgttggagagatactaacaagtgctgaattgcatgaaagagcaattgagaatgcaagaaatgtcttttgtctgctactccgctatgtttttggtaacgaacatatgctatgactagatgctacaatgcaaatttagttcagatccctgtagaagttgagacgcccgatcatcattatcaccatctggcatttttcacgaacaagaaagtggaggcatttgaagagttaacttgggattatggcatcgattttgatgacatggaagggcccagtaaaccgttcagatgcatgtgtggaagtagatactgccgcgatccgaacaatccaaggaggatgggtagagcagctgctaagcgaaagtaggcagggagcgcggacttggttggagttgagcacaccaacttttgctgtgggggggtctggtttcgtgtttgatgtggagtaatgcagtaccatcacctcagctagtattaagtgtagataggtgtggatgattttggtgaatggtgttatggacggaaatgctgcaggctgagcgacctagtaacctatgccatgtagtggcatctaaattagcctgggattgtgtatgcgtaaaaagaacgcctaagacttaaccatgttattatgtcagcttggtacatggtgataaaaagaatctgaccatttcatgtcagccacaattcttgggacggtcggagagtgaactagtatgtcgctggtgcgttgcaggcctgtttggttgtatgcatattgtctaaaattagttgctcaaattgttgtcacatcttagcacgcgtaagtgaatcttcctttatttttaaaattcactgacgagtgagaccaacacggcaggagaaaccttaccacaattatagctataaatcaaacgtatatctaagctgttaaatctaactaatcttaggctatgttttgcttctcgtagatattgaaaatctaat

SEQ ID NO: 9299 - DNA, 2781 bp, Zea Mays
cagcaagcaaacgctagagtgtagacggactgagggagagccctcctcgtctcctccgcccctcctccaggtttgcgtgagatcggcgagcgaatcacgcacacagctgtaggatggagtggggatttgctgtctctccctcttgattgcagtttaatcctttccatttcatccgtccgttcctcgtccacccgagtccgttgaccgttgaagtacagtgggacagggagcaaccgccatcatccctgttcgtcatctctcccaccatcaacaccaacatgggcagcaacacggaaagggccaggaaggcgttgggcgccatgaagctgatcggtttctctaagaagcaggccatcccagtactcaaggaactcctcaaaatcttcaacaacaactgggagcccattgaggatgagagctaccgtgccctcgcagatgccatcctcgataggcaagacagcaagcaaacccctccctcccaacagggcacccaagcagcccatgcggacttggagcctcttagatcaacaagggacgatcggcaacaatatctttctgctagccttgatgacacatgtgaagatgataatgaaacacccctggtcaagaggcccaggatgggcaccgctaatttcagaccagagctgcagccaccacagcaatccagtgtttcaacccaaggtgctctgcctgcttcaccacaaacgagtcgtcggcaaactcggtccttgactgtagagccacacgctgctggccatgaatatcctttagctgtcaacgatgctctagttgtgaaagaacccaaaccagaaccacaaattgatagagcagaagattttgtggctggtcctaatgccacacaactcaatgatggatcttcagaacaaacttcgggttttggtgcaagaggcaacatagttcaccaagctcaaagtcttggcaggagcctgcaagcagccgcagtgtgcaagaatggggtagggtctacagttcaaaatactcatgagacttcgattgtggaggtggacgttgcttcctcagccaatggtgaggtgaagatgtcattgaaatgcagcttgggttcttcaaatttcagcattagtatggaggaggttttcaaaatggtggaggagaagtgccttcactcatacaagatgctaccttcagatctttctattggcaagctgctgagtgagccaatctcttgtgaggctgctgtgggcataagtgatgatgtggctggtgggtcatcagtccttgaatcctcagaaccttgtttgcagaattcacttgttgcttggaatcctgagttggctcactgtaatcaaaagacaacccatgatactactgatatatccaaaggcgaagagcggcgccagttccatgttcttgtgcaagaataacagggggcgagttctcctatacacttgagggcctgcttaagacagcattccttgatgaatgtacctcagtgaatcatttcctacaagagcaccataggttctactgtccagtttgccctcttgaaagatctaagaacgaaggctcacctggtccatgtaaaggtcatattgtcagaaaattcattaaagaatgctggagtaaatgtggatgtggcatgcagtgtggaaaccgtgtgattcagcgtggtataacatgcaaattacaggtgttctttacacgtgagggtaaaggctggggagtacgcacagtggaagatctcccaagaggtgcctttgtctgtgaatatgttggagagatactaacaagtgctgaattgcatgaaagagcaattgagaatgcaagaaatggtaagcatatgcatcaagtgctcctggacgctggttggggttcaggtgtagtattgagggatgaggacgcttgtagccttgatggttcattttatgggaatgtcgggcggtttatcaaccaccgatgctacaatgcaaatttagttcagatccctgtagaagttgagacgcccgatcatcattatcaccatctggcatttttcacgaacaagaaagtggaggcatttgaagagttaacttgggattatggcatcgattttgatgacatggaagggcccagtaaaccgttcagatgcatgtgtggaagtagatactgccgcgatccgaacaatccaaggaggatgggtagagcagctgctaagcgaaagtaggcagggagcgcggacttggttggagttgagcacaccaacttttgctgtgggggggtctggtttcgtgtttgatgtggagtaatgcagtaccatcacctcagctagtattaagtgtagataggtgtggatgattttggtgaatggtgttatggacggaaatgctgcaggctgagcgacctagtaacctatgccatgtagtggcatctaaattagcctgggattgtgtatgcgtaaaaagaacgcctaagacttaaccatgttattatgtcagcttggtacatggtgataaaaagaatctgaccatttcatgtcagccacaattcttgggacggtcggagagtgaactagtatgtcgctggtgcgttgcaggcctgtttggttgtatgcatattgtctaaaattagttgctcaaattgttgtcacatcttagcacgcgtaagtgaatcttcctttatttttaaaattcactgacgagtgagaccaacacggcaggagaaaccttaccacaattatagctataaatcaaacgtatatctaagctgttaaatctaactaatcttaggctatgttttgcttctcgtagatattgaaaatctaat

SEQ ID NO: 9300 - DNA, 3031 bp, Zea Mays
cagcaagcaaacgctagagtgtagacggactgagggagagccctcctcgtctcctccgcccctcctccaggtttgcgtgagatcggcgagcgaatcacgcacacagctgtaggatggagtggggatttgctgtctctccctcttgattgcagtttaatcctttccatttcatccgtccgttcctcgtccacccgagtccgttgaccgttgaagtacagtgggacagggagcaaccgccatcatccctgttcgtcatctctcccaccatcaacaccaacatgggcagcaacacggaaagggccaggaaggcgttgggcgccatgaagctgatcggtttctctaagaagcaggccatcccagtactcaaggaactcctcaaaatcttcaacaacaactgggagcccattgaggatgagagctaccgtgccctcgcagatgccatcctcgataggcaagacagcaagcaaacccctccctcccaacagggcacccaagcagcccatgcggacttggagcctcttagatcaacaagggacgatcggcaacaatatctttctgctagccttgatgacacatgtgaagatgataatgaaacacccctggtcaagaggcccaggatgggcaccgctaatttcagaccagagctgcagccaccacagcaatccagtgtttcaacccaaggtgctctgcctgcttcaccacaaacgagtcgtcggcaaactcggtccttgactgtagagccacacgctgctggccatgaatatcctttagctgtcaacgatgctctagttgtgaaagaacccaaaccagaaccacaaattgatagagcagaagattttgtggctggtcctaatgccacacaactcaatgatggatcttcagaacaaacttcgggttttggtgcaagaggcaacatagttcaccaagctcaaagtcttggcaggagcctgcaagcagccgcagtgtgcaagaatggggtagggtctacagttcaaaatactcatgagacttcgattgtggaggtggacgttgcttcctcagccaatggtgaggtgaagatgtcattgaaatgcagcttgggttcttcaaatttcagcattagtatggaggaggttttcaaaatggtggaggagaagtgccttcactcatacaagatgctaccttcagatctttctattggcaagctgctgagtgaggtatgccaatctgttgtgcagttgggcactatgcattctgaggttaatagggacagtggcagcttgcataatgaagtagttgttccatttgtgaagccaatctcttgtgaggctgctgtgggcataagtgatgatgtggctggtgggtcatcagtccttgaatcctcagaaccttgtttgcagaattcacttgttgcttggaatcctgagttggctcactgtaatcaaaagacaacccatgatactactgatatatccaaaggcgaagagcggattgttgtgctgattgttctggcaactgtttatcagcgccagttccatgttcttgtgcaagaataacagggggcgagttctcctatacacttgagggcctgcttaagacagcattccttgatgaatgtacctcagtgaatcatttcctacaagagcaccataggttctactgtccagtttgccctcttgaaagatctaagaacgaaggctcacctggtccatgtaaaggtcatattgtcagaaaattcattaaagaatgctggagtaaatgtggatgtggcatgcagtgtggaaaccgtgtgattcagcgtggtataacatgcaaattacaggtgttctttacacgtgagggtaaaggctggggagtacgcacagtggaagatctcccaagaggtgcctttgtctgtgaatatgttggagagatactaacaagtgctgaattgcatgaaagagcaattgagaatgcaagaaatggtaagcatatgcatcaagtgctcctggacgctggttggggttcaggtgtagtattgagggatgaggacgcttgtagccttgatggttcattttatgggaatgtcgggcggtttatcaaccaccggtatgtaggttacttgctcgtttttttttgctgtaaatatcttgccataatttgtgtattacagtcttttgtctgctactccgctatgtttttggtaacgaacatatgctatgactagatgctacaatgcaaatttagttcagatccctgtagaagttgagacgcccgatcatcattatcaccatctggcatttttcacgaacaagaaagtggaggcatttgaagagttaacttgggattatggcatcgattttgatgacatggaagggcccagtaaaccgttcagatgcatgtgtggaagtagatactgccgcgatccgaacaatccaaggaggatgggtagagcagctgctaagcgaaagtaggcagggagcgcggacttggttggagttgagcacaccaacttttgctgtgggggggtctggtttcgtgtttgatgtggagtaatgcagtaccatcacctcagctagtattaagtgtagataggtgtggatgattttggtgaatggtgttatggacggaaatgctgcaggctgagcgacctagtaacctatgccatgtagtggcatctaaattagcctgggattgtgtatgcgtaaaaagaacgcctaagacttaaccatgttattatgtcagcttggtacatggtgataaaaagaatctgaccatttcatgtcagccacaattcttgggacggtcggagagtgaactagtatgtcgctggtgcgttgcaggcctgtttggttgtatgcatattgtctaaaattagttgctcaaattgttgtcacatcttagcacgcgtaagtgaatcttcctttatttttaaaattcactgacgagtgagaccaacacggcaggagaaaccttaccacaattatagctataaatcaaacgtatatctaagctgttaaatctaactaatcttaggctatgttttgcttctcgtagatattgaaaatctaat

SEQ ID NO: 9301 - DNA, 2442 bp, Zea Mays
attgtcatctccagtcgtgttgtggccggaagagacagacacgcaaacgagaggactcgagagagattccgccgccaccaccgccggctcagatgccgccgccgcagtcgggcatgaccctctgccgccttcccaaggccacccttggccttcccctttctctcccctctttgctatatcgtcccagcctgtccctcgccgcacgtcgcaccaaggccgtctccgccagggcctcctcctcctctccatcaccggactcttccttcggttcgcggatggaggattccgtcaagaagacggtggccgataaccccgttgtcatctactctaagtcatgatattccatggaggtgaagtcactcttcaagcggatcggtgtgcagccccacgtcatcgagctcgacaatctcggagctcaaggaccacaactacaaaaggtattagaaaggctgactggacagtctactgttcctaacgttttcatcggtggaaaacacgttggaggctgcacagataccgtgaagctgtatcgcaagggggagctagctagcatgctgtcggacctggatatcaacattgacaactcatgacaagctatgttctgcaaggattgggcgagacttgggcagcactgtattgagtttctttttttaacatgtgcgatgacaaacactggtgtcatttacacattttcgtttggtactccgattaaatcattgaatttgaccaccgtatatatgcaatttgctagaaaaagaagggaacgagctcgcaaatcttgtgtcctcggcaatttttgtctattttttcccaagcgcatatattgcaacgcaaacgatgtgcggcccgtcatgtgccgtggagcaagatcgggtagctgaaacccccaggccccagtcacttgtggggagtttgactgcccgtcccgtgatttttggagtaaatataccagcactgccgaagcccgaaaatgaatggcctgaaaaatggggtggtgtagggcgtcccgcagcagcagctgagcagagcagcggcgaagaagcagcagcagaatgctttccgttccaggagcagcaggtgcgcccagccacggccaccccgaccccgccccgcgccttcttcgtcttcggcgactcgctggtggacagcggcaacaacaactacctggccacgacggcgcgcgccgactcgccgccgtacggcctcgactacccgacgcaccgcgcgacgggccgcttctccaacggcaagaacgtgccggacatcatcagcgagtacctgggcgcggagccggcgctgccgtacctgagcccgcacctggacgggcggaagctgctggtgggcgccaacttcgcgtcggcgggcgtgggcgtgctcaacgacacgggggtccagttcgccaacatcatccgcgtccagaagcagctgcgctacttccggcagtaccaggaccgcttgagccgcctcgtcggcgaggacgccgccgcgcgcctcgtccgcggagcgctcgtgctcgtcaccctgggcggcaacgacttcatcaacaactactacctggtgcccttctcggcgcggtcccgcgagttcgcgctgccggactacgtgcgctacgtcgtgtccgagtacgccaaggtgctgcggcagctctactcgctgggcgcgcgccgggtgctggtcacggggtcgggcccgctggggtgcgccccagccgagctggcgctgcggggcagccgcgacggggagtgcgacgccgagctgcagcgcgccgccgcgctctacaacccgcagctggtggacatgatcaagggcgtcaacgcggagctcggcgccgacgtcttcgtcgccgtcaacgcctaccggatgcacatggacttcatctccgacccggcggcctacggcttcgtcacctccaaggtcgcgtgctgcggccagggaccatacaacggcgtggggctctgcaccgccgcgtccagcgtctgcccggaccgcagcgtctacgccttctgggacaacttccaccccacggagaaggccaaccgcatcatcgtcagccagttcatggacggcccacaggagtacatgcacccgctcaacctcagcaccatcctcgccgtcgacgcccgcgccgccgccaccttcaactagctaaaacacgatacagcatatgaaaacagaccacattcatattctatcatatattatgcacccatccgaaccccaggctggcagttcatcagtatttgtactccgatatgacacatcatacatctagtagcatgcatttcgccctagtggctagtactagtacgcttcctgctgagaatctgaaataaaaacgagttgtacttcatcattcatccagtatactgtagttgctgccagcaacacccagaaattagtcccaaatggaacaaggatgaatcaatgatacattgatcacaa

SEQ ID NO: 9302 - DNA, 434 bp, Zea Mays
attgtcatctccagtcgtgttgtggccggaagagacagacacgcaaacgagaggactcgagagagattccgccgccaccaccgccggctcagatgccgccgccgcagtcgggcatgaccctctgccgccttcccaaggccacccttggccttcccctttctctcccctctttgctatatcgtcccagcctgtccctcgccgcacgtcgcaccaaggccgtctccgccagggcctcctcctcctctccatcaccggactcttccttcggttcgcggatggaggattccgtcaagaagacggtggccgataaccccgttgtcatctactctaagtcatgatattccatggaggtgaagtcactcttcaagcggatcggtgtgcagccccacgtcatcgagctcgacaatctcggttgatgttcttgtgcagctgac

SEQ ID NO: 9303 - DNA, 975 bp, Zea Mays
gtcctcctctggaaaaccacctcttctcctagacttcttccgttgcatcttctcttctgttctccacgacgcagttcggctgccagacaaaaaccctaaacgccgccgccgccgccgctcttcctcgagatgggaggcaagtgcccgcaccgcaaggtaaagaagcgccgcctatcccacaagacggctcgccgcggcaagttcctcctgaaggccgacgatgccgtctatgacgagctcgtcaagctggccgaccagggcaaggacgctgaagccaaggagctccccgtcgatgaggacctcccaggcctgggacagttctactgcctccactgcgatcgctactttgcaagtgaaagcgtgaaggatgatcactaccgctcaaagcgccacaagaaaaggtaatgtctggaccggccccgcacacgcagcttgatgcagaactcgctgcagggatgggaaagcctgacaacggcctgaagctcatgtccatgtgaaggaacctcttgctggtactggtacttgttccgtgcctttgttgctgccgtacaattgaagctgctttgcgcagtaagtaatagcaagagttatagcagacggtttttttttgttgtacgcaagactttcgaagtgggtgtaagttgttttagagtggtggcagagggggggggggggggtgtcaatgcatgtatcatgaaaccatttatcgacccataccagtgatgatgatgatgatgtctcgtatcatttggcctcagactgcgctcgtgtgatgtatcatgtatggtagtaccacaaagacagacggatggacgcgagaggcgtccaggccaggacagcagcgctcgcttgtcagctttccgttctgtgcgaagattttccaagatctgtgtctgctgtacagtacctgtgctctctatggctctggtttcgtcggctgatgatgccgatggctgggtcgtctataataattgc

SEQ ID NO: 9304 - DNA, 2831 bp, Zea Mays
tgccgctcgtgtccgacccgaaatttcgggtaaacccgaacgccatcccagccattcaccagtcccgaaacaagagaacggagacgcagaagcggtggagcctccagcccgtgccgaaggggagaagccctactatgcgctcccatggccgcctgcgtgctgggcctagcacctactctcgttagcatgtggcccctccggtgcgctaccgcttgctccgccgctacagaggcctccaccacggccgctcatgcgtcgcgtcgcggcgtgggcgcggtcagctcggctctgtccggtcttcgaggaaggcactccttatcttcggcgcaattcatggatggtcttagaagcaatcttcaagtggaaaggaacctgacactttccccaaagtcaccaatgtctcgtagtgatgattcagccataacctgtaaaggattctgtacaatattatggaacctgaaagcagatttacaagatgggtgcttaatattcataacaggagacccgcttaccctgggctgttgggaatccaacatggctgttcagttggctccttctgttgaaagcaataatatatggacagctgaaataaaggtaccatatggagtgcatttcaaatatagttattttgttcgagaagaaatgagttcctcttctgatattatatggaggccaggtccagtatactccttatcaataccttcagatggccagaaaaagcaggttattattgtgaaagacctatggatgaaaaccagtctaccaggtcttcctactcctacatggggatcatggctgatggaagctgattctcttgaaggtgaactttttgatggtggaaataaccagaacattgtgaaagatcactctgtcagggatacacggaatcaaggcttatctgtgatcatattatattgaagcttgggaatggcacaccattacatgcaaaactgttgtcggataatcaatctaccatcatgcacaactgtgtaactgaaataccaaatgccagttatataagccaatatggaaggcctcaagtcgtagaggagccatggattcttgaatcaattgtgtctgcaaagaaaccagttgcaaaagtcaaagataagaaagggcaaaagaagcttgtaaattataagcacactttgagtggagttagtaaaaacatgcatgaacagtatcagcctgttgaagagccatggttatttcaatctatattggaactaaatgaaactatagttcttgctgatggaaaagtagaagcaagggacattatcagaaaattaaggaaaatagaaaaacctttaacgcctttggatgagagtaaaccgactggtggtgaaccgtcatcaagagttatacttatgaattcctctgtctgcactatgcagagaattgcagtattagaagatggaaaactagttgaactcttgctggaacccatcaagaacaatgtacagtgtgatagtatttatctaggtgtagtaacaaagctcgttcctcatatgggaggagcatttgtagatattggaatttcaaggccttcacttatgagcataaagcaaaaccgagatccttttgtgtatcctcaagtttttaagaaccgaggaacagatcatgttggtgattattgtaatgaagagaaccttccagcttatgaaaacgatgatgatatgagtgacgacgaatttgcagatgaagaagctcatgatggttcatcatttccagttgagaatgttacagataacaatgtcgatgatgatgaagttgacagcatttctgtttatgacgtagacaaagatgaagaaaatgaccacatggaagatgaatatagtgagggcatactgcaaggatatcaatcagaaatttccaatgatctcaagactttatcttcaattcagcatgctttaagagaatctaatgatgacacaaatggaagcagatggtctcaagttcgcaagggcacaaaagtaatggttcaagttgtcaaagaaggattgggtacgaaaggtccaacacttagtccatttccatgcctgcgaagccgattttggatattggtttcccgtggcaacaaagttggggtatccaaaaagattactggaatagaacgcaccaggttaaagggcatcacaaaattactgcgacctcctggatttactttgacggctcgcacagtcgcagctggtcattcctgggaggaactgcagaaggaccttgatggcttgctatctacatggaaaggaataactgagcatgctcaatctgctgccttggctgctgatgagggtgtggaaggtgctgttcctgtaatgttgcacagagcgaagggtcaaactttatctgttgttcaagacgattttaatgaaaaggtcaagaggctggttgtggattctcctcgaacatatcatgaggttacaagctatcttgaagaagtcgcacctgagctctacagccgagttgagctttatgagaaaagaaaacctatatttgatgaatacaacatcgagaaggagatagacaacatcctttgtaaaaggtgctacttcattgtttctatattatttcatagttcctgttggtggattttttcattagtttttttctaaagcgcccaggagaactgcacatcaattatattaagaagatagaagaaaaatggtctaaaaatagaccaaaatacaagaacaaccacctttttttagaaacaaaaatacacaaaagaatccatctagaagtcagcctaaaggacacaaccaacagcccctaaactaaggtcaggcggcgcgcagaccttagaaataaaaatacacaaaagagtgttgtct

SEQ ID NO: 9305 - DNA, 2826 bp, Zea Mays
tgccgctcgtgtccgacccgaaatttcgggtaaacccgaacgccatcccagccattcaccagtcccgaaacaagagaacggagacgcagaagcggtggagcctccagcccgtgccgaaggggagaagccctactatgcgctcccatggccgcctgcgtgctgggcctagcacctactctcgttagcatgtggcccctccggtgcgctaccgcttgctccgccgctacagaggcctccaccacggccgctcatgcgtcgcgtcgcggcgtgggcgcggtcagctcggctctgtccggtcttcgaggaaggcactccttatcttcggcgcaattcatggatggtcttagaagcaatcttcaagtggaaaggaacctgacactttccccaaagtcaccaatgtctcgtagtgccataacctgtaaaggattctgtacaatattatggaacctgaaagcagatttacaagatgggtgcttaatattcataacaggagacccgcttaccctgggctgttgggaatccaacatggctgttcagttggctccttctgttgaaagcaataatatatggacagctgaaataaaggtaccatatggagtgcatttcaaatatagttattttgttcgagaagaaatgagttcctcttctgatattatatggaggccaggtccagtatactccttatcaataccttcagatggccagaaaaagcaggttattattgtgaaagacctatggatgaaaaccagtctaccaggtcttcctactcctacatggggatcatggctgatggaagctgattctcttgaaggtgaactttttgatggtggaaataaccagaacattgtgaaagatcactctgtcagggatacacggaatcaaggcttatctgtaggtgatcatattatattgaagcttgggaatggcacaccattacatgcaaaactgttgtcggataatcaatctaccatcatgcacaactgtgtaactgaaataccaaatgccagttatataagccaatatggaaggcctcaagtcgtagaggagccatggattcttgaatcaattgtgtctgcaaagaaaccagttgcaaaagtcaaagataagaaagggcaaaagaagcttgtaaattataagcacactttgagtggagttagtaaaaacatgcatgaacagtatcagcctgttgaagagccatggttatttcaatctatattggaactaaatgaaactatagttcttgctgatggaaaagtagaagcaagggacattatcagaaaattaaggaaaatagaaaaacctttaacgcctttggatgagagtaaaccgactggtggtgaaccgtcatcaagagttatacttatgaattcctctgtctgcactatgcagagaattgcagtattagaagatggaaaactagttgaactcttgctggaacccatcaagaacaatgtacagtgtgatagtatttatctaggtgtagtaacaaagctcgttcctcatatgggaggagcatttgtagatattggaatttcaaggccttcacttatgagcataaagcaaaaccgagatccttttgtgtatcctcaagtttttaagaaccgaggaacagatcatgttggtgattattgtaatgaagagaaccttccagcttatgaaaacgatgatgatatgagtgacgacgaatttgcagatgaagaagctcatgatggttcatcatttccagttgagaatgttacagataacaatgtcgatgatgatgaagttgacagcatttctgtttatgacgtagacaaagatgaagaaaatgaccacatggaagatgaatatagtgagggcatactgcaaggatatcaatcagaaatttccaatgatctcaagactttatcttcaattcagcatgctttaagagaatctaatgatgacacaaatggaagcagatggtctcaagttcgcaagggcacaaaagtaatggttcaagttgtcaaagaaggattgggtacgaaaggtccaacacttagtccatttccatgcctgcgaagccgattttggatattggtttcccgtggcaacaaagttggggtatccaaaaagattactggaatagaacgcaccaggttaaagggcatcacaaaattactgcgacctcctggatttactttgacggctcgcacagtcgcagctggtcattcctgggaggaactgcagaaggaccttgatggcttgctatctacatggaaaggaataactgagcatgctcaatctgctgccttggctgctgatgagggtgtggaaggtgctgttcctgtaatgttgcacagagcgaagggtcaaactttatctgttgttcaagacgattttaatgaaaaggtcaagaggctggttgtggattctcctcgaacatatcatgaggttacaagctatcttgaagaagtcgcacctgagctctacagccgagttgagctttatgagaaaagaaaacctatatttgatgaatacaacatcgagaaggagatagacaacatcctttgtaaaaggtgctacttcattgtttctatattatttcatagttcctgttggtggattttttcattagtttttttctaaagcgcccaggagaactgcacatcaattatattaagaagatagaagaaaaatggtctaaaaatagaccaaaatacaagaacaaccacctttttttagaaacaaaaatacacaaaagaatccatctagaagtcagcctaaaggacacaaccaacagcccctaaactaaggtcaggcggcgcgcagaccttagaaataaaaatacacaaaagagtgttgtct

SEQ ID NO: 9306 - DNA, 2842 bp, Zea Mays
tgccgctcgtgtccgacccgaaatttcgggtaaacccgaacgccatcccagccattcaccagtcccgaaacaagagaacggagacgcagaagcggtggagcctccagcccgtgccgaaggggagaagccctactatgcgctcccatggccgcctgcgtgctgggcctagcacctactctcgttagcatgtggcccctccggtgcgctaccgcttgctccgccgctacagaggcctccaccacggccgctcatgcgtcgcgtcgcggcgtgggcgcggtcagctcggctctgtccggtcttcgaggaaggcactccttatcttcggcgcaattcatggatggtcttagaagcaatcttcaagtggaaaggaacctgacactttccccaaagtcaccaatgtctcgtagtgatgattcagccataacctgtaaaggattctgtacaatattatggaacctgaaagcagatttacaagatgggtgcttaatattcataacaggagacccgcttaccctgggctgttgggaatccaacatggctgttcagttggctccttctgttgaaagcaataatatatggacagctgaaataaaggtaccatatggagtgcatttcaaatatagttattttgttcgagaagaaatgagttcctcttctgatattatatggaggccaggtccagtatactccttatcaataccttcagatggccagaaaaagcaggttattattgtgaaagacctatggatgaaaaccagtctaccaggtcttcctactcctacatggggatcatggctgatggaagctgattctcttgaaggtgaactttttgatggtggaaataaccagaacattgtgaaagatcactctgtcagggatacacggaatcaaggcttatcttggatttgcaggtgatcatattatattgaagcttgggaatggcacaccattacatgcaaaactgttgtcggataatcaatctaccatcatgcacaactgtgtaactgaaataccaaatgccagttatataagccaatatggaaggcctcaagtcgtagaggagccatggattcttgaatcaattgtgtctgcaaagaaaccagttgcaaaagtcaaagataagaaagggcaaaagaagcttgtaaattataagcacactttgagtggagttagtaaaaacatgcatgaacagtatcagcctgttgaagagccatggttatttcaatctatattggaactaaatgaaactatagttcttgctgatggaaaagtagaagcaagggacattatcagaaaattaaggaaaatagaaaaacctttaacgcctttggatgagagtaaaccgactggtggtgaaccgtcatcaagagttatacttatgaattcctctgtctgcactatgcagagaattgcagtattagaagatggaaaactagttgaactcttgctggaacccatcaagaacaatgtacagtgtgatagtatttatctaggtgtagtaacaaagctcgttcctcatatgggaggagcatttgtagatattggaatttcaaggccttcacttatgagcataaagcaaaaccgagatccttttgtgtatcctcaagtttttaagaaccgaggaacagatcatgttggtgattattgtaatgaagagaaccttccagcttatgaaaacgatgatgatatgagtgacgacgaatttgcagatgaagaagctcatgatggttcatcatttccagttgagaatgttacagataacaatgtcgatgatgatgaagttgacagcatttctgtttatgacgtagacaaagatgaagaaaatgaccacatggaagatgaatatagtgagggcatactgcaaggatatcaatcagaaatttccaatgatctcaagactttatcttcaattcagcatgctttaagagaatctaatgatgacacaaatggaagcagatggtctcaagttcgcaagggcacaaaagtaatggttcaagttgtcaaagaaggattgggtacgaaaggtccaacacttagtccatttccatgcctgcgaagccgattttggatattggtttcccgtggcaacaaagttggggtatccaaaaagattactggaatagaacgcaccaggttaaagggcatcacaaaattactgcgacctcctggatttactttgacggctcgcacagtcgcagctggtcattcctgggaggaactgcagaaggaccttgatggcttgctatctacatggaaaggaataactgagcatgctcaatctgctgccttggctgctgatgagggtgtggaaggtgctgttcctgtaatgttgcacagagcgaagggtcaaactttatctgttgttcaagacgattttaatgaaaaggtcaagaggctggttgtggattctcctcgaacatatcatgaggttacaagctatcttgaagaagtcgcacctgagctctacagccgagttgagctttatgagaaaagaaaacctatatttgatgaatacaacatcgagaaggagatagacaacatcctttgtaaaaggtgctacttcattgtttctatattatttcatagttcctgttggtggattttttcattagtttttttctaaagcgcccaggagaactgcacatcaattatattaagaagatagaagaaaaatggtctaaaaatagaccaaaatacaagaacaaccacctttttttagaaacaaaaatacacaaaagaatccatctagaagtcagcctaaaggacacaaccaacagcccctaaactaaggtcaggcggcgcgcagaccttagaaataaaaatacacaaaagagtgttgtct

SEQ ID NO: 9307 - DNA, 2756 bp, Zea Mays
tgccgctcgtgtccgacccgaaatttcgggtaaacccgaacgccatcccagccattcaccagtcccgaaacaagagaacggagacgcagaagcggtggagcctccagcccgtgccgaaggggagaagccctactatgcgctcccatggccgcctgcgtgctgggcctagcacctactctcgttagcatgtggcccctccggtgcgctaccgcttgctccgccgctacagaggcctccaccacggccgctcatgcgtcgcgtcgcggcgtgggcgcggtcagctcggctctgtccggtcttcgaggaaggcactccttatcttcggcgcaattcatggatggtcttagaagcaatcttcaagtggaaaggaacctgacactttccccaaagtcaccaatgtctcgtagtggagacccgcttaccctgggctgttgggaatccaacatggctgttcagttggctccttctgttgaaagcaataatatatggacagctgaaataaaggtaccatatggagtgcatttcaaatatagttattttgttcgagaagaaatgagttcctcttctgatattatatggaggccaggtccagtatactccttatcaataccttcagatggccagaaaaagcaggttattattgtgaaagacctatggatgaaaaccagtctaccaggtcttcctactcctacatggggatcatggctgatggaagctgattctcttgaaggtgaactttttgatggtggaaataaccagaacattgtgaaagatcactctgtcagggatacacggaatcaaggcttatctgtagtggatttgcaggtgatcatattatattgaagcttgggaatggcacaccattacatgcaaaactgttgtcggataatcaatctaccatcatgcacaactgtgtaactgaaataccaaatgccagttatataagccaatatggaaggcctcaagtcgtagaggagccatggattcttgaatcaattgtgtctgcaaagaaaccagttgcaaaagtcaaagataagaaagggcaaaagaagcttgtaaattataagcacactttgagtggagttagtaaaaacatgcatgaacagtatcagcctgttgaagagccatggttatttcaatctatattggaactaaatgaaactatagttcttgctgatggaaaagtagaagcaagggacattatcagaaaattaaggaaaatagaaaaacctttaacgcctttggatgagagtaaaccgactggtggtgaaccgtcatcaagagttatacttatgaattcctctgtctgcactatgcagagaattgcagtattagaagatggaaaactagttgaactcttgctggaacccatcaagaacaatgtacagtgtgatagtatttatctaggtgtagtaacaaagctcgttcctcatatgggaggagcatttgtagatattggaatttcaaggccttcacttatgagcataaagcaaaaccgagatccttttgtgtatcctcaagtttttaagaaccgaggaacagatcatgttggtgattattgtaatgaagagaaccttccagcttatgaaaacgatgatgatatgagtgacgacgaatttgcagatgaagaagctcatgatggttcatcatttccagttgagaatgttacagataacaatgtcgatgatgatgaagttgacagcatttctgtttatgacgtagacaaagatgaagaaaatgaccacatggaagatgaatatagtgagggcatactgcaaggatatcaatcagaaatttccaatgatctcaagactttatcttcaattcagcatgctttaagagaatctaatgatgacacaaatggaagcagatggtctcaagttcgcaagggcacaaaagtaatggttcaagttgtcaaagaaggattgggtacgaaaggtccaacacttagtccatttccatgcctgcgaagccgattttggatattggtttcccgtggcaacaaagttggggtatccaaaaagattactggaatagaacgcaccaggttaaagggcatcacaaaattactgcgacctcctggatttactttgacggctcgcacagtcgcagctggtcattcctgggaggaactgcagaaggaccttgatggcttgctatctacatggaaaggaataactgagcatgctcaatctgctgccttggctgctgatgagggtgtggaaggtgctgttcctgtaatgttgcacagagcgaagggtcaaactttatctgttgttcaagacgattttaatgaaaaggtcaagaggctggttgtggattctcctcgaacatatcatgaggttacaagctatcttgaagaagtcgcacctgagctctacagccgagttgagctttatgagaaaagaaaacctatatttgatgaatacaacatcgagaaggagatagacaacatcctttgtaaaaggtgctacttcattgtttctatattatttcatagttcctgttggtggattttttcattagtttttttctaaagcgcccaggagaactgcacatcaattatattaagaagatagaagaaaaatggtctaaaaatagaccaaaatacaagaacaaccacctttttttagaaacaaaaatacacaaaagaatccatctagaagtcagcctaaaggacacaaccaacagcccctaaactaaggtcaggcggcgcgcagaccttagaaataaaaatacacaaaagagtgttgtct

SEQ ID NO: 9308 - DNA, 2661 bp, Zea Mays
tgccgctcgtgtccgacccgaaatttcgggtaaacccgaacgccatcccagccattcaccagtcccgaaacaagagaacggagacgcagaagcggtggagcctccagcccgtgccgaaggggagaagccctactatgcgctcccatggccgcctgcgtgctgggcctagcacctactctcgttagcatgtggcccctccggtgcgctaccgcttgctccgccgctacagaggcctccaccacggccgctcatgcgtcgcgtcgcggcgtgggcgcggtcagctcggctctgtccggtcttcgaggaaggcactccttatcttcggcgcaattcatggatggtcttagaagcaatcttcaagtggaaaggaacctgacactttccccaaagtcaccaatgtctcgtagtggtaccatatggagtgcatttcaaatatagttattttgttcgagaagaaatgagttcctcttctgatattatatggaggccaggtccagtatactccttatcaataccttcagatggccagaaaaagcaggttattattgtgaaagacctatggatgaaaaccagtctaccaggtcttcctactcctacatggggatcatggctgatggaagctgattctcttgaaggtgaactttttgatggtggaaataaccagaacattgtgaaagatcactctgtcagggatacacggaatcaaggcttatctgtagtggatttgcaggtgatcatattatattgaagcttgggaatggcacaccattacatgcaaaactgttgtcggataatcaatctaccatcatgcacaactgtgtaactgaaataccaaatgccagttatataagccaatatggaaggcctcaagtcgtagaggagccatggattcttgaatcaattgtgtctgcaaagaaaccagttgcaaaagtcaaagataagaaagggcaaaagaagcttgtaaattataagcacactttgagtggagttagtaaaaacatgcatgaacagtatcagcctgttgaagagccatggttatttcaatctatattggaactaaatgaaactatagttcttgctgatggaaaagtagaagcaagggacattatcagaaaattaaggaaaatagaaaaacctttaacgcctttggatgagagtaaaccgactggtggtgaaccgtcatcaagagttatacttatgaattcctctgtctgcactatgcagagaattgcagtattagaagatggaaaactagttgaactcttgctggaacccatcaagaacaatgtacagtgtgatagtatttatctaggtgtagtaacaaagctcgttcctcatatgggaggagcatttgtagatattggaatttcaaggccttcacttatgagcataaagcaaaaccgagatccttttgtgtatcctcaagtttttaagaaccgaggaacagatcatgttggtgattattgtaatgaagagaaccttccagcttatgaaaacgatgatgatatgagtgacgacgaatttgcagatgaagaagctcatgatggttcatcatttccagttgagaatgttacagataacaatgtcgatgatgatgaagttgacagcatttctgtttatgacgtagacaaagatgaagaaaatgaccacatggaagatgaatatagtgagggcatactgcaaggatatcaatcagaaatttccaatgatctcaagactttatcttcaattcagcatgctttaagagaatctaatgatgacacaaatggaagcagatggtctcaagttcgcaagggcacaaaagtaatggttcaagttgtcaaagaaggattgggtacgaaaggtccaacacttagtccatttccatgcctgcgaagccgattttggatattggtttcccgtggcaacaaagttggggtatccaaaaagattactggaatagaacgcaccaggttaaagggcatcacaaaattactgcgacctcctggatttactttgacggctcgcacagtcgcagctggtcattcctgggaggaactgcagaaggaccttgatggcttgctatctacatggaaaggaataactgagcatgctcaatctgctgccttggctgctgatgagggtgtggaaggtgctgttcctgtaatgttgcacagagcgaagggtcaaactttatctgttgttcaagacgattttaatgaaaaggtcaagaggctggttgtggattctcctcgaacatatcatgaggttacaagctatcttgaagaagtcgcacctgagctctacagccgagttgagctttatgagaaaagaaaacctatatttgatgaatacaacatcgagaaggagatagacaacatcctttgtaaaaggtgctacttcattgtttctatattatttcatagttcctgttggtggattttttcattagtttttttctaaagcgcccaggagaactgcacatcaattatattaagaagatagaagaaaaatggtctaaaaatagaccaaaatacaagaacaaccacctttttttagaaacaaaaatacacaaaagaatccatctagaagtcagcctaaaggacacaaccaacagcccctaaactaaggtcaggcggcgcgcagaccttagaaataaaaatacacaaaagagtgttgtct

SEQ ID NO: 9309 - DNA, 2796 bp, Zea Mays
cagcagtccagctcgtcgcctctcgcagcctcgcctaccgacctgcgtgccgctcgtgtccgacccgaaatttcgggtaaacccgaacgccatcccagccattcaccagtcccgaaacaagagaacggagacgcagaagcggtggagcctccagcccgtgccgaaggggagaagccctactatgcgctcccatggccgcctgcgtgctgggcctagcacctactctcgttagcatgtggcccctccggtgcgctaccgcttgctccgccgctacagaggcctccaccacggccgctcatgcgtcgcgtcgcggcgtgggcgcggtcagctcggctctgtccggtcttcgaggaaggcactccttatcttcggcgcaattcatggatggtcttagaagcaatcttcaagtggaaaggaacctgacactttccccaaagtcaccaatgtctcgtagtgatgattcagccataacctgtaaaggattctgtacaatattatggaacctgaaagcagatttacaagatgggtgcttaatattcataacaggagacccgcttaccctgggctgttgggaatccaacatggctgttcagttggctccttctgttgaaagcaataatatatggacagctgaaataaaggtaccatatggagtgcatttcaaatatagttattttgttcgagaagaaatgagttcctcttctgatattatatggaggccaggtccagtatactccttatcaataccttcagatggccagaaaaagcaggtgaactttttgatggtggaaataaccagaacattgtgaaagatcactctgtcagggatacacggaatcaaggcttatctgtagtggatttgcaggtgatcatattatattgaagcttgggaatggcacaccattacatgcaaaactgttgtcggataatcaatctaccatcatgcacaactgtgtaactgaaataccaaatgccagttatataagccaatatggaaggcctcaagtcgtagaggagccatggattcttgaatcaattgtgtctgcaaagaaaccagttgcaaaagtcaaagataagaaagggcaaaagaagcttgtaaattataagcacactttgagtggagttagtaaaaacatgcatgaacagtatcagcctgttgaagagccatggttatttcaatctatattggaactaaatgaaactatagttcttgctgatggaaaagtagaagcaagggacattatcagaaaattaaggaaaatagaaaaacctttaacgcctttggatgagagtaaaccgactggtggtgaaccgtcatcaagagttatacttatgaattcctctgtctgcactatgcagagaattgcagtattagaagatggaaaactagttgaactcttgctggaacccatcaagaacaatgtacagtgtgatagtatttatctaggtgtagtaacaaagctcgttcctcatatgggaggagcatttgtagatattggaatttcaaggccttcacttatgagcataaagcaaaaccgagatccttttgtgtatcctcaagtttttaagaaccgaggaacagatcatgttggtgattattgtaatgaagagaaccttccagcttatgaaaacgatgatgatatgagtgacgacgaatttgcagatgaagaagctcatgatggttcatcatttccagttgagaatgttacagataacaatgtcgatgatgatgaagttgacagcatttctgtttatgacgtagacaaagatgaagaaaatgaccacatggaagatgaatatagtgagggcatactgcaaggatatcaatcagaaatttccaatgatctcaagactttatcttcaattcagcatgctttaagagaatctaatgatgacacaaatggaagcagatggtctcaagttcgcaagggcacaaaagtaatggttcaagttgtcaaagaaggattgggtacgaaaggtccaacacttagtccatttccatgcctgcgaagccgattttggatattggtttcccgtggcaacaaagttggggtatccaaaaagattactggaatagaacgcaccaggttaaagggcatcacaaaattactgcgacctcctggatttactttgacggctcgcacagtcgcagctggtcattcctgggaggaactgcagaaggaccttgatggcttgctatctacatggaaaggaataactgagcatgctcaatctgctgccttggctgctgatgagggtgtggaaggtgctgttcctgtaatgttgcacagagcgaagggtcaaactttatctgttgttcaagacgattttaatgaaaaggtcaagaggctggttgtggattctcctcgaacatatcatgaggttacaagctatcttgaagaagtcgcacctgagctctacagccgagttgagctttatgagaaaagaaaacctatatttgatgaatacaacatcgagaaggagatagacaacatcctttgtaaaaggtgctacttcattgtttctatattatttcatagttcctgttggtggattttttcattagtttttttctaaagcgcccaggagaactgcacatcaattatattaagaagatagaagaaaaatggtctaaaaatagaccaaaatacaagaacaaccacctttttttagaaacaaaaatacacaaaagaatccatctagaagtcagcctaaaggacacaaccaacagcccctaaactaaggtcaggcggcgcgcagaccttagaaataaaaatacacaaaagagtgttgtct

SEQ ID NO: 9310 - DNA, 2785 bp, Zea Mays
cagcagtccagctcgtcgcctctcgcagcctcgcctaccgacctgcgtgccgctcgtgtccgacccgaaatttcgggtaaacccgaacgccatcccagccattcaccagtcccgaaacaagagaacggagacgcagaagcggtggagcctccagcccgtgccgaaggggagaagccctactatgcgctcccatggccgcctgcgtgctgggcctagcacctactctcgttagcatgtggcccctccggtgcgctaccgcttgctccgccgctacagaggcctccaccacggccgctcatgcgtcgcgtcgcggcgtgggcgcggtcagctcggctctgtccggtcttcgaggaaggcactccttatcttcggcgcaattcatggatggtcttagaagcaatcttcaagtggaaaggaacctgacactttccccaaagtcaccaatgtctcgtagtgatgattcagccataacctgtaaaggattctgtacaatattatggaacctgaaagcagatttacaagatgggtgcttaatattcataacaggagacccgcttaccctgggctgttgggaatccaacatggctgttcagttggctccttctgttgaaagcaataatatatggacagctgaaataaaggtaccatatggagtgcatttcaaatatagttattttgttcgagaagaaatgagttcctcttctgatattatatggaggccaggtccagtatactccttatcaataccttcagatggccagaaaaagcaggtgaactttttgatggtggaaataaccagaacattgtgaaagatcactctgtcagggatacacggaatcaaggcttatctgtaggtgatcatattatattgaagcttgggaatggcacaccattacatgcaaaactgttgtcggataatcaatctaccatcatgcacaactgtgtaactgaaataccaaatgccagttatataagccaatatggaaggcctcaagtcgtagaggagccatggattcttgaatcaattgtgtctgcaaagaaaccagttgcaaaagtcaaagataagaaagggcaaaagaagcttgtaaattataagcacactttgagtggagttagtaaaaacatgcatgaacagtatcagcctgttgaagagccatggttatttcaatctatattggaactaaatgaaactatagttcttgctgatggaaaagtagaagcaagggacattatcagaaaattaaggaaaatagaaaaacctttaacgcctttggatgagagtaaaccgactggtggtgaaccgtcatcaagagttatacttatgaattcctctgtctgcactatgcagagaattgcagtattagaagatggaaaactagttgaactcttgctggaacccatcaagaacaatgtacagtgtgatagtatttatctaggtgtagtaacaaagctcgttcctcatatgggaggagcatttgtagatattggaatttcaaggccttcacttatgagcataaagcaaaaccgagatccttttgtgtatcctcaagtttttaagaaccgaggaacagatcatgttggtgattattgtaatgaagagaaccttccagcttatgaaaacgatgatgatatgagtgacgacgaatttgcagatgaagaagctcatgatggttcatcatttccagttgagaatgttacagataacaatgtcgatgatgatgaagttgacagcatttctgtttatgacgtagacaaagatgaagaaaatgaccacatggaagatgaatatagtgagggcatactgcaaggatatcaatcagaaatttccaatgatctcaagactttatcttcaattcagcatgctttaagagaatctaatgatgacacaaatggaagcagatggtctcaagttcgcaagggcacaaaagtaatggttcaagttgtcaaagaaggattgggtacgaaaggtccaacacttagtccatttccatgcctgcgaagccgattttggatattggtttcccgtggcaacaaagttggggtatccaaaaagattactggaatagaacgcaccaggttaaagggcatcacaaaattactgcgacctcctggatttactttgacggctcgcacagtcgcagctggtcattcctgggaggaactgcagaaggaccttgatggcttgctatctacatggaaaggaataactgagcatgctcaatctgctgccttggctgctgatgagggtgtggaaggtgctgttcctgtaatgttgcacagagcgaagggtcaaactttatctgttgttcaagacgattttaatgaaaaggtcaagaggctggttgtggattctcctcgaacatatcatgaggttacaagctatcttgaagaagtcgcacctgagctctacagccgagttgagctttatgagaaaagaaaacctatatttgatgaatacaacatcgagaaggagatagacaacatcctttgtaaaaggtgctacttcattgtttctatattatttcatagttcctgttggtggattttttcattagtttttttctaaagcgcccaggagaactgcacatcaattatattaagaagatagaagaaaaatggtctaaaaatagaccaaaatacaagaacaaccacctttttttagaaacaaaaatacacaaaagaatccatctagaagtcagcctaaaggacacaaccaacagcccctaaactaaggtcaggcggcgcgcagaccttagaaataaaaatacacaaaagagtgttgtct

SEQ ID NO: 9311 - DNA, 2792 bp, Zea Mays
cagcagtccagctcgtcgcctctcgcagcctcgcctaccgacctgcgtgccgctcgtgtccgacccgaaatttcgggtaaacccgaacgccatcccagccattcaccagtcccgaaacaagagaacggagacgcagaagcggtggagcctccagcccgtgccgaaggggagaagccctactatgcgctcccatggccgcctgcgtgctgggcctagcacctactctcgttagcatgtggcccctccggtgcgctaccgcttgctccgccgctacagaggcctccaccacggccgctcatgcgtcgcgtcgcggcgtgggcgcggtcagctcggctctgtccggtcttcgaggaaggcactccttatcttcggcgcaattcatggatggtcttagaagcaatcttcaagtggaaaggaacctgacactttccccaaagtcaccaatgtctcgtagtggagacccgcttaccctgggctgttgggaatccaacatggctgttcagttggctccttctgttgaaagcaataatatatggacagctgaaataaaggtaccatatggagtgcatttcaaatatagttattttgttcgagaagaaatgagttcctcttctgatattatatggaggccaggtccagtatactccttatcaataccttcagatggccagaaaaagcaggttattattgtgaaagacctatggatgaaaaccagtctaccaggtcttcctactcctacatggggatcatggctgatggaagctgattctcttgaaggtgaactttttgatggtggaaataaccagaacattgtgaaagatcactctgtcagggatacacggaatcaaggcttatctgtaggtgatcatattatattgaagcttgggaatggcacaccattacatgcaaaactgttgtcggataatcaatctaccatcatgcacaactgtgtaactgaaataccaaatgccagttatataagccaatatggaaggcctcaagtcgtagaggagccatggattcttgaatcaattgtgtctgcaaagaaaccagttgcaaaagtcaaagataagaaagggcaaaagaagcttgtaaattataagcacactttgagtggagttagtaaaaacatgcatgaacagtatcagcctgttgaagagccatggttatttcaatctatattggaactaaatgaaactatagttcttgctgatggaaaagtagaagcaagggacattatcagaaaattaaggaaaatagaaaaacctttaacgcctttggatgagagtaaaccgactggtggtgaaccgtcatcaagagttatacttatgaattcctctgtctgcactatgcagagaattgcagtattagaagatggaaaactagttgaactcttgctggaacccatcaagaacaatgtacagtgtgatagtatttatctaggtgtagtaacaaagctcgttcctcatatgggaggagcatttgtagatattggaatttcaaggccttcacttatgagcataaagcaaaaccgagatccttttgtgtatcctcaagtttttaagaaccgaggaacagatcatgttggtgattattgtaatgaagagaaccttccagcttatgaaaacgatgatgatatgagtgacgacgaatttgcagatgaagaagctcatgatggttcatcatttccagttgagaatgttacagataacaatgtcgatgatgatgaagttgacagcatttctgtttatgacgtagacaaagatgaagaaaatgaccacatggaagatgaatatagtgagggcatactgcaaggatatcaatcagaaatttccaatgatctcaagactttatcttcaattcagcatgctttaagagaatctaatgatgacacaaatggaagcagatggtctcaagttcgcaagggcacaaaagtaatggttcaagttgtcaaagaaggattgggtacgaaaggtccaacacttagtccatttccatgcctgcgaagccgattttggatattggtttcccgtggcaacaaagttggggtatccaaaaagattactggaatagaacgcaccaggttaaagggcatcacaaaattactgcgacctcctggatttactttgacggctcgcacagtcgcagctggtcattcctgggaggaactgcagaaggaccttgatggcttgctatctacatggaaaggaataactgagcatgctcaatctgctgccttggctgctgatgagggtgtggaaggtgctgttcctgtaatgttgcacagagcgaagggtcaaactttatctgttgttcaagacgattttaatgaaaaggtcaagaggctggttgtggattctcctcgaacatatcatgaggttacaagctatcttgaagaagtcgcacctgagctctacagccgagttgagctttatgagaaaagaaaacctatatttgatgaatacaacatcgagaaggagatagacaacatcctttgtaaaaggtgctacttcattgtttctatattatttcatagttcctgttggtggattttttcattagtttttttctaaagcgcccaggagaactgcacatcaattatattaagaagatagaagaaaaatggtctaaaaatagaccaaaatacaagaacaaccacctttttttagaaacaaaaatacacaaaagaatccatctagaagtcagcctaaaggacacaaccaacagcccctaaactaaggtcaggcggcgcgcagaccttagaaataaaaatacacaaaagagtgttgtct

SEQ ID NO: 9312 - DNA, 1091 bp, Zea Mays
atggagtacatgtacatatataggcatggaaaatctaagattgcccgtgagttgcgcttgagggatattggtggcattatcattgtggattttatcgatatgtcagatgattcaaacaaaaaactagtatatgaagaaatgaagaaagcagtagaaaaggatcgatcaacagttggtgtttcagaactatcaaagctaggtttgatggaaataactagaaaaagggtccgaccaagcgttactttcatgatcagtgagccatgtacatgctgccatggtactggtcgtgtggaagctcttgacacatcgttttcaaagatcgaacgtgaaatatgtcgacgtcttgctgcctctcgacgaaaatcagaccctgagaaaccaaaatcatggccaaggtttctgcttagagtggatcatgagatgtgcacgtatttgacgtccggaaagaagacaaaactaggactcctgagtagctcccttaaagtgtggattttgttgaagattgccagaggtttctcccgtggcgcttttgaactgctaccgtactcggagaaggaaaactactctatggagaaagaaacatcagagttgccccaaaaagagtccaggcccaagctatctgtctttcctatcaagaagtggatgagccgggccaagcgtgctaagtgattctcttttattagcatggggccttcctttgtattcacaacttagaatgagtaaagattcaggaagaggatcattcttttcgttcatgaaatctcagcgtcggatatctagagatctctcgaccagcttttgtttacatttttttaggaattcagacaattccatgtttagtttaatccagaaaattttcagcaaaaatgtgacgatatatataactgtgcaaatctagtacccttaatagtagtagatctcttaaatggttcttagtgttaccataagatacataatatatttatcatgagaagactacgattactcttttaagttactacattgttatgctccttaggatttgcttatgaggttcctcgtgattttgttcattaggctcctcactatgttctatcatattaaaagcctcg

SEQ ID NO: 9313 - DNA, 1389 bp, Zea Mays
ctgatactggaggatctcaggggaatttggttacgactatggaggcccaattgctcatgtcgcttcgtcgccttgcagcctctacacctacaggagctgctagttctgtgactcagtcctctgcatctaaaggttttgatgttggttctctatcgtccactaagggaccaccttccatttccatttcagggtaccactaaacaatgggggttctctggtcatagaacagactgaagctctggtatcagttgatgtgaatggtggtcacagtatgtttggtcagggaacttcacaggagaaggctattttagaagttaatcttgaagctgcaaagcaaattgcccgtgagttgcgcttgagggatattggtggcattatcattgtggattttatcgatatgtcagatgattcaaacaaaaaactagtatatgaagaaatgaagaaagcagtagaaaaggatcgatcaacagttggtgtttcagaactatcaaagctaggtttgatggaaataactagaaaaagggtccgaccaagcgttactttcatgatcagtgagccatgtacatgctgccatggtactggtcgtgtggaagctcttgacacatcgttttcaaagatcgaacgtgaaatatgtcgacgtcttgctgcctctcgacgaaaatcagaccctgagaaaccaaaatcatggccaaggtttctgcttagagtggatcatgagatgtgcacgtatttgacgtccggaaagaagacaaaactaggactcctgagtagctcccttaaagtgtggattttgttgaagattgccagaggtttctcccgtggcgcttttgaactgctaccgtactcggagaaggaaaactactctatggagaaagaaacatcagagttgccccaaaaagagtccaggcccaagctatctgtctttcctatcaagaagtggatgagccgggccaagcgtgctaagtgattctcttttattagcatggggccttcctttgtattcacaacttagaatgagtaaagattcaggaagaggatcattcttttcgttcatgaaatctcagcgtcggatatctagagatctctcgaccagcttttgtttacatttttttaggaattcagacaattccatgtttagtttaatccagaaaattttcagcaaaaatgtgacgatatatataactgtgcaaatctagtacccttaatagtagtagatctcttaaatggttcttagtgttaccataagatacataatatatttatcatgagaagactacgattactcttttaagttactacattgttatgctccttaggatttgcttatgaggttcctcgtgattttgttcattaggctcctcactatgttctatcatattaaaagcctcg

SEQ ID NO: 9314 - DNA, 1349 bp, Zea Mays
atgtcgccttcaaaaacgaccttttctcttccaagagctggatcagcatcagcctcccagaaggaaggaacagtagaaaactggacacaggcaggcgacaaagactcaccgatccttcttccacctctagccaaggtgaaaccatatgaacaacaattttcgtggaggttgaagcctggttggttagcaccggacgatggggatcaggacgtccatgtccaaaggaggggcatatctcttacgagagtgacagtggcgagtccgaccccgcggagagtcagcgatagaattccgaccctcagtcacggaggcacttgtgacaaaaggctgcgctgggtaccactaaacaatgggggttctctggtcatagaacagactgaagctctggtatcagttgatgtgaatggtggtcacagtatgtttggtcagggaacttcacaggagaaggctattttagaagttaatcttgaagctgcaaagcaagtccgaccaagcgttactttcatgatcagtgagccatgtacatgctgccatggtactggtcgtgtggaagctcttgacacatcgttttcaaagatcgaacgtgaaatatgtcgacgtcttgctgcctctcgacgaaaatcagaccctgagaaaccaaaatcatggccaaggtttctgcttagagtggatcatgagatgtgcacgtatttgacgtccggaaagaagacaaaactaggactcctgagtagctcccttaaagtgtggattttgttgaagattgccagaggtttctcccgtggcgcttttgaactgctaccgtactcggagaaggaaaactactctatggagaaagaaacatcagagttgccccaaaaagagtccaggcccaagctatctgtctttcctatcaagaagtggatgagccgggccaagcgtgctaagtgattctcttttattagcatggggccttcctttgtattcacaacttagaatgagtaaagattcaggaagaggatcattcttttcgttcatgaaatctcagcgtcggatatctagagatctctcgaccagcttttgtttacatttttttaggaattcagacaattccatgtttagtttaatccagaaaattttcagcaaaaatgtgacgatatatataactgtgcaaatctagtacccttaatagtagtagatctcttaaatggttcttagtgttaccataagatacataatatatttatcatgagaagactacgattactcttttaagttactacattgttatgctccttaggatttgcttatgaggttcctcgtgattttgttcattaggctcctcactatgttctatcatattaaaagcctcg

SEQ ID NO: 9315 - DNA, 405 bp, Zea Mays
caagacctggttcttttactcattgataatacacaaacttagcaaggcatatacatggatcattgatgcatgctgatggaaacacacgggaaaaggtgggtacacacacatcgtccaaacatagtactacacacaatacacacaccctatataaaaagagagctcactcttacacaaacagtattacttatcagtcatagccaaaagctatagatggcatccacgatgatgatcggttccactatgctcctctcagttcccttccacgacgcccgtgccaaatggtggtggaagagacgacggtggctccggcttcgatggttctggttggggttttggatctggcttggatggttcgggttggggtttgggatctggttgaggctcgggctgtgggaaaggtgg

SEQ ID NO: 9316 - DNA, 1245 bp, Zea Mays
gcaccctgttcctcgtttcttctcaggggaaagcacttaatgcggtcgcctcgcggaacgcgaaagtcttagttgtcggaaatccctgtaacactaatgcgctgatttgtttgaaaaatgccccaaacataccggcaaaaaactttcatgcattgacgaggttggatgaaaatagagcaaagtgccagctggcactaaaagcaggtgtattttatgacaaagtatcaaacgtgactatttgggggaaccattcgacgactcaggttcctgatttcttgaatgccaaaattgatggaagaccagtgaaagaagtcattaaggataccaagtggttagaggaagagttcaccctcacagttcaaaagcgtggaggtgtgctcatccaaaaatggggcagatcatcagctgcatcgaccgctgtttcgatagtggatgctattagatccctcgtaactcctaccccagaaggtgactggttttctacaggggtttatacgactggaaatccttatggcatagcagaggatatcgtgttcagcatgccatgcagatcgaagggtgatggtgattacgaactagctagtgatgtgttgatggacgattttctctgggaacggattaaaaagagcgaagctgaattgcttgctgagaagaaatgcgttgcccatcttacaggagaggggaatgcattctgtgatcttccggaagataccatgctaccaggagaagtgtagtttagttacagaagcaacagcagcggaatgcatttgccaatacattagctgagacttgaaacatctgcttgccagatgcagcaactacttttatatatatatgtgtatattcaataattgtgccacacgaatttgactatgatgcaaacctcttacacaggtaagtcttttttttttccgtaaatacgagaaagactgcttcaaattcatgatctggtgattcagtgagataatcctcaccaatccgctaggcgtgtgccgttcagccacaacttgcattcatcgttacgttgtgaaccatcatgactcccatggaggatctgaaatatatatacatgattttgcactatcatcgccactgcaactagaagcatggcaaatgacatcatcacaccaatgaggcgattcgcatactattattaaatgctctctccattctaagttataaattatgttattaagagtcgaagcatcttaaatttagtcaacattatagaaaaaaaaatacaaa

SEQ ID NO: 9317 - DNA, 1472 bp, Zea Mays
cttctttctacaccttactatctgagaagaagaaacaattcatagttgctagtacatacctacgatttcaagtgtagctatggaactggaggactcgctgtatccactgctgagggaagtcagcattggcatagatccttacgtggtctttcaagatgtagattgggcccttcttattggcgctaagccccgaggtcccggcatggagcgagctgcgctactggatatcaatggccaaatctttgctgaccaggggaaagcacttaatgcggtcgcctcgcggaacgcgaaagtcttagttgtcggaaatccctgtaacactaatgcgctgatttgtttgaaaaatgccccaaacataccggcaaaaaactttcatgcattgacgaggttggatgaaaatagagcaaagtgccagctggcactaaaagcaggtgtattttatgacaaagtatcaaacgtgactatttgggggaaccattcgacgactcaggttcctgatttcttgaatgccaaaattgatggaagaccagtgaaagaagtcattaaggataccaagtggttagaggaagagttcaccctcacagttcaaaagcgtggaggtgtgctcatccaaaaatggggcagatcatcagctgcatcgaccgctgtttcgatagtggatgctattagatccctcgtaactcctaccccagaaggtgactggttttctacaggggtttatacgactggaaatccttatggcatagcagaggatatcgtgttcagcatgccatgcagatcgaagggtgatggtgattacgaactagctagtgatgtgttgatggacgattttctctgggaacggattaaaaagagcgaagctgaattgcttgctgagaagaaatgcgttgcccatcttacaggagaggggaatgcattctgtgatcttccggaagataccatgctaccaggagaagtgtagtttagttacagaagcaacagcagcggaatgcatttgccaatacattagctgagacttgaaacatctgcttgccagatgcagcaactacttttatatatatatgtgtatattcaataattgtgccacacgaatttgactatgatgcaaacctcttacacaggtaagtcttttttttttccgtaaatacgagaaagactgcttcaaattcatgatctggtgattcagtgagataatcctcaccaatccgctaggcgtgtgccgttcagccacaacttgcattcatcgttacgttgtgaaccatcatgactcccatggaggatctgaaatatatatacatgattttgcactatcatcgccactgcaactagaagcatggcaaatgacatcatcacaccaatgaggcgattcgcatactattattaaatgctctctccattctaagttataaattatgttattaagagtcgaagcatcttaaatttagtcaacattatagaaaaaaaaatacaaa

SEQ ID NO: 9318 - DNA, 1636 bp, Zea Mays
atacaggtttcaccaaacgaaagcgcaggggtggagtgccagcgtcacggagagcctgcacttgaggacaagaccaagtcgtggaagaagctagtgaatgttgctgtgtcaggcgcggccgggatgatatcaaatcacctgctgttcaaactcgcttctggtgaggttttcggacaagaccaaccaatagcacttaagctactcggctcagaaagatcgtttcaagccctcgaaggtgtagctatggaactggaggactcgctgtatccactgctgagggaagtcagcattggcatagatccttacgtggtctttcaagatgtagattgggcccttcttattggcgctaagccccgaggtcccggcatggagcgagctgcgctactggatatcaatggccaaatctttgctgaccaggggaaagcacttaatgcggtcgcctcgcggaacgcgaaagtcttagttgtcggaaatccctgtaacactaatgcgctgatttgtttgaaaaatgccccaaacataccggcaaaaaactttcatgcattgacgaggttggatgaaaatagagcaaagtgccagctggcactaaaagcaggtgtattttatgacaaagtatcaaacgtgactatttgggggaaccattcgacgactcaggttcctgatttcttgaatgccaaaattgatggaagaccagtgaaagaagtcattaaggataccaagtggttagaggaagagttcaccctcacagttcaaaagcgtggaggtgtgctcatccaaaaatggggcagatcatcagctgcatcgaccgctgtttcgatagtggatgctattagatccctcgtaactcctaccccagaaggtgactggttttctacaggggtttatacgactggaaatccttatggcatagcagaggatatcgtgttcagcatgccatgcagatcgaagggtgatggtgattacgaactagctagtgatgtgttgatggacgattttctctgggaacggattaaaaagagcgaagctgaattgcttgctgagaagaaatgcgttgcccatcttacaggagaggggaatgcattctgtgatcttccggaagataccatgctaccaggagaagtgtagtttagttacagaagcaacagcagcggaatgcatttgccaatacattagctgagacttgaaacatctgcttgccagatgcagcaactacttttatatatatatgtgtatattcaataattgtgccacacgaatttgactatgatgcaaacctcttacacaggtaagtcttttttttttccgtaaatacgagaaagactgcttcaaattcatgatctggtgattcagtgagataatcctcaccaatccgctaggcgtgtgccgttcagccacaacttgcattcatcgttacgttgtgaaccatcatgactcccatggaggatctgaaatatatatacatgattttgcactatcatcgccactgcaactagaagcatggcaaatgacatcatcacaccaatgaggcgattcgcatactattattaaatgctctctccattctaagttataaattatgttattaagagtcgaagcatcttaaatttagtcaacattatagaaaaaaaaatacaaa

SEQ ID NO: 9319 - DNA, 1995 bp, Zea Mays
cgcctcgccctgctgctaatccagttccctacgcgcgctactgcatacagctatatttctctgatcggagaagaaggcgagcgcgcggtgtccaccactccctcctctcctctcccgtcctatccatccggcacgcccagcatccatccactcctcccctgctccggctccggctccggctccgccatgggcctttcaacagtttactccccggccggaccgcgcctcgtgccggcccctctcggccgctgccgctctgcccagccccgccgcccgcgccgagccccgctcgccaccgtccggtgctccgtcgacgccaccaagcaggcgcaggatggcgtggcgacggcggtcgcgacggaggcgccggcgtcgcggaaggagtgcttcggggtcttctgcaccacctacgacctcaaggcggaggacaagaccaagtcgtggaagaagctagtgaatgttgctgtgtcaggcgcggccgggatgatatcaaatcacctgctgttcaactcgcttctggtgaggttttcggacaagaccaaccaatagcacttaagctactcggctcagaaagatcgtttcaagccctcgaaggtgtagctatggaactggaggactcgctgtatccactgctgagggaagtcagcattggcatagatccttacgtggtctttcaagatgtagattgggcccttcttattggcgctaagccccgaggtcccggcatggagcgagctgcgctactggatatcaatggccaaatctttgctgaccaggggaaagcacttaatgcggtcgcctcgcggaacgcgaaagtcttagttgtcggaaatccctgtaacactaatgcgctgatttgtttgaaaaatgccccaaacataccggcaaaaaactttcatgcattgacgaggttggatgaaaatagagcaaagtgccagctggcactaaaagcaggtgtattttatgacaaagtatcaaacgtgactatttgggggaaccattcgacgactcaggttcctgatttcttgaatgccaaaattgatggaagaccagtgaaagaagtcattaaggataccaagtggttagaggaagagttcaccctcacagttcaaaagcgtggaggtgtgctcatccaaaaatggggcagatcatcagctgcatcgaccgctgtttcgatagtggatgctattagatccctcgtaactcctaccccagaaggtgactggttttctacaggggtttatacgactggaaatccttatggcatagcagaggatatcgtgttcagcatgccatgcagatcgaagggtgatggtgattacgaactagctagtgatgtgttgatggacgattttctctgggaacggattaaaaagagcgaagctgaattgcttgctgagaagaaatgcgttgcccatcttacaggagaggggaatgcattctgtgatcttccggaagataccatgctaccaggagaagtgtagtttagttacagaagcaacagcagcggaatgcatttgccaatacattagctgagacttgaaacatctgcttgccagatgcagcaactacttttatatatatatgtgtatattcaataattgtgccacacgaatttgactatgatgcaaacctcttacacaggtaagtcttttttttttccgtaaatacgagaaagactgcttcaaattcatgatctggtgattcagtgagataatcctcaccaatccgctaggcgtgtgccgttcagccacaacttgcattcatcgttacgttgtgaaccatcatgactcccatggaggatctgaaatatatatacatgattttgcactatcatcgccactgcaactagaagcatggcaaatgacatcatcacaccaatgaggcgattcgcatactattattaaatgctctctccattctaagttataaattatgttattaagagtcgaagcatcttaaatttagtcaacattatagaaaaaaaaatacaaa

SEQ ID NO: 9320 - DNA, 1995 bp, Zea Mays
cgcctcgccctgctgctaatccagttccctacgcgcgctactgcatacagctatatttctctgatcggagaagaaggcgagcgcgcggtgtccaccactccctcctctcctctcccgtcctatccatccggcacgcccagcatccatccactcctcccctgctccggctccggctccggctccgccatgggcctttcaacagtttactccccggccggaccgcgcctcgtgccggcccctctcggccgctgccgctctgcccagccccgccgcccgcgccgagccccgctcgccaccgtccggtgctccgtcgacgccaccaagcaggcgcaggatggcgtggcgacggcggtcgcgacggaggcgccggcgtcgcggaaggagtgcttcggggtcttctgcaccacctacgacctcaaggcggaggacaagaccaagtcgtggaagaagctagtgaatgttgctgtgtcaggcgcggccgggatgatatcaaatcacctgctgttcaaactcgcttctggtgaggttttcggacaagaccaaccaatagcacttaagctactcggctcagaaagatcgtttcaagccctcgaaggtgtagctatggaactggaggactcgctgtatccactgctgagggaagtcagcattggcatagatccttacgtggtctttcaagatgtagattgggcccttcttattggcgctaagccccgaggtcccggcatggagcgagctgcgctactggatatcaatggccaaatctttgctgaccaggggaaagcacttaatgcggtcgcctcgcggaacgcgaaagtcttagttgtcggaaatccctgtaacactatgcgctgatttgtttgaaaaatgccccaaacataccggcaaaaaactttcatgcattgacgaggttggatgaaaatagagcaaagtgccagctggcactaaaagcaggtgtattttatgacaaagtatcaaacgtgactatttgggggaaccattcgacgactcaggttcctgatttcttgaatgccaaaattgatggaagaccagtgaaagaagtcattaaggataccaagtggttagaggaagagttcaccctcacagttcaaaagcgtggaggtgtgctcatccaaaaatggggcagatcatcagctgcatcgaccgctgtttcgatagtggatgctattagatccctcgtaactcctaccccagaaggtgactggttttctacaggggtttatacgactggaaatccttatggcatagcagaggatatcgtgttcagcatgccatgcagatcgaagggtgatggtgattacgaactagctagtgatgtgttgatggacgattttctctgggaacggattaaaaagagcgaagctgaattgcttgctgagaagaaatgcgttgcccatcttacaggagaggggaatgcattctgtgatcttccggaagataccatgctaccaggagaagtgtagtttagttacagaagcaacagcagcggaatgcatttgccaatacattagctgagacttgaaacatctgcttgccagatgcagcaactacttttatatatatatgtgtatattcaataattgtgccacacgaatttgactatgatgcaaacctcttacacaggtaagtcttttttttttccgtaaatacgagaaagactgcttcaaattcatgatctggtgattcagtgagataatcctcaccaatccgctaggcgtgtgccgttcagccacaacttgcattcatcgttacgttgtgaaccatcatgactcccatggaggatctgaaatatatatacatgattttgcactatcatcgccactgcaactagaagcatggcaaatgacatcatcacaccaatgaggcgattcgcatactattattaaatgctctctccattctaagttataaattatgttattaagagtcgaagcatcttaaatttagtcaacattatagaaaaaaaaatacaaa

SEQ ID NO: 9321 - DNA, 652 bp, Zea Mays
cttttgcaccctgttcctcgtttcttctcaggggaaagcacttaatgcggtcgcctcgcggaacgcgaaagtcttagttgtcggaaatccctgtaacactaatgcgctgatttgtttgaaaaatgccccaaacataccggcaaaaaactttcatgcattgacgaggttggatgaaaatagagcaaagtgccagctggcactaaaagcaggtgtattttatgacaaagtatcaaacgtgactatttgggggaaccattcgacgactcaggttcctgatttcttgaatgccaaaattgatggaagaccagtgaaagaagtcattaaggataccaagtggttagaggaagagttcaccctcacagttcaaaagcgtggaggtgtgctcatccaaaaatggggcagatcatcagctgcatcgaccgctgtttcgatagtggatgctattagatccctcgtaactcctaccccagaaggtgactggttttctacaggggtttatacgactggaaatccttatggcatagcagaggatatcgtgttcagcatgccatgcagatcgaagggtgatggtgattacgaactagctagtgatgtgttgatggacgattttctctgggaacggattaaaaagttgaccctgtaatattttcag

SEQ ID NO: 9322 - DNA, 1398 bp, Zea Mays
cgcctcgccctgctgctaatccagttccctacgcgcgctactgcatacagctatatttctctgatcggagaagaaggcgagcgcgcggtgtccaccactccctcctctcctctcccgtcctatccatccggcacgcccagcatccatccactcctcccctgctccggctccggctccggctccgccatgggcctttcaacagtttactccccggccggaccgcgcctcgtgccggcccctctcggccgctgccgctctgcccagccccgccgcccgcgccgagccccgctcgccaccgtccggtgctccgtcgacgccaccaagcaggcgcaggatggcgtggcgacggcggtcgcgacggaggcgccggcgtcgcggaaggagtgcttcggggtcttctgcaccacctacgacctcaaggcggaggacaagaccaagtcgtggaagaagctagtgaatgttgctgtgtcaggcgcggccgggatgatatcaaatcacctgctgttcaaactcgcttctggtgaggttttcggacaagaccaaccaatagcacttaagctactcggctcagaaagatcgtttcaagccctcgaaggtgtagctatggaactggaggactcgctgtatccactgctgagggaagtcagcattggcatagatccttacgtggtctttcaagatgtagattgggcccttcttattggcgctaagccccgaggtcccggcatggagcgagctgcgctactggatatcaatggccaaatctttgctgaccaggggaaagcacttaatgcggtcgcctcgcggaacgcgaaagtcttagttgtcggaaatccctgtaacactaatgcgctgatttgtttgaaaaatgccccaaacataccggcaaaaaactttcatgcattgacgaggttggatgaaaatagagcaaagtgccagctggcactaaaagcaggtgtattttatgacaaagtatcaaacgtgactatttgggggaaccattcgacgactcaggttcctgatttcttgaatgccaaaattgatggaagaccagtgaaagaagtcattaaggataccaagtggttagaggaagagttcaccctcacagttcaaaagcgtggaggtgtgctcatccaaaaatggggcagatcatcagctgcatcgaccgctgtttcgatagtggatgctattagatccctcgtaactcctaccccagaaggtgactggttttctacaggggtttatacgactggaaatccttatggcatagcagaggatatcgtgttcagcatgccatgcagatcgaagggtgatggtgattacgaactagctagtgatgtgttgatggacgattttctctgggaacggattaaaaagttgaccctgtaatattttcag

SEQ ID NO: 9323 - DNA, 1404 bp, Zea Mays
atgacgtccgatgacggcgaaaacgatgaatattgccaaaatgtcaactttgtattggggccaacgggcatatgtatagtttatgaacagtacatatttcctgctgccaagcaatatgctgaaacattaagaacttcagatgaattttactgggataatgggccaaagatcagagaaggaggtggtgcatacttcctttttctattgtccatagcatttctcatgtcattcttcggcatattagtgcctggagttcctacaaactgcataggagacattgcagatgcaccacctgctaccacaggtggcatagacgatgttggtgcaggaacaggtggagctacaggtgtcggcacggacgcttgtaggggcaatgtagcaggtgcctgtgaaggtgcaggttcaggaggagggcgcgtgacatctggaaggaaattgaaaggtgtaaggaactggtggagaggttcaaggcaaaaaataatttctttgcctactgctccttgctcaggtgataccactaacagcaacaagaacaagagggggcctgcttctgcattggaaaaagattgggcattggaagaccataagcacatggacgctttaattagtagatcaatttattctggagggtatctttcaattttctgtgaaatctatatcttcgagaagcatttgcctttacttgcagccgcatcctgcaaaggttatataattcctggataagcagagttagggagcagctgctgaagcaagcaaggaggcacatagactctgctggagagcacaaagagaatatgggcagagaagggagtcacaatgcactgatggttggttagatcctcagaggtgattgattttattgttgtttctgagaaggcacctatgttcttgagggctgataattgtcaagtctgcactgtttgcagagtggaatttgaatatgggggatggggacgggttgtgaacgcagttggagtacctttgaatttaaagatgaaagctaggttccaaaaactacgccagaagaaggggaaaaactttgatccattggttcatgaggacttcaacttggacaatgagtgggctgattctttgcatgtagtccctgaaggtgggcgtgggtgtgagtgtgaccttacatgggaccttgtggataatgccattggagcatcacaagcacttcgtggccgaaacttaccaagaagagcccataatgtgtattcaagaagaaattctgttgctgcacaaaatatgtcagaggctgaagaggaagatgaagatgaagaagatgttccacatgatgatgcagaaatcacagattgtgaagatgaatctaatggtggcaatgatggtgaagaaggggaggcacccaatatcccaggagagtttgatgatgatttttga

SEQ ID NO: 9324 - DNA, 633 bp, Zea Mays
gtgatcttttttcttaatgtggaccacattttaatccaaacaatctgacgcacggtgcaccagaagacgaagtccgtcatgcgggtgacctgggaaacattgttgcaaatgctgagggcatagccgaggcaaccattgttgatacccagattcctttgactggcccaaattcagttgttgggagagcatttgtggttcatgagcttgaagatgatttggggaaagggggccatgagctcagcctctctactggaaatgctggtggaagactggcatgtggtgttgttggcctgactccattgtaggttgctcgccgggtgcccgggttgcagttgcagctacgctgttacatccttgccttggtggacttttgtcttcaatcgtgttattgggacagtgacctttttgtattacttggattcattccatgcatgtggtatggtgcgtaatagcctttgcaggtcgactgtataaaaagcaatatttagttgaggaaataagtgttgccacatatccaaatcgatctatgaagcactatgaacatcaaatgttattttgattttgttttaaccttttttaaagctatttctaaaaaataatattcgagagtttttttttcttctaaaactaaca

SEQ ID NO: 9325 - DNA, 2337 bp, Zea Mays
agttcttgtcgacggagagtaatgagatatagaataaggtaccctatagaataaagaatctttctctgaaaagtctgacgtacgtaaataagatataataaaaaaaatacaaagagaagcgctggactggagatgctcctatatgcggcaatgcctgtgcttataaatagccacctcggtcggcaaggacatgaacggcggacgcagtgtgcatgcatacaagagcaacaagatactggcgcagaggagcaatgcccggcatggatgccttcgctgctgtgtcactactcgccacactctttctggttcgtgcggcagctgcccatcctccggcggcggctgcggacgccatgacgccgacggactattggcgagcggtgcttcctgagaccccgatgccccgagccatactcgacctattgaccacatctacagttggtgagggctcaaggaaggtcaccacgtcaaatgggtaccaaggccatgacttaagaacggtcagcacatcatatgcatctcaagatggggacaactcatggaaggccaccatgtcatatgggttccaaagtggtgagggctcgaggaaggtcaccacatcatatccgtaccgagggcaggacttaaggatggtcagcacatcatatgtatctcaagatgaggacaactcatggaaggtctcaatgccatctaggttccaagttggtgagggctcaaggaaggtcaccacgtcaaatgggtaccaaggccatgacttaaggacggtcagcacatcatatgcatctcaagatggggacaactcatggaaggtcaccacgtcaaatgggtaccaaggccatgacttaaggacggtcagcacatcatatgcatctcaagatggggacaactcatggaaggccaccatgtcatatgggttccaaagtggtgagggctcgaggaaggtcaccacatcatatccgtaccgaggccaggacttaaggatggtcagcacatcatatgtatctcaagatgaggacaactcatggaaggtctcgatgccatctaggttccaagttggtgagggctcaaggaagctcaccacaccattcgaatcacaaagggaggactcaaggaaggccaccgcatcatatggaatccaagatgatgaggacacaaggaaggccactacatcatatggaatccatggggaggacccaagaaaggccaccacgtcatatggttcccaggatgagaagggatcaaggaaggtcataatgtcatatgggtctaatggtgaggatgatccaagaaaggccaccacatcatatggaatacaagataaagagtatcccaggaaggccaccacatcttatggagttcaaggggacatccatcaccatgaccatgctgccgttcacatccacagcagcggcaacaagctagtagcagatgttttcttcttccacgacgtcctacgcccagggtccgtaatcacgccgatcatcccaccgaccatcaccctaccacctctgctgcctctccgcgaggccgacgcgctcccgttctccaccgggcgcttcgccgacatcctcgccatgttcgcgccgacgacatccgacgccatgggcgaagagatacggtcgacgctcgacacctgcgagaacacgcgcccgctccctggcgagaaggccgcctgcgccacctccctcgagtctctcgccaggatacccgccgtcctcctcgggacacgcaacgtccgcgctttctccggcgacatgcccaccgatcctgccggcacgtcggcgaagcgggggcggtataacgtaacggccgtgcagaagctctccgagtcactgacggcggcggcgtgccatgacctgacgtacccctacgttgtgttctactgccacacgaccaacccagcggccacgtacctggtgaagctggcagcccaggatggcgggacgccggacatggaggcgttggtcgtgtgccacctcgacacgtcgttgtggagtcccagacacccattcttggtggcgcacagtctcaagccaggggacgacgcagtcgtgtgccattttctctctaagctcagcatcgtctgggtccccgctggcgagcaggggtggcgtgcgtgaagtgaagcctaatagcgttaagtacccgtgctcagagctctatctgtaacctgtatggacctaatgtggctctgtaatgctaaataaaacctgcgtcaatcatgtatcgtgatattttatttgttttagcaaaatggtgtccaaaactatagtccaaagtgaaggaattcatgttgtgagcactatatttggcacctgaacatggttggacggttcgacc

SEQ ID NO: 9326 - DNA, 1413 bp, Zea Mays
agttcttgtcgacggagagtaatgagatatagaataaggtaccctatagaataaagaatctttctctgaaaagtctgacgtacgtaaataagatataataaaaaaaatacaaagagaagcgctggactggagatgctcctatatgcggcaatgcctgtgcttataaatagccacctcggtcggcaaggacatgaacggcggacgcagtgtgcatgcatacaagagcaacaagatactggcgcagaggagcaatgcccggcatggatgccttcgctgctgtgtcactactcgccacactctttctggttcgtgcggcagctgcccatcctccggcggcggctgcggacgccatgacgccgacggactattggcgagcggtgcttcctgagaccccgatgccccgagccatactcgacctattgaccacatctacaggggacatccatcaccatgaccatgctgccgttcacatccacagcagcggcaacaagctagtagcagatgttttcttcttccacgacgtcctacgcccagggtccgtaatcacgccgatcatcccaccgaccatcaccctaccacctctgctgcctctccgcgaggccgacgcgctcccgttctccaccgggcgcttcgccgacatcctcgccatgttcgcgccgacgacatccgacgccatgggcgaagagatacggtcgacgctcgacacctgcgagaacacgcgcccgctccctggcgagaaggccgcctgcgccacctccctcgagtctctcgccaggatacccgccgtcctcctcgggacacgcaacgtccgcgctttctccggcgacatgcccaccgatcctgccggcacgtcggcgaagcgggggcggtataacgtaacggccgtgcagaagctctccgagtcactgacggcggcggcgtgccatgacctgacgtacccctacgttgtgttctactgccacacgaccaacccagcggccacgtacctggtgaagctggcagcccaggatggcgggacgccggacatggaggcgttggtcgtgtgccacctcgacacgtcgttgtggagtcccagacacccattcttggtggcgcacagtctcaagccaggggacgacgcagtcgtgtgccattttctctctaagctcagcatcgtctgggtccccgctggcgagcaggggtggcgtgcgtgaagtgaagcctaatagcgttaagtacccgtgctcagagctctatctgtaacctgtatggacctaatgtggctctgtaatgctaaataaaacctgcgtcaatcatgtatcgtgatattttatttgttttagcaaaatggtgtccaaaactatagtccaaagtgaaggaattcatgttgtgagcactatatttggcacctgaacatggttggacggttcgacc

SEQ ID NO: 9327 - DNA, 2118 bp, Zea Mays
agttcttgtcgacggagagtaatgagatatagaataaggtaccctatagaataaagaatctttctctgaaaagtctgacgtacgtaaataagatataataaaaaaaatacaaagagaagcgctggactggagatgctcctatatgcggcaatgcctgtgcttataaatagccacctcggtcggcaaggacatgaacggcggacgcagtgtgcatgcatacaagagcaacaagatactggcgcagaggagcaatgcccggcatggatgccttcgctgctgtgtcactactcgccacactctttctggttcgtgcggcagctgcccatcctccggcggcggctgcggacgccatgacgccgacggactattggcgagcggtgcttcctgagaccccgatgccccgagccatactcgacctattgaccacatctacagttggtgagggctcaaggaaggtcaccacgtcaaatgggtaccaaggccatgacttaagaacggtcagcacatcatatgcatctcaagatggggacaactcatggaaggccaccatgtcatatgggttccaaagtggtgagggctcgaggaaggtcaccacatcatatccgtaccgagggcaggacttaaggatggtcagcacatcatatgtatctcaagatgaggacaactcatggaaggccaccatgtcatatgggttccaaagtggtgagggctcgaggaaggtcaccacatcatatccgtaccgaggccaggacttaaggatggtcagcacatcatatgtatctcaagatgaggacaactcatggaaggtctcgatgccatctaggttccaagttggtgagggctcaaggaagctcaccacaccattcgaatcacaaagggaggactcaaggaaggccaccgcatcatatggaatccaagatgatgaggacacaaggaaggccactacatcatatggaatccatggggaggacccaagaaaggccaccacgtcatatggttcccaggatgagaagggatcaaggaaggtcataatgtcatatgggtctaatggtgaggatgatccaagaaaggccaccacatcatatggaatacaagataaagagtatcccaggaaggccaccacatcttatggagttcaaggggacatccatcaccatgaccatgctgccgttcacatccacagcagcggcaacaagctagtagcagatgttttcttcttccacgacgtcctacgcccagggtccgtaatcacgccgatcatcccaccgaccatcaccctaccacctctgctgcctctccgcgaggccgacgcgctcccgttctccaccgggcgcttcgccgacatcctcgccatgttcgcgccgacgacatccgacgccatgggcgaagagatacggtcgacgctcgacacctgcgagaacacgcgcccgctccctggcgagaaggccgcctgcgccacctccctcgagtctctcgccaggatacccgccgtcctcctcgggacacgcaacgtccgcgctttctccggcgacatgcccaccgatcctgccggcacgtcggcgaagcgggggcggtataacgtaacggccgtgcagaagctctccgagtcactgacggcggcggcgtgccatgacctgacgtacccctacgttgtgttctactgccacacgaccaacccagcggccacgtacctggtgaagctggcagcccaggatggcgggacgccggacatggaggcgttggtcgtgtgccacctcgacacgtcgttgtggagtcccagacacccattcttggtggcgcacagtctcaagccaggggacgacgcagtcgtgtgccattttctctctaagctcagcatcgtctgggtccccgctggcgagcaggggtggcgtgcgtgaagtgaagcctaatagcgttaagtacccgtgctcagagctctatctgtaacctgtatggacctaatgtggctctgtaatgctaaataaaacctgcgtcaatcatgtatcgtgatattttatttgttttagcaaaatggtgtccaaaactatagtccaaagtgaaggaattcatgttgtgagcactatatttggcacctgaacatggttggacggttcgacc

SEQ ID NO: 9328 - DNA, 5335 bp, Zea Mays
atacaacaattattaggaaataatcgagttagagctgtggctatgagtgctacagaggggttgatgagaggaatggaagtgattgacacgggaactcctctcagtgttccagtcggtggagctactctcggacgaatttttaacgttcttggggagcctattgataatttgggtcctgtggatactagtgcaacatttcctattcatagatctgcgcctgcctttatcgagttagatacgaaattatctatctttgaaacaggtattaaggtggtcgatcttttagctccctatcgacgtggaggaaaaatcggactgtttgggggggcaggagtaggtaaaacagtactcatcatggaattaatcaataacattgctaaagctcatggaggcgtatccgtatttggcggagtaggggaacggactcgtgaaggaaatgatctttatatggaaatgaaggaatccggagtaattaatgaaaaaaatattgaggaatcaaaggtagctctagtctatggccaaatgaatgaaccgccgggagctcgtatgagagttggtttaactgccctaactatggcagaatatttccgagatgttaataagcaagacgtgcttttattcatcgataatatctttcgttttgttcaagcaggatcggaagtatccgccttattaggcagaatgccctccgcagtgggttatcaacctacccttagtacagaaatgggttctttgcaagaaagaattacttctaccaaaaagggatctataacttcgatccaagcagtttatgtacctgcagacgatttgaccgaccctgctcctgccacaacatttgcacatttggacgctactaccgtactttccagaggattagcttccaagggtatttatcccgcagtggatcctttagattcaacctcaactatgttacagcctcggattgttggcaacgaacattatgaaactgcgcaaagagttaaggaaactttacaacgttacaaagaacttcaggacattatcgcaattcttggattggatgaattatcggaggaggatcgtttaactgtagcaagagcacgaaaaatcgagcggttcttatcacaaccgttctttgtggcagaagtttttaccggttctccaggaaatggccaaattggtgtattaccaaaccacgcccccattaacacagctgtagatatgggtcctttgagaatacgcctcctgaacgaccaatggttaacggcggttctgtggagtggttttgcaagaatagttaataatgagatcatcattttaggaaatgatgcagaactgggtagtgacattgatccagaagaagctcaacaggcacttgaaatagccgaagctgactcggacctgttctgaaaaagtcgaggactaattcagttccgcctattccacattaatgggagtacatttatgtttctgcttcacgaatatgatattttttggacatttctaataatagcaagccttattcctattttggtattttggatttcaggacttttagccccggttagtgaaggaccagagaagctttctagttatgaatcgggtatagaacccatggggggggcttggttacaattctgaatacgctattacatgtttgcgctagtttttgttgtttttgatgtggaaacagtctttctctacccttgggcaatgagtttcgacgtattgggtgtatccgtttttatcgaagctttcatttttgtgcttatcctagttgttggtttagtttatgcatggcgaaaaggagccttggaatggtcttaactgaatattcagaaaaaaaaaaagaaggaaaagattccattgagacaattatgagtttgattgagtttccgttactcgaccaaacaagttccaattccgttatttcaactacaccaaacgatctttcaaattggtcaagactctcaagtttatggccccttctatatggtaccagttgttgtttcattgaatttgcttcattaataggctcacgattcgactttgatcgttatggattggtaccaagatcaagtcctagacaagcggacctaattttaacagctggtacggtaacaatgaaaatggctccatctttagtgcgattatatgagcaaatgcctgaaccgaaatacgtcattgctatgggagcctgtactattacagggggcatgttcagtacagattcctatagtactgttcgaggagttgataagttaattcctgtggacgtctacctgccgggttgcccgcctaaaccagaggctgttatagatgccctaacaaaacttcgtaagaagatagcgcgagaaataattgaggatcgaactctatgtcaaagtcaaaagaaaaatagatcttttactacccgtcacaaactttatgttcggcgcagtactcacactggaacttacgaacaagaattgctctatcaatcaccatctactttagatatatcttctgaaacttttttcaaatccaaaagttcagtatcttcctacaaattagtgaattaggaggggttcttttgtgcagaaaaagaaagaaaagagcagtacaatctttcaaacttgcatttgaaatgtgaaatatttatacaaagggggagagatcaagacaatgcagcagggttggttatctaattggctagttaaacatgacgtggttcataggtctttgggcttcgatcatcgaggagtagagactttacaaataaaagcgggggattgggattccattgctgtcattttatatgtatatggttacaattatttacgttcccaatgtgcttatgacgtagcacccggtggatctttagctagcgtgtatcatcttacgagaatacagtatggtatagataacccagaagaggtatgcataaaagtctttgcccaaaaggataatcctagaatcccgtctgttttctgggtttggagaagtgccgattttcaagaacgcgaatcttatgatatggtgggaatttcttatgataatcatccacgtcttaaacgtatcttaatgcctgaaagttggataggctggcccttacgtaaggactatataacccccaatttctatgaaatacaagatgctcattgagtgataataaattcatgttcacttatacaacacaattccagattttattcaagtcaaggaatattttgacgttctgttcctagacgaaacgaaatacttagaatataatattctaattaattcctattatacaaaaaggtccagatagactgaacaaaaagggcttcatttctattttccaatttggaaaatcacatatttgtttccttcgtatgaacagaaaaatacaatgactcaaagaagttcctaccacgaactttgtaccgcgcatattacttagaacaactgggaaagtaggataagcaagaataaaaaaaaaatatattcttcggaatagcggtatacaaaattaataagaaatgcaaaatgaagaaaagggcacctaatctcacctctttctataccataaagaaccagagatttaaaccctttttttaaaagaaaaagaagtgtttagagatttatctacttactctagagatttatctacttactctagactaaagactaagtagatttttaataaatatttaccccaatccatctcaaaatatttgtatcaatatctattcagtagatcctttttttctgtgccaggaaccagatttgaactggtgacacgaggattttcagtcctctgctctaccaactgagctatcctgaccctttcttgtgcatcatcttagtaaagtattttgcatctatgtcaattaaagggactaaaaaatcaataaagtattccattcaaaattaggaaatggggaggggtagtcctatgcattgtggatggcttacttaataatacttaaaaaaacgaattaataatcgagattccttgccgatactctactctaataaataaaaaagaaataaaaaagaaatcatctatttaatgaatagcataagattcattgagttcttgtcgcactcctttgtgaaagagtagaatgagaaagctagtgaatcttaaacccattgataaaagaaaaaaaggataacaactatggttagggaataaaagagggtttggggatagagggacttgaaccctcacgacttataaagtcgacggattttccttttactagaaatttcattgttgtcagtattgacatgtagaatgggactctctctttatcctcgtccgattaatccacttttaaaaattaaaagatctcgaaaacaatgaattgaaggatttgattactcaatatttgattggaatagattcacaataattctaaaaaaaaattatgaattttctatttcataatcattcctaatttcattctaaaaataaaataaagaacctatattataatatgggttctgtgattaatcgttattacttcgattcattagaacagcttccattgagtctctgcacctatcctttcctttgggttctagtttgagaaccacttgtttttcaaaaaagggatttggctcaggattgcccatttttcattccagggtttctctgaatttggaagttaccacttagcaggtttccataccaaggctcaatacaatcaagtccgtagcgtctaccgatttcgccatatccccattttacttttctttgaaaccaggattccttgtataatttaatccatctcttagttttttttgaatcattgaattcattattcgacgtagtctagcaactcatctctatttgagacaccccgctcgcttattgcaattcagaattgcattgattttatcgttgatatatttgcaattcaatcggaatgaatatatccaaaagtttttctctctcccgcctccctccttccttttttagagtattccaaatcatactataacgcttgatattcattctttttttctaaactgaattagaaatttcatttgctatgattctatcttctccttagtgaactatttatccttaaattattaacaaataaaaaaacaaaatatctcaaaaatgtatataatgatcaaatgaaaatgccaatctcttggcattttctctttattatattattcatatatattcttctttttcttcttttctatgtattagattattcctccgagccatatcaaattgaaaatatctgaaatcaaattcaatatagaatttggaatagattctattaaaaaaatccatttgcgaattagagaaataaaaagaaagttcaataaattctataatcctatttaagaatatcatttagttaag

SEQ ID NO: 9329 - DNA, 5479 bp, Zea Mays
cgtttcgatgatgagcctatggtaatgcttttatctctattctatggcgcaatcgaccgtcgagtctataaacaagtactaaataaggaaaagaaactatactaaaggaaacataagatatccatcctaaaatggaaaaaagacgtatatattagggctatacggattcgaaccgtagaccttctcggtaaaacagatcaaacagattattatcgaaatgattcgaactgtttcaaagacccaacatgcatttttctgcattgggctctttcatcaactaatgtaaagatcagttaattcgccatagtttttctttagggaaagataataagatggctccctgtgctctgattgattatttgtcttatgatctatctaggaacaataccaaagtgtttcaaaggaggattaccttgacttaggtctgcctccggcctaaattaaatcaacctaagtgaaatggagtctctatcgttccgctgcaagagtttactatgagacttcatacaccttaaagttcatagaacgaaaagaagttttttggaggcccttatcctcattacgcctagcattgagtgggctggatatttaccttatcaactagcaaatcaataggagttctatttgagtaagcaccttaattggcacctgaatcggactgaaccagctgtttgtcattgtcaggctactgttcttctattctttcgaatccatgaagtaagacattgattttgcaacaaggtcaattatgttcattgcataataagttcccttgaaaagcattggcgcacgtgtaaacgagttgctctaccgaactgagctatagcccttgtcagagatatcttaacatatagataatttcttgtcaagatgaatattctctaatgccagaggatatccctttgatccgtttactatataacataaacataccaataacggagcggtattgcttataaaaaggattcaatctataatcgatcgaagtaatggggcttcttttgtggtgataaattgcctacttaactcagtggttagagtattgctttcatacggcgggagtcattggttcaaatccaatagtaggtagtaggtagaaaaatactagatagcattggactacttcgcttcgctatctaataactttttctacccttctttcctttttctttgtatcaacgaaatctttggattgtcttcaattggatgggggaatccaattgacagcctcgactcgtatcctagctcgtctgagagctagcttcgcttcaaccaattctttcgtaccttcagctttactcaagttagcttcggctatttcaagtgcctgttgagcttcttctggatcaatgtcactacccagttctgcatcatttcctaaaatgatgatctcattattaactattcttgcaaaaccactccacagaaccgccgttaaccattggtcgttcaggaggcgtattctcaaaggacccatatctacagctgtgttaatgggggcgtggtttggtaatacaccaatttggccactattagtagataaaatgatttctttcacttcacaatcccaaataattcgtttaggagtcagtacataaagatttaatttcatttcttcaatttgctctcctcttctaagtttatagctttcgtgctagcttcatcgatgttccccactaaataaaaagcctgttcgggtaggccgtctaattctccggaaaggattagttgaaatcccctaattgtttctgcaagaccaacatactttcctggagaaccggtaaaaacttctgccacaaagaacggttgtgataagaaccgctcgatttttcgtgctcttgctacagttaaacgatcctcctccgataattcatccaatccaagaattgcgataatgtcctgaagttctttgtaacgttgtaaagtttccttaactctttgcgcagtttcataatgttcgttgccaacaatccgaggctgtaacatagttgaggttgaatctaaaggatccactgcgggataaatacccttggaagctaatcctctggaaagtacggtagtagcgtccaaatgtgcaaatgttgtggcaggagcagggtcggtcaaatcgtctgcaggtacataaactgcttggatcgaagttatagatccctttttggtagaagtaattctttcttgcaaagaacccatttctgtactaagggtaggttgataacccactgcggagggcattctgcctaataaggcggatacttccgatcctgcttgaacaaaacgaaagatattatcgatgaataaaagcacgtcttgcttattaacatctcggaaatattctgccatagttagggcagttaaaccaactctcatacgaactcccggcggttcattcatttggccatagactagagctacctttgattcctcaatatttttttcattaattactccggattccttcatttccatataaagatcatttccttcacgagtccgttcccctactccgccaaatacggatacgcctccatgagctttagcaatgttattgattaattccatgatgagtactgttttacctactcctgcccccccaaacagtccgatttttcctccacgtcgatagggagctaaaagatcgaccaccttaatacctgtttcaaagatagataatttcgtatctaactcgataaaggcaggcgcagatctatgaataggaaatgttgcactagtatccacaggacccaaattgtcaataggctccccaagaacgttaaaaattcgtccgagagtagctccaccgactggaacactgagaggagttcccgtgtcaatcacttccattcctctcatcaacccctctgtagcactcatagccacagctctaactcgattatttcctaataattgttgtacctcacaagtcacattaatttgcttatcggcagtgtctcgactcttgactatcaaagcattataaatataaggcaacttgcccgggggaaaagtgatatccagcacgggtccaataatttgatcaatacgccctacgcttttttcttcaattgtggaaatcccgggacgcgaagtagtaggattggttctcataattatcacataattttcaaaaaaaagggatttgtcgaaattttttttcttgttgaataatgccaaatcaaaaaaaatatccaaaaatccaaaagtcaaaaggaaatgaattagttaattcaataaaaaagaaaaggggactcgcacttgatttcgttgcccaagcgaatcccattcaatcgtttacttatggaatgaatccgttggaaagttcaatccatttttttcatataaatttcgccttttgtgaaggatctgtgcctactctactttcctatctaggacttcgatatacaaaatatatactactgtgaagcatagattgctgtcaacagagaattttcttagtatttaggtatttagattcaaaatatcaaaggggaagaactttaaaaattgtaaaataaagattagggtttgggttgcgctatatctatcaaagagtatacaataatgatggatttggtgaatcaaatccacggtttaataacgaaccgtgttaacttaccataacaacaactcaattcctatcgaattccttcctatcgaattcctatagtaaaattcctataggatagaacgtacacagggtgtacacattatatatgaatgaaacatattcattaacttaagcatactcctttttttatttaatgagttgatattaattaaatatcttttttttagatttttgcaaaggtttcatttacgcctaatccatatcgagtagaccctgtcgttgtgagaattcttaattcatgagttgtagggagggacttatgtcaccacaaacagaaactaaagcaagtgttggatttaaagctggtgttaaggattataaattgacttactacaccccagagtacgaaaccaaggatactgatatcttggcagcattccgagtaactcctcagctcggggttccgcctgaagaagcaggagctgcagtagctgcggaatcttctactggtacatggacaactgtttggactgatggacttaccagtcttgatcgttacaaaggacgatgctatcacatcgagcccgttcctggggacccagatcaatatatctgttatgtagcttatccattagacctatttgaagagggttctgttactaacatgtttacttccattgtgggtaacgtatttggtttcaaagccttacgcgctctacgtttggaggatctacgaattccccctgcttattcaaaaactttccaaggtccgcctcacggtatccaagttgaaagggataagttgaacaagtacggtcgtcctttattgggatgtactattaaaccaaaattgggattatccgcaaaaaattacggtagagcgtgttatgagtgtctacgcggtggacttgattttaccaaagatgatgaaaacgtaaactcacaaccatttatgcgctggagagaccgttttgtcttttgtgccgaagcaatttataaagcacaagccgaaactggtgaaatcaaggggcattacttgaatgcgactgcaggtacatgcgaagaaatgattaagagagctgtatttgcaagggaattaggggttcctattgtaatgcatgactacttaacaggaggattcaccgcaaatactactttgtctcattattgccgcgacaacggcctacttcttcacattcaccgagcaatgcatgcagttattgatagacagaaaaatcatggtatgcatttccgtgtattagctaaagcattgcgtatgtcggggggagatcatatccactccggtacagtagtaggtaagttagaaggggaacgcgaaataactttaggttttgttgatttattgcgcgatgattttattgaaaaagatcgttctcgcggtatctttttcactcaggactgggtatccatgccaggtgttataccggtggcttctgggggtattcatgtttggcatatgccagctctgaccgaaatctttggagatgattccgtattacaatttggtggaggaactttaggacatccttggggaaatgcacctggtgcagcagctaatcgtgtggctttagaagcctgtgtacaagctcgtaacgaagggcgcgatcttgctcgtgaaggtaatgaaattatcaaagcagcttgcaaatggagtgctgaactagccgcagcttgtgaaatatggaaggagatcaaatttgatggtttcaaagcgatggataccatataaaataaaaaaaaagcaaaatagaaagagaaaaaataagttaagaaatgcagtaattcttctttattcctctaattgattgcaattcaattcggctcaatcttttctaaaaaaaaaagactgagccgaattgaaatagatcttgatacgatcatgagacttgacaa

SEQ ID NO: 9330 - DNA, 2341 bp, Zea Mays
cagaagtcctctctttttacagtgccccacccccacttgtgcaggcagctgctgcagcaagtacagtacgctgctgcccgaatccgcatcgggaggagcggacggaacgcctgggcccacccgtcacaggcacacctactcctcccctccctactctgcacggcttgggatttgcttggcgcacccgcacccgcaactgcaaatccctctccccactccccagcaccaccgctcaactcaacaaagccgagcagagaagagccgaaccgagccaaaaccaaagcaaagcaaacccagggcggccagcggacggaacccaaggcgaaaaggaagccagcggaagcagcgaaaagcccacgccaccttccaatcccccccaaattcccttgcattccattcccttcttcccttcccacacacctcctcctcctcctcctccgcgtctcttccccggcccccacatccgtccccccctctctctctcttcgccggccgccattgcgctcccgcattgcgccgggtcctaccagtccagcgcgggtccgtgccggcggcgggcatgatgccgcggcgcgtggcgtcggtgccggtgcccgactggctggaggcgctgctggccacgcgcttcttcctcgcctgcgccgcgcacccggcgtccccgcgcaacgagtgcaacatgttctgcctcgactgcacgggcgcgccgccgccgccgccgccggccttctgctactactgccgcgcgcaccgacactcgtcgcaccgcgtcatccagataaggcggtcctcctaccacgacgtcgtccgcgtgtcggaggtggaggacgtgctcgacatctccggcgtgcagacctacgtcatcaacagcgcccgggtgctcttcctcaacgagaggccccagccgcgcggcgccggcgcggccgcgggcaaggccgccgcgtccccctacaactgcgagatctgcggccgcgcgctgctcgaccccttccgcttctgctcgctcggatgcaaggtgttgcctttttttttcctttcctgcggttgccgattgttccgcccaccaacccacccgccctcccgctgtcccgcatcgttcattcgttgaattccccacaaataatgcacatgcctcgcaagaacaccaaaagtttgcgcctttcttcatgaatcttgttttgctttcttgtctttgacataaataaagaaagaaatataatgccatggccatgggggtgaaacgaacggcaatgccaaggaattggcgtccattggctggtggacaccaagaggagcaacggccacgcggctagttccgcggacggaggcggcggcggcggcggcgcagccagtggcaatgacgagacgacggaggccggcgggagcaagaacggcccgggggcgcggccgcacggacggcggcggaaggggaccccacaccgcgcgcccttctggtcctgacccaccaccggcaatggcgatcggtcgagttactccactagcgagcatcgaggcaatcaagagatcgataggggaataatggagggaggggacgatcgccgtctctcctccgcgccgccccgcgcttcttcggttcggttcggtttggttgtccttatatatacgtaattagaaacagaaaagcaaaggagagagaaaaagatactgcccgcccaactagagaaaggaaggaaggttatagataaacagatagaaaagcgagctgaggtcggcaccctcgcgcgcatcccccctcaaccaccggagggagggagagagggagccggcccggggccgcgcgctcgctggactgcagtaagcaacttgtctgtccccatccctctctcaccataccatggcgccatttggtacggtaggtgtgcatgatggcatgcctgatcatctcctcctcctcctcctcctagtcatcatattcatagatgatgctggtgaacttgagctagcaggaaatggatttaattctttctttttttttgacattggttggttaaccgttgacagtgagtagtactgataattatgtcttttttttctccctgctacattatagtaatgtactcctgttgtttggttcacattgcattgccggataatatatatatatatatatacaaagttattcctcaagcattgtggaaaggaaggaagggataccataccaaaggaaaacgaatgattgtccttttgcttgtctgctgcctgtccagctactccactggttcctgctgctagatggaactaaggaaggtgcgtggttaatttagtttcagcttgctacgcaaataatctcgccttctaattcgttcacgcgtctaataatata

SEQ ID NO: 9331 - DNA, 3437 bp, Zea Mays
cctgacgttctgcctcccacagtcccacccgacatcctcgcccagaacgcgtcgctaatctcgcgatcgcgcctcggccgttccgcgcctgcctgccgccgcccgcgattgtagctcaccccgacaccgtgccccctctcccctggcgtgatgcccgcctcccacccccttctccgcaccgcacggatctagcgcgggaactgctcagccacggctccgcacaccctcccttcccatgatacggagctgtcctatcctgctcgcgaggcaacgaaagggtacgtgatcctctgtctacatggaaggtgaggcagatcggggggagagtggctcgtggcagtcgcctcgatggcgtccttcgcgccgtccggcgaggtgtcgtccaagcacggcgtcgtcggctacgggatcgtgggtgggcccaacggcaacgccgtcgcgcccgctgccaagtccaccgtcgtcgagaccaccatcgagaggtttgcatatgcttctagtgtgccacgattgctacttctgcagataaatgaagtcagcaaggaatacttcttaaaaactgtaagtaatattgttggtgataaattgcttaagcaagctgcttcacaatatcaaatgcaggcacaacgaagccctcagacaaacccaagcaactattctttatcaggtcaagtttctggtcagcagactgctcccagtggttctgtgacaggagatgaacagaagggatatccatgggcgcacaccatccctatgagacaagctattgccagcactcgaccacctcaatttcggccttcctcgtctggccaaatgcggagtaatacggtacaaacaatgcagcatcacgtgcagcgaccacaaacatcttcaccagtgtttggggcaaatagtattcatgcacgtccatttctgcggccagttggaggtccagctgcaccatttagaccacaaatggcagattccaatccaagagcacacttgattcagggagctgtgaccacaatatctaggagtgtgccaaaacgatccatagtgtctggaaatgcgccagtcaatcaagccttgggatcttcaaaagtcagtgctggcatggaaagccagtcacaacaattgagtgcgcctaagcctttagctgcaacaagcttaagtcagactcaatctcatggcattcaagaagagcctaaaattcaggggaagaaacaactattattcgagagtttgcctgcaaccgatctaaagtattggtctctagagaggaagctctgccaaccattattaataactgagaagatgttcgcgtacagggagacggtgttggaggaggcacatcagggcatggagctacatgagcactgccgccatatagttgacaacgatgaccaacactgtagattccattctctgtgtgtacaccaagttgggctgaggaacactgagcagcaacaacaatatcgtaaggagagtgcatatgttggacaaatggaggcgacccaacccttggtagcgcccccgttccaacagtggccacccacgggggctgtgctgcccctgcccgggtccacggcctcggtcaccaacccaccgtctccccccatccccggcgcgtctgacattgttgccgcggacgaggtctgcaccatcttcatggatctgcctatagatgtcaaggaaacggagatgcacaacctgttgtgctggctcttaggattcgaggcgtttgagatgaacttcaagggcaaccagcccatgggcttcgcgctcttctccactgtgcaccaggccatcactgcaaaggctatgttccaggtttgtttcaatgcttgttgcggggatgagatgtgaccccaactggcactcgtcatctgcaggatacggtgtttgatactgagactaaggtggtgttgcaaactgatatggccaagaagaacctcttcgtcaagagatgtgagatttgtccacttgtctttcacatgttctctctactatcgctctaacagaatgttagtaccatgagcaagctaacctggattgatggagatgagatagtttgacttaggatgattctagaaattgaattgttttgggattgacggaatacatgcaacaagttcagatcgacgacgacgtcttcacactgcatgttttcttgcttcgccatcaccttcttacagcaccatccatttagctttctctcctcttgcatgaacgactaactgttgaaactggtgcttctaatggatgaggtggattaatctattatatgattattgaggtgtttatggttccatgtcttaataaagtgtcacactcacgttttgtctcattttcttgtgtatatctgttttcatgttcatgttgtccctgcacatatgtttagaataatcatcagcattactaaatctcacttcaagcttggtcttacaggtatgttcccatcatataatcctgcatgatttcactatttgccttggtgtattataaattaattatgttaatattatgacatctacccttgtgatagtactggtctaaattttctaattgcaccaaaactgtatgaagcgaatcagttggatttagtcaaaggtggatttattgcaaatgtgcagtgtgaagaagtatggatttaccctgcttgaattcctcatcctccccttcctatgcctcttgatttggtgtcttcaatccatcttcgcagttcgttcttgcaacaatctcataacccatggtcacaaatccactgacaccaatttgccgtgatgcgcctttatttgctagccaaagattgtttatcccatgcgtttgtggagtgggtggcccgcctcccgttgacgccgctaacaacatagacacaacgacactgcattgtgccctgtgctttttcactctcaccgagcttgctcaacaactggtggctggtgcaggatgtggacgatgacggagccgagagaggtcattcgaaggcaatgccggaggtgacgacaagggtcataaatagagaagaggtaattgtggatgggttgagggataatgtgttcgccttctcagagaatgttccaggcaccacaaccaagggcatcatggacacagtcctggtcacccagtactttggcaccatgagattggggcctcctcgaagtcatctcgttcatcccccatggtcctggagctgtcaaggatgtctcggcatagataagagatggcttcctgcatgctaatctttagtgagaaaacaaaggattgatatggcccatataggtgagggcattggtactatcatgctatgaaattgttaattatagtcaatatatgatatataaagctagacttgattggtctgtaaaagcatagttcgattgagctataagtgcacttgtgagtgagcctaggtatccaaacctgtcagctcttcatggaaatcctttgggtcagac

SEQ ID NO: 9332 - DNA, 4068 bp, Zea Mays
cctgacgttctgcctcccacagtcccacccgacatcctcgcccagaacgcgtcgctaatctcgcgatcgcgcctcggccgttccgcgcctgcctgccgccgcccgcgattgtagctcaccccgacaccgtgccccctctcccctggcgtgatgcccgcctcccacccccttctccgcaccgcacggatctagcgcgggaactgctcagccacggctccgcacaccctcccttcccatgatacggagctgtcctatcctgctcgcgaggcaacgaaagggtacgtgatcctctgtctacatggaaggtgaggcagatcggggggagagtggctcgtggcagtcgcctcgatggcgtccttcgcgccgtccggcgaggtgtcgtccaagcacggcgtcgtcggctacgggatcgtgggtgggcccaacggcaacgccgtcgcgcccgctgccaagtccaccgtcgtcgagaccaccatcgagagggttatcttcgatttttggttcctggcgctcctccccgccgctcgggaaccactccaccgctgagaccgtcgtaacgatcggctccgttgtggcccgcctgtgaccccgtatccgcttgcgctcagctagggttcagatctaaaaatggctgatgacggtgcgaggaggggaatgcccgctgaaggctgaagctgcccccacgggctacagtaggtgccatcgctcgccacaccgaacaccccactgccctccagaccgtgctccagggccctacggcgataggaggccactgaggatggatcagtgcggtactgctgccttccggaggacgccgagcgccggagagggggctcttctattggacttggagcaagcccacggcaacaacgccggaagcaaaatggcctcttctctagaaggacatgagttcgatccaccgtaaggaggcgtgcccgccaggctccatcttcggatctgatcgcccaccaagtgggttgagttcggatgacgagagtttgcctgcaactgatctaaaggttagagcgagcggcatgtgatgcggataaatgaagtcagcaaggaatacttcttaaaaactgtaagtaatattgttggtgataaattgcttaagcaagctgcttcacaatatcaaatgcaggcacaacgaagccctcagacaaacccaagcaactattctttatcaggtcaagtttctggtcagcagactgctcccagtggttctgtgacaggagatgaacagaagggatatccatgggcgcacaccatccctatgagacaagctattgccagcactcgaccacctcaatttcggccttcctcgtctggccaaatgcggagtaatacgggtaatccaccttcacaaaccaatttgcataaggctaataaaatgggaaacatgtcagatgggaaaggggtccatatgttacaaactcatccacccaataactccataccagtacaaacaatgcagcatcacgtgcagcgaccacaaacatcttcaccagtgtttggggcaaatagtattcatgcacgtccatttctgcggccagttggaggtccagctgcaccatttagaccacaaatggcagattccaatccaagagcacacttgattcagggagctgtgaccacaatatctaggagtgtgccaaaacgatccatagtgtctggaaatgcgccagtcaatcaagccttgggatcttcaaaagtcagtgctggcatggaaagccagtcacaacaattgagtgcgcctaagcctttagctgcaacaagcttaagtcagactcaatctcatggcattcaagaagagcctaaaattcaggggaagaaacaactattattcgagagtttgcctgcaaccgatctaaagtattggtctctagagaggaagctctgccaaccattattaataactgagaagatgttcgcgtacagggagacggtgttggaggaggcacatcagggcatggagctacatgagcactgccgccatatagttgacaacgatgaccaacactgtagattccattctctgtgtgtacaccaagttgggctgaggaacactgagcagcaacaacaatatcgtaaggagagtgcatatgttggacaaatggaggcgacccaacccttggtagcgcccccgttccaacagtggccacccacgggggctgtgctgcccctgcccgggtccacggcctcggtcaccaacccaccgtctccccccatccccggcgcgtctgacattgttgccgcggacgaggtctgcaccatcttcatggatctgcctatagatgtcaaggaaacggagatgcacaacctgttgtgctggctcttaggattcgaggcgtttgagatgaacttcaagggcaaccagcccatgggcttcgcgctcttctccactgtgcaccaggccatcactgcaaaggctatgttccaggtttgtttcaatgcttgttgcggggatgagatgtgaccccaactggcactcgtcatctgcaggatacggtgtttgatactgagactaaggtggtgttgcaaactgatatggccaagaagaacctcttcgtcaagagatgtgagatttgtccacttgtctttcacatgttctctctactatcgctctaacagaatgttagtaccatgagcaagctaacctggattgatggagatgagatagtttgacttaggatgattctagaaattgaattgttttgggattgacggaatacatgcaacaagttcagatcgacgacgacgtcttcacactgcatgttttcttgcttcgccatcaccttcttacagcaccatccatttagctttctctcctcttgcatgaacgactaactgttgaaactggtgcttctaatggatgaggtggattaatctattatatgattattgaggtgtttatggttccatgtcttaataaagtgtcacactcacgttttgtctcattttcttgtgtatatctgttttcatgttcatgttgtccctgcacatatgtttagaataatcatcagcattactaaatctcacttcaagcttggtcttacaggtatgttcccatcatataatcctgcatgatttcactatttgccttggtgtattataaattaattatgttaatattatgacatctacccttgtgatagtactggtctaaattttctaattgcaccaaaactgtatgaagcgaatcagttggatttagtcaaaggtggatttattgcaaatgtgcagtgtgaagaagtatggatttaccctgcttgaattcctcatcctccccttcctatgcctcttgatttggtgtcttcaatccatcttcgcagttcgttcttgcaacaatctcataacccatggtcacaaatccactgacaccaatttgccgtgatgcgcctttatttgctagccaaagattgtttatcccatgcgtttgtggagtgggtggcccgcctcccgttgacgccgctaacaacatagacacaacgacactgcattgtgccctgtgctttttcactctcaccgagcttgctcaacaactggtggctggtgcaggatgtggacgatgacggagccgagagaggtcattcgaaggcaatgccggaggtgacgacaagggtcataaatagagaagaggtaattgtggatgggttgagggataatgtgttcgccttctcagagaatgttccaggcaccacaaccaagggcatcatggacacagtcctggtcacccagtactttggcaccatgagattggggcctcctcgaagtcatctcgttcatcccccatggtcctggagctgtcaaggatgtctcggcatagataagagatggcttcctgcatgctaatctttagtgagaaaacaaaggattgatatggcccatataggtgagggcattggtactatcatgctatgaaattgttaattatagtcaatatatgatatataaagctagacttgattggtctgtaaaagcatagttcgattgagctataagtgcacttgtgagtgagcctaggtatccaaacctgtcagctcttcatggaaatcctttgggtcagac

SEQ ID NO: 9333 - DNA, 2985 bp, Zea Mays
cctgacgttctgcctcccacagtcccacccgacatcctcgcccagaacgcgtcgctaatctcgcgatcgcgcctcggccgttccgcgcctgcctgccgccgcccgcgattgtagctcaccccgacaccgtgccccctctcccctggcgtgatgcccgcctcccacccccttctccgcaccgcacggatctagcgcgggaactgctcagccacggctccgcacaccctcccttcccatgatacggagctgtcctatcctgctcgcgaggcaacgaaagggtacgtgatcctctgtctacatggaaggtgaggcagatcggggggagagtggctcgtggcagtcgcctcgatggcgtccttcgcgccgtccggcgaggtgtcgtccaagcacggcgtcgtcggctacgggatcgtgggtgggcccaacggcaacgccgtcgcgcccgctgccaagtccaccgtcgtcgagaccaccatcgagaggtttgcatatgcttctagtgtgccacgattgctacttctgcagataaatgaagtcagcaaggaatacttcttaaaaactgtaagtaatattgttggtgataaattgcttaagcaagctgcttcacaatatcaaatgcaggcacaacgaagccctcagacaaacccaagcaactattctttatcaggtcaagtttctggtcagcagactgctcccagtggttctgtgacaggagatgaacagaagggatatccatgggcgcacaccatccctatgagacaagctattgccagcactcgaccacctcaatttcggccttcctcgtctggccaaatgcggagtaatacggtacaaacaatgcagcatcacgtgcagcgaccacaaacatcttcaccagtgtttggggcaaatagtattcatgcacgtccatttctgcggccagttggaggtccagctgcaccatttagaccacaaatggcagattccaatccaagagcacacttgattcagggagctgtgaccacaatatctaggagtgtgccaaaacgatccatagtgtctggaaatgcgccagtcaatcaagccttgggatcttcaaaagtcagtgctggcatggaaagccagtcacaacaattgagtgcgcctaagcctttagctgcaacaagcttaagtcagactcaatctcatggcattcaagaagagcctaaaattcaggggaagaaacaactattattcgagagtttgcctgcaaccgatctaaaggttagagcgagcggcatgtgatgcgggtatgtacatagttgttccaaaattcatgtgtttgatgctggattgcctgtagctagctgttcatagtagggattaacgctgaaaaaattgggggaaagcaaagtacactggtgacctcaagttccatcgaatcaatatggcacagcagttagactatttgcttatcttagacctcaaattccatacgttcgacatctatgaatagaaaattttgacactatatctttgaacaattgatctctcaggaatatatgaggtcttggagttgagggatggaggatctgattattttggcaagggtgtttatcttagacctcaaagctcaatctagcatgctcttcgctctgttttactttccatgattcgttgagtatctatgcagtttctgcacgattactatgagtacgtgctttcatatattgtttactcgatgacttgaatagtttacaacgtatgattattgcttaggaccctgcactactaaatcaggggactggcttgagtcagaaaaacttaggaaccaagtttgctctctaagttactgacttcattttctactgtttatagattacgaactgaacttaaatcaaatacttcagtattggtctctagagaggaagctctgccaaccattattaataactgagaagatgttcgcgtacagggagacggtgttggaggaggcacatcagggcatggagctacatgagcactgccgccatatagttgacaacgatgaccaacactgtagattccattctctgtgtgtacaccaaggtatcggtgtctcgtctcggaccatgccctttcccttcccttccttctccgcacacgcagaaccggctgattctctttcttttgctttcctcctcttggcctacgttgatctagcgatgcgcttttcacggttactgcgaccgtgatgggcatctaggtgctcaaaccatcagttgggctgaggaacactgagcagcaacaacaatatcgtaaggagagtgcatatgttggacaaatggtatgccatatcttcagttctcttatgatgcttcagcgctgcatcttcagttttctcggctaaaaagagatcatagtcaatagtatacctatgtgtgaaatactgtcaaacttggtatatggacctcagaaagtataggaaagcgctatgctatttgcatgtttgctgggagaaagaaaagatagatgaaggatgtggacgatgacggagccgagagaggtcattcgaaggcaatgccggaggtgacgacaagggtcataaatagagaagaggtaattgtggatgggttgagggataatgtgttcgccttctcagagaatgttccaggcaccacaaccaagggcatcatggacacagtcctggtcacccagtactttggcaccatgagattggggcctcctcgaagtcatctcgttcatcccccatggtcctggagctgtcaaggatgtctcggcatagataagagatggcttcctgcatgctaatctttagtgagaaaacaaaggattgatatggcccatataggtgagggcattggtactatcatgctatgaaattgttaattatagtcaatatatgatatataaagctagacttgattggtctgtaaaagcatagttcgattgagctataagtgcacttgtgagtgagcctaggtatccaaacctgtcagctcttcatggaaatcctttgggtcagac

SEQ ID NO: 9334 - DNA, 2711 bp, Zea Mays
cctgacgttctgcctcccacagtcccacccgacatcctcgcccagaacgcgtcgctaatctcgcgatcgcgcctcggccgttccgcgcctgcctgccgccgcccgcgattgtagctcaccccgacaccgtgccccctctcccctggcgtgatgcccgcctcccacccccttctccgcaccgcacggatctagcgcgggaactgctcagccacggctccgcacaccctcccttcccatgatacggagctgtcctatcctgctcgcgaggcaacgaaagggtacgtgatcctctgtctacatggaaggtgaggcagatcggggggagagtggctcgtggcagtcgcctcgatggcgtccttcgcgccgtccggcgaggtgtcgtccaagcacggcgtcgtcggctacgggatcgtgggtgggcccaacggcaacgccgtcgcgcccgctgccaagtccaccgtcgtcgagaccaccatcgagagggttatcttcgatttttggttcctggcgctcctccccgccgctcgggaaccactccaccgctgagaccgtcgtaacgatcggctccgttgtggcccgcctgtgaccccgtatccgcttgcgctcagctagggttcagatctaaaaatggctgatgacggtgcgaggaggggaatgcccgctgaaggctgaagctgcccccacgggctacagtaggtgccatcgctcgccacaccgaacaccccactgccctccagaccgtgctccagggccctacggcgataggaggccactgaggatggatcagtgcggtactgctgccttccggaggacgccgagcgccggagagggggctcttctattggacttggagcaagcccacggcaacaacgccggaagcaaaatggcctcttctctagaaggacatgagttcgatccaccgtaaggaggcgtgcccgccaggctccatcttcggatctgatcgcccaccaagtgggttgagttcggatgacgagagtttgcctgcaactgatctaaaggttagagcgagcggcatgtgatgcggataaatgaagtcagcaaggaatacttcttaaaaactgtaagtaatattgttggtgataaattgcttaagcaagctgcttcacaatatcaaatgcaggtaaataatatttccacttcattgtgttatatgtaaacataacgtgtcttgccaccatagctttatatttttggtgtgatgcaatcttattagtcattcttaccagcactttttgttttgttttgtgggttatttactcatgtttgctcaggcacaacgaagccctcagacaaacccaagcaactattctttatcaggtcaagtttctggtcagcagactgctcccagtggttctgtgacaggagatgaacagaagggatatccatgggcgcacaccatccctatgagacaagctattgccagcactcgaccacctcaatttcggccttcctcgtctggccaaatgcggagtaatacggcatcacgtgcagcgaccacaaacatcttcaccagtgtttggggcaaatagtattcatgcacgtccatttctgcggccagttggaggtccagctgcaccatttagaccacaaatggcagattccaatccaagagcacacttgattcagggagctgtgaccacaatatctaggagtgtgccaaaacgatccatagtgtctggaaatgcgccagtcaatcaagccttgggatcttcaaaagtcagtgctggcatggaaagccagtcacaacaattgagtgcgcctaagcctttagctgcaacaagcttaagtcagactcaatctcatggcattcaagaagagcctaaaattcaggggaagaaacaactattattcgagagtttgcctgcaaccgatctaaagtattggtctctagagaggaagctctgccaaccattattaataactgagaagatgttcgcgtacagggagacggtgttggaggaggcacatcagggcatggagctacatgagcactgccgccatatagttgacaacgatgaccaacactgtagattccattctctgtgtgtacaccaagcgatgcgcttttcacggttactgcgaccgtgatgggcatctaggtgctcaaaccatcagttgggctgaggaacactgagcagcaacaacaatatcgtaaggagagtgcatatgttggacaaatggatgtggacgatgacggagccgagagaggtcattcgaaggcaatgccggaggtgacgacaagggtcataaatagagaagaggtaattgtggatgggttgagggataatgtgttcgccttctcagagaatgttccaggcaccacaaccaagggcatcatggacacagtcctggtcacccagtactttggcaccatgagattggggcctcctcgaagtcatctcgttcatcccccatggtcctggagctgtcaaggatgtctcggcatagataagagatggcttcctgcatgctaatctttagtgagaaaacaaaggattgatatggcccatataggtgagggcattggtactatcatgctatgaaattgttaattatagtcaatatatgatatataaagctagacttgattggtctgtaaaagcatagttcgattgagctataagtgcacttgtgagtgagcctaggtatccaaacctgtcagctcttcatggaaatcctttgggtcagac

SEQ ID NO: 9335 - DNA, 3622 bp, Zea Mays
cctgacgttctgcctcccacagtcccacccgacatcctcgcccagaacgcgtcgctaatctcgcgatcgcgcctcggccgttccgcgcctgcctgccgccgcccgcgattgtagctcaccccgacaccgtgccccctctcccctggcgtgatgcccgcctcccacccccttctccgcaccgcacggatctagcgcgggaactgctcagccacggctccgcacaccctcccttcccatgatacggagctgtcctatcctgctcgcgaggcaacgaaagggtacgtgatcctctgtctacatggaaggtgaggcagatcggggggagagtggctcgtggcagtcgcctcgatggcgtccttcgcgccgtccggcgaggtgtcgtccaagcacggcgtcgtcggctacgggatcgtgggtgggcccaacggcaacgccgtcgcgcccgctgccaagtccaccgtcgtcgagaccaccatcgagagggttatcttcgatttttggttcctggcgctcctccccgccgctcgggaaccactccaccgctgagaccgtcgtaacgatcggctccgttgtggcccgcctgtgaccccgtatccgcttgcgctcagctagggttcagatctaaaaatggctgatgacggtgcgaggaggggaatgcccgctgaaggctgaagctgcccccacgggctacagtaggtgccatcgctcgccacaccgaacaccccactgccctccagaccgtgctccagggccctacggcgataggaggccactgaggatggatcagtgcggtactgctgccttccggaggacgccgagcgccggagagggggctcttctattggacttggagcaagcccacggcaacaacgccggaagcaaaatggcctcttctctagaaggacatgagttcgatccaccgtaaggaggcgtgcccgccaggctccatcttcggatctgatcgcccaccaagtgggttgagttcggatgacgagagtttgcctgcaactgatctaaaggttagagcgagcggcatgtgatgcggataaatgaagtcagcaaggaatacttcttaaaaactgcacaacgaagccctcagacaaacccaagcaactattctttatcaggtcaagtttctggtcagcagactgctcccagtggttctgtgacaggagatgaacagaagggatatccatgggcgcacaccatccctatgagacaagctattgccagcactcgaccacctcaatttcggccttcctcgtctggccaaatgcggagtaatacggcatcacgtgcagcgaccacaaacatcttcaccagtgtttggggcaaatagtattcatgcacgtccatttctgcggccagttggaggtccagctgcaccatttagaccacaaatggcagattccaatccaagagcacacttgattcagggagctgtgaccacaatatctaggagtgtgccaaaacgatccatagtgtctggaaatgcgccagtcaatcaagccttgggatcttcaaaagtcagtgctggcatggaaagccagtcacaacaattgagtgcgcctaagcctttagctgcaacaagcttaagtcagactcaatctcatggcattcaagaagagcctaaaattcaggtatgtattaatttgctattgtgttgctatgttttcttgtacttttagttgcacataaaaatcatttcggacactactgcctgaagttttaatttgtttgataatttgcattatctttcttattaagttatatgaaaccctgaaatttgtttaatggccaatttgatgctgccctatttgaccaccctcaggggaagaaacaactattattcgagagtttgcctgcaaccgatctaaaggttagagcgagcggcatgtgatgcgggtatgtacatagttgttccaaaattcatgtgtttgatgctggattgcctgtagctagctgttcatagtagggattaacgctgaaaaaattgggggaaagcaaagtacactggtgacctcaagttccatcgaatcaatatggcacagcagttagactatttgcttatcttagacctcaaattccatacgttcgacatctatgaatagaaaattttgacactatatctttgaacaattgatctctcaggaatatatgaggtcttggagttgagggatggaggatctgattattttggcaagggtgtttatcttagacctcaaagctcaatctagcatgctcttcgctctgttttactttccatgattcgttgagtatctatgcagtttctgcacgattactatgagtacgtgctttcatatattgtttactcgatgacttgaatagtttacaacgtatgattattgcttaggaccctgcactactaaatcaggggactggcttgagtcagaaaaacttaggaaccaagtttgctctctaagttactgacttcattttctactgtttatagattacgaactgaacttaaatcaaatacttcagtattggtctctagagaggaagctctgccaaccattattaataactgagaagatgttcgcgtacagggagacggtgttggaggaggcacatcagggcatggagctacatgagcactgccgccatatagttgacaacgatgaccaacactgtagattccattctctgtgtgtacaccaaggtatcggtgtctcgtctcggaccatgccctttcccttcccttccttctccgcacacgcagaaccggctgattctctttcttttgctttcctcctcttggcctacgttgatctagcgatgcgcttttcacggttactgcgaccgtgatgggcatctaggtgctcaaaccatcagttgggctgaggaacactgagcagcaacaacaatatcgtaaggagagtgcatatgttggacaaatggtatgccatatcttcagttctcttatgatgcttcagcgctgcatcttcagttttctcggctaaaaagagatcatagtcaatagtatacctatgtgtgaaatactgtcaaacttggtatatggacctcagaaagtataggaaagcgctatgctatttgcatgtttgctgggagaaagaaaagatagatgaaggatgtggacgatgacggagccgagagaggtcattcgaaggcaatgccggaggtgacgacaagggtcataaatagagaagaggtaattgtggatgggttgagggataatgtgttcgccttctcagagaatgttccaggcaccacaaccaagggcatcatggacacagtcctggtcacccagtactttggcaccatgagattggggcctcctcgaagtcatctcgttcatcccccatggtcctggagctgtcaaggatgtctcggcatagataagagatggcttcctgcatgctaatctttagtgagaaaacaaaggattgatatggcccatataggtgagggcattggtactatcatgctatgaaattgttaattatagtcaatatatgatatataaagctagacttgattggtctgtaaaagcatagttcgattgagctataagtgcacttgtgagtgagcctaggtatccaaacctgtcagctcttcatggaaatcctttgggtcagac

SEQ ID NO: 9336 - DNA, 2822 bp, Zea Mays
cctgacgttctgcctcccacagtcccacccgacatcctcgcccagaacgcgtcgctaatctcgcgatcgcgcctcggccgttccgcgcctgcctgccgccgcccgcgattgtagctcaccccgacaccgtgccccctctcccctggcgtgatgcccgcctcccacccccttctccgcaccgcacggatctagcgcgggaactgctcagccacggctccgcacaccctcccttcccatgatacggagctgtcctatcctgctcgcgaggcaacgaaagggtacgtgatcctctgtctacatggaaggtgaggcagatcggggggagagtggctcgtggcagtcgcctcgatggcgtccttcgcgccgtccggcgaggtgtcgtccaagcacggcgtcgtcggctacgggatcgtgggtgggcccaacggcaacgccgtcgcgcccgctgccaagtccaccgtcgtcgagaccaccatcgagagggttatcttcgatttttggttcctggcgctcctccccgccgctcgggaaccactccaccgctgagaccgtcgtaacgatcggctccgttgtggcccgcctgtgaccccgtatccgcttgcgctcagctagggttcagatctaaaaatggctgatgacggtgcgaggaggggaatgcccgctgaaggctgaagctgcccccacgggctacagtaggtgccatcgctcgccacaccgaacaccccactgccctccagaccgtgctccagggccctacggcgataggaggccactgaggatggatcagtgcggtactgctgccttccggaggacgccgagcgccggagagggggctcttctattggacttggagcaagcccacggcaacaacgccggaagcaaaatggcctcttctctagaaggacatgagttcgatccaccgtaaggaggcgtgcccgccaggctccatcttcggatctgatcgcccaccaagtgggttgagttcgataaatgaagtcagcaaggaatacttcttaaaaactgtaagtaatattgttggtgataaattgcttaagcaagctgcttcacaatatcaaatgcaggcacaacgaagccctcagacaaacccaagcaactattctttatcaggtcaagtttctggtcagcagactgctcccagtggttctgtgacaggagatgaacagaagggatatccatgggcgcacaccatccctatgagacaagctattgccagcactcgaccacctcaatttcggccttcctcgtctggccaaatgcggagtaatacggtacaaacaatgcagcatcacgtgcagcgaccacaaacatcttcaccagtgtttggggcaaatagtattcatgcacgtccatttctgcggccagttggaggtccagctgcaccatttagaccacaaatggcagattccaatccaagagcacacttgattcagggagctgtgaccacaatatctaggagtgtgccaaaacgatccatagtgtctggaaatgcgccagtcaatcaagccttgggatcttcaaaagtcagtgctggcatggaaagccagtcacaacaattgagtgcgcctaagcctttagctgcaacaagcttaagtcagactcaatctcatggcattcaagaagagcctaaaattcaggggaagaaacaactattattcgagagtttgcctgcaaccgatctaaaggttagagcgagcggcatgtgatgcgggtatgtacatagttgttccaaaattcatgtgtttgatgctggattgcctgtagctagctgttcatagtagggattaacgctgaaaaaattgggggaaagcaaagtacactggtgacctcaagttccatcgaatcaatatggcacagcagttagactatttgcttatcttagacctcaaattccatacgttcgacatctatgaatagaaaattttgacactatatctttgaacaattgatctctcaggaatatatgaggtcttggagttgagggatggaggatctgattattttggcaaggattacgaactgaacttaaatcaaatacttcagtattggtctctagagaggaagctctgccaaccattattaataactgagaagatgttcgcgtacagggagacggtgttggaggaggcacatcagggcatggagctacatgagcactgccgccatatagttgacaacgatgaccaacactgtagattccattctctgtgtgtacaccaagcgatgcgcttttcacggttactgcgaccgtgatgggcatctaggtgctcaaaccatcagttgggctgaggaacactgagcagcaacaacaatatcgtaaggagagtgcatatgttggacaaatggtatgccatatcttcagttctcttatgatgcttcagcgctgcatcttcagttttctcggctaaaaagagatcatagtcaatagtatacctatgtgtgaaatactgtcaaacttggtatatggacctcagaaagtataggaaagcgctatgctatttgcatgtttgctgggagaaagaaaagatagatgaaggatgtggacgatgacggagccgagagaggtcattcgaaggcaatgccggaggtgacgacaagggtcataaatagagaagaggttttgctgcaaggaacaagccgcctgttgagggacgtacacaatttgtttgactgaatgacgcaaaatgtgacattgctctgatgttctcggcttctaggtgctcgaagttgaaggatgagagtggcaacctgtgagaaagttgaggctgagaagatacactagatcaagagagccaaaggagtgg

SEQ ID NO: 9337 - DNA, 2347 bp, Zea Mays
cctgacgttctgcctcccacagtcccacccgacatcctcgcccagaacgcgtcgctaatctcgcgatcgcgcctcggccgttccgcgcctgcctgccgccgcccgcgattgtagctcaccccgacaccgtgccccctctcccctggcgtgatgcccgcctcccacccccttctccgcaccgcacggatctagcgcgggaactgctcagccacggctccgcacaccctcccttcccatgatacggagctgtcctatcctgctcgcgaggcaacgaaagggtacgtgatcctctgtctacatggaaggtgaggcagatcggggggagagtggctcgtggcagtcgcctcgatggcgtccttcgcgccgtccggcgaggtgtcgtccaagcacggcgtcgtcggctacgggatcgtgggtgggcccaacggcaacgccgtcgcgcccgctgccaagtccaccgtcgtcgagaccaccatcgagaggtttgcatatgcttctagtgtgccacgattgctacttctgcagataaatgaagtcagcaaggaatacttcttaaaaactgtaagtaatattgttggtgataaattgcttaagcaagctgcttcacaatatcaaatgcaggcacaacgaagccctcagacaaacccaagcaactattctttatcaggtcaagtttctggtcagcagactgctcccagtggttctgtgacaggagatgaacagaagggatatccatgggcgcacaccatccctatgagacaagctattgccagcactcgaccacctcaatttcggccttcctcgtctggccaaatgcggagtaatacggcatcacgtgcagcgaccacaaacatcttcaccagtgtttggggcaaatagtattcatgcacgtccatttctgcggccagttggaggtccagctgcaccatttagaccacaaatggcagattccaatccaagagcacacttgattcagggagctgtgaccacaatatctaggagtgtgccaaaacgatccatagtgtctggaaatgcgccagtcaatcaagccttgggatcttcaaaagtcagtgctggcatggaaagccagtcacaacaattgagtgcgcctaagcctttagctgcaacaagcttaagtcagactcaatctcatggcattcaagaagagcctaaaattcaggggaagaaacaactattattcgagagtttgcctgcaaccgatctaaaggttagagcgagcggcatgtgatgcgggtatgtacatagttgttccaaaattcatgtgtttgatgctggattgcctgtagctagctgttcatagtagggattaacgctgaaaaaattgggggaaagcaaagtacactggtgacctcaagttccatcgaatcaatatggcacagcagttagactatttgcttatcttagacctcaaattccatacgttcgacatctatgaatagaaaattttgacactatatctttgaacaattgatctctcaggaatatatgaggtcttggagttgagggatggaggatctgattattttggcaaggattacgaactgaacttaaatcaaatacttcagtattggtctctagagaggaagctctgccaaccattattaataactgagaagatgttcgcgtacagggagacggtgttggaggaggcacatcagggcatggagctacatgagcactgccgccatatagttgacaacgatgaccaacactgtagattccattctctgtgtgtacaccaagcgatgcgcttttcacggttactgcgaccgtgatgggcatctaggtgctcaaaccatcagttgggctgaggaacactgagcagcaacaacaatatcgtaaggagagtgcatatgttggacaaatggtatgccatatcttcagttctcttatgatgcttcagcgctgcatcttcagttttctcggctaaaaagagatcatagtcaatagtatacctatgtgtgaaatactgtcaaacttggtatatggacctcagaaagtataggaaagcgctatgctatttgcatgtttgctgggagaaagaaaagatagatgaaggatgtggacgatgacggagccgagagaggtcattcgaaggcaatgccggaggtgacgacaagggtcataaatagagaagaggttttgctgcaaggaacaagccgcctgttgagggacgtacacaatttgtttgactgaatgacgcaaaatgtgacattgctctgatgttctcggcttctaggtgctcgaagttgaaggatgagagtggcaacctgtgagaaagttgaggctgagaagatacactagatcaagagagccaaaggagtgg

SEQ ID NO: 9338 - DNA, 2575 bp, Zea Mays
cctgacgttctgcctcccacagtcccacccgacatcctcgcccagaacgcgtcgctaatctcgcgatcgcgcctcggccgttccgcgcctgcctgccgccgcccgcgattgtagctcaccccgacaccgtgccccctctcccctggcgtgatgcccgcctcccacccccttctccgcaccgcacggatctagcgcgggaactgctcagccacggctccgcacaccctcccttcccatgatacggagctgtcctatcctgctcgcgaggcaacgaaagggtacgtgatcctctgtctacatggaaggtgaggcagatcggggggagagtggctcgtggcagtcgcctcgatggcgtccttcgcgccgtccggcgaggtgtcgtccaagcacggcgtcgtcggctacgggatcgtgggtgggcccaacggcaacgccgtcgcgcccgctgccaagtccaccgtcgtcgagaccaccatcgagaggtttgcatatgcttctagtgtgccacgattgctacttctgcagataaatgaagtcagcaaggaatacttcttaaaaactgtaagtaatattgttggtgataaattgcttaagcaagctgcttcacaatatcaaatgcaggcacaacgaagccctcagacaaacccaagcaactattctttatcaggtcaagtttctggtcagcagactgctcccagtggttctgtgacaggagatgaacagaagggatatccatgggcgcacaccatccctatgagacaagctattgccagcactcgaccacctcaatttcggccttcctcgtctggccaaatgcggagtaatacgggtaatccaccttcacaaaccaatttgcataaggctaataaaatgggaaacatgtcagatgggaaaggggtccatatgttacaaactcatccacccaataactccataccagtacaaacaatgcagcatcacgtgcagcgaccacaaacatcttcaccagtgtttggggcaaatagtattcatgcacgtccatttctgcggccagttggaggtccagctgcaccatttagaccacaaatggcagattccaatccaagagcacacttgattcagggagctgtgaccacaatatctaggagtgtgccaaaacgatccatagtgtctggaaatgcgccagtcaatcaagccttgggatcttcaaaagtcagtgctggcatggaaagccagtcacaacaattgagtgcgcctaagcctttagctgcaacaagcttaagtcagactcaatctcatggcattcaagaagagcctaaaattcaggggaagaaacaactattattcgagagtttgcctgcaaccgatctaaaggttagagcgagcggcatgtgatgcgggtatgtacatagttgttccaaaattcatgtgtttgatgctggattgcctgtagctagctgttcatagtagggattaacgctgaaaaaattgggggaaagcaaagtacactggtgacctcaagttccatcgaatcaatatggcacagcagttagactatttgcttatcttagacctcaaattccatacgttcgacatctatgaatagaaaattttgacactatatctttgaacaattgatctctcaggaatatatgaggtcttggagttgagggatggaggatctgattattttggcaagggtgtttatcttagacctcaaagctcaatctagcatgctcttcgctctgttttactttccatgattcgttgagtatctatgcagtttctgcacgattactatgaattacgaactgaacttaaatcaaatacttcagtattggtctctagagaggaagctctgccaaccattattaataactgagaagatgttcgcgtacagggagacggtgttggaggaggcacatcagggcatggagctacatgagcactgccgccatatagttgacaacgatgaccaacactgtagattccattctctgtgtgtacaccaagcgatgcgcttttcacggttactgcgaccgtgatgggcatctaggtgctcaaaccatcagttgggctgaggaacactgagcagcaacaacaatatcgtaaggagagtgcatatgttggacaaatggtatgccatatcttcagttctcttatgatgcttcagcgctgcatcttcagttttctcggctaaaaagagatcatagtcaatagtatacctatgtgtgaaatactgtcaaacttggtatatggacctcagaaagtataggaaagcgctatgctatttgcatgtttgctgggagaaagaaaagatagatgaaggatgtggacgatgacggagccgagagaggtcattcgaaggcaatgccggaggtgacgacaagggtcataaatagagaagaggttttgctgcaaggaacaagccgcctgttgagggacgtacacaatttgtttgactgaatgacgcaaaatgtgacattgctctgatgttctcggcttctaggtgctcgaagttgaaggatgagagtggcaacctgtgagaaagttgaggctgagaagatacactagatcaagagagccaaaggagtgg

SEQ ID NO: 9339 - DNA, 2309 bp, Zea Mays
cctgacgttctgcctcccacagtcccacccgacatcctcgcccagaacgcgtcgctaatctcgcgatcgcgcctcggccgttccgcgcctgcctgccgccgcccgcgattgtagctcaccccgacaccgtgccccctctcccctggcgtgatgcccgcctcccacccccttctccgcaccgcacggatctagcgcgggaactgctcagccacggctccgcacaccctcccttcccatgatacggagctgtcctatcctgctcgcgaggcaacgaaagggtacgtgatcctctgtctacatggaaggtgaggcagatcggggggagagtggctcgtggcagtcgcctcgatggcgtccttcgcgccgtccggcgaggtgtcgtccaagcacggcgtcgtcggctacgggatcgtgggtgggcccaacggcaacgccgtcgcgcccgctgccaagtccaccgtcgtcgagaccaccatcgagagggttatcttcgatttttggttcctggcgctcctccccgccgctcgggaaccactccaccgctgagaccgtcgtaacgatcggctccgttgtggcccgcctgtgaccccgtatccgcttgcgctcagctagggttcagatctaaaaatggctgatgacggtgcgaggaggggaatgcccgctgaaggctgaagctgcccccacgggctacagtaggtgccatcgctcgccacaccgaacaccccactgccctccagaccgtgctccagggccctacggcgataggaggccactgaggatggatcagtgcggtactgctgccttccggaggacgccgagcgccggagagggggctcttctattggacttggagcaagcccacggcaacaacgccggaagcaaaatggcctcttctctagaaggacatgagttcgatccaccgtaaggaggcgtgcccgccaggctccatcttcggatctgatcgcccaccaagtgggttgagttcgataaatgaagtcagcaaggaatacttcttaaaaactgtaagtaatattgttggtgataaattgcttaagcaagctgcttcacaatatcaaatgcaggcacaacgaagccctcagacaaacccaagcaactattctttatcaggtcaagtttctggtcagcagactgctcccagtggttctgtgacaggagatgaacagaagggatatccatgggcgcacaccatccctatgagacaagctattgccagcactcgaccacctcaatttcggccttcctcgtctggccaaatgcggagtaatacggtacaaacaatgcagcatcacgtgcagcgaccacaaacatcttcaccagtgtttggggcaaatagtattcatgcacgtccatttctgcggccagttggaggtccagctgcaccatttagaccacaaatggcagattccaatccaagagcacacttgattcagggagctgtgaccacaatatctaggagtgtgccaaaacgatccatagtgtctggaaatgcgccagtcaatcaagccttgggatcttcaaaagtcagtgctggcatggaaagccagtcacaacaattgagtgcgcctaagcctttagctgcaacaagcttaagtcagactcaatctcatggcattcaagaagagcctaaaattcaggggaagaaacaactattattcgagagtttgcctgcaaccgatctaaagtattggtctctagagaggaagctctgccaaccattattaataactgagaagatgttcgcgtacagggagacggtgttggaggaggcacatcagggcatggagctacatgagcactgccgccatatagttgacaacgatgaccaacactgtagattccattctctgtgtgtacaccaaggtatcggtgtctcgtctcggaccatgccctttcccttcccttccttctccgcacacgcagaaccggctgattctctttcttttgctttcctcctcttggcctacgttgatctagcgatgcgcttttcacggttactgcgaccgtgatgggcatctaggtgctcaaaccatcagttgggctgaggaacactgagcagcaacaacaatatcgtaaggagagtgcatatgttggacaaatggatgtggacgatgacggagccgagagaggtcattcgaaggcaatgccggaggtgacgacaagggtcataaatagagaagaggttttgctgcaaggaacaagccgcctgttgagggacgtacacaatttgtttgactgaatgacgcaaaatgtgacattgctctgatgttctcggcttctaggtgctcgaa

SEQ ID NO: 9340 - DNA, 2386 bp, Zea Mays
cctgacgttctgcctcccacagtcccacccgacatcctcgcccagaacgcgtcgctaatctcgcgatcgcgcctcggccgttccgcgcctgcctgccgccgcccgcgattgtagctcaccccgacaccgtgccccctctcccctggcgtgatgcccgcctcccacccccttctccgcaccgcacggatctagcgcgggaactgctcagccacggctccgcacaccctcccttcccatgatacggagctgtcctatcctgctcgcgaggcaacgaaagggtacgtgatcctctgtctacatggaaggtgaggcagatcggggggagagtggctcgtggcagtcgcctcgatggcgtccttcgcgccgtccggcgaggtgtcgtccaagcacggcgtcgtcggctacgggatcgtgggtgggcccaacggcaacgccgtcgcgcccgctgccaagtccaccgtcgtcgagaccaccatcgagagggttatcttcgatttttggttcctggcgctcctccccgccgctcgggaaccactccaccgctgagaccgtcgtaacgatcggctccgttgtggcccgcctgtgaccccgtatccgcttgcgctcagctagggttcagatctaaaaatggctgatgacggtgcgaggaggggaatgcccgctgaaggctgaagctgcccccacgggctacagtaggtgccatcgctcgccacaccgaacaccccactgccctccagaccgtgctccagggccctacggcgataggaggccactgaggatggatcagtgcggtactgctgccttccggaggacgccgagcgccggagagggggctcttctattggacttggagcaagcccacggcaacaacgccggaagcaaaatggcctcttctctagaaggacatgagttcgatccaccgtaaggaggcgtgcccgccaggctccatcttcggatctgatcgcccaccaagtgggttgagttcgataaatgaagtcagcaaggaatacttcttaaaaactgtaagtaatattgttggtgataaattgcttaagcaagctgcttcacaatatcaaatgcaggcacaacgaagccctcagacaaacccaagcaactattctttatcaggtcaagtttctggtcagcagactgctcccagtggttctgtgacaggagatgaacagaagggatatccatgggcgcacaccatccctatgagacaagctattgccagcactcgaccacctcaatttcggccttcctcgtctggccaaatgcggagtaatacggtacaaacaatgcagcatcacgtgcagcgaccacaaacatcttcaccagtgtttggggcaaatagtattcatgcacgtccatttctgcggccagttggaggtccagctgcaccatttagaccacaaatggcagattccaatccaagagcacacttgattcagggagctgtgaccacaatatctaggagtgtgccaaaacgatccatagtgtctggaaatgcgccagtcaatcaagccttgggatcttcaaaagtcagtgctggcatggaaagccagtcacaacaattgagtgcgcctaagcctttagctgcaacaagcttaagtcagactcaatctcatggcattcaagaagagcctaaaattcaggggaagaaacaactattattcgagagtttgcctgcaaccgatctaaagtattggtctctagagaggaagctctgccaaccattattaataactgagaagatgttcgcgtacagggagacggtgttggaggaggcacatcagggcatggagctacatgagcactgccgccatatagttgacaacgatgaccaacactgtagattccattctctgtgtgtacaccaagcgatgcgcttttcacggttactgcgaccgtgatgggcatctaggtgctcaaaccatcagttgggctgaggaacactgagcagcaacaacaatatcgtaaggagagtgcatatgttggacaaatggtatgccatatcttcagttctcttatgatgcttcagcgctgcatcttcagttttctcggctaaaaagagatcatagtcaatagtatacctatgtgtgaaatactgtcaaacttggtatatggacctcagaaagtataggaaagcgctatgctatttgcatgtttgctgggagaaagaaaagatagatgaaggatgtggacgatgacggagccgagagaggtcattcgaaggcaatgccggaggtgacgacaagggtcataaatagagaagaggttttgctgcaaggaacaagccgcctgttgagggacgtacacaatttgtttgactgaatgacgcaaaatgtgacattgctctgatgttctcggcttctaggtgctcgaa

SEQ ID NO: 9341 - DNA, 2882 bp, Zea Mays
cctgacgttctgcctcccacagtcccacccgacatcctcgcccagaacgcgtcgctaatctcgcgatcgcgcctcggccgttccgcgcctgcctgccgccgcccgcgattgtagctcaccccgacaccgtgccccctctcccctggcgtgatgcccgcctcccacccccttctccgcaccgcacggatctagcgcgggaactgctcagccacggctccgcacaccctcccttcccatgatacggagctgtcctatcctgctcgcgaggcaacgaaagggtacgtgatcctctgtctacatggaaggtgaggcagatcggggggagagtggctcgtggcagtcgcctcgatggcgtccttcgcgccgtccggcgaggtgtcgtccaagcacggcgtcgtcggctacgggatcgtgggtgggcccaacggcaacgccgtcgcgcccgctgccaagtccaccgtcgtcgagaccaccatcgagagggttatcttcgatttttggttcctggcgctcctccccgccgctcgggaaccactccaccgctgagaccgtcgtaacgatcggctccgttgtggcccgcctgtgaccccgtatccgcttgcgctcagctagggttcagatctaaaaatggctgatgacggtgcgaggaggggaatgcccgctgaaggctgaagctgcccccacgggctacagtaggtgccatcgctcgccacaccgaacaccccactgccctccagaccgtgctccagggccctacggcgataggaggccactgaggatggatcagtgcggtactgctgccttccggaggacgccgagcgccggagagggggctcttctattggacttggagcaagcccacggcaacaacgccggaagcaaaatggcctcttctctagaaggacatgagttcgatccaccgtaaggaggcgtgcccgccaggctccatcttcggatctgatcgcccaccaagtgggttgagttcgataaatgaagtcagcaaggaatacttcttaaaaactgtaagtaatattgttggtgataaattgcttaagcaagctgcttcacaatatcaaatgcaggcacaacgaagccctcagacaaacccaagcaactattctttatcaggtcaagtttctggtcagcagactgctcccagtggttctgtgacaggagatgaacagaagggatatccatgggcgcacaccatccctatgagacaagctattgccagcactcgaccacctcaatttcggccttcctcgtctggccaaatgcggagtaatacggcatcacgtgcagcgaccacaaacatcttcaccagtgtttggggcaaatagtattcatgcacgtccatttctgcggccagttggaggtccagctgcaccatttagaccacaaatggcagattccaatccaagagcacacttgattcagggagctgtgaccacaatatctaggagtgtgccaaaacgatccatagtgtctggaaatgcgccagtcaatcaagccttgggatcttcaaaagtcagtgctggcatggaaagccagtcacaacaattgagtgcgcctaagcctttagctgcaacaagcttaagtcagactcaatctcatggcattcaagaagagcctaaaattcaggggaagaaacaactattattcgagagtttgcctgcaaccgatctaaagtattggtctctagagaggaagctctgccaaccattattaataactgagaagatgttcgcgtacagggagacggtgttggaggaggcacatcagggcatggagctacatgagcactgccgccatatagttgacaacgatgaccaacactgtagattccattctctgtgtgtacaccaagcgatgcgcttttcacggttactgcgaccgtgatgggcatctaggtgctcaaaccatcagttgggctgaggaacactgagcagcaacaacaatatcgtaaggagagtgcatatgttggacaaatggtatgccatatcttcagttctcttatgatgcttcagcgctgcatcttcagttttctcggctaaaaagagatcatagtcaatagtatacctatgtgtgaaatactgtcaaacttggtatatggacctcagaaagtataggaaagcgctatgctatttgcatgtttgctgggagaaagaaaagatagatgaagttttgtgaacaaccctaacttatgtggtcctggcaccacaaaaccttgtcctgatgctcctcccttttctccacctcctccatacaaccctacaaccccgatgcaatcaccaggtgatttattcagattgtccagtgaaatccttgagttcaataggacctttccttccttactctttcatctaaatgacatcctaattgggaaaatgtatacttccaaaacaagcataatgctgtcaaggctggagagcggtaaggaagaactgcacgttttcctgaaaattaagttgaaaataatttgtaatcaggagctagagcgttacatggtactatgattctgtgctgctattagtctgtggcttagcggtatgtgtgttgtactgctgttaatttgctatactggaatactggaatacaataggaagctactatctgtacctcgtgggattcaggaatgcagaacaagtcaataactaccttgtccttttggttttccctaccctacattagtacgagagtgattaagggtatggaacatatggctttgccgttgacatcttttattttggcggagtggctgctggcgcagccttgctatttgctgttcctgctatcagttttgcctattggcagcacaggaaaccacaagagcattttctcaatgtatctgacttcaaagttagtctttgattattatcttt

SEQ ID NO: 9342 - DNA, 3556 bp, Zea Mays
cctgacgttctgcctcccacagtcccacccgacatcctcgcccagaacgcgtcgctaatctcgcgatcgcgcctcggccgttccgcgcctgcctgccgccgcccgcgattgtagctcaccccgacaccgtgccccctctcccctggcgtgatgcccgcctcccacccccttctccgcaccgcacggatctagcgcgggaactgctcagccacggctccgcacaccctcccttcccatgatacggagctgtcctatcctgctcgcgaggcaacgaaagggtacgtgatcctctgtctacatggaaggtgaggcagatcggggggagagtggctcgtggcagtcgcctcgatggcgtccttcgcgccgtccggcgaggtgtcgtccaagcacggcgtcgtcggctacgggatcgtgggtgggcccaacggcaacgccgtcgcgcccgctgccaagtccaccgtcgtcgagaccaccatcgagagggttatcttcgatttttggttcctggcgctcctccccgccgctcgggaaccactccaccgctgagaccgtcgtaacgatcggctccgttgtggcccgcctgtgaccccgtatccgcttgcgctcagctagggttcagatctaaaaatggctgatgacggtgcgaggaggggaatgcccgctgaaggctgaagctgcccccacgggctacagtaggtgccatcgctcgccacaccgaacaccccactgccctccagaccgtgctccagggccctacggcgataggaggccactgaggatggatcagtgcggtactgctgccttccggaggacgccgagcgccggagagggggctcttctattggacttggagcaagcccacggcaacaacgccggaagcaaaatggcctcttctctagaaggacatgagttcgatccaccgtaaggaggcgtgcccgccaggctccatcttcggatctgatcgcccaccaagtgggttgagttcggatgacgagagtttgcctgcaactgatctaaaggttagagcgagcggcatgtgatgcggataaatgaagtcagcaaggaatacttcttaaaaactgtaagtaatattgttggtgataaattgcttaagcaagctgcttcacaatatcaaatgcaggtaaataatatttccacttcattgtgttatatgtaaacataacgtgtcttgccaccatagctttatatttttggtgtgatgcaatcttattagtcattcttaccagcactttttgttttgttttgtgggttatttactcatgtttgctcaggcacaacgaagccctcagacaaacccaagcaactattctttatcaggtcaagtttctggtcagcagactgctcccagtggttctgtgacaggagatgaacagaagggatatccatgggcgcacaccatccctatgagacaagctattgccagcactcgaccacctcaatttcggccttcctcgtctggccaaatgcggagtaatacggcatcacgtgcagcgaccacaaacatcttcaccagtgtttggggcaaatagtattcatgcacgtccatttctgcggccagttggaggtccagctgcaccatttagaccacaaatggcagattccaatccaagagcacacttgattcagggagctgtgaccacaatatctaggagtgtgccaaaacgatccatagtgtctggaaatgcgccagtcaatcaagccttgggatcttcaaaagtcagtgctggcatggaaagccagtcacaacaattgagtgcgcctaagcctttagctgcaacaagcttaagtcagactcaatctcatggcattcaagaagagcctaaaattcaggtatgtattaatttgctattgtgttgctatgttttcttgtacttttagttgcacataaaaatcatttcggacactactgcctgaagttttaatttgtttgataatttgcattatctttcttattaagttatatgaaaccctgaaatttgtttaatggccaatttgatgctgccctatttgaccaccctcaggggaagaaacaactattattcgagagtttgcctgcaaccgatctaaaggttagagcgagcggcatgtgatgcgggtatgtacatagttgttccaaaattcatgtgtttgatgctggattgcctgtagctagctgttcatagtagggattaacgctgaaaaaattgggggaaagcaaagtacactggtgacctcaagttccatcgaatcaatatggcacagcagttagactatttgcttatcttagacctcaaattccatacgttcgacatctatgaatagaaaattttgacactatatctttgaacaattgatctctcaggaatatatgaggtcttggagttgagggatggaggatctgattattttggcaagggtgtttatcttagacctcaaagctcaatctagcatgctcttcgctctgttttactttccatgattcgttgagtatctatgcagtttctgcacgattactatgaattacgaactgaacttaaatcaaatacttcagtattggtctctagagaggaagctctgccaaccattattaataactgagaagggagacggtgttggaggaggcacatcagggcatggagctacatgagcactgccgccatatagttgacaacgatgaccaacactgtagattccattctctgtgtgtacaccaagcgatgcgcttttcacgaatatttgcgtctttaggttactgcgaccgtgatgggcatctaggtgctcaaaccatcagttgggctgaggaacactgagcagcaacaacaatatcgtaaggagagtgcatatgttggacaaatgttttgtgaacaaccctaacttatgtggtcctggcaccacaaaaccttgtcctgatgctcctcccttttctccacctcctccatacaaccctacaaccccgatgcaatcaccaggtgatttattcagattgtccagtgaaatccttgagttcaataggacctttccttccttactctttcatctaaatgacatcctaattgggaaaatgtatacttccaaaacaagcataatgctgtcaaggctggagagcggtaaggaagaactgcacgttttcctgaaaattaagttgaaaataatttgtaatcaggagctagagcgttacatggtactatgattctgtgctgctattagtctgtggcttagcggtatgtgtgttgtactgctgttaatttgctatactggaatactggaatacaataggaagctactatctgtacctcgtgggattcaggaatgcagaacaagtcaataactaccttgtccttttggttttccctaccctacattagtacgagagtgattaagggtatggaacatatggctttgccgttgacatcttttattttggcggagtggctgctggcgcagccttgctatttgctgttcctgctatcagttttgcctattggcagcacaggaaaccacaagagcattttctcaatgtatctgacttcaaagttagtctttgattattatcttt

SEQ ID NO: 9343 - DNA, 3004 bp, Zea Mays
cctgacgttctgcctcccacagtcccacccgacatcctcgcccagaacgcgtcgctaatctcgcgatcgcgcctcggccgttccgcgcctgcctgccgccgcccgcgattgtagctcaccccgacaccgtgccccctctcccctggcgtgatgcccgcctcccacccccttctccgcaccgcacggatctagcgcgggaactgctcagccacggctccgcacaccctcccttcccatgatacggagctgtcctatcctgctcgcgaggcaacgaaagggtacgtgatcctctgtctacatggaaggtgaggcagatcggggggagagtggctcgtggcagtcgcctcgatggcgtccttcgcgccgtccggcgaggtgtcgtccaagcacggcgtcgtcggctacgggatcgtgggtgggcccaacggcaacgccgtcgcgcccgctgccaagtccaccgtcgtcgagaccaccatcgagaggtttgcatatgcttctagtgtgccacgattgctacttctgcagataaatgaagtcagcaaggaatacttcttaaaaactgtaagtaatattgttggtgataaattgcttaagcaagctgcttcacaatatcaaatgcaggcacaacgaagccctcagacaaacccaagcaactattctttatcaggtcaagtttctggtcagcagactgctcccagtggttctgtgacaggagatgaacagaagggatatccatgggcgcacaccatccctatgagacaagctattgccagcactcgaccacctcaatttcggccttcctcgtctggccaaatgcggagtaatacggtacaaacaatgcagcatcacgtgcagcgaccacaaacatcttcaccagtgtttggggcaaatagtattcatgcacgtccatttctgcggccagttggaggtccagctgcaccatttagaccacaaatggcagattccaatccaagagcacacttgattcagggagctgtgaccacaatatctaggagtgtgccaaaacgatccatagtgtctggaaatgcgccagtcaatcaagccttgggatcttcaaaagtcagtgctggcatggaaagccagtcacaacaattgagtgcgcctaagcctttagctgcaacaagcttaagtcagactcaatctcatggcattcaagaagagcctaaaattcaggggaagaaacaactattattcgagagtttgcctgcaaccgatctaaaggttagagcgagcggcatgtgatgcggctgttcatagtagggattaacgctgaaaaaattgggggaaagcaaagtacactggtgacctcaagttccatcgaatcaatatggcacagcagttagactatttgcttatcttagacctcaaattccatacgttcgacatctatgaatagaaaattttgacactatatctttgaacaattgatctctcaggaatatatgaggtcttggagttgagggatggaggatctgattattttggcaagggtgtttatcttagacctcaaagctcaatctagcatgctcttcgctctgttttactttccatgattcgttgagtatctatgcagtttctgcacgattactatgagtacgtgctttcatatattgtttactcgatgacttgaatagtttacaacgtatgattattgcttaggaccctgcactactaaatcaggggactggcttgagtcagaaaaacttaggaaccaagtttgctctctaagttactgacttcattttctactgtttatagattacgaactgaacttaaatcaaatacttcagtattggtctctagagaggaagctctgccaaccattattaataactgagaagatgttcgcgtacagggagacggtgttggaggaggcacatcagggcatggagctacatgagcactgccgccatatagttgacaacgatgaccaacactgtagattccattctctgtgtgtacaccaagcgatgcgcttttcacggttactgcgaccgtgatgggcatctaggtgctcaaaccatcagttgggctgaggaacactgagcagcaacaacaatatcgtaaggagagtgcatatgttggacaaatggtatgccatatcttcagttctcttatgatgcttcagcgctgcatcttcagttttctcggctaaaaagagatcatagtcaatagtatacctatgtgtgaaatactgtcaaacttggtatatggacctcagaaagtataggaaagcgctatgctatttgcatgtttgctgggagaaagaaaagatagatgaagttttgtgaacaaccctaacttatgtggtcctggcaccacaaaaccttgtcctgatgctcctcccttttctccacctcctccatacaaccctacaaccccgatgcaatcaccaggtgatttattcagattgtccagtgaaatccttgagttcaataggacctttccttccttactctttcatctaaatgacatcctaattgggaaaatgtatacttccaaaacaagcataatgctgtcaaggctggagagcggtaaggaagaactgcacgttttcctgaaaattaagttgaaaataatttgtaatcaggagctagagcgttacatggtactatgattctgtgctgctattagtctgtggcttagcggtatgtgtgttgtactgctgttaatttgctatactggaatactggaatacaataggaagctactatctgtacctcgtgggattcaggaatgcagaacaagtcaataactaccttgtccttttggttttccctaccctacattagtacgagagtgattaagggtatggaacatatggctttgccgttgacatcttttattttggcggagtggctgctggcgcagccttgctatttgctgttcctgctatcagttttgcctattggcagcacaggaaaccacaagagcattttctcaatgtatctgacttcaaagttagtctttgattattatcttt

SEQ ID NO: 9344 - DNA, 1619 bp, Zea Mays
cctgacgttctgcctcccacagtcccacccgacatcctcgcccagaacgcgtcgctaatctcgcgatcgcgcctcggccgttccgcgcctgcctgccgccgcccgcgattgtagctcaccccgacaccgtgccccctctcccctggcgtgatgcccgcctcccacccccttctccgcaccgcacggatctagcgcgggaactgctcagccacggctccgcacaccctcccttcccatgatacggagctgtcctatcctgctcgcgaggcaacgaaagggtacgtgatcctctgtctacatggaaggtgaggcagatcggggggagagtggctcgtggcagtcgcctcgatggcgtccttcgcgccgtccggcgaggtgtcgtccaagcacggcgtcgtcggctacgggatcgtgggtgggcccaacggcaacgccgtcgcgcccgctgccaagtccaccgtcgtcgagaccaccatcgagaggtttgcatatgcttctagtgtgccacgattgctacttctgcagataaatgaagtcagcaaggaatacttcttaaaaactgcacaacgaagccctcagacaaacccaagcaactattctttatcaggtcaagtttctggtcagcagactgctcccagtggttctgtgacaggagatgaacagaagggatatccatgggcgcacaccatccctatgagacaagctattgccagcactcgaccacctcaatttcggccttcctcgtctggccaaatgcggagtaatacggcatcacgtgcagcgaccacaaacatcttcaccagtgtttggggcaaatagtattcatgcacgtccatttctgcggccagttggaggtccagctgcaccatttagaccacaaatggcagattccaatccaagagcacacttgattcagggagctgtgaccacaatatctaggagtgtgccaaaacgatccatagtgtctggaaatgcgccagtcaatcaagccttgggatcttcaaaagtcagtgctggcatggaaagccagtcacaacaattgagtgcgcctaagcctttagctgcaacaagcttaagtcagactcaatctcatggcattcaagaagagcctaaaattcaggggaagaaacaactattattcgagagtttgcctgcaaccgatctaaagtattggtctctagagaggaagctctgccaaccattattaataactgagaagatgttcgcgtacagggagacggtgttggaggaggcacatcagggcatggagctacatgagcactgccgccatatagttgacaacgatgaccaacactgtagattccattctctgtgtgtacaccaagttgggctgaggaacactgagcagcaacaacaatatcgtaaggagagtgcatatgttggacaaatggtatgccatatcttcagttctcttatgatgcttcagcgctgcatcttcagttttctcggctaaaaagagatcatagtcaatagtatacctatgtgtgaaatactgtcaaacttggtatatggacctcagaaagtataggaaagcgctatgctatttgcatgtttgctgggagaaagaaaagatagatgaaggtaattatacaatttct

SEQ ID NO: 9345 - DNA, 2043 bp, Zea Mays
cctgacgttctgcctcccacagtcccacccgacatcctcgcccagaacgcgtcgctaatctcgcgatcgcgcctcggccgttccgcgcctgcctgccgccgcccgcgattgtagctcaccccgacaccgtgccccctctcccctggcgtgatgcccgcctcccacccccttctccgcaccgcacggatctagcgcgggaactgctcagccacggctccgcacaccctcccttcccatgatacggagctgtcctatcctgctcgcgaggcaacgaaagggtacgtgatcctctgtctacatggaaggtgaggcagatcggggggagagtggctcgtggcagtcgcctcgatggcgtccttcgcgccgtccggcgaggtgtcgtccaagcacggcgtcgtcggctacgggatcgtgggtgggcccaacggcaacgccgtcgcgcccgctgccaagtccaccgtcgtcgagaccaccatcgagaggtttgcatatgcttctagtgtgccacgattgctacttctgcagataaatgaagtcagcaaggaatacttcttaaaaactgtaagtaatattgttggtgataaattgcttaagcaagctgcttcacaatatcaaatgcaggcacaacgaagccctcagacaaacccaagcaactattctttatcaggtcaagtttctggtcagcagactgctcccagtggttctgtgacaggagatgaacagaagggatatccatgggcgcacaccatccctatgagacaagctattgccagcactcgaccacctcaatttcggccttcctcgtctggccaaatgcggagtaatacggtacaaacaatgcagcatcacgtgcagcgaccacaaacatcttcaccagtgtttggggcaaatagtattcatgcacgtccatttctgcggccagttggaggtccagctgcaccatttagaccacaaatggcagattccaatccaagagcacacttgattcagggagctgtgaccacaatatctaggagtgtgccaaaacgatccatagtgtctggaaatgcgccagtcaatcaagccttgggatcttcaaaagtcagtgctggcatggaaagccagtcacaacaattgagtgcgcctaagcctttagctgcaacaagcttaagtcagactcaatctcatggcattcaagaagagcctaaaattcaggggaagaaacaactattattcgagagtttgcctgcaaccgatctaaaggttagagcgagcggcatgtgatgcggtagggattaacgctgaaaaaattgggggaaagcaaagtacactggtgacctcaagttccatcgaatcaatatggcacagcagttagactatttgcttatcttagacctcaaattccatacgttcgacatctatgaatagaaaattttgacactatatctttgaacaattgatctctcaggaatatatgaggtcttggagttgagggatggaggatctgattattttggcaaggattacgaactgaacttaaatcaaatacttcagtattggtctctagagaggaagctctgccaaccattattaataactgagaagatgttcgcgtacagggagacggtgttggaggaggcacatcagggcatggagctacatgagcactgccgccatatagttgacaacgatgaccaacactgtagattccattctctgtgtgtacaccaagcgatgcgcttttcacggttactgcgaccgtgatgggcatctaggtgctcaaaccatcagttgggctgaggaacactgagcagcaacaacaatatcgtaaggagagtgcatatgttggacaaatggtatgccatatcttcagttctcttatgatgcttcagcgctgcatcttcagttttctcggctaaaaagagatcatagtcaatagtatacctatgtgtgaaatactgtcaaacttggtatatggacctcagaaagtataggaaagcgctatgctatttgcatgtttgctgggagaaagaaaagatagatgaaggtaattatacaatttct

SEQ ID NO: 9346 - DNA, 2140 bp, Zea Mays
cctgacgttctgcctcccacagtcccacccgacatcctcgcccagaacgcgtcgctaatctcgcgatcgcgcctcggccgttccgcgcctgcctgccgccgcccgcgattgtagctcaccccgacaccgtgccccctctcccctggcgtgatgcccgcctcccacccccttctccgcaccgcacggatctagcgcgggaactgctcagccacggctccgcacaccctcccttcccatgatacggagctgtcctatcctgctcgcgaggcaacgaaagggtacgtgatcctctgtctacatggaaggtgaggcagatcggggggagagtggctcgtggcagtcgcctcgatggcgtccttcgcgccgtccggcgaggtgtcgtccaagcacggcgtcgtcggctacgggatcgtgggtgggcccaacggcaacgccgtcgcgcccgctgccaagtccaccgtcgtcgagaccaccatcgagagggttatcttcgatttttggttcctggcgctcctccccgccgctcgggaaccactccaccgctgagaccgtcgtaacgatcggctccgttgtggcccgcctgtgaccccgtatccgcttgcgctcagctagggttcagatctaaaaatggctgatgacggtgcgaggaggggaatgcccgctgaaggctgaagctgcccccacgggctacagtaggtgccatcgctcgccacaccgaacaccccactgccctccagaccgtgctccagggccctacggcgataggaggccactgaggatggatcagtgcggtactgctgccttccggaggacgccgagcgccggagagggggctcttctattggacttggagcaagcccacggcaacaacgccggaagcaaaatggcctcttctctagaaggacatgagttcgatccaccgtaaggaggcgtgcccgccaggctccatcttcggatctgatcgcccaccaagtgggttgagttcgataaatgaagtcagcaaggaatacttcttaaaaactgtaagtaatattgttggtgataaattgcttaagcaagctgcttcacaatatcaaatgcaggcacaacgaagccctcagacaaacccaagcaactattctttatcaggtcaagtttctggtcagcagactgctcccagtggttctgtgacaggagatgaacagaagggatatccatgggcgcacaccatccctatgagacaagctattgccagcactcgaccacctcaatttcggccttcctcgtctggccaaatgcggagtaatacggcatcacgtgcagcgaccacaaacatcttcaccagtgtttggggcaaatagtattcatgcacgtccatttctgcggccagttggaggtccagctgcaccatttagaccacaaatggcagattccaatccaagagcacacttgattcagggagctgtgaccacaatatctaggagtgtgccaaaacgatccatagtgtctggaaatgcgccagtcaatcaagccttgggatcttcaaaagtcagtgctggcatggaaagccagtcacaacaattgagtgcgcctaagcctttagctgcaacaagcttaagtcagactcaatctcatggcattcaagaagagcctaaaattcaggggaagaaacaactattattcgagagtttgcctgcaaccgatctaaagtattggtctctagagaggaagctctgccaaccattattaataactgagaagatgttcgcgtacagggagacggtgttggaggaggcacatcagggcatggagctacatgagcactgccgccatatagttgacaacgatgaccaacactgtagattccattctctgtgtgtacaccaagttgggctgaggaacactgagcagcaacaacaatatcgtaaggagagtgcatatgttggacaaatggtatgccatatcttcagttctcttatgatgcttcagcgctgcatcttcagttttctcggctaaaaagagatcatagtcaatagtatacctatgtgtgaaatactgtcaaacttggtatatggacctcagaaagtataggaaagcgctatgctatttgcatgtttgctgggagaaagaaaagatagatgaaggtaattatacaatttct

SEQ ID NO: 9347 - DNA, 1776 bp, Zea Mays
cctgacgttctgcctcccacagtcccacccgacatcctcgcccagaacgcgtcgctaatctcgcgatcgcgcctcggccgttccgcgcctgcctgccgccgcccgcgattgtagctcaccccgacaccgtgccccctctcccctggcgtgatgcccgcctcccacccccttctccgcaccgcacggatctagcgcgggaactgctcagccacggctccgcacaccctcccttcccatgatacggagctgtcctatcctgctcgcgaggcaacgaaagggtacgtgatcctctgtctacatggaaggtgaggcagatcggggggagagtggctcgtggcagtcgcctcgatggcgtccttcgcgccgtccggcgaggtgtcgtccaagcacggcgtcgtcggctacgggatcgtgggtgggcccaacggcaacgccgtcgcgcccgctgccaagtccaccgtcgtcgagaccaccatcgagaggtttgcatatgcttctagtgtgccacgattgctacttctgcagataaatgaagtcagcaaggaatacttcttaaaaactgtaagtaatattgttggtgataaattgcttaagcaagctgcttcacaatatcaaatgcaggcacaacgaagccctcagacaaacccaagcaactattctttatcaggtcaagtttctggtcagcagactgctcccagtggttctgtgacaggagatgaacagaagggatatccatgggcgcacaccatccctatgagacaagctattgccagcactcgaccacctcaatttcggccttcctcgtctggccaaatgcggagtaatacggcatcacgtgcagcgaccacaaacatcttcaccagtgtttggggcaaatagtattcatgcacgtccatttctgcggccagttggaggtccagctgcaccatttagaccacaaatggcagattccaatccaagagcacacttgattcagggagctgtgaccacaatatctaggagtgtgccaaaacgatccatagtgtctggaaatgcgccagtcaatcaagccttgggatcttcaaaagtcagtgctggcatggaaagccagtcacaacaattgagtgcgcctaagcctttagctgcaacaagcttaagtcagactcaatctcatggcattcaagaagagcctaaaattcaggaatatatgaggtcttggagttgagggatggaggatctgattattttggcaaggattacgaactgaacttaaatcaaatacttcagtattggtctctagagaggaagctctgccaaccattattaataactgagaagatgttcgcgtacagggagacggtgttggaggaggcacatcagggcatggagctacatgagcactgccgccatatagttgacaacgatgaccaacactgtagattccattctctgtgtgtacaccaagcgatgcgcttttcacggttactgcgaccgtgatgggcatctaggtgctcaaaccatcagttgggctgaggaacactgagcagcaacaacaatatcgtaaggagagtgcatatgttggacaaatggtatgccatatcttcagttctcttatgatgcttcagcgctgcatcttcagttttctcggctaaaaagagatcatagtcaatagtatacctatgtgtgaaatactgtcaaacttggtatatggacctcagaaagtataggaaagcgctatgctatttgcatgtttgctgggagaaagaaaagatagatgaaggtaattatacaatttct

SEQ ID NO: 9348 - DNA, 2350 bp, Zea Mays
cctgacgttctgcctcccacagtcccacccgacatcctcgcccagaacgcgtcgctaatctcgcgatcgcgcctcggccgttccgcgcctgcctgccgccgcccgcgattgtagctcaccccgacaccgtgccccctctcccctggcgtgatgcccgcctcccacccccttctccgcaccgcacggatctagcgcgggaactgctcagccacggctccgcacaccctcccttcccatgatacggagctgtcctatcctgctcgcgaggcaacgaaagggtacgtgatcctctgtctacatggaaggtgaggcagatcggggggagagtggctcgtggcagtcgcctcgatggcgtccttcgcgccgtccggcgaggtgtcgtccaagcacggcgtcgtcggctacgggatcgtgggtgggcccaacggcaacgccgtcgcgcccgctgccaagtccaccgtcgtcgagaccaccatcgagagggttatcttcgatttttggttcctggcgctcctccccgccgctcgggaaccactccaccgctgagaccgtcgtaacgatcggctccgttgtggcccgcctgtgaccccgtatccgcttgcgctcagctagggttcagatctaaaaatggctgatgacggtgcgaggaggggaatgcccgctgaaggctgaagctgcccccacgggctacagtaggtgccatcgctcgccacaccgaacaccccactgccctccagaccgtgctccagggccctacggcgataggaggccactgaggatggatcagtgcggtactgctgccttccggaggacgccgagcgccggagagggggctcttctattggacttggagcaagcccacggcaacaacgccggaagcaaaatggcctcttctctagaaggacatgagttcgatccaccgtaaggaggcgtgcccgccaggctccatcttcggatctgatcgcccaccaagtgggttgagttcggatgacgagagtttgcctgcaactgatctaaaggttagagcgagcggcatgtgatgcggataaatgaagtcagcaaggaatacttcttaaaaactgtaagtaatattgttggtgataaattgcttaagcaagctgcttcacaatatcaaatgcaggtaaataatatttccacttcattgtgttatatgtaaacataacgtgtcttgccaccatagctttatatttttggtgtgatgcaatcttattagtcattcttaccagcactttttgttttgttttgtgggttatttactcatgtttgctcaggcacaacgaagccctcagacaaacccaagcaactattctttatcaggtcaagtttctggtcagcagactgctcccagtggttctgtgacaggagatgaacagaagggatatccatgggcgcacaccatccctatgagacaagctattgccagcactcgaccacctcaatttcggccttcctcgtctggccaaatgcggagtaatacggcatcacgtgcagcgaccacaaacatcttcaccagtgtttggggcaaatagtattcatgcacgtccatttctgcggccagttggaggtccagctgcaccatttagaccacaaatggcagattccaatccaagagcacacttgattcagggagctgtgaccacaatatctaggagtgtgccaaaacgatccatagtgtctggaaatgcgccagtcaatcaagccttgggatcttcaaaagtcagtgctggcatggaaagccagtcacaacaattgagtgcgcctaagcctttagctgcaacaagcttaagtcagactcaatctcatggcattcaagaagagcctaaaattcaggggaagaaacaactattattcgagagtttgcctgcaaccgatctaaagtattggtctctagagaggaagctctgccaaccattattaataactgagaagatgttcgcgtacagggagacggtgttggaggaggcacatcagggcatggagctacatgagcactgccgccatatagttgacaacgatgaccaacactgtagattccattctctgtgtgtacaccaagttgggctgaggaacactgagcagcaacaacaatatcgtaaggagagtgcatatgttggacaaatggtatgccatatcttcagttctcttatgatgcttcagcgctgcatcttcagttttctcggctaaaaagagatcatagtcaatagtatacctatgtgtgaaatactgtcaaacttggtatatggacctcagaaagtataggaaagcgctatgctatttgcatgtttgctgggagaaagaaaagatagatgaaggtaattatacaatttct

SEQ ID NO: 9349 - DNA, 2213 bp, Zea Mays
cctgacgttctgcctcccacagtcccacccgacatcctcgcccagaacgcgtcgctaatctcgcgatcgcgcctcggccgttccgcgcctgcctgccgccgcccgcgattgtagctcaccccgacaccgtgccccctctcccctggcgtgatgcccgcctcccacccccttctccgcaccgcacggatctagcgcgggaactgctcagccacggctccgcacaccctcccttcccatgatacggagctgtcctatcctgctcgcgaggcaacgaaagggtacgtgatcctctgtctacatggaaggtgaggcagatcggggggagagtggctcgtggcagtcgcctcgatggcgtccttcgcgccgtccggcgaggtgtcgtccaagcacggcgtcgtcggctacgggatcgtgggtgggcccaacggcaacgccgtcgcgcccgctgccaagtccaccgtcgtcgagaccaccatcgagagggttatcttcgatttttggttcctggcgctcctccccgccgctcgggaaccactccaccgctgagaccgtcgtaacgatcggctccgttgtggcccgcctgtgaccccgtatccgcttgcgctcagctagggttcagatctaaaaatggctgatgacggtgcgaggaggggaatgcccgctgaaggctgaagctgcccccacgggctacagtaggtgccatcgctcgccacaccgaacaccccactgccctccagaccgtgctccagggccctacggcgataggaggccactgaggatggatcagtgcggtactgctgccttccggaggacgccgagcgccggagagggggctcttctattggacttggagcaagcccacggcaacaacgccggaagcaaaatggcctcttctctagaaggacatgagttcgatccaccgtaaggaggcgtgcccgccaggctccatcttcggatctgatcgcccaccaagtgggttgagttcggatgacgagagtttgcctgcaactgatctaaaggttagagcgagcggcatgtgatgcggataaatgaagtcagcaaggaatacttcttaaaaactgtaagtaatattgttggtgataaattgcttaagcaagctgcttcacaatatcaaatgcaggcacaacgaagccctcagacaaacccaagcaactattctttatcaggtcaagtttctggtcagcagactgctcccagtggttctgtgacaggagatgaacagaagggatatccatgggcgcacaccatccctatgagacaagctattgccagcactcgaccacctcaatttcggccttcctcgtctggccaaatgcggagtaatacggtacaaacaatgcagcatcacgtgcagcgaccacaaacatcttcaccagtgtttggggcaaatagtattcatgcacgtccatttctgcggccagttggaggtccagctgcaccatttagaccacaaatggcagattccaatccaagagcacacttgattcagggagctgtgaccacaatatctaggagtgtgccaaaacgatccatagtgtctggaaatgcgccagtcaatcaagccttgggatcttcaaaagtcagtgctggcatggaaagccagtcacaacaattgagtgcgcctaagcctttagctgcaacaagcttaagtcagactcaatctcatggcattcaagaagagcctaaaattcaggggaagaaacaactattattcgagagtttgcctgcaaccgatctaaagtattggtctctagagaggaagctctgccaaccattattaataactgagaagatgttcgcgtacagggagacggtgttggaggaggcacatcagggcatggagctacatgagcactgccgccatatagttgacaacgatgaccaacactgtagattccattctctgtgtgtacaccaagttgggctgaggaacactgagcagcaacaacaatatcgtaaggagagtgcatatgttggacaaatggtatgccatatcttcagttctcttatgatgcttcagcgctgcatcttcagttttctcggctaaaaagagatcatagtcaatagtatacctatgtgtgaaatactgtcaaacttggtatatggacctcagaaagtataggaaagcgctatgctatttgcatgtttgctgggagaaagaaaagatagatgaaggtaattatacaatttct

SEQ ID NO: 9350 - DNA, 2325 bp, Zea Mays
cctgacgttctgcctcccacagtcccacccgacatcctcgcccagaacgcgtcgctaatctcgcgatcgcgcctcggccgttccgcgcctgcctgccgccgcccgcgattgtagctcaccccgacaccgtgccccctctcccctggcgtgatgcccgcctcccacccccttctccgcaccgcacggatctagcgcgggaactgctcagccacggctccgcacaccctcccttcccatgatacggagctgtcctatcctgctcgcgaggcaacgaaagggtacgtgatcctctgtctacatggaaggtgaggcagatcggggggagagtggctcgtggcagtcgcctcgatggcgtccttcgcgccgtccggcgaggtgtcgtccaagcacggcgtcgtcggctacgggatcgtgggtgggcccaacggcaacgccgtcgcgcccgctgccaagtccaccgtcgtcgagaccaccatcgagagggttatcttcgatttttggttcctggcgctcctccccgccgctcgggaaccactccaccgctgagaccgtcgtaacgatcggctccgttgtggcccgcctgtgaccccgtatccgcttgcgctcagctagggttcagatctaaaaatggctgatgacggtgcgaggaggggaatgcccgctgaaggctgaagctgcccccacgggctacagtaggtgccatcgctcgccacaccgaacaccccactgccctccagaccgtgctccagggccctacggcgataggaggccactgaggatggatcagtgcggtactgctgccttccggaggacgccgagcgccggagagggggctcttctattggacttggagcaagcccacggcaacaacgccggaagcaaaatggcctcttctctagaaggacatgagttcgatccaccgtaaggaggcgtgcccgccaggctccatcttcggatctgatcgcccaccaagtgggttgagttcgataaatgaagtcagcaaggaatacttcttaaaaactgtaagtaatattgttggtgataaattgcttaagcaagctgcttcacaatatcaaatgcaggcacaacgaagccctcagacaaacccaagcaactattctttatcaggtcaagtttctggtcagcagactgctcccagtggttctgtgacaggagatgaacagaagggatatccatgggcgcacaccatccctatgagacaagctattgccagcactcgaccacctcaatttcggccttcctcgtctggccaaatgcggagtaatacggtacaaacaatgcagcatcacgtgcagcgaccacaaacatcttcaccagtgtttggggcaaatagtattcatgcacgtccatttctgcggccagttggaggtccagctgcaccatttagaccacaaatggcagattccaatccaagagcacacttgattcagggagctgtgaccacaatatctaggagtgtgccaaaacgatccatagtgtctggaaatgcgccagtcaatcaagccttgggatcttcaaaagtcagtgctggcatggaaagccagtcacaacaattgagtgcgcctaagcctttagctgcaacaagcttaagtcagactcaatctcatggcattcaagaagagcctaaaattcaggggaagaaacaactattattcgagagtttgcctgcaaccgatctaaaggttagagcgagcggcatgtgatgcgggaatatatgaggtcttggagttgagggatggaggatctgattattttggcaaggattacgaactgaacttaaatcaaatacttcagtattggtctctagagaggaagctctgccaaccattattaataactgagaagatgttcgcgtacagggagacggtgttggaggaggcacatcagggcatggagctacatgagcactgccgccatatagttgacaacgatgaccaacactgtagattccattctctgtgtgtacaccaagcgatgcgcttttcacggttactgcgaccgtgatgggcatctaggtgctcaaaccatcagttgggctgaggaacactgagcagcaacaacaatatcgtaaggagagtgcatatgttggacaaatggtatgccatatcttcagttctcttatgatgcttcagcgctgcatcttcagttttctcggctaaaaagagatcatagtcaatagtatacctatgtgtgaaatactgtcaaacttggtatatggacctcagaaagtataggaaagcgctatgctatttgcatgtttgctgggagaaagaaaagatagatgaaggtaattatacaatttct

SEQ ID NO: 9351 - DNA, 2007 bp, Zea Mays
cctgacgttctgcctcccacagtcccacccgacatcctcgcccagaacgcgtcgctaatctcgcgatcgcgcctcggccgttccgcgcctgcctgccgccgcccgcgattgtagctcaccccgacaccgtgccccctctcccctggcgtgatgcccgcctcccacccccttctccgcaccgcacggatctagcgcgggaactgctcagccacggctccgcacaccctcccttcccatgatacggagctgtcctatcctgctcgcgaggcaacgaaagggtacgtgatcctctgtctacatggaaggtgaggcagatcggggggagagtggctcgtggcagtcgcctcgatggcgtccttcgcgccgtccggcgaggtgtcgtccaagcacggcgtcgtcggctacgggatcgtgggtgggcccaacggcaacgccgtcgcgcccgctgccaagtccaccgtcgtcgagaccaccatcgagagggttatcttcgatttttggttcctggcgctcctccccgccgctcgggaaccactccaccgctgagaccgtcgtaacgatcggctccgttgtggcccgcctgtgaccccgtatccgcttgcgctcagctagggttcagatctaaaaatggctgatgacggtgcgaggaggggaatgcccgctgaaggctgaagctgcccccacgggctacagtaggtgccatcgctcgccacaccgaacaccccactgccctccagaccgtgctccagggccctacggcgataggaggccactgaggatggatcagtgcggtactgctgccttccggaggacgccgagcgccggagagggggctcttctattggacttggagcaagcccacggcaacaacgccggaagcaaaatggcctcttctctagaaggacatgagttcgatccaccgtaaggaggcgtgcccgccaggctccatcttcggatctgatcgcccaccaagtgggttgagttcggatgacgagagtttgcctgcaactgatctaaaggttagagcgagcggcatgtgatgcggataaatgaagtcagcaaggaatacttcttaaaaactgtaagtaatattgttggtgataaattgcttaagcaagctgcttcacaatatcaaatgcaggtaaataatatttccacttcattgtgttatatgtaaacataacgtgtcttgccaccatagctttatatttttggtgtgatgcaatcttattagtcattcttaccagcactttttgttttgttttgtgggttatttactcatgtttgctcaggcacaacgaagccctcagacaaacccaagcaactattctttatcaggtcaagtttctggtcagcagactgctcccagtggttctgtgacaggagatgaacagaagggatatccatgggcgcacaccatccctatgagacaagctattgccagcactcgaccacctcaatttcggccttcctcgtctggccaaatgcggagtaatacggtacaaacaatgcagcatcacgtgcagcgaccacaaacatcttcaccagtgtttggggcaaatagtattcatgcacgtccatttctgcggccagttggaggtccagctgcaccatttagaccacaaatggcagattccaatccaagagcacacttgattcagggagctgtgaccacaatatctaggagtgtgccaaaacgatccatagtgtctggaaatgcgccagtcaatcaagccttgggatcttcaaaagtcagtgctggcatggaaagccagtcacaacaattgagtgcgcctaagcctttagctgcaacaagcttaagtcagactcaatctcatggcattcaagaagagcctaaaattcaggggaagaaacaactattattcgagagtttgcctgcaaccgatctaaaggttagagcgagcggcatgtgatgcgggaatatatgaggtcttggagttgagggatggaggatctgattattttggcaaggattacgaactgaac

SEQ ID NO: 9352 - DNA, 1865 bp, Zea Mays
cctgacgttctgcctcccacagtcccacccgacatcctcgcccagaacgcgtcgctaatctcgcgatcgcgcctcggccgttccgcgcctgcctgccgccgcccgcgattgtagctcaccccgacaccgtgccccctctcccctggcgtgatgcccgcctcccacccccttctccgcaccgcacggatctagcgcgggaactgctcagccacggctccgcacaccctcccttcccatgatacggagctgtcctatcctgctcgcgaggcaacgaaagggtacgtgatcctctgtctacatggaaggtgaggcagatcggggggagagtggctcgtggcagtcgcctcgatggcgtccttcgcgccgtccggcgaggtgtcgtccaagcacggcgtcgtcggctacgggatcgtgggtgggcccaacggcaacgccgtcgcgcccgctgccaagtccaccgtcgtcgagaccaccatcgagagggttatcttcgatttttggttcctggcgctcctccccgccgctcgggaaccactccaccgctgagaccgtcgtaacgatcggctccgttgtggcccgcctgtgaccccgtatccgcttgcgctcagctagggttcagatctaaaaatggctgatgacggtgcgaggaggggaatgcccgctgaaggctgaagctgcccccacgggctacagtaggtgccatcgctcgccacaccgaacaccccactgccctccagaccgtgctccagggccctacggcgataggaggccactgaggatggatcagtgcggtactgctgccttccggaggacgccgagcgccggagagggggctcttctattggacttggagcaagcccacggcaacaacgccggaagcaaaatggcctcttctctagaaggacatgagttcgatccaccgtaaggaggcgtgcccgccaggctccatcttcggatctgatcgcccaccaagtgggttgagttcggatgacgagagtttgcctgcaactgatctaaaggttagagcgagcggcatgtgatgcggataaatgaagtcagcaaggaatacttcttaaaaactgtaagtaatattgttggtgataaattgcttaagcaagctgcttcacaatatcaaatgcaggtaaataatatttccacttcattgtgttatatgtaaacataacgtgtcttgccaccatagctttatatttttggtgtgatgcaatcttattagtcattcttaccagcactttttgttttgttttgtgggttatttactcatgtttgctcaggcacaacgaagccctcagacaaacccaagcaactattctttatcaggtcaagtttctggtcagcagactgctcccagtggttctgtgacaggagatgaacagaagggatatccatgggcgcacaccatccctatgagacaagctattgccagcactcgaccacctcaatttcggccttcctcgtctggccaaatgcggagtaatacggcatcacgtgcagcgaccacaaacatcttcaccagtgtttggggcaaatagtattcatgcacgtccatttctgcggccagttggaggtccagctgcaccatttagaccacaaatggcagattccaatccaagagcacacttgattcagggagctgtgaccacaatatctaggagtgtgccaaaacgatccatagtgtctggaaatgcgccagtcaatcaagccttgggatcttcaaaagtcagtgctggcatggaaagccagtcacaacaattgagtgcgcctaagcctttagctgcaacaagcttaagtcagactcaatctcatggcattcaagaagagcctaaaattcagattacgaactgaac

SEQ ID NO: 9353 - DNA, 1235 bp, Zea Mays
cctgacgttctgcctcccacagtcccacccgacatcctcgcccagaacgcgtcgctaatctcgcgatcgcgcctcggccgttccgcgcctgcctgccgccgcccgcgattgtagctcaccccgacaccgtgccccctctcccctggcgtgatgcccgcctcccacccccttctccgcaccgcacggatctagcgcgggaactgctcagccacggctccgcacaccctcccttcccatgatacggagctgtcctatcctgctcgcgaggcaacgaaagggtacgtgatcctctgtctacatggaaggtgaggcagatcggggggagagtggctcgtggcagtcgcctcgatggcgtccttcgcgccgtccggcgaggtgtcgtccaagcacggcgtcgtcggctacgggatcgtgggtgggcccaacggcaacgccgtcgcgcccgctgccaagtccaccgtcgtcgagaccaccatcgagaggtttgcatatgcttctagtgtgccacgattgctacttctgcagataaatgaagtcagcaaggaatacttcttaaaaactgtaagtaatattgttggtgataaattgcttaagcaagctgcttcacaatatcaaatgcaggcacaacgaagccctcagacaaacccaagcaactattctttatcaggtcaagtttctggtcagcagactgctcccagtggttctgtgacaggagatgaacagaagggatatccatgggcgcacaccatccctatgagacaagctattgccagcactcgaccacctcaatttcggccttcctcgtctggccaaatgcggagtaatacggtacaaacaatgcagcatcacgtgcagcgaccacaaacatcttcaccagtgtttggggcaaatagtattcatgcacgtccatttctgcggccagttggaggtccagctgcaccatttagaccacaaatggcagattccaatccaagagcacacttgattcagggagctgtgaccacaatatctaggagtgtgccaaaacgatccatagtgtctggaaatgcgccagtcaatcaagccttgggatcttcaaaagtcagtgctggcatggaaagccagtcacaacaattgagtgcgcctaagcctttagctgcaacaagcttaagtcagactcaatctcatggcattcaagaagagcctaaaattcaggaatatatgaggtcttggagttgagggatggaggatctgat

SEQ ID NO: 9354 - DNA, 1847 bp, Zea Mays
cctgacgttctgcctcccacagtcccacccgacatcctcgcccagaacgcgtcgctaatctcgcgatcgcgcctcggccgttccgcgcctgcctgccgccgcccgcgattgtagctcaccccgacaccgtgccccctctcccctggcgtgatgcccgcctcccacccccttctccgcaccgcacggatctagcgcgggaactgctcagccacggctccgcacaccctcccttcccatgatacggagctgtcctatcctgctcgcgaggcaacgaaagggtacgtgatcctctgtctacatggaaggtgaggcagatcggggggagagtggctcgtggcagtcgcctcgatggcgtccttcgcgccgtccggcgaggtgtcgtccaagcacggcgtcgtcggctacgggatcgtgggtgggcccaacggcaacgccgtcgcgcccgctgccaagtccaccgtcgtcgagaccaccatcgagagggttatcttcgatttttggttcctggcgctcctccccgccgctcgggaaccactccaccgctgagaccgtcgtaacgatcggctccgttgtggcccgcctgtgaccccgtatccgcttgcgctcagctagggttcagatctaaaaatggctgatgacggtgcgaggaggggaatgcccgctgaaggctgaagctgcccccacgggctacagtaggtgccatcgctcgccacaccgaacaccccactgccctccagaccgtgctccagggccctacggcgataggaggccactgaggatggatcagtgcggtactgctgccttccggaggacgccgagcgccggagagggggctcttctattggacttggagcaagcccacggcaacaacgccggaagcaaaatggcctcttctctagaaggacatgagttcgatccaccgtaaggaggcgtgcccgccaggctccatcttcggatctgatcgcccaccaagtgggttgagttcgataaatgaagtcagcaaggaatacttcttaaaaactgtaagtaatattgttggtgataaattgcttaagcaagctgcttcacaatatcaaatgcaggtaaataatatttccacttcattgtgttatatgtaaacataacgtgtcttgccaccatagctttatatttttggtgtgatgcaatcttattagtcattcttaccagcactttttgttttgttttgtgggttatttactcatgtttgctcaggcacaacgaagccctcagacaaacccaagcaactattctttatcaggtcaagtttctggtcagcagactgctcccagtggttctgtgacaggagatgaacagaagggatatccatgggcgcacaccatccctatgagacaagctattgccagcactcgaccacctcaatttcggccttcctcgtctggccaaatgcggagtaatacggtacaaacaatgcagcatcacgtgcagcgaccacaaacatcttcaccagtgtttggggcaaatagtattcatgcacgtccatttctgcggccagttggaggtccagctgcaccatttagaccacaaatggcagattccaatccaagagcacacttgattcagggagctgtgaccacaatatctaggagtgtgccaaaacgatccatagtgtctggaaatgcgccagtcaatcaagccttgggatcttcaaaagtcagtgctggcatggaaagccagtcacaacaattgagtgcgcctaagcctttagctgcaacaagcttaagtcagactcaatctcatggcattcaagaagagcctaaaattcaggaatatatgaggtcttggagttgagggatggaggatctgat

SEQ ID NO: 9355 - DNA, 841 bp, Zea Mays
ctcaaatatcaaatctattaataatgaatggataaaaaaaacgttaagggaacaacatgttttttttgggtcgcttcgttcacagttggacttgcacggatggacccgtcccaccctacttctcctccaccctccgcccagaacccacaacgccgccgcgttcgtctgccactgcctgcccgagccgccgctccccttcctcggtctctcctcgcttcccagtcccagtcctagcccagcgcgccgcggcgctaactggccagctggtagtgatggcaaccgagccgccgccggcagcggagaagaagaaggcgccgctccccaaggtggtcacgctcaataaagccctcaagctggctcggtcttggtgctaaagcggcacctggtgtgaagcgtgtggttcccactgacccagttgagaggaggttgcttgggaaggtgaatgcgcagaagaggaaggccttggaggatgatgatagaaatgctcaggtggcgaatgaggctagcgacgacgatgagcctgaaagcaggaccagtgcctttaacaagaagaggccagtgccttcagttacttctacacctttagggaagaaggctaagtgacaagctatatgcatagactacctgagtgatctgcttgttttgatcacgtttcgtactaactcccagactgatgctattttcataaggcatagtataccttctcatactccagtttgtgattcctgaatttaaagggatagctgtgcttgatattgttaaggctcattgccgattcagaaattcacatactctctgtttaaagctaaatacactgtgatattcatttgattattttttc

SEQ ID NO: 9356 - DNA, 2451 bp, Zea Mays
gcacgttcgcccacagccacagctccacttgtccctgtccatccattcatcattccccgtcactccaccaattcaccacccaaaaccctaaaccccattccgtacctcaacgccgccgccgccgccgccgccgctgcgatgcagtccatggcgctcacctccccctcactcccggaggtcggccccgtttccggccgccgtctccagcgcatccgtgccaccgcggtcggcgtctcgtcggtgtggtacgaggggaacacctgcaacatgcacctgctccgcctcgcggaggccgtccgtgacggcgtccgcgaggccggcatggtcggcttccggtttaacaccgtcggtgtcagcgacgccatttccatgggcacccggggcatgtgctacagcctccagtcccgtgacctcatcgccgacagcatcgagaccgtcatgggagcgcagcactacgacgccaacatttccatacctgggtgcgacaagaacatgccaggtacaataatggcaatgggacggcttaatcgacctagcataatgatatatggtggaactattaagcctggtcactttcagggcaattcctatgatatagtatctgctttccagtgctatggagaatatgttagtggttcaatcactgatgagcaaagaaagaacgtcctccgcaattcatgtccaggagcaggtgcctgtggtggtatgtacacagcaaacactatggcatctgctatcgaaactttgggcatgagtcttccatacagttcttcgacacctgctgaggacccactaaaactagaagagtgccgtcttgctgggaagtatcttttagagttgctaaagatggatttgaagcctaaggacattatcactgagaagtcattgcgaaatgcaatggttattgttatggcacttggtggttcgactaatgctgttctgcatttgattgccattgctcggtccgttggtttgcatttgactcttgatgatttccagaaggtcagtgaccaagttcctttccttgcagacctcaagcccagtggcaaatatgtcatggaggatctacataagattggtgggacacctgcagtcattcattaccttttggagcaaggtcttcttgatggtgattgcatgactgttactggtaaaactctagctgagaatgctaaaatcttccctcctctgtctgaggggcagcaaataattcgaccacttgacaatcctatcaaaccaactggccatattcaaatactttatggaaatcttgcaccggaaggttctgtcgcaaaaataactggcaaagagggactgttcttctcaggtcccgcattagtttttgagggtgaagaatccatgatcacagctatctcagaaaacccagcgaatttcaagggaaaggtagtagtaatccgaggagaaggaccaaaaggagggccagggatgcctgaaatgttgactccaacaagtgcaataatgggtgctggtctcggaaaggagtgcgccctgctgacagatggtagattttcaggaggctcacatggatttgttgtcggccacatatgccctgaagcacaggaaggtggcccaattggccttgtccatagtggtgatgtaatcaccatcgatgtaagtaagagggtaatcgacgttgaccttaccgagcagcagctcgaagaaagacggaggaaatggaccccaccgccatacaagtccacctgtggagctctttggaagtacatcaagcttgtggctccagcgtctagaggatgcgtcactgatgagtaggatgtgttacattctgttaggtatgacaataaattgccggtttctaagagcttagcaatgctgcagaaactgctgaataatcgagtgtaatcggggcccagacatgggtggacaaaatgagtgcatcggagccggatgaacccaacgataaggatttcgagggccggccaccaaagctcggtcttggtgctaaagcggcacctggtgtgaagcgtgtggttcccactgacccagttgagaggaggttgcttgggaaggtgaatgcgcagaagaggaaggccttggaggatgatgatagaaatgctcaggtggcgaatgaggctagcgacgacgatgagcctgaaagcaggaccagtgcctttaacaagaagaggccagtgccttcagttacttctacacctttagggaagaaggctaagtgacaagctatatgcatagactacctgagtgatctgcttgttttgatcacgtttcgtactaactcccagactgatgctattttcataaggcatagtataccttctcatactccagtttgtgattcctgaatttaaagggatagctgtgcttgatattgttaaggctcattgccgattcagaaattcacatactctctgtttaaagctaaatacactgtgatattcatttgattattttttc

SEQ ID NO: 9357 - DNA, 2744 bp, Zea Mays
cctatatacaaaaagatcaccactactgtactacggcaccccttcctcccccgctcccccacctccgctcccgaaaccctcgccgccgccgccgccgccgccgacgccgaaatcctcgtcgcggcggcgatcactgctcccctctatgatagcggcgcgtgagggcggcggagcgcggcctgtcgctccccggtccgcgtgcccggggcggctctgagagcccagagctcgtctcggttccctgccaagcgcagccgagcaccgcgccggcgccgcgtggcagttcaggccgtagtctgggcgctgttctgctctgggtctactggagtgcgtttgggattttttcggttcctactacattcgggggcgctggcgtctctctttcatggggcagccagggatggattctgttccagggaaggagaacaacggcattgcccctaacctcaatggggtcgtgtctccagcgaagcagcagctggaggggaaggaagcgatgcggtatgcaaacatcctccggtcgcgcaataagtttgctgacgcgatcaacctgtacaccattgttctcgagaaggatggcaccaatgtggaggcccttatcgggaaagggatttgcctccaggcgcagaacctaccaagacaggccattgagtgctttacagaagctgtcaaaatcgagccaggaaatgcgtctgctcttacacattgtgggatgatttacaaagatgagggtcacttggttgaagcagctgaggcatatcaaaaagctaggatggctgatccttcctacaaacctgcttcggaatttcttgctattgtgttgactgatcttggaactagcttgaagcttgcgggtaatacagaggaggggattcaaaaatattgtgaagctctggaagtagacaaccactatgcgccggcttactacaaccttggagttgtttattcggagatgatgcaatttgatatggctcttagttgttacgagaaagctgcactggagagaccattgtatgctgaggcctattgcaacatgggagttatctataagaatcggggagatctagatgcagcaattatctgctacgagaggtgcttgaccatttctcccaactttgagattgctaagaataatatggcaatagcactaactgacttgggaacaaaggtaaaaattgaaggtgacatcaatagaggtgtagcatattacaagaaagctctatactacaattggcactatgctgatgccatgtataatcttggcgttgcatatggtgaaatgttgaattttgagatggcaattgtcttttacgagcttgcgctgcacttcaatcctcgctgtgcggaagcatgcaacaatttaggagtcatatacaaagacagggataaccttgacaaagctgttgaatgttatcaaatggcactgtcaattaagccacttttcgctcagtcgctaaataaccttggagttgtctatactgttcaaggtaagatggattctgctgctagcatgattgagaaggctatacatgcaaatcccacatatgctgaagcatataataatctaggtgttctttacagagacgctggtagtattactttagcaattcatgcttacgagagatgccttcagatcgatcctgattcacgaaatgctggccagaaccgtttgcttgcaatgaactatattgacgagggctcagatgacaagctttatgaagctcacagggagtggggaaaacgctttatgaaattgtatccacaatatacaagttgggataactcaaaagttgctgaccgcccattgatcatcggttatttgtctcctgattactttactcattccgtgtcctacttcattgaagctccccttacacaccatgattccacagtttgcaaggtggttgtctactccggtgttgtgaaggcagatgccaagacacttagattcaaggataaggtgttgaaaaagggtgggttgtggagagatatatatggtattgatgaaaagagggttgctagcttggtaagggaggataaagtggacatacttgtggaacttactggtcacacagcaaataataagttagggacaatggcatgccgacctgctcctattcaggttacctggattggctaccccaacacaacaggtttgccaacaatagactaccgaatctcagactcattgactgatccacctatgacaaagcaaaagcatgttgaggagttggtgcgccttcctgaaagctttctttgttatactccttccccagaagctggtcctgtttgtccaacaccagcaatttcaaatggtttcgtcacttttgggagctttaacaatctagcaaagattacaccgaaagtgttgcaagtttgggccagaatattatgttcagtccctaactccaggcttgtggttaagtgcaagccattctgctgtgagaacataaggcagaaatttttggccacactggaggagttgggtttggagtcattacgggttgatctgttgccactcatccatctgaatcatgatcacatgcaggcgtattctttgatggacatcagcctggatacatttccctatgctggtactacgactacatgtgaatctttatacatgggggttccatgtgttacaatggctggtgctgttcatgctcataacgttggtgtcagcttgctcagcaaagtcgggttggggaggctggttgccaaaactgaggatgagtatggagcaa

SEQ ID NO: 9358 - DNA, 2748 bp, Zea Mays
cctatatacaaaaagatcaccactactgtactacggcaccccttcctcccccgctcccccacctccgctcccgaaaccctcgccgccgccgccgccgccgccgacgccgaaatcctcgtcgcggcggcgatcactgctcccctctatgatagcggcgcgtgagggcggcggagcgcggcctgtcgctccccggtccgcgtgcccggggcggctctgagagcccagagctcgtctcggttccctgccaagcgcagccgagcaccgcgccggcgccgcgtggcagttcaggccgtagtctgggcgctgttctgctctgggtctactggagtgcgtttgggattttttcggttcctactacattcgggggcgctgaaaataaggcgtctctctttcatggggcagccagggatggattctgttccagggaaggagaacaacggcattgcccctaacctcaatggggtcgtgtctccagcgaagcagcagctggaggggaaggaagcgatgcggtatgcaaacatcctccggtcgcgcaataagtttgctgacgcgatcaacctgtacaccattgttctcgagaaggatggcaccaatgtggaggcccttatcgggaaagggatttgcctccaggcgcagaacctaccaagacaggccattgagtgctttacagaagctgtcaaaatcgagccaggaaatgcgtctgctcttacacattgtgggatgatttacaaagatgagggtcacttggttgaagcagctgaggcatatcaaaaagctaggatggctgatccttcctacaaacctgcttcggaatttcttgctattgtgttgactgatcttggaactagcttgaagcttgcgggtaatacagaggaggggattcaaaaatattgtgaagctctggaagtagacaaccactatgcgccggcttactacaaccttggagttgtttattcggagatgatgcaatttgatatggctcttagttgttacgagaaagctgcactggagagaccattgtatgctgaggcctattgcaacatgggagttatctataagaatcggggagatctagatgcagcaattatctgctacgagaggtgcttgaccatttctcccaactttgagattgctaagaataatatggcaatagcactaactgacttgggaacaaaggtaaaaattgaaggtgacatcaatagaggtgtagcatattacaagaaagctctatactacaattggcactatgctgatgccatgtataatcttggcgttgcatatggtgaaatgttgaattttgagatggcaattgtcttttacgagcttgcgctgcacttcaatcctcgctgtgcggaagcatgcaacaatttaggagtcatatacaaagacagggataaccttgacaaagctgttgaatgttatcaaatggcactgtcaattaagccacttttcgctcagtcgctaaataaccttggagttgtctatactgttcaaggtaagatggattctgctgctagcatgattgagaaggctatacatgcaaatcccacatatgctgaagcatataataatctaggtgttctttacagagacgctggtagtattactttagcaattcatgcttacgagagatgccttcagatcgatcctgattcacgaaatgctggccagaaccgtttgcttgcaatgaactatattgacgagggctcagatgacaagctttatgaagctcacagggagtggggaaaacgctttatgaaattgtatccacaatatacaagttgggataactcaaaagttgctgaccgcccattgatcatcggttatttgtctcctgattactttactcattccgtgtcctacttcattgaagctccccttacacaccatgattccacagtttgcaaggtggttgtctactccggtgttgtgaagatgccaagacacttagattcaaggataaggtgttgaaaaagggtgggttgtggagagatatatatggtattgatgaaaagagggttgctagcttggtaagggaggataaagtggacatacttgtggaacttactggtcacacagcaaataataagttagggacaatggcatgccgacctgctcctattcaggttacctggattggctaccccaacacaacaggtttgccaacaatagactaccgaatctcagactcattgactgatccacctatgacaaagcaaaagcatgttgaggagttggtgcgccttcctgaaagctttctttgttatactccttccccagaagctggtcctgtttgtccaacaccagcaatttcaaatggtttcgtcacttttgggagctttaacaatctagcaaagattacaccgaaagtgttgcaagtttgggccagaatattatgttcagtccctaactccaggcttgtggttaagtgcaagccattctgctgtgagaacataaggcagaaatttttggccacactggaggagttgggtttggagtcattacgggttgatctgttgccactcatccatctgaatcatgatcacatgcaggcgtattctttgatggacatcagcctggatacatttccctatgctggtactacgactacatgtgaatctttatacatgggggttccatgtgttacaatggctggtgctgttcatgctcataacgttggtgtcagcttgctcagcaaagtcgggttggggaggctggttgccaaaactgaggatgagtatggagcaa

SEQ ID NO: 9359 - DNA, 2563 bp, Zea Mays
cctatatacaaaaagatcaccactactgtactacggcaccccttcctcccccgctcccccacctccgctcccgaaaccctcgccgccgccgccgccgccgccgacgccgaaatcctcgtcgcggcggcgatcactgctcccctctatgatagcggcgcgtgagggcggcggagcgcggcctgtcgctccccggtccgcgtgcccggggcggctctgagagcccagagctcgtctcggttccctgccaagcgcagccgagcaccgcgccggcgccgcgtggcagttcaggccgtagtctgggcgctgttctgctctgggtctactggagtgcgtttgggattttttcggttcctactacattcgggggcgctgaaaataaggcgtctctctttcatggggcagccagggatggattctgttccagggaaggagaacaacggcattgcccctaacctcaatggggtcgtgtctccagcgaagcagcagctggaggggaaggaagcgatgcggtatgcaaacatcctccggtcgcgcaataagtttgctgacgcgatcaacctgtacaccattgttctcgagaaggatggcaccaatgtggaggcccttatcgggaaagggatttgcctccaggcgcagaacctaccaagacaggccattgagtgctttacagaagctgtcaaaatcgagccaggaaatgcgtctgctcttacacattgtgggatgatttacaaagatgagggtcacttggttgaagcagctgaggcatatcaaaaagctaggatggctgatccttcctacaaacctgcttcggaatttcttgctattgtgttgactgatcttggaactagcttgaagcttgcgggtaatacagaggaggggattcaaaaatattgtgaagctctggaagtagacaaccactatgcgccggcttactacaaccttggagttgtttattcggagatgatgcaatttgatatggctcttagttgttacgagaaagctgcactggagagaccattgtatgctgaggcctattgcaacatgggagttatctataagaatcggggagatctagatgcagcaattatctgctacgagaggtgcttgaccatttctcccaactttgagattgctaagaataatatggcaatagcactaactgacttgggaacaaaggtaaaaattgaaggtgacatcaatagaggtgtagcatattacaagaaagctctatactacaattggcactatgctgatgccatgtataatcttggcgttgcatatggtgaaatgttgaattttgagatgggtaagatggattctgctgctagcatgattgagaaggctatacatgcaaatcccacatatgctgaagcatataataatctaggtgttctttacagagacgctggtagtattactttagcaattcatgcttacgagagatgccttcagatcgatcctgattcacgaaatgctggccagaaccgtttgcttgcaatgaactatattgacgagggctcagatgacaagctttatgaagctcacagggagtggggaaaacgctttatgaaattgtatccacaatatacaagttgggataactcaaaagttgctgaccgcccattgatcatcggttatttgtctcctgattactttactcattccgtgtcctacttcattgaagctccccttacacaccatgattccacagtttgcaaggtggttgtctactccggtgttgtgaaggcagatgccaagacacttagattcaaggataaggtgttgaaaaagggtgggttgtggagagatatatatggtattgatgaaaagagggttgctagcttggtaagggaggataaagtggacatacttgtggaacttactggtcacacagcaaataataagttagggacaatggcatgccgacctgctcctattcaggttacctggattggctaccccaacacaacaggtttgccaacaatagactaccgaatctcagactcattgactgatccacctatgacaaagcaaaagcatgttgaggagttggtgcgccttcctgaaagctttctttgttatactccttccccagaagctggtcctgtttgtccaacaccagcaatttcaaatggtttcgtcacttttgggagctttaacaatctagcaaagattacaccgaaagtgttgcaagtttgggccagaatattatgttcagtccctaactccaggcttgtggttaagtgcaagccattctgctgtgagaacataaggcagaaatttttggccacactggaggagttgggtttggagtcattacgggttgatctgttgccactcatccatctgaatcatgatcacatgcaggcgtattctttgatggacatcagcctggatacatttccctatgctggtactacgactacatgtgaatctttatacatgggggttccatgtgttacaatggctggtgctgttcatgctcataacgttggtgtcagcttgctcagcaaagtcgggttggggaggctggttgccaaaactgaggatgagtatggagcaa

SEQ ID NO: 9360 - DNA, 2804 bp, Zea Mays
aaagcaccgttaatttcccgcaaaagggaggggcctatatacaaaaagatcaccactactgtactacggcaccccttcctcccccgctcccccacctccgctcccgaaaccctcgccgccgccgccgccgccgccgacgccgaaatcctcgtcgcggcggcgatcactgctcccctctatgatagcggcgcgtgagggcggcggagcgcggcctgtcgctccccggtccgcgtgcccggggcggctctgagagcccagagctcgtctcggttccctgccaagcgcagccgagcaccgcgccggcgccgcgtggcagttcaggccgtagtctgggcgctgttctgctctgggtctactggagtgcgtttgggattttttcggttcctactacattcgggggcgctgaaaataaggcgtctctctttcatggggcagccagggatggattctgttccagggaaggagaacaacggcattgcccctaacctcaatggggtcgtgtctccagcgaagcagcagctggaggggaaggaagcgatgcggtatgcaaacatcctccggtcgcgcaataagtttgctgacgcgatcaacctgtacaccattgttctcgagaaggatggcaccaatgtggaggcccttatcgggaaagggatttgcctccaggcgcagaacctaccaagacaggccattgagtgctttacagaagctgtcaaaatcgagccaggaaatgcgtctgctcttacacattgtgggatgatttacaaagatgagggtcacttggttgaagcagctgaggcatatcaaaaagctaggatggctgatccttcctacaaacctgcttcggaatttcttgctattgtgttgactgatcttggaactagcttgaagcttgcgggtaatacagaggaggggattcaaaaatattgtgaagctctggaagtagacaaccactatgcgccggcttactacaaccttggagttgtttattcggagatgatgcaatttgatatggctcttagttgttacgagaaagctgcactggagagaccattgtatgctgaggcctattgcaacatgggagttatctataagaatcggggagatctagatgcagcaattatctgctacgagaggtgcttgaccatttctcccaactttgagattgctaagaataatatggcaatagcactaactgacttgggaacaaaggtaaaaattgaaggtgacatcaatagaggtgtagcatattacaagaaagctctatactacaattggcactatgctgatgccatgtataatcttggcgttgcatatggtgaaatgttgaattttgagatggcaattgtcttttacgagcttgcgctgcacttcaatcctcgctgtgcggaagcatgcaacaatttaggagtcatatacaaagacagggataaccttgacaaagctgttgaatgttatcaaatggcactgtcaattaagccacttttcgctcagtcgctaaataaccttggagttgtctatactgttcaagtctgttcctctgttatcaattttctcttacacaactcctattttgttttcctgattactttgctcttttagcgtactcaaatatgcatatatttatatagggtaagatggattctgctgctagcatgattgagaaggctatacatgcaaatcccacatatgctgaagcatataataatctaggtgttctttacagagacgctggtagtattactttagcaattcatgcttacgagagatgccttcagatcgatcctgattcacgaaatgctggccagaaccgtttgcttgcaatgaactatattgacgagggctcagatgacaagctttatgaagctcacagggagtggggaaaacgctttatgaaattgtatccacaatatacaagttgggataactcaaaagttgctgaccgcccattgatcatcggttatttgtctcctgattactttactcattccgtgtcctacttcattgaagctccccttacacaccatgattccacagtttgcaaggtggttgtctactccggtgttgtgaaggcagatgccaagacacttagattcaaggataaggtgttgaaaaagggtgggttgtggagagatatatatggtattgatgaaaagagggttgctagcttggtaagggaggataaagtggacatacttgtggaacttactggtcacacagcaaataataagttagggacaatggcatgccgacctgctcctattcaggttacctggattggctaccccaacacaacaggtttgccaacaatagactaccgaatctcagactcattgactgatccacctatgacaaagcaaaagcatgttgaggagttggtgcgccttcctgaaagctttctttgttatactccttccccagaagctggtcctgtttgtccaacaccagcaatttcaaatggtttcgtcacttttgggagctttaacaatctagcaaagattacaccgaaagtgttgcaagtttgggccagaatattatgttcagtccctaactccaggcttgtggttaagtgcaagccattctgctgtgagaacataaggcagaaatttttggccacactggaggagttgggtttggagtcattacgggttgatctgttgccactcatccatgtgaatctttatacatgggggttccatgtgttacaatggctggtgctgttcatgctcataacgttggtgtcagcttgctcagcaaagtcgggttggggaggctggttgccaaaactgaggatgagtatggagcaa

SEQ ID NO: 9361 - DNA, 2825 bp, Zea Mays
aaaggcaaagcaccgttaatttcccgcaaaagggaggggcctatatacaaaaagatcaccactactgtactacggcaccccttcctcccccgctcccccacctccgctcccgaaaccctcgccgccgccgccgccgccgccgacgccgaaatcctcgtcgcggcggcgatcactgctcccctctatgatagcggcgcgtgagggcggcggagcgcggcctgtcgctccccggtccgcgtgcccggggcggctctgagagcccagagctcgtctcggttccctgccaagcgcagccgagcaccgcgccggcgccgcgtggcagttcaggccgtagtctgggcgctgttctgctctgggtctactggagtgcgtttgggattttttcggttcctactacattcgggggcgctgtttggtttccatgtgaacccccacatgtcccacgccagaaaataaggcgtctctctttcatggggcagccagggatggattctgttccagggaaggagaacaacggcattgcccctaacctcaatggggtcgtgtctccagcgaagcagcagctggaggggaaggaagcgatgcggtatgcaaacatcctccggtcgcgcaataagtttgctgacgcgatcaacctgtacaccattgttctcgagaaggatggcaccaatgtggaggcccttatcgggaaagggatttgcctccaggcgcagaacctaccaagacaggccattgagtgctttacagaagctgtcaaaatcgagccaggaaatgcgtctgctcttacacattgtgggatgatttacaaagatgagggtcacttggttgaagcagctgaggcatatcaaaaagctaggatggctgatccttcctacaaacctgcttcggaatttcttgctattgtgttgactgatcttggaactagcttgaagcttgcgggtaatacagaggaggggattcaaaaatattgtgaagctctggaagtagacaaccactatgcgccggcttactacaaccttggagttgtttattcggagatgatgcaatttgatatggctcttagttgttacgagaaagctgcactggagagaccattgtatgctgaggcctattgcaacatgggagttatctataagaatcggggagatctagatgcagcaattatctgctacgagaggtgcttgaccatttctcccaactttgagattgctaagaataatatggcaatagcactaactgacttgggaacaaaggtaaaaattgaaggtgacatcaatagaggtgtagcatattacaagaaagctctatactacaattggcactatgctgatgccatgtataatcttggcgttgcatatggtgaaatgttgaattttgagatggcaattgtcttttacgagcttgcgctgcacttcaatcctcgctgtgcggaagcatgcaacaatttaggagtcatatacaaagacagggataaccttgacaaagctgttgaatgttatcaaatggcactgtcaattaagccacttttcgctcagtcgctaaataaccttggagttgtctatactgttcaaggtaagatggattctgctgctagcatgattgagaaggctatacatgcaaatcccacatatgctgaagcatataataatctaggtgttctttacagagacgctggtagtattactttagcaattcatgcttacgagagatgccttcagatcgatcctgattcacgaaatgctggccagaaccgtttgcttgcaatgaactatattgacgagggctcagatgacaagctttatgaagctcacagggagtggggaaaacgctttatgaaattgtatccacaatatacaagttgggataactcaaaagttgctgaccgcccattgatcatcggttatttgtctcctgattactttactcattccgtgtcctacttcattgaagctccccttacacaccatgattccacagtttgcaaggtggttgtctactccggtgttgtgaagatgccaagacacttagattcaaggataaggtgttgaaaaagggtgggttgtggagagatatatatggtattgatgaaaagagggttgctagcttggtaagggaggataaagtggacatacttgtggaacttactggtcacacagcaaataataagttagggacaatggcatgccgacctgctcctattcaggttacctggattggctaccccaacacaacaggtttgccaacaatagactaccgaatctcagactcattgactgatccacctatgacaaagcaaaagcatgttgaggagttggtgcgccttcctgaaagctttctttgttatactccttccccagaagctggtcctgtttgtccaacaccagcaatttcaaatggtttcgtcacttttgggagctttaacaatctagcaaagattacaccgaaagtgttgcaagtttgggccagaatattatgttcagtccctaactccaggcttgtggttaagtgcaagccattctgctgtgagaacataaggcagaaatttttggccacactggaggagttgggtttggagtcattacgggttgatctgttgccactcatccatctgaatcatgatcacatgcaggcgtattctttgatggacatcagcctggatacatttccctatgctggtactacgactacatgtgaatctttatacatgggggttccatgtgttacaatggctggtgctgttcatgctcataacgttggtgtcagcttgctcagcaaagtcgggttggggaggctggttgccaaaactgaggatgagtatggagcaa

SEQ ID NO: 9362 - DNA, 793 bp, Zea Mays
ctgaaaaaagtaccatttccgaagtactactactaccgcatggcgagcgagtagacggttcttctaatgggccgttccgtgggcttcattgtttaacctggggctagctatatagtaataccatcccaccccgctcctcaaaaccctagctagcgccgccgccgctgcagactcctccttttcgatcccttcacaaagcgccgccgtcgccccatcgaacatggctccgaagaaggataaggccccgcccccgtcgtcgaagcccgccaagtccggcggtggcaagcagaagaagaagaagtggagcaagggaaagctaaaggagaaggtgaacaacgcggtgctgttcgaccaggctacctacgacaagctgctctctgaggtgcccaagtacaagcagatctacaccagggcaacaaatacctaaggatgggattcccttgtttgccctctctgtaggagctcgtcttctttagaacagttgccatctctgtcaagagtttgctaatgctatgttagatgagtttagtttggcttgcctattataccttatctggccttagctttttctatggaaatctgccttgaaatgtctgatccgtgattatgcaactctatctaaactactgttatgctgcaattctgtcaacttgtctgaccagcaagtctgatgaatgaacttctgtatagatgtgatatttgcttgtgctgaacgttagtcagaagttgccaaggtcggtcgtctaacgcgcaacactatttttctagttctaagtcaatactatgatatttg

SEQ ID NO: 9363 - DNA, 553 bp, Zea Mays
gtgcactctagtaatgctgcccacctagggcgactgggcgagtcagtacttcagacttgagtccacccagccagccaagacacgcagcgcaggcgcatcccagccagattcaacccgagttcgcgacgagagcacgagatggcgatgcggacagcgctgacctccctccccgcgcgcctgcgcgcccctgcgccccccgcggcgacgggcggccggcgcctcctcagcgacgggaaggggcgtgtgctcagcgaggaggagcgcgccaaggagagcatctacatccagaagatggagagggagcggcaggagaagctgaagaagaggctcgagcaggagaaggccgactccgacaaggccaagcccgccgacgccgacaaggtattttcggattcagaattatggatatggagcacgaccaggacgaaggctgagccagacgaaggtcgggggcagccgaagctgtacgcagggaagcttcggcgcgatggcacaagggggaaccgaccttaagatgaaaagacttcggggtcctcaatagatttccataaac

SEQ ID NO: 9364 - DNA, 2834 bp, Zea Mays
cctagggcgactgggcgagtcagtacttcagacttgagtccacccagccagccaagacacgcagcgcaggcgcatcccagccagattcaacccgagttcgcgacgagagcacgagatggcgatgcggacagcgctgacctccctccccgcgcgcctgcgcgcccctgcgccccccgcggcgacgggcggccggcgcctcctcagcgacgggaaggggcgtgtgctcagcgaggaggagcgcgccaaggagagcatctacatccagaagatggagagggagcggcaggagaagctgaagaagaggctcgagcaggagaaggccgactccgacaaggccaagcccgccgacgccgacaaggtaccgtagcatcgttgtccgcttgacatcgagcggcacagagctatctgatctgcatgtggaaattacattgttgtgtggactctacactctagctttcaagtcgctgcaaacctgtcgggcaagtcccagacgaaactttagatgccgaactggtcctgatgcaatgggggttgggatggggtcctctgtctactgaacaaaatggatggggatttgtggaacactcaagtacgttttgcagggtttagttctcaagaacatggaatgtccagatcatgagttaatctggactgtgggtttactttgactgaacgttttttttttacaccagaggggatttagaatggggggatttgggtctaattctgtagccgtgtgtgaatggcataatgctgtggaccctaattgagccaaggagcttggtccttggagttaactatgcataaatttccaacacaaacatgtacagtaccctattctacttatagggtctgatttctatatccgtgagttatcattcctctgcttgccccatggcctataaacccaataagcccttgtttggatgcactccgatccattaatcatccatcctaaattcccaatccctctcaacccatgtggattggagtgcaccgaaacaatccctaatcagacatgagtctgtaattttttttcagaagtcaaaagatacatagccaagtacggaagtaaagtcttctacgattattacaagattacaaaccgtcatgctgaactctacttccatttgttttggttcacaaaacagcgtcaagagggtggggtcaagagggtgggatcaagcgtgcgttcacaaaacagcatcaatctgctcactgtccgaaacaaattgttctgcgtccttagtcaatgaaaccactctgctgagacgaaagctaggggagcaaatggggttagagaccccagtagtcctaggcataaacaatggatactaggtgttgtgcgactcgacccgtgcagtgttgtacctaatgcgttaagtatcccgcctggggagtacgttcgtaagaatgaaactcaaagaaattgacgggggaccgtacaagcggtggagcatgtggtttaattcgatgcaaagcgaagaaccttaccaagtcttgacatgccgcgaatcctcttaaaagagagaggtgccctcgggaacgcggacataggtggtgcatggctgtcgtcagctcgtgtcgtaaggtgttggattaagtctcgcaacgagcacaacccttgtgtttagttgccactatgagtttggtttggaaccctgaatagactgtcggtgttaagccggaggtctgagaggatgaggccaagtcatcatgccccttatgccctaggcgacacacatgctacagtgggcgggacaaagggttgcgatcttgtgagggtgagctaactccaaaaccccgtcctcagttcggattgcaagctgcaactcgcctgcatgatcgctagtaatcgccggtcagtcataagtgttatggtctggtgtctatgttttaggttccaaataacattttcgagttcctttcctccacgcatttaggaaaaaagagtgtcagtcaggtacatgtaccatcatcccttttcaactcatccggttacagtacactgcagttaccgtctcacagattgggattgtttggcataggctttaatatgtttgtcgcgttacaaacttggatacaatgatttcaagtcgtccgactaatcgcgattaatcgcgattagtcgggctagtcggttttagtggagcgaccagggtatccgacccgattaggtcgactaatcgtccagtcgtccgattagtcgtcgaccaagtgcgattagtcgtccagttaatgtgtggacgattagttaggtttggttggctggtggctgacctgtttttgctttgggctagacgtctagtaagtctgcaactctacatcatatgttataatatgttatgtagtgagtagtgagtgatattcagttcatgttctgaaatctgaattcttaattctgaaatgtgatctgagtgcctgacaattatagtattcataatttctatgatgttctgaaatctgaatgttcaatggtgttctgaaatctgaattgtccactctccactgtccagttctagtattcatatttgttttgtttggtaatttggttaccttgatattgcctcctatatgctatattgctatatgctactgttgggggccttcgtcctccgaaggtcctcaaaaacatgatttgacaatgttttccaagtgaattatatgaacaggtattttcggattcagaattatggatatggagcacgaccaggacgaaggctgagccagacgaaggtcgggggcagccgaagctgtacgcagggaagcttcggcgcgatggcacaagggggaaccgaccttaagatgaaaagacttcggggtcctcaatagat

SEQ ID NO: 9365 - DNA, 559 bp, Zea Mays
cttcttcccctttctcgtgcactctagtaatgctgcccacctagggcgactgggcgagtcagtacttcagacttgagtccacccagccagccaagacacgcagcgcaggcgcatcccagccagattcaacccgagttcgcgacgagagcacgagatggcgatgcggacagcgctgacctccctccccgcgcgcctgcgcgcccctgcgccccccgcggcgacgggcggccggcgcctcctcagcgacgggaaggggcgtgtgctcagcgaggaggagcgcgccaaggagagcatctacatccagaagatggagagggagcggcaggagaagctgaagaagaggctcgagcaggagaaggccgactccgacaaggccaagcccgccgacgccgacaaggtattttcggattcagaattatggatatggagcacgaccaggacgaaggctgagccagacgaaggtcgggggcagccgaagctgtacgcagggaagcttcggcgcgatggcacaagggggaaccgaccttaagatgaaaagacttcggggtcctcaatagat

SEQ ID NO: 9366 - DNA, 888 bp, Zea Mays
atggcgggcggcgaaggaacctacgacgagctgctcaaggggcgccaggagaaaagtgagcacctgataattccccagtgcgcatcacttatatgggcagcaagccggttcggctccaccttggatgcagatcaaaggcagacgaccttgcaaatacaagcaatgagagttgtcaaatccttggaaccctactcacctggagcgccgagcgccggtagggataaatatcttgtgtagtcatttgttaaggcaagaatattagcttgtctctgatctggtagtaacatgataacaattattaattttgggaaaaaatcgtacgtacattattaattaataacattcggagtcaagtcgatattatgcatcagtaatattgtataaaaaattagccaccttactttgatgtatgttacatgatttaatcatgaacaaataaataaataacggggaatgggaggtaattatggtggtcgaaagaaaaaaacggtattttatggtggcggtgaggttaaaatagagggaatggttgacgaagatattgaaatagagaaaaaaatggaatatagggtgagaaatttagaaggtagggttagcttccgttcttttatccgcagccacaagttttgctctgcgtctcccaagttcccgatctcggccgcgcgagtcagtgcaccccgtgcgtgatcaacagaatcttggcggccagccatatatgggtgtactgctaggttccgggaggttcttggcgcgacggcctcccctcgctgctctcgaggctccccggacaaaagcggcagcgacaaaggtacgcgatccggtaactgtcactgtctagttcctttctgctaccgtagaactgtttggtgaaatgccactgagagatcc

SEQ ID NO: 9367 - DNA, 1716 bp, Zea Mays
aaactcccgctcgactggggatctttgggtcggcgaaaatccctttcaacattcgtgggcggggcggatgacctggagctggaggttcgtggtagcggccgccgccggccatggagaagagaaatcggattctcgacctgcaggacctcctctctgacgcggacttcggcccactactcgcccgacagctactgtctccgttcatgcggcggccacctacctacctcgtagcaagacaccatatcataagtgctgccatggatttgcacctagagctctacattggtcgccggcgccgcggcggaggcgagactcagaactcagaagtaccctcccatgggagtccacttctgtcggcttgatggagcacctgatggatggagaggagctcgcccaacaggtgaaacctcagctgactgggacaaggcatggtctgccttcaagaagaaagggaagaggaccctgttttctgatttctcaccggacaagtacgtgatctggaacccacggcgcagcgagtatccattgtcagaagaggtcgatccaatcaagagaagtgaaagatctaacttgatgctgtggacaagcccccagttcaccttggtcggggcgattatcatcgtcttgacattgctaatctatacactagttgttcctcctcccaagtaactgcagaggtgacaactactaggggggtgagctgtaaactagtagtatttcaactggggagtctgtattgtacatttttacgtgtactatggcaactatagcagtattaattcaattgcgatcatgtagatacaacaccactgtccattccattctggaggttttcttcaattgtgtgctaaatggctgctgtctgagtcttatattcacttattataatgaagaaatatttggggtcaggtagaattatatgttggtcgatatttgatgctcctaatgtgtgtttctaaacagcaacttatcaatcatatctcccacaacatacctatttcaaacttcactctgtgaacaatgcagcgtaaaatagtgttttgtacggctacacacgatctggtgtagatagctgtattaacctgtgaaagtttgtactagtgttgggagtgtttgggcaacggggaactgatggacacatgagaatcacgtttcttattacagataaattcaggtcaatgtcagatcatcgccttcatacaataataagccttaggcattaggatgtgttttaacagacaattggtccacggtggtggccaggactttctttccctgtgtgaatggaatagaagatggggtacaatacattctgggaccttttcaaacctgagagacgagctccttgctccccaaggaagtttgtcacacacactctcccccatcgccgcatgtccccagcatctcatctgctctgcgcctataaaagtgagcaagccttcgcctcctgccgtcactcactctgacatcagacacaacactcagcagatggctcttcagtcccctgattcccgtgccttcctgagcaagaagccacccgcggcggcgatggagcggcaggaggcggcgaggcggaccctgccgcggcgcgggcagatcaagctgcgcatcttcgcgagcctgttccggtgcttcatcacccccgaggcacccgcgcgcaaggaaggcgacaagaacagagatggcggcggccgccgcgtttccccaggtggctga

SEQ ID NO: 9368 - DNA, 2379 bp, Zea Mays
cttactactagttcattgtctgccttcttcctttacacggcagtggcttataagccagaggctgactctgccctgtgggccacacacacatatgacataccaacaccaaaaacgtatacgccggctgtaaacacgttcgcgccattgacatgggaatatttgccggagtcctgcggctgaagctgtgtttcggaccctcggtaataaggcagactcaaggatgagagcagcttcaaaaaagcgggggattgaggtcacatcaatatccaggcctatcaaaccctcggattttcgtgattttgatcttatccttgcaatggacaggcagaactatgaagatatattgaactcgtttgagagatggagacgcaaagagcccctccctgatagtgcacccaataaggttaagctgatgtgctcctactgcaaacaacatactgagtctgaagttccagatccttattatggaggtcctcagggatttgaaaaggtgttggacttattggaagatgcttgcgagtcgctgcttgatagtatcgtcgcaaacaatgcaagcatttctgggtgacatcgatgtaaatctccacatagacatctattttcagacgcaccggctgtagcatccatgcacaaccggagtaatttggttgctaatgcaacattgatcatgtcgttattacccaggtcttggtctggtttgtatataccaccatccttatacctggttatgtgataagtgacaaaaaaactgctcatcatcacttttttccactaaagataatcagaaacaatcagaatgactgacaaagcatgcttatgtccatttgaaacttactattttcgcataaggcatactcggttcctcaggaaccatgcttggaacaattgtttgactaatttatatgacatttgataagctggaacagtttctgggttctggctagatttctagctatccctttgtttgaattttgcactgttttttttttcttcttcccggtgcttttctttagcctgcagcaggctgcaaccagcacgacctccacaggtgactgcggctaccatgaaatcagtcgtcaccggcggtagcactgcacatgcaagaagaagccgccgggcgactgctctgtggcagctgtgtcgtcggccatccacagcctgccctccttctccgccctagccttcaccatgaactgcgcccccgagcccgcgctgccgccaccccgcccaccgaaccaccagtcgtgcacgtcccacatgacgtcgaccacctctccgtcgggcagcacggcggcgcggttgccccggaagccccagcccacccgccgcacctccgtcaccttctcgccgtcgatggtgacccgcagctccccctccccgcccctgcacgcgtgcacggccacctcgtgctcgtccccgccctcgcggaacctgcagcgcgtgacgtgcgccgccgccgccgctgccgcgcagcgcagctgctcccgccggctgacgaggagcgcgggcgcggcgcgagcgctcggtgcgaggccgaggcggcgggagagctcgcgcgccgcgccgcccgcgccgaggaggagcgcgagctcggcgtcggccacgacggcgaggcagtagtcgcgttcgggctccggggacgaaggcgacgggtacttggcctccgcggtgtcccagtgcacgccgacggccgtgccggcgccggtgaccagcgaccggctccctcttctcttgtgcagcaggaggacaggaggcctcgtccgggccggcgacggcttcggcgcgtcggaggtgccgccgccgccgtcgtcatcgaagtcgaaggcgaccgcgacgccggcctctccggccgcgctccgggtccacgtcacccggacgagcacctccttgcccgaggacagcgcggccctgtacacgctggtggtggccgcctgcagcgcccggtcgagcgcgccgcggccggagacggcggcgtcggccgtggccacgctgacggagccgtcgccgaagcaggacagctccctcatcgccgcagccacttgattcggacgccgagcaaagcgacggaacgctgcgaatctgctgcggatgcattggagggaggcgaggtgttttaatcggcgggtgtgcgtgtcgtttggctgggcttgcaatctgcgagaggaggtggcagtcaaacaaaggatttcgtgaatcaaccgacggcagaagcacccgccggtatcttgagttcagctgccgtgttgtattgtattgtattgctagctgaagctgagtgaattttgcacgacggcaagcatgcgtgcatgcatgttggcagctgacagggcgactaccagaccatatcatattccgtcccgatcatgcttgactcccaac

SEQ ID NO: 9369 - DNA, 691 bp, Zea Mays
cgagcacttcctttccccttctgtgggtgattctgacgcctgcctttcttgtcgcaggacgacccctgaaacattcgggtgggaggcatcaccttctgtccggtcgttgtggtcgggcccattggagcctatccctctcccctaggagtcccgggagagccatgaggcttttcgcgcggcgctaaaggcggccgaggctgaggctggactgctccgggcctagcttgccgagtctaacatccgtgtagctgttctagaagacgaattggagaaaatgtgccactgtttggggaaagttgagaagtacgtcggggctcatggctcctccttagtaagcgcttggacaacatctcgtgtcgtgtccgagatatcattgactttggtgttcatcgaggagctttggtccggatgtggtcttcgtgacatcgttggccttccttcatctctatcggaagaggagctagaggatgtactggaggactacgagaaggcgaccaatcatgttgtagataggttgtctaaagacgatatcgttcgtagcgctcgatgtccccctagtgtattacgtcctaatgtcgtttcctgagggaggatataagaatggtttctattttccttttgcttgtgctgccctttgactccatgcgaccatgtcatggggcctcaaggccttttctccactgatctgctc

SEQ ID NO: 9370 - DNA, 1902 bp, Zea Mays
atccggttcggttccgtcgtccactctcgttccccagttcgctggaccatctcaaaatcctatcctcctctccttccctccgtatctcatccggccgattcgaatctccggtcccatcctctacggcttcaccccgcgcccaatccagtctgtacgtgaatcttgacaggggagagaagaatcggataaggagacctgcaccttcctccgagcaaagcaggagaggaaacaagaatagaggaggagatggccatgcccaccttacgccttgctcctgacctgccgcccgtatcccgcctctgcttcgggacaatgacgatgggagagcagagcggggcggcgtgctcgctccgcctcctcgacgccgcctacgacgccggcgtcaacttcttcgactccgcagagatgtacccagtcccacagcgcagtgagacgcgcgggcgtagcgaggagctcctcggccgctggttgcgggcccgccgggccccacgggacagcgtcgtcgtcgcaaccaaagtcgcggggccttcagggcagatgacgtggattcgcggcgggccgacatctctcgattcacagaacatcgcagaggcaatcgatggctgtttgcgcaggctgggtgtggactacatcgacctctaccagatacactggccggatcggtatgttccaatgtttggggagacagagtatgatccgaactgccagtacacgtctgttccaatggaagagcaactggaggctctcggaagagcaatagatgctggcaaggtacattggccttagcaatgagacaccatatggtttgatgaaatttcttcagttgagtaaggattctcagttgcttccaaagctactgacactgcagaactcgtataatttgttgtgccgaaattttgattctggattggcagaatgctgccatcatgagaggtatgcttgacacggtcagaagccctaactgttgtcttcagtgtctctaatcttctcatgtatggtcctggcatgagttggtagtgcatattggttttttccctctctatgactatgatacaacgatacatagctctcctgcatgttcgaaaaaatattgacatctgtttagtttaaagaagaatggcattgtcatatcgtatttgctcttggttaagaattagcttgctggcttatagcccaatggcaatgggtatactttcaggaaagtatcacttatctgataattgtggtccgccagacgcaagaatgaatcttttcaaagggagatactctgaaggtgaatcccggtacaaactgcagagccccaaagtgaaagcagctgtgaagatttctgcaaagtatggcatttctccagtgaccttagcgattgcatttgtcttgagacatccacttgtggcatcggctgttttcggtgcgactaaattgtggcagcttgatgaagttcttcaggcaactacagtccatctttgtgaggaaattgttgctgagatcaatgatgtacatgcaagataccctaacccttgcccataaaattttgcaaaaaaaaaactttatttagcatcacatggatccttatttatcatcgagagatatttttttccaatatagcactgggtatgttttttcccaatatagcaccgccattagatgtgacacttagggcctgtttgtttaccccatggattatataatctggattatttttggaggattatatagggcctgtttgtttaccccccaaattatataatctggattaaataatcctaagaggcaaacaaacagtccagcttatttgcctagattatataatctaaccccttggattatgataatccataagcaagtgcctagattattttttcccacttccccactaccctttcaagtttcctaggaattacc

SEQ ID NO: 9371 - DNA, 1914 bp, Zea Mays
atccggttcggttccgtcgtccactctcgttccccagttcgctggaccatctcaaaatcctatcctcctctccttccctccgtatctcatccggccgattcgaatctccggtcccatcctctacggcttcaccccgcgcccaatccagtctgtacgtgaatcttgacaggggagagaagaatcggataaggagacctgcaccttcctccgagcaaagcaggagaggaaacaagaatagaggaggagatggccatgcccaccttacgccttgctcctgacctgccgcccgtatcccgcctctgcttcgggacaatgacgatgggagagcagagcggggcggcgtgctcgctccgcctcctcgacgccgcctacgacgccggcgtcaacttcttcgactccgcagagatgtacccagtcccacagcgcagtgagacgcgcgggcgtagcgaggagctcctcggccgctggttgcgggcccgccgggccccacgggacagcgtcgtcgtcgcaaccaaagtcgcggggccttcagggcagatgacgtggattcgcggcgggccgacatctctcgattcacagaacatcgcagaggcaatcgatggctgtttgcgcaggctgggtgtggactacatcgacctctaccagatacactggccggatcggtatgttccaatgtttggggagacagagtatgatccgaactgccagtacacgtctgttccaatggaagagcaactggaggctctcggaagagcaatagatgctggcaaggtacattggccttagcaatgagacaccatatggtttgatgaaatttcttcagttgagtaaggattctcagttgcttccaaagctactgacactgcagaactcgtataatttgttgtgccgaaattttgattctggattggcagaatgctgccatcatgagaggtatgcttgacacggtcagaagccctaactgttgtcttcagtgtctctaatcttctcatgtatggtcctggcatgagttggtagtgcatattggttttttccctctctatgactatgatacaacgatacatagctctcctgcatgttcgaaaaaatattgacatctgtttagtttaaagaagaatggcattgtcatatcgtatttgctcttggttaagaattagcttgctggcttatagcccaatggcaatgggtatactttcaggaaagtatcacttatctgataattgtggtccgccagacgcaagaatgaatcttttcaaagggagatactctgaaggtgaatcccggtacaaactgcagagccccaaagtgaaagcagctgtgaaggaatacacacagatttctgcaaagtatggcatttctccagtgaccttagcgattgcatttgtcttgagacatccacttgtggcatcggctgttttcggtgcgactaaattgtggcagcttgatgaagttcttcaggcaactacagtccatctttgtgaggaaattgttgctgagatcaatgatgtacatgcaagataccctaacccttgcccataaaattttgcaaaaaaaaaactttatttagcatcacatggatccttatttatcatcgagagatatttttttccaatatagcactgggtatgttttttcccaatatagcaccgccattagatgtgacacttagggcctgtttgtttaccccatggattatataatctggattatttttggaggattatatagggcctgtttgtttaccccccaaattatataatctggattaaataatcctaagaggcaaacaaacagtccagcttatttgcctagattatataatctaaccccttggattatgataatccataagcaagtgcctagattattttttcccacttccccactaccctttcaagtttcctaggaattacc

SEQ ID NO: 9372 - DNA, 1696 bp, Zea Mays
atccggttcggttccgtcgtccactctcgttccccagttcgctggaccatctcaaaatcctatcctcctctccttccctccgtatctcatccggccgattcgaatctccggtcccatcctctacggcttcaccccgcgcccaatccagtctgtacgtgaatcttgacaggggagagaagaatcggataaggagacctgcaccttcctccgagcaaagcaggagaggaaacaagaatagaggaggagatggccatgcccaccttacgccttgctcctgacctgccgcccgtatcccgcctctgcttcgggacaatgacgatgggagagcagagcggggcggcgtgctcgctccgcctcctcgacgccgcctacgacgccggcgtcaacttcttcgactccgcagagatgtacccagtcccacagcgcagtgagacgcgcgggcgtagcgaggagctcctcggccgctggttgcgggcccgccgggccccacgggacagcgtcgtcgtcgcaaccaaagtcgcggggccttcagggcagatgacgtggattcgcggcgggccgacatctctcgattcacagaacatcgcagaggcaatcgatggctgtttgcgcaggctgggtgtggactacatcgacctctaccagatacactggccggatcggtatgttccaatgtttggggagacagagtatgatccgaactgccagtacacgtctgttccaatggaagagcaactggaggctctcggaagagcaatagatgctggcaaggtacattggccttagcaatgagacaccatatggtttgatgaaatttcttcagttgagtaaggattctcagttgcttccaaagctactgacactgcagaactcgtataatttgttgtgccgaaattttgattctggattggcagaatgctgccatcatgagagaattagcttgctggcttatagcccaatggcaatgggtatactttcaggaaagtatcacttatctgataattgtggtccgccagacgcaagaatgaatcttttcaaagggagatactctgaaggtgaatcccggtacaaactgcagagccccaaagtgaaagcagctgtgaaggaatacacacagatttctgcaaagtatggcatttctccagtgaccttagcgattgcatttgtcttgagacatccacttgtggcatcggctgttttcggtgcgactaaattgtggcagcttgatgaagttcttcaggcaactacagtccatctttgtgaggaaattgttgctgagatcaatgatgtacatgcaagataccctaacccttgcccataaaattttgcaaaaaaaaaactttatttagcatcacatggatccttatttatcatcgagagatatttttttccaatatagcactgggtatgttttttcccaatatagcaccgccattagatgtgacacttagggcctgtttgtttaccccatggattatataatctggattatttttggaggattatatagggcctgtttgtttaccccccaaattatataatctggattaaataatcctaagaggcaaacaaacagtccagcttatttgcctagattatataatctaaccccttggattatgataatccataagcaagtgcctagattattttttcccacttccccactaccctttcaagtttcctaggaattacc

SEQ ID NO: 9373 - DNA, 1860 bp, Zea Mays
atccggttcggttccgtcgtccactctcgttccccagttcgctggaccatctcaaaatcctatcctcctctccttccctccgtatctcatccggccgattcgaatctccggtcccatcctctacggcttcaccccgcgcccaatccagtctgtacgtgaatcttgacaggggagagaagaatcggataaggagacctgcaccttcctccgagcaaagcaggagaggaaacaagaatagaggaggagatggccatgcccaccttacgccttgctcctgacctgccgcccgtatcccgcctctgcttcgggacaatgacgatgggagagcagagcggggcggcgtgctcgctccgcctcctcgacgccgcctacgacgccggcgtcaacttcttcgactccgcagagatgtacccagtcccacagcgcagtgagacgcgcgggcgtagcgaggagctcctcggccgctggttgcgggcccgccgggccccacgggacagcgtcgtcgtcgcaaccaaagtcgcggggccttcagggcagatgacgtggattcgcggcgggccgacatctctcgattcacagaacatcgcagaggcaatcgatggctgtttgcgcaggctgggtgtggactacatcgacctctaccagatacactggccggatcggtatgttccaatgtttggggagacagagtatgatccgaactgccagtacacgtctgttccaatggaagagcaactggaggctctcggaagagcaatagatgctggcaagattaggtacattggccttagcaatgagacaccatatggtttgatgaaatttcttcagttgagtaaggattctcagttgcttccaaagctactgacactgcaggtaagtagcgcagtttgatctaatctgtagtactgtaatcgctctccatatttcttcacctgtgtttttgcagaactcgtataatttgttgtgccgaaattttgattctggattggcagaatgctgccatcatgagagaattagcttgctggcttatagcccaatggcaatgggtatactttcaggaaagtatcacttatctgataattgtggtccgccagacgcaagaatgaatcttttcaaaggtaccgtgttctgaaaattttaaaaggtttatagtctggttccaatcctctctttcattttagtttggttccactacgttagcgctcctcctttatagggagatactctgaaggtgaatcccggtacaaactgcagagccccaaagtgaaagcagctgtgaagatttctgcaaagtatggcatttctccagtgaccttagcgattgcatttgtcttgagacatccacttgtggcatcggctgttttcggtgcgactaaattgtggcagcttgatgaagttcttcaggcaactacagtccatctttgtgaggaaattgttgctgagatcaatgatgtacatgcaagataccctaacccttgcccataaaattttgcaaaaaaaaaactttatttagcatcacatggatccttatttatcatcgagagatatttttttccaatatagcactgggtatgttttttcccaatatagcaccgccattagatgtgacacttagggcctgtttgtttaccccatggattatataatctggattatttttggaggattatatagggcctgtttgtttaccccccaaattatataatctggattaaataatcctaagaggcaaacaaacagtccagcttatttgcctagattatataatctaaccccttggattatgataatccataagcaagtgcctagattattttttcccacttccccactaccctttcaagtttcctaggaattacc

SEQ ID NO: 9374 - DNA, 2288 bp, Zea Mays
atccggttcggttccgtcgtccactctcgttccccagttcgctggaccatctcaaaatcctatcctcctctccttccctccgtatctcatccggccgattcgaatctccggtcccatcctctacggcttcaccccgcgcccaatccagtctgtacgtgaatcttgacaggggagagaagaatcggataaggagacctgcaccttcctccgagcaaagcaggagaggaaacaagaatagaggaggagatggccatgcccaccttacgccttgctcctgacctgccgcccgtatcccgcctctgcttcgggacaatgacgatgggagagcagagcggggcggcgtgctcgctccgcctcctcgacgccgcctacgacgccggcgtcaacttcttcgactccgcagagatgtaggctcacctgctccctcatctccctgcctcggttcgagagtaatgaaaggaaaggtgtctggaactctggatgcacatctgcaaacatgtttactcgtcaggtacccagtcccacagcgcagtgagacgcgcgggcgtagcgaggagctcctcggccgctggttgcgggcccgccgggccccacgggacagcgtcgtcgtcgcaaccaaagtcgcggggccttcagggcagatgacgtggattcgcggcgggccgacatctctcgattcacagaacatcgcagaggcaatcgatggctggtgggtcaattgtttgcgcaggctgggtgtggactacatcgacctctaccagatacactggccggatcggtatgttccaatgtttggggagacagagtatgatccgaactgccagtacacgtctgttccaatggaagagcaactggaggctctcggaagagcaatagatgctggcaaggtacattggccttagcaatgagacaccatatggtttgatgaaatttcttcagttgagtaaggattctcagttgcttccaaagctactgacactgcaggtaagtagcgcagtttgatctaatctgtagtactgtaatcgctctccatatttcttcacctgtgtttttgcagaactcgtataatttgttgtgccgaaattttgattctggattggcagaatgctgccatcatgagaggtatgcttgacacggtcagaagccctaactgttgtcttcagtgtctctaatcttctcatgtatggtcctggcatgagttggtagtgcatattggttttttccctctctatgactatgatacaacgatacatagctctcctgcatgttcgaaaaaatattgacatctgtttagtttaaagaagaatggcattgtcatatcgtatttgctcttggttaaggtattttccaaattgtattctgttttgactcaatttatacaattgtttttcttctgaacttccattgttgaactatggcatttgcagaattagcttgctggcttatagcccaatggcaatgggtatactttcaggaaagtatcacttatctgataattgtggtccgccagacgcaagaatgaatcttttcaaaggtaccgtgttctgaaaattttaaaaggtttatagtctggttccaatcctctctttcattttagtttggttccactacgttagcgctcctcctttatagggagatactctgaaggtgaatcccggtacaaactgcagagccccaaagtgaaagcagctgtgaaggaatacacacagatttctgcaaagtatggcatttctccagtgaccttagcgattgcatttgtcttgagacatccacttgtggcatcggctgttttcggtgcgactaaattgtggcagcttgatgaagttcttcaggcaactacagtccatctttgtgaggaaattgttgctgagatcaatgatgtacatgcaagataccctaacccttgcccataaaattttgcaaaaaaaaaactttatttagcatcacatggatccttatttatcatcgagagatatttttttccaatatagcactgggtatgttttttcccaatatagcaccgccattagatgtgacacttagggcctgtttgtttaccccatggattatataatctggattatttttggaggattatatagggcctgtttgtttaccccccaaattatataatctggattaaataatcctaagaggcaaacaaacagtccagcttatttgcctagattatataatctaaccccttggattatgataatccataagcaagtgcctagattattttttcccacttccccactaccctttcaagtttcctaggaattacc

SEQ ID NO: 9375 - DNA, 1849 bp, Zea Mays
atccggttcggttccgtcgtccactctcgttccccagttcgctggaccatctcaaaatcctatcctcctctccttccctccgtatctcatccggccgattcgaatctccggtcccatcctctacggcttcaccccgcgcccaatccagtctgtacgtgaatcttgacaggggagagaagaatcggataaggagacctgcaccttcctccgagcaaagcaggagaggaaacaagaatagaggaggagatggccatgcccaccttacgccttgctcctgacctgccgcccgtatcccgcctctgcttcgggacaatgacgatgggagagcagagcggggcggcgtgctcgctccgcctcctcgacgccgcctacgacgccggcgtcaacttcttcgactccgcagagattcccacagcgcagtgagacgcgcgggcgtagcgaggagctcctcggccgctggttgcgggcccgccgggccccacgggacagcgtcgtcgtcgcaaccaaagtcgcggggccttcagggcagatgacgtggattcgcggcgggccgacatctctcgattcacagaacatcgcagaggcaatcgatggctgtttgcgcaggctgggtgtggactacatcgacctctaccagatacactggccggatcggtatgttccaatgtttggggagacagagtatgatccgaactgccagtacacgtctgttccaatggaagagcaactggaggctctcggaagagcaatagatgctggcaaggtaatgttgtcgaggtgctgtttttaactttccaattttaatgaaaaagttcaggctgcatatttatgaatcgttggtgttagattaggtacattggccttagcaatgagacaccatatggtttgatgaaatttcttcagttgagtaaggattctcagttgcttccaaagctactgacactgcaggtaagtagcgcagtttgatctaatctgtagtactgtaatcgctctccatatttcttcacctgtgtttttgcagaactcgtataatttgttgtgccgaaattttgattctggattggcagaatgctgccatcatgagagaattagcttgctggcttatagcccaatggcaatgggtatactttcaggaaagtatcacttatctgataattgtggtccgccagacgcaagaatgaatcttttcaaagggagatactctgaaggtgaatcccggtacaaactgcagagccccaaagtgaaagcagctgtgaaggaatacacacagatttctgcaaagtatggcatttctccagtgaccttagcgattgcatttgtcttgagacatccacttgtggcatcggctgttttcggtgcgactaaattgtggcagcttgatgaagttcttcaggcaactacagtccatctttgtgaggaaattgttgctgagatcaatgatgtacatgcaagataccctaacccttgcccataaaattttgcaaaaaaaaaactttatttagcatcacatggatccttatttatcatcgagagatatttttttccaatatagcactgggtatgttttttcccaatatagcaccgccattagatgtgacacttagggcctgtttgtttaccccatggattatataatctggattatttttggaggattatatagggcctgtttgtttaccccccaaattatataatctggattaaataatcctaagaggcaaacaaacagtccagcttatttgcctagattatataatctaaccccttggattatgataatccataagcaagtgcctagattattttttcccacttccccactaccctttcaagtttcctaggaattacc

SEQ ID NO: 9376 - DNA, 2022 bp, Zea Mays
atccggttcggttccgtcgtccactctcgttccccagttcgctggaccatctcaaaatcctatcctcctctccttccctccgtatctcatccggccgattcgaatctccggtcccatcctctacggcttcaccccgcgcccaatccagtctgtacgtgaatcttgacaggggagagaagaatcggataaggagacctgcaccttcctccgagcaaagcaggagaggaaacaagaatagaggaggagatggccatgcccaccttacgccttgctcctgacctgccgcccgtatcccgcctctgcttcgggacaatgacgatgggagagcagagcggggcggcgtgctcgctccgcctcctcgacgccgcctacgacgccggcgtcaacttcttcgactccgcagagatgtacccagtcccacagcgcagtgagacgcgcgggcgtagcgaggagctcctcggccgctggttgcgggcccgccgggccccacgggacagcgtcgtcgtcgcaaccaaagtcgcggggccttcagggcagatgacgtggattcgcggcgggccgacatctctcgattcacagaacatcgcagaggcaatcgatggctgtttgcgcaggctgggtgtggactacatcgacctctaccagatacactggccggatcggtatgttccaatgtttggggagacagagtatgatccgaactgccagtacacgtctgttccaatggaagagcaactggaggctctcggaagagcaatagatgctggcaaggtacattggccttagcaatgagacaccatatggtttgatgaaatttcttcagttgagtaaggattctcagttgcttccaaagctactgacactgcaggtaagtagcgcagtttgatctaatctgtagtactgtaatcgctctccatatttcttcacctgtgtttttgcagaactcgtataatttgttgtgccgaaattttgattctggattggcagaatgctgccatcatgagaggtatgcttgacacggtcagaagccctaactgttgtcttcagtgtctctaatcttctcatgtatggtcctggcatgagttggtagtgcatattggttttttccctctctatgactatgatacaacgatacatagctctcctgcatgttcgaaaaaatattgacatctgtttagtttaaagaagaatggcattgtcatatcgtatttgctcttggttaagaattagcttgctggcttatagcccaatggcaatgggtatactttcaggaaagtatcacttatctgataattgtggtccgccagacgcaagaatgaatcttttcaaagtttggttccactacgttagcgctcctcctttatagggagatactctgaaggtgaatcccggtacaaactgcagagccccaaagtgaaagcagctgtgaaggaatacacacagatttctgcaaagtatggcatttctccagtgaccttagcgattgcatttgtcttgagacatccacttgtggcatcggctgttttcggtgcgactaaattgtggcagcttgatgaagttcttcaggcaactacagtccatctttgtgaggaaattgttgctgagatcaatgatgtacatgcaagataccctaacccttgcccataaaattttgcaaaaaaaaaactttatttagcatcacatggatccttatttatcatcgagagatatttttttccaatatagcactgggtatgttttttcccaatatagcaccgccattagatgtgacacttagggcctgtttgtttaccccatggattatataatctggattatttttggaggattatatagggcctgtttgtttaccccccaaattatataatctggattaaataatcctaagaggcaaacaaacagtccagcttatttgcctagattatataatctaaccccttggattatgataatccataagcaagtgcctagattattttttcccacttccccactaccctttcaagtttcctaggaattacc

SEQ ID NO: 9377 - DNA, 1565 bp, Zea Mays
ccactccccactgcgctgctctgcctcacttctgctgagcaagaccagcagccagactcaaattgaatttgttgattttgctcacattgaatcaatctctatttgatgaggatcttagagagaagattgatgcacaagctgttctttatgagaccaaagagaggcatttgcaaatccaacggctataaaaaatgcacaaacaaggaatccacgtaagtattctaaaattgatagccttccctccattttcagcatgtaacatataatcttctttgttcttgccattttagttgattggtggcttgcatatggtggtcgtactattgaattatataagtttgcaagacggattgttagtctttgtgcttcatcatccggttgtgagcgaaattggagtacatttgaatttgtaagtgagctagtcaaattattcaatttctattcgccactacttttttatcctcagttcttcattggttacttttatttgcacttgtagatgcataccaaaaagaggaataggttagagcacaaaaggttgaatgacttggtatatgtttcatacaacagaaagatggctgataggtttcaaaaaatacgcgagaaaggaaaaaactttgatctttgattttagaagactttgattgggacaatgaatgggttgatccattagctaattcttctcatgttagcaatgctcttggagatgatttcaatttatcatgggatgctcatggtcttaatattgatgagttcgatgatggttactaatcatgcataaaagttgtaacttgtgtggttgaacttgtgttgttgaacttgatttgtttctttttatgctaatgctatttggtttgtgaactcaacttatgtatgaacttattctatatttgaaattctatgtcaagtctaaaaagacgtttcaacgttcgtttaaacgtttcaacgttcgtttaaacatttaaacgtcgaaaagttggttcataacgttttaacgttttaccgtttttttttctctcgaaagcgcaagagagctgcgcgaaaatatattaagaaggggaaaaggtccaaaaaaggaccccaagttttaccgttttaataaccatgcctatttctatcgatttttaaactaaaaataatttagggccctagcaatttgtgaagaaacatttggattatgatctattaccacccatagtttgtcgcgcctaagagaatcttgcaacacttttacaagtcattgacgagtgggacctatgtagctggagaaaaatcttgccacaacaatgactccaaatcaaagttgcctaacctgaggcgtaacaaactatgacaagtgaggcagcaaaccaaatagccccctagtgacataggctcccacacgaatggggtctgggaagagataaaccgaggcaaaccttcccccgcaaatgtggagatgctacttcaaacccgcgacttgataactcagtgagactgatggaataagtcttgagcatctagaggacaacagtcgcttttgactgtcctctgtagtcctttagcatctagaggacagcttgact

SEQ ID NO: 9378 - DNA, 307 bp, Zea Mays
cagatccccaccaatcctccctcgtcttagctttccagcgcaggaacaggatctacaaggaggagcaacgtcagatcagagctgctgctcgtaaggccaaggaggaagctgagggtgcccctgctgttgcagcacaccattagtctccctgtctattttttgtgttgttgttttctgttaactcatctttggttcagttatgatgctaagggcaaggcaataatctccagctgttggactacacagattttttcccccatgacttaaatatcaagactcattttgtgcttctgctggtttctgcttg

SEQ ID NO: 9379 - DNA, 323 bp, Zea Mays
gcttcctccgtttcattcgattcgtcgcctccgactccgaaccctagcttccagcgcaggaacaggatctacaaggaggagcaacgtcagatcagagctgctgctcgtaaggccaaggaggaagctgagggtgcccctgctgttgcagcacaccattagtctccctgtctattttttgtgttgttgttttctgttaactcatctttggttcagttatgatgctaagggcaaggcaataatctccagctgttggactacacagattttttcccccatgacttaaatatcaagactcattttgtgcttctgctggtttctgcttg

SEQ ID NO: 9380 - DNA, 2663 bp, Zea Mays
gtacgtttggcttcatcatgttgttcgtttgacgattaaacctgccctctcatggcccgggtcatgttctattttaccctgtcgatagtgaatcttcttctttttatatatattccacagatatgaaaacatgctgctctagtggatattgactgattcctaaaagatcattgcggttacggttttcttccttctggtgattgctttttatgcattcttcgcaatgtttctagggaagcaagtcctagagtatgttgtgatcggtgtctacactgccgtggtgttttctgtcgccatgctttacatccgctgcactagtataaaccctgctgatcctggaatcatgtcaaagttcgacaatgtcctcatcgatgcacctggaagtgctgccaacatacagggcacggatttgccagtgaaagctggtattggcgctggaacaatctccccatcggcaacatctacttgtaggaactctgtagatgggcattctaacgctggtgctttagctgctggagacacaaatctggatttaaggtctcagccgccaacaagtccatggagctgcttacttggagggcttgtttgttttttgtttgtgaaggaggattgtaggaaatacgatgattcagagaatcaagttgatggggaaggagccttgttctgcacgttatgtgacgccgaggttcgcaaattcagtaaacactgcagaagttgtgacaagtgtgtggatggatttgatcatcactgtcggtggctaaataactgtgttggacggaagaactatttcacgtttcttgctctgatggctaccagtcttctctggcttgctatcgaaattggagtaggcatcggtgttcttgttatatgctttgccaacaagaattcagagagaattattcaagacaggcttgggaatggtttgcctcggcctgcctttgctaccattgtagcgttttttactcttctttctctagtcgcttgcatacctttaggggagcttttcttcttccacatgatcttaatcagaaaggggatcacaacttatgaatatgtcgttgcaatgagagctatgagtgaaacacctcaagaggaggaagagcacgaggaggaggagggggtaaacattgtttattccccaacaaattcagccaccactgcgttcagtggtgctagttcactcagtcttcactacaagggctcatggtgcacacctccaaggatttttgttgatcaggatgaagtgatcccgcatttggagccagggatggtgccttcaaccatcgatcctgatgctgttggacgcgccgaaagagccaacaaagccaagaagcaggtcaaaatcagtgcctggaagcttgcaaagctggacagcaatgaggcgatgaaggccgctgctaaagtccgggcatcatcgtctgtcctccggcctattgattcccgccgggttccaggtgctagccctggctccagtggcaatgccagcatgagaagcagcatgagtgccggttacagcgccagtggcaccaaggaaaggggggctggtatgcttcagagtccctcgtatcctcagagccctgcaagccaggacgactacgagtcgggcacgcagagtggtagcagcaggaccagcccggtgcacattcacagacccgccgcaccgcacgctcagatcaacgtgccactgccacctcgtgtgccccaagcacctccaaggcctgcgccggcgttggcaccgaggccgcctgttccagccacgcagatgtccaagccaacgttccagtcggcaacatcttatgtccgtgagaaccggaaagtatcggttgtttgggatcaagaggctgctaggtacgtgtccgtggcaccggcgcccacaaggccagtaactggcaaccatggaagaactctcgcatccatgaatccttcgtcctcagcgttgccatctggacagccgtccgagaggttggcatacactgggcagtcgatattctttggtggaccgcttctgggtgctgctgctgctgaccctcggaggaatgaagctgtcgcgggagtgccgccggagacaaggaggaacgatggcactgggggagagaggagacgaactgcggagtccttcccggtgtttgctccaggatcccttgagaagaacccgccatccaacaggtgatctcgtggcggtatggcaccaccttttctgaccatcgtgaccaagacaatgggacgatcgttactcaacaaggagccctggagagtccaagggtgattactgtgagttcatcggcgatcgtcaccaattccacacgcagagaaggcgtcacagggacatgctacaagtctgaaatgggggcatcctagtactgagcctgaacccgaggttgagggatgtgagtgtctgagtgacaaatgaaccgtgcaggtgtcaagaaagctgaaacagggaggacacacacaaggcgtgagtgactgattggggtgtaaatgttttgctcgtttcgttggagtaacttttgggttagacgtgtgttttgtagagacaatataagttaggtcaagacaatggctattgattaggtgtatatggatttcatgtctctattgatggtattcaatttcgattttcaaaggatgaacgagaagcttaaagatcggttagttctaag

SEQ ID NO: 9381 - DNA, 2362 bp, Zea Mays
cttggtttccttctcaaagcccgaaacacctgcagacccactgaatcattgcggttacggttttcttccttctggtgattgctttttatgcattcttcgcaatgtttctagggaagcaagtcctagagtatgttgtgatcggtgtctacactgccgtggtgttttctgtcgccatgctttacatccgctgcactagtataaaccctgctgatcctggaatcatgtcaaagttcgacaatgtcctcatcgatgcacctggaagtgctgccaacatacagggcacggatttgccagtgaaagctggaggattgtaggaaatacgatgattcagagaatcaagttgatggggaaggagccttgttctgcacgttatgtgacgccgaggttcgcaaattcagtaaacactgcagaagttgtgacaagtgtgtggatggatttgatcatcactgtcggtggctaaataactgtgttggacggaagaactatttcacgtttcttgctctgatggctaccagtcttctctggcttgctatcgaaattggagtaggcatcggtgttcttgttatatgctttgccaacaagaattcagagagaattattcaagacaggcttgggaatggtttgcctcggcctgcctttgctaccattgtagcgttttttactcttctttctctagtcgcttgcatacctttaggggagcttttcttcttccacatgatcttaatcagaaaggggatcacaacttatgaatatgtcgttgcaatgagagctatgagtgaaacacctcaagaggaggaagagcacgaggaggaggagggggtaaacattgtttattccccaacaaattcagccaccactgcgttcagtggtgctagttcactcagtcttcactacaagggctcatggtgcacacctccaaggatttttgttgatcaggatgaagtgatcccgcatttggagccagggatggtgccttcaaccatcgatcctgatgctgttggacgcgccgaaagagccaacaaagccaagaagcaggtcaaaatcagtgcctggaagcttgcaaagctggacagcaatgaggcgatgaaggccgctgctaaagtccgggcatcatcgtctgtcctccggcctattgattcccgccgggttccaggtgctagccctggctccagtggcaatgccagcatgagaagcagcatgagtgccggttacagcgccagtggcaccaaggaaaggggggctggtatgcttcagagtccctcgtatcctcagagccctgcaagccaggacgactacgagtcgggcacgcagagtggtagcagcaggaccagcccggtgcacattcacagacccgccgcaccgcacgctcagatcaacgtgccactgccacctcgtgtgccccaagcacctccaaggcctgcgccggcgttggcaccgaggccgcctgttccagccacgcagatgtccaagccaacgttccagtcggcaacatcttatgtccgtgagaaccggaaagtatcggttgtttgggatcaagaggctgctaggtacgtgtccgtggcaccggcgcccacaaggccagtaactggcaaccatggaagaactctcgcatccatgaatccttcgtcctcagcgttgccatctggacagccgtccgagaggttggcatacactgggcagtcgatattctttggtggaccgcttctgggtgctgctgctgctgaccctcggaggaatgaagctgtcgcgggagtgccgccggagacaaggaggaacgatggcactgggggagagaggagacgaactgcggagtccttcccggtgtttgctccaggatcccttgagaagaacccgccatccaacaggtgatctcgtggcggtatggcaccaccttttctgaccatcgtgaccaagacaatgggacgatcgttactcaacaaggagccctggagagtccaagggtgattactgtgagttcatcggcgatcgtcaccaattccacacgcagagaaggcgtcacagggacatgctacaagtctgaaatgggggcatcctagtactgagcctgaacccgaggttgagggatgtgagtgtctgagtgacaaatgaaccgtgcaggtgtcaagaaagctgaaacagggaggacacacacaaggcgtgagtgactgattggggtgtaaatgttttgctcgtttcgttggagtaacttttgggttagacgtgtgttttgtagagacaatataagttaggtcaagacaatggctattgattaggtgtatatggatttcatgtctctattgatggtattcaatttcgattttcaaaggatgaacgagaagcttaaagatcggttagttctaag

SEQ ID NO: 9382 - DNA, 2695 bp, Zea Mays
ccgagaaagcagggcaaagcgtttgtgccgtgccgtggccttgtgggaagagaaagaaagggagagaaagacaggactggagaaggtgagtgagagggaggcgcgcagcggcagcggcggcggcggcgtcgccgtccatggcgaggaagcacggatggcagctccccgcgcacacgctccagatcattgcggttacggttttcttccttctggtgattgctttttatgcattcttcgcaatgtttctagggaagcaagtcctagagtatgttgtgatcggtgtctacactgccgtggtgttttctgtcgccatgctttacatccgctgcactagtataaaccctgctgatcctggaatcatgtcaaagttcgacaatgtcctcatcgatgcacctggaagtgctgccaacatacagggcacggatttgccagtgaaagctggtattggcgctggaacaatctccccatcggcaacatctacttgtaggaactctgtagatgggcattctaacgctggtgctttagctgctggagacacaaatctggatttaaggtctcagccgccaacaagtccatggagctgcttacttggagggcttgtttgttttttgtttgtgaaggaggattgtaggaaatacgatgattcagagaatcaagttgatggggaaggagccttgttctgcacgttatgtgacgccgagaaagatgatttttcaggttcgcaaattcagtaaacactgcagaagttgtgacaagtgtgtggatggatttgatcatcactgtcggtggctaaataactgtgttggacggaagaactatttcacgtttcttgctctgatggctaccagtcttctctggcttgctatcgaaattggagtaggcatcggtgttcttgttatatgctttgccaacaagaattcagagagaattattcaagacaggcttgggaatggtttgcctcggcctgcctttgctaccattgtagcgttttttactcttctttctctagtcgcttgcatacctttaggggagcttttcttcttccacatgatcttaatcagaaaggggatcacaacttatgaatatgtcgttgcaatgagagctatgagtgaaacacctcaagaggaggaagagcacgaggaggaggagggggtaaacattgtttattccccaacaaattcagccaccactgcgttcagtggtgctagttcactcagtcttcactacaagggctcatggtgcacacctccaaggatttttgttgatcaggatgaagtgatcccgcatttggagccagggatggtgccttcaaccatcgatcctgatgctgttggacgcgccgaaagagccaacaaagccaagaagcaggtcaaaatcagtgcctggaagcttgcaaagctggacagcaatgaggcgatgaaggccgctgctaaagtccgggcatcatcgtctgtcctccggcctattgattcccgccgggttccaggtgctagccctggctccagtggcaatgccagcatgagaagcagcatgagtgccggttacagcgccagtggcaccaaggaaaggggggctggtatgcttcagagtccctcgtatcctcagagccctgcaagccaggacgactacgagtcgggcacgcagagtggtagcagcaggaccagcccggtgcacattcacagacccgccgcaccgcacgctcagatcaacgtgccactgccacctcgtgtgccccaagcacctccaaggcctgcgccggcgttggcaccgaggccgcctgttccagccacgcagatgtccaagccaacgttccagtcggcaacatcttatgtccgtgagaaccggaaagtatcggttgtttgggatcaagaggctgctaggtacgtgtccgtggcaccggcgcccacaaggccagtaactggcaaccatggaagaactctcgcatccatgaatccttcgtcctcagcgttgccatctggacagccgtccgagaggttggcatacactgggcagtcgatattctttggtggaccgcttctgggtgctgctgctgctgaccctcggaggaatgaagctgtcgcgggagtgccgccggagacaaggaggaacgatggcactgggggagagaggagacgaactgcggagtccttcccggtgtttgctccaggatcccttgagaagaacccgccatccaacaggtgatctcgtggcggtatggcaccaccttttctgaccatcgtgaccaagacaatgggacgatcgttactcaacaaggagccctggagagtccaagggtgattactgtgagttcatcggcgatcgtcaccaattccacacgcagagaaggcgtcacagggacatgctacaagtctgaaatgggggcatcctagtactgagcctgaacccgaggttgagggatgtgagtgtctgagtgacaaatgaaccgtgcaggtgtcaagaaagctgaaacagggaggacacacacaaggcgtgagtgactgattggggtgtaaatgttttgctcgtttcgttggagtaacttttgggttagacgtgtgttttgtagagacaatataagttaggtcaagacaatggctattgattaggtgtatatggatttcatgtctctattgatggtattcaatttcgattttcaaaggatgaacgagaagcttaaagatcggttagttctaag

SEQ ID NO: 9383 - DNA, 2670 bp, Zea Mays
gaaatgggttgaaagccctgcccagtgagagagagcctattgacttcaaccactactcccgagaaagcagggcaaagcgtttgtgccgtgccgtggccttgtgggaagagaaagaaagggagagaaagacaggactggagaaggtgagtgagagggaggcgcgcagcggcagcggcggcggcggcgtcgccgtccatggcgaggaagcacggatggcagctccccgcgcacacgctccagggaagcaagtcctagagtatgttgtgatcggtgtctacactgccgtggtgttttctgtcgccatgctttacatccgctgcactagtataaaccctgctgatcctggaatcatgtcaaagttcgacaatgtcctcatcgatgcacctggaagtgctgccaacatacagggcacggatttgccagtgaaagctggtattggcgctggaacaatctccccatcggcaacatctacttgtaggaactctgtagatgggcattctaacgctggtgctttagctgctggagacacaaatctggatttaaggtctcagccgccaacaagtccatggagctgcttacttggagggcttgtttgttttttgtttgtgaaggaggattgtaggaaatacgatgattcagagaatcaagttgatggggaaggagccttgttctgcacgttatgtgacgccgaggttcgcaaattcagtaaacactgcagaagttgtgacaagtgtgtggatggatttgatcatcactgtcggtggctaaataactgtgttggacggaagaactatttcacgtttcttgctctgatggctaccagtcttctctggcttgctatcgaaattggagtaggcatcggtgttcttgttatatgctttgccaacaagaattcagagagaattattcaagacaggcttgggaatggtttgcctcggcctgcctttgctaccattgtagcgttttttactcttctttctctagtcgcttgcatacctttaggggagcttttcttcttccacatgatcttaatcagaaaggggatcacaacttatgaatatgtcgttgcaatgagagctatgagtgaaacacctcaagaggaggaagagcacgaggaggaggagggggtaaacattgtttattccccaacaaattcagccaccactgcgttcagtggtgctagttcactcagtcttcactacaagggctcatggtgcacacctccaaggatttttgttgatcaggatgaagtgatcccgcatttggagccagggatggtgccttcaaccatcgatcctgatgctgttggacgcgccgaaagagccaacaaagccaagaagcaggtcaaaatcagtgcctggaagcttgcaaagctggacagcaatgaggcgatgaaggccgctgctaaagtccgggcatcatcgtctgtcctccggcctattgattcccgccgggttccaggtgctagccctggctccagtggcaatgccagcatgagaagcagcatgagtgccggttacagcgccagtggcaccaaggaaaggggggctggtatgcttcagagtccctcgtatcctcagagccctgcaagccaggacgactacgagtcgggcacgcagagtggtagcagcaggaccagcccggtgcacattcacagacccgccgcaccgcacgctcagatcaacgtgccactgccacctcgtgtgccccaagcacctccaaggcctgcgccggcgttggcaccgaggccgcctgttccagccacgcagatgtccaagccaacgttccagtcggcaacatcttatgtccgtgagaaccggaaagtatcggttgtttgggatcaagaggctgctaggtacgtgtccgtggcaccggcgcccacaaggccagtaactggcaaccatggaagaactctcgcatccatgaatccttcgtcctcagcgttgccatctggacagccgtccgagaggttggcatacactgggcagtcgatattctttggtggaccgcttctgggtgctgctgctgctgaccctcggaggaatgaagctgtcgcgggagtgccgccggagacaaggaggaacgatggcactgggggagagaggagacgaactgcggagtccttcccggtgtttgctccaggatcccttgagaagaacccgccatccaacaggtgatctcgtggcggtatggcaccaccttttctgaccatcgtgaccaagacaatgggacgatcgttactcaacaaggagccctggagagtccaagggtgattactgtgagttcatcggcgatcgtcaccaattccacacgcagagaaggcgtcacagggacatgctacaagtctgaaatgggggcatcctagtactgagcctgaacccgaggttgagggatgtgagtgtctgagtgacaaatgaaccgtgcaggtgtcaagaaagctgaaacagggaggacacacacaaggcgtgagtgactgattggggtgtaaatgttttgctcgtttcgttggagtaacttttgggttagacgtgtgttttgtagagacaatataagttaggtcaagacaatggctattgattaggtgtatatggatttcatgtctctattgatggtattcaatttcgattttcaaaggatgaacgagaagcttaaagatcggttagttctaag

SEQ ID NO: 9384 - DNA, 2176 bp, Zea Mays
agaccaagaaagatccacttttggtgaaggtgaataagctgacatccacgaagacgcaacttccctactcatattactctcttcctttctgtaaaccaaacacgatagttgacagtgcagagaatcttggagaagttctgcgtggtgatcgcattgagaactctccttatgtgtttgagatgggggaacccaagatgtgccagattatctgcaaagcaaaaattgatgataaacaggcaaaggagcttaaggaaaaaatagaggatgagtatcgggtgaacatgtacggattttatatgtggcactgtaattttgattgcatgaaaaatgctgcagttacataacgtattttcttcacaggattcttgacaatctcccactagttgttcctattgcaaggcaggataggggtgctactgtttaccaggctggatatcatgttggtgtcaagggccaatacactggtaacaatgatgagaagtcctttatccacaaccacttggcatttttagtaaaataccataaggatgaaactacagatctctctagaattgttggatttgaggtcaaaccattcagtatcaatcaccagtttgaagggccgtggaatgataaaaacactcgtttaatcacatgtgatcctcatgccagcaagcttgtggtaaactcagatactcctcaggaggttgaagccgggaaggaaatcatatttacctatgatgtaggcttcgaggagagtgatatcaagtgggcttctcgctgggacacctacttgttaatgatagatgatcaaattcactggttttctattgtgaactctctcatgatcgtactcttcttatctgggatggtggcaatgattatgctccgcaccctttatagagatatctctaggtacaatcagcttgaaactgaagaagaagcccaagaggagacaggatggaagcttgttcatggagacgtattccgccctcctgcaaactccgacttactctgtgtctgtgttgggactggtgttcagttcttcggtatgctactagtaaccatgatctttgctgttctgggtttcctttcgccatcaaaccggggaggactgatgactgccatgctgctcacttgggtcttgatggggttgttcgccggatatgcttcttcacgcctgtataagatgttgaaaggatcggaatggcggagcatcaccctgaggaccgccttcctgtttcctgggattgctttcggtattttcttcatccttaatgctctaatatggggggagaagtcgtctggcgctgttcctttcaccacaatgtttgctttggtcctcctctggtttggtatctcggttcctcttgtatttgtcgggagctatctgggcttcaagcaacctgccattgaggctccggtgaagacgaacaagatcccaagacaggtccctgagcaggcttggtacatgaaccctgccttcaccattctgattggtggcatacttccgttcggagcagtcttcatcgagctcttcttcatcctgacgtcgatctggcttcaccagttctactacatctttggcttcctgttcctggtgttcattatcctcatcatcacctgtgcggagatcacgatcgtgctgtgctatttccaactgtgcagtgaggactacctgtggtggtggaggtcctttctgacctcaggatcatcagcaatctacctcttcctgtacgccgggttctacttcttcactaagctacagatcactaaggttgtgtcaggcatgctgtactttggctacatgcttcttgcctcgtttgctttctgtgtgctcaccggtacgatcggcttctacgcctgcttctgcttcacaagattgatttattcatctgtgaagatcgactaggcatgttccatgggcctgcagcgagtatgcccattgtgtgttttttttcatgaattttcagtgcagctgtacttttggtgttagcttataaacaatttatgctcactgtggttcagagttgtacaaggataggacactactgctagctttatatggggtaattttaacttgtgctgttgagaactgctgcatacgttcaatccatagtctcgttatcgtctgccacccctttcctgcttcagctgcatgatgatgtccatacgtgcttggcttcatcaagaaaat

SEQ ID NO: 9385 - DNA, 2257 bp, Zea Mays
ggccggcccgttcaccatttctcatcgttcaattcagaatctgatacatcagagaagggccacagcacagagagagactgtctgccagtggacgcgagggagcgcctccgcctcagatccaacccccaccgatgcgagctccggcgatgctccgctgggccgcggcggcgctcgcggcgctcctcgccgcctcaccggccgccgcgttttacctacccggcgtggcgcccaacgacttccataagaaagatccacttttggtgaagttgacagtgcagagaatcttggagaagttctgcgtggtgatcgcattgagaactctccttatgtgtttgagatgggggaacccaagatgtgccagattatctgcaaagcaaaaattgatgataaacaggcaaaggagcttaaggaaaaaatagaggatgagtatcgggtgaacatgattcttgacaatctcccactagttgttcctattgcaaggcaggataggggtgctactgtttaccaggctggatatcatgttggtgtcaagggccaatacactggtaacaatgatgagaagtcctttatccacaaccacttggcatttttagtaaaataccataaggatgaaactacagatctctctagaattgttggatttgaggtcaaaccattcagtatcaatcaccagtttgaagggccgtggaatgataaaaacactcgtttaatcacatgtgatcctcatgccagcaagcttgtggtaaactcagatactcctcaggaggttgaagccgggaaggaaatcatatttacctatgatgtaggcttcgaggagagtgatatcaagtgggcttctcgctgggacacctacttgttaatgatagatgatcaaattcactggttttctattgtgaactctctcatgatcgtactcttcttatctgggatggtggcaatgattatgctccgcaccctttatagagatatctctaggtacaatcagcttgaaactgaagaagaagcccaagaggagacaggatggaagcttgttcatggagacgtattccgccctcctgcaaactccgacttactctgtgtctgtgttgggactggtgttcagttcttcggtatgctactagtaaccatgatctttgctgttctgggtttcctttcgccatcaaaccggggaggactgatgactgccatgctgctcacttgggtcttgatggggttgttcgccggatatgcttcttcacgcctgtataagatgttgaaaggatcggaatggcggagcatcaccctgaggaccgccttcctgtttcctgggattgctttcggtattttcttcatccttaatgctctaatatggggggagaagtcgtctggcgctgttcctttcaccacaatgtttgctttggtcctcctctggtttggtatctcggttcctcttgtatttgtcgggagctatctgggcttcaagcaacctgccattgaggctccggtgaagacgaacaagatcccaagacaggtccctgagcaggcttggtacatgaaccctgccttcaccattctgattggtggcatacttccgttcggagcagtcttcatcgagctcttcttcatcctgacgtcgatctggcttcaccagttctactacatctttggcttcctgttcctggtgttcattatcctcatcatcacctgtgcggagatcacgatcgtgctgtgctatttccaactgtgcagtgaggactacctgtggtggtggaggtcctttctgacctcaggatcatcagcaatctacctcttcctgtacgccgggttctacttcttcactaagctacagatcactaaggttgtgtcaggcatgctgtactttggctacatgcttcttgcctcgtttgctttctgtgtgctcaccggtacgatcggcttctacgcctgcttctgcttcacaagattgatttattcatctgtgaagatcgactaggcatgttccatgggcctgcagcgagtatgcccattgtgtgttttttttcatgaattttcagtgcagctgtacttttggtgttagcttataaacaatttatgctcactgtggttcagagttgtacaaggataggacactactgctagctttatatggggtaattttaacttgtgctgttgagaactgctgcatacgttcaatccatagtctcgttatcgtctgccacccctttcctgcttcagctgcatgatgatgtccatacgtgcttggcttcatcaagaaaat

SEQ ID NO: 9386 - DNA, 1466 bp, Zea Mays
cttgacctgcaatttttctaaaagagagtgatatcaagtgggcttctcgctgggacacctacttgttaatgatagatgatcaaattcactggttttctattgtgaactctctcatgatcgtactcttcttatctgggatggtggcaatgattatgctccgcaccctttatagagatatctctaggtacaatcagcttgaaactgaagaagaagcccaagaggagacaggatggaagcttgttcatggagacgtattccgccctcctgcaaactccgacttactctgtgtctgtgttgggactggtgttcagttcttcggtatgctactagtaaccatgatctttgctgttctgggtttcctttcgccatcaaaccggggaggactgatgactgccatgctgctcacttgggtcttgatggggttgttcgccggatatgcttcttcacgcctgtataagatgttgaaaggatcggaatggcggagcatcaccctgaggaccgccttcctgtttcctgggattgctttcggtattttcttcatccttaatgctctaatatggggggagaagtcgtctggcgctgttcctttcaccacaatgtttgctttggtcctcctctggtttggtatctcggttcctcttgtatttgtcgggagctatctgggcttcaagcaacctgccattgaggctccggtgaagacgaacaagatcccaagacaggtccctgagcaggcttggtacatgaaccctgccttcaccattctgattggtggcatacttccgttcggagcagtcttcatcgagctcttcttcatcctgacgtcgatctggcttcaccagttctactacatctttggcttcctgttcctggtgttcattatcctcatcatcacctgtgcggagatcacgatcgtgctgtgctatttccaactgtgcagtgaggactacctgtggtggtggaggtcctttctgacctcaggatcatcagcaatctacctcttcctgtacgccgggttctacttcttcactaagctacagatcactaaggttgtgtcaggcatgctgtactttggctacatgcttcttgcctcgtttgctttctgtgtgctcaccggtacgatcggcttctacgcctgcttctgcttcacaagattgatttattcatctgtgaagatcgactaggcatgttccatgggcctgcagcgagtatgcccattgtgtgttttttttcatgaattttcagtgcagctgtacttttggtgttagcttataaacaatttatgctcactgtggttcagagttgtacaaggataggacactactgctagctttatatggggtaattttaacttgtgctgttgagaactgctgcatacgttcaatccatagtctcgttatcgtctgccacccctttcctgcttcagctgcatgatgatgtccatacgtgcttggcttcatcaagaaaat

SEQ ID NO: 9387 - DNA, 2141 bp, Zea Mays
ggcccgttcaccatttctcatcgttcaattcagagtctgacatatcagagaagggccacagcacagagagtgactgtctgccagcgccagactgccagtggactgcgagggagcgcctccgcctcagatccaaccccaccgatgcgagctccggcgatgctccgctgggccgcggcggcgctcgccgcgctcctcgccgcctcaccggccgccgcgttctatctacccggcgtggcgcccaacgacttccataagaaagatccacttttggtgaaggtgaataagctgacatccacgaagacgcaacttccctactcatattactctcttcctttctgtaaaccaaacacgatagttgacagtgcagagaatcttggagaagttctgcgtggtgatcgcattgagaactctccttatgtgtttgagatgggggaacccaagatgtgccagattatctgcaaagcaaaaattgatgataaacaggcaaaggagctcaaggaaaaaatagaggatgagtatcgggtgaacatgattcttgacaatctcccactagttgttcctcttgcaaggcaggataggggtgctactgtttaccaggctggatatcatgttggtgtcaagggccaatacgctggtaacaatgataagaagtcctttatccacaatcacttggcatttttagtaaaataccacaaggatgaaactacagatctctctagaattgttggatttgaggtcaaaccattcagtatcaatcaccagtttgaagggccgtggaatgataaaaacactcgtttaatcacatgtgatcctcatgccagcaagcttctggtaaactcagatactcctcaggaggttgaagccgggaaggaaatcatatttacctatgatgtaggcttcgagagatatctctaggtacaatcagcttgaaactgaagaagaaacccaagaggagacaggatggaagcttgttcatggagacgtattccgccctcctgcaaactctgacttactctgtgtctgtgttgggactggtgttcagttcttcggtatgctgctagtaaccatgatctttgctgttctgggtttcctttcaccatcaaaccggggaggactgatgactgccatgctgctcacttgggtcttgatggggttgtttgctggatatgcttcttcacgcctgtataagatgttgaaaggatcagaatggaagagcatcaccctgaggaccgccttcctgtttcctgggattgctttcggtattttcttcgtccttaatgctctaatatggggggagaagtcgtctggcgctgttcctttcaccacaatgtttgccttggtcctcctctggtttggtatctcggttcctcttgtatttgtcgggagctatctgggcttcaagcaacctgccattgaggctccggtgaagacgaacaagatcccgagacaggtccccgagcaagcttggtacatgaaccctgccttcaccattctgattggtggcatacttccgttcggagcagtcttcatcgagctcttcttcatcctgacgtcgatctggcttcatcagttctactacatctttggcttcctgttcctggtgttcattatcctcatcgtcacctgtgcggagatcacaatcgtgctgtgctatttccaactgtgcagtgaggactacctgtggtggtggaggtcctttctgacttcaggatcatcagcaatctacctcttcctgtatgccgggttctacttcttcactaagctgcagatcactaaggtggtgtcgggcatgctgtactttggctacatgcttcttgcctcgttcgctttctgtgtgctcaccggtacgatcggcttctacgcctgcttctgcttcacaagattgatttattcttctgtgaagatcgactaggcatgttccatgggcctgcagcgagtatgcccattgcgtttttttcatgaattttcagtgcagctgtacttttggtgttagcttataaaccatttatgctcactgtggttcagagttgtacaaggataggacactactgctagctttatatggggtaattttaacttgtgctgttgagaactgctgcatacgttcaatccatagtctcgttatcgtctgccaccccttt

SEQ ID NO: 9388 - DNA, 1626 bp, Zea Mays
atgaccaaaatttccctcctaccttgtgctcgaatttggatgcctctctctctctcccatgttgcgtctgccctgctcttgttgccgtttgcgcacctggcagcggcgacgcaggtgggcgacgcgtgctcctcctccagcggcggtggctccggcctgcactgcagcccctgtggcgccggcggggcagcatctgcacgtgcgccagccccgtggacccggccacccacggcacgggcctccccttcaacaactacccgtggctcaccacccacaactcctacgctctcgccggcgccgcctccgccaccggctccgcgctcatcaccgagaccaaccaggaggacaccgtcactgcgcagctcaagatgctgttgatgcaggggaaggagagatgccaccagccgtccagccagccctcccctttcgtgactgtgaccgccactatggccacgacggatggttggcatgggaaggagatctggagctgcacaggtgtaacatccagaaagtggcagctgagccagttgagttcaatcaagagattaggagggaccattgtttggagccggcccctttggtgaggggaggtaggcagggcaggtggtgggagggccatggggggggggggttcagcactgatgtccatgatgttgtttgagccactccatccatccatcgccgtgtaccagactagaatcagtccacacccacaaatgtgatatctgtctctggagccctgcctatctacggagcggatttggggagagacaaaaactgacttggcttccacattttgatggagactttgtttcagtagcgagttttttttagcgagcacaggctatgctatgaaatcgagagataggagtatagaagcaaacagaagcccagttcgtagcagcagagcacaacgcctaaagtgatgtttattatccttgattgatggcattgaagacagagggtgacacaaagggttcaaagtcttctgatcagaatggaaagaaacagatgttacccaatggtgaacttggatcatcaaggactaagtacaacaacatggagccagatgttgttgatttctttggggaatgtatgaatagtccccgaaatggtcgtactccgcttgcaaatgagatatatgagcaaatggttgcagagaaggaaagagagctagaagaaggagaagcacaaaagtcaccctccaagattgttgctgatagtctcagccagatcagtcgctcatccaccttccttctaaacattggtgtctgtttgaatgcttcaaacctttgtggtggaacctttgtatgtttgaacctctattgtggaagaactagtgtgctggaattgtgtatgacttgtgatgagaatgttgtgtatgatggcttttatgtgtattatgattctgtgagctatcatgagagctctgtgtatcatgagagctcagtgtatgattctgcgtcactgttagaagagttaccaagaagtaagcatgagagtacttccatgccaggaaagcagaaattgctgcaaaaacaggggaaaagcgagttgataggcaacatgacacatatacttggtaacacaaagcttaggatgatgatattcattctacttgcctga

SEQ ID NO: 9389 - DNA, 2270 bp, Zea Mays
atgaccaaaatttccctcctaccttgtgctcgaatttggatgcctctctctctctcccatgttgcgtctgccctgctcttgttgccgtttgcgcacctggcagcggcgacgcaggtgggcgacgcgtgctcctcctccagcggcggtggctccggcctgcactgcagcccctgtggcgccggcggggcagcatctgcacgtgcgccagccccgtggacccggccacccacggcacgggcctccccttcaacaactacccgtggctcaccacccacaactcctacgctctcgccggcgccgcctccgccaccggctccgcgctcatcaccgagaccaaccaggaggacaccgtcactgcgcagctcaagatgctgttgatgcaggggaaggagagatgccaccagccgtccagccagccctcccctttcgtgactgtgaccgccactatggccacgacggatggtaattatcttgtcttattaaccgagacttggatccattttcatcacaaaggagcacagcagcacaggtgtagtatgaaatatgaatgcgatgttcatttatttctgatgatacggcttgtttgcgccggagacgcaaggttggcatgggaaggagatctggagctgcacaggtgtaacatccagaaagtggcagctgagccagttgagttcaatcaagagattaggagggaccattgtttggagccggcccctttggtgaggggaggtaggcagggcaggtggtgggagggccatggggggggggggttcagcactgatgtccatgatgttgtttgagccactccatccatccatcgccgtgtaccagactagaatcagtccacacccacaaatgtgatatctgtctctggagccctgcctatctacggagcggatttggggagagacaaaaactgacttggcttccacattttgatggagactttgtttcagtagcgagttttttttagcgagcacaggctatgctatgaaatcgagagataggagtatagaagcaaacagaagcccagttcgtagcagcagagcacaacgcctaaagtgatgtttattatccttgattgatggcattgaagacagagggtgacacaaagggttcaaagtcttctgatcagaatggaaagaaacagatgttacccaatggtgaacttggatcatcagtaatatttactttctggttgcaaaactgccaccaaataaccctcttcctaatctgttacttcacatctcctctttctaaaatgtacgacgctttctttatgcatcttctatttgttaatttttagaaacctgatcattagcaactgtatttacaaactagaatcatctggtgagcttcaggaagaaacttaaattgatactactagtcaggacttctgtttgataaccagcagtaggggtacttgcttagcatagcaattcaatatggagtttgagtttttattgattcttgaggtctgccatatttggaaatatgtaattcgactaacttgtgactaattaaaaggctgatgaactagacattgtttgctttgtcatgataagtttctaaaacccaggttgctttttaaaaggctgatgaactagacactatgttgtattgctgttggtatgtaccaatatttcatggaaaatcttatatcccaagttttttatatgccgcagaggactaagtacaacaacatggagccagatgttgttgatttctttggggaatgtatgaatagtccccgaaatggtcgtactccgcttgcaaatgagatatatgagcaaatggttgcagagaaggaaagagagctagaagaaggagaagcacaaaagtcaccctccaagattgttgctgatagtctcagccagatcagtcgctcatccaccttccttctaaacattggtgtctgtttgaatgcttcaaacctttgtggtggaacctttgtatgtttgaacctctattgtggaagaactagtgtgctggaattgtgtatgacttgtgatgagaatgttgtgtatgatggcttttatgtgtattatgattctgtgagctatcatgagagctctgtgtatcatgagagctcagtgtatgattctgcgtcactgttagaagagttaccaagaagtaagcatgagagtacttccatgccaggaaagcagaaattgctgcaaaaacaggggaaaagcgagttgataggcaacatgacacatatacttggtaacacaaagcttaggatgatgatattcattctacttgcctga

SEQ ID NO: 9390 - DNA, 2115 bp, Zea Mays
atgaccaaaatttccctcctaccttgtgctcgaatttggatgcctctctctctctcccatgttgcgtctgccctgctcttgttgccgtttgcgcacctggcagcggcgacgcaggtgggcgacgcgtgctcctcctccagcggcggtggctccggcctgcactgcagcccctgtggcgccggcggggcagcatctgcacgtgcgccagccccgtggacccggccacccacggcacgggcctccccttcaacaactacccgtggctcaccacccacaactcctacgctctcgccggcgccgcctccgccaccggctccgcgctcatcaccgagaccaaccaggaggacaccgtcactgcgcagctcaaggtaacccaaccagttcccgtttcatccattcatttgccgcctggcctctccactgctgaggccagctcaggtcgtctaaccgcttccgccttccgctccgacgccggcgacgctgggaatggaaacggcatcgagttttcctttggttgaggaatcaacgacgtgtgggggtactactgaaaagctagacaggagaggtgttgacagcaacataaataaagcagataaaaggaaaagcgtatcttatatcttttgcaagtgatcgtgtacacatgtagcagtagtagataggaaatccagtcctcaactatctcaagcatggtgtgctgatataggccctaattatcagccacgtttcggttgccagatgctgttgatgcaggggaaggagagatgccaccagccgtccagccagccctcccctttcgtgactgtgaccgccactatggccacgacggatggtaattatcttgtcttattaaccgagacttggatccattttcatcacaaaggagcacagcagcacaggtgtagtatgaaatatgaatgcgatgttcatttatttctgatgatacggcttgtttgcgccggagacgcaaggttggcatgggaaggagatctggagctgcacaggtgtaacatccagaaagtggcagctgagccagttgagttcaatcaagagattaggagggaccattgtttggagccggcccctttggtgaggggaggtaggcagggcaggtggtgggagggccatggggggggggggttcagcactgatgtccatgatgttgtttgagccactccatccatccatcgccgtgtaccagactagaatcagtccacacccacaaatgtgatatctgtctctggagccctgcctatctacggagcggatttggggagagacaaaaactgacttggcttccacattttgatggagactttgtttcagtagcgagttttttttagcgagcacaggctatgctatgaaatcgagagataggagtatagaagcaaacagaagcccagttcgtagcagcagagcacaacgcctaaagtgatgtttattatccttgattgatggcattgaagacagagggtgacacaaagggttcaaagtcttctgatcagaatggaaagaaacagatgttacccaatgaggactaagtacaacaacatggagccagatgttgttgatttctttggggaatgtatgaatagtccccgaaatggtcgtactccgcttgcaaatgagatatatgagcaaatggttgcagagaaggaaagagagctagaagaaggagaagcacaaaagtcaccctccaagattgttgctgatagtctcagccagatcagtcgctcatccaccttccttctaaacattggtgtctgtttgaatgcttcaaacctttgtggtggaacctttgtatgtttgaacctctattgtggaagaactagtgtgctggaattgtgtatgacttgtgatgagaatgttgtgtatgatggcttttatgtgtattatgattctgtgagctatcatgagagctctgtgtatcatgagagctcagtgtatgattctgcgtcactgttagaagagttaccaagaagtaagcatgagagtacttccatgccaggaaagcagaaattgctgcaaaaacaggggaaaagcgagttgataggcaacatgacacatatacttggtaacacaaagcttaggatgatgatattcattctacttgcctga

SEQ ID NO: 9391 - DNA, 1993 bp, Zea Mays
atgaccaaaatttccctcctaccttgtgctcgaatttggatgcctctctctctctcccatgttgcgtctgccctgctcttgttgccgtttgcgcacctggcagcggcgacgcaggtgggcgacgcgtgctcctcctccagcggcggtggctccggcctgcactgcagcccctgtggcgccggcggggcagcatctgcacgtgcgccagccccgtggacccggccacccacggcacgggcctccccttcaacaactacccgtggctcaccacccacaactcctacgctctcgccggcgccgcctccgccaccggctccgcgctcatcaccgagaccaaccaggaggacaccgtcactgcgcagctcaaggtaacccaaccagttcccgtttcatccattcatttgccgcctggcctctccactgctgaggccagctcaggtcgtctaaccgcttccgccttccgctccgacgccggcgacgctgggaatggaaacggcatcgagttttcctttggttgaggaatcaacgacgtgtgggggtactactgaaaagctagacaggagaggtgttgacagcaacataaataaagcagataaaaggaaaagcgtatcttatatcttttgcaagtgatcgtgtacacatgtagcagtagtagataggaaatccagtcctcaactatctcaagcatggtgtgctgatataggccctaattatcagccacgtttcggttgccagatgctgttgatgcaggggaaggagagatgccaccagccgtccagccagccctcccctttcgtgactgtgaccgccactatggccacgacggatggttggcatgggaaggagatctggagctgcacaggtgtaacatccagaaagtggcagctgagccagttgagttcaatcaagagattaggagggaccattgtttggagccggcccctttggtgaggggaggtaggcagggcaggtggtgggagggccatggggggggggggttcagcactgatgtccatgatgttgtttgagccactccatccatccatcgccgtgtaccagactagaatcagtccacacccacaaatgtgatatctgtctctggagccctgcctatctacggagcggatttggggagagacaaaaactgacttggcttccacattttgatggagactttgtttcagtagcgagttttttttagcgagcacaggctatgctatgaaatcgagagataggagtatagaagcaaacagaagcccagttcgtagcagcagagcacaacgcctaaagtgatgtttattatccttgattgatggcattgaagacagagggtgacacaaagggttcaaagtcttctgatcagaatggaaagaaacagatgttacccaatggtgaacttggatcatcaaggactaagtacaacaacatggagccagatgttgttgatttctttggggaatgtatgaatagtccccgaaatggtcgtactccgcttgcaaatgagatatatgagcaaatggttgcagagaaggaaagagagctagaagaaggagaagcacaaaagtcaccctccaagattgttgctgatagtctcagccagatcagtcgctcatccaccttccttctaaacattggtgtctgtttgaatgcttcaaacctttgtggtggaacctttgtatgtttgaacctctattgtggaagaactagtgtgctggaattgtgtatgacttgtgatgagaatgttgtgtatgatggcttttatgtgtattatgattctgtgagctatcatgagagctctgtgtatcatgagagctcagtgtatgattctgcgtcactgttagaagagttaccaagaagtaagcatgagagtacttccatgccaggaaagcagaaattgctgcaaaaacaggggaaaagcgagttgataggcaacatgacacatatacttggtaacacaaagcttaggatgatgatattcattctacttgcctga

SEQ ID NO: 9392 - DNA, 2475 bp, Zea Mays
gctccatccccatcttcgcctcctcctcctcctccttggcttcaactccactcctcgcacgcttgcttgctttccaaaccaagggataacggataacataaccgccgcccgtctaagcgcttccaccaccaccacgtactacgccgcccatcccaactgcactgcactgcacccagcaacagccaacagggcctgtctgtctggtggtctcaaaacctgcatcaggagcctctgtgcctgctgcatgggccctccgcggccggcctcgccggcctgtgccaccgccggcgtcacggtcaaggtcagcgacagatacgtcgagatcaaaaacggcatctttgacctgacgctgtccaacccggacgggatcgtcaccggcgtgcgctacaacggcgtggacaatctcatggagattctcaacaaggaagacaaccgagggtactgggaccttgtttggaacccaccaggacagaaaactggcatctttgatgtgatcaaaggcaccgaattccgcatcgtttaccaagatgagaaccaggctgaggtatccttcaccagaaattgggatccttcccttgaaggaaaagctgtccccttgaacatcgataagaggttcatcgttctccgtggctcatccgggttctacacctatggtatctatgagcataaggaaggatggcctgatttcggcttgggagagacgagggtggctttcaagctgcggaaagacatgtttcattacatggcattggctgacgacaggcagagaattatgccaatgcccgatgaccggttgcctcctcgaggacagccattagcataccctgaggctgtgctccttgtggacccaatcaaccctgaacttagaggggaggttgacgacaagtaccagtactcttgcgaagaccagtacaacaatgtccatggttggatgtcattcgatcctccaattggcttctggcagatcactccaagtgatgagttcaggacaggaggacctctgaagcaaaacttgacttctcatgttggccctactatgctggctatgtttcttagtgcacattatgcaggagatgacctctcaccaaagttcacgaatggagagtactggaaaaaggtccatggaccggtattcatgtatcttaattccagttgggatgcaagtgacccaactatgctatgggaagatgcaaaagttcagatgatgattgagaaaggaaactggccgtactgttttgcactttcagaggattttcagaagacagagcaaaggggttgtgtctctggtagattactagtccgagacaggtatatagatgatcaagacctttatgcctcaggagcctatgtaggcttggccctaccaggagaagctggatcctggcaaagagagtgcaagggataccagttctggtgtagagcagatgtagacgggagcttctacataaggaacattgtaactgggaactacaacctgtatgcttgggttccagggtttctaggggactacaagctagatgccacagtgaccatagcttcaggggatgatatttatctgggtgacctcgtgtatgagccgccaagagacgggccgacgatgtgggagattggagtacctgatcgatctgctgctgagttttatgttccggatcctaaccccaactacgtcaatagattatttagacagtatgggctctgggaacgatacgcggaactataccctgacagtgacctggtatacacagttggccaaagtgactatagcacggattggttctatgctcaagttaacaggaaaattgatgacaacacttaccagccaacaacatggcaaatcaagttcgaccttgacagtgtcagcccaagcagcacctacaagttcagggtggctctggcgtcttctgcgctcgctgagttgcagatttccttcaacgaccaggacagggctgttcctcacttcgccaccgggctgatcggcagggacaacgccatagcaaggcacgggatccatgggctctactggctgtttaacatcgatgtggccagtgcttggcttgtgcaaggggtgaacaccatctacctgaagcagcccaggagccagagcccgtttcaggggttgatgtacgactacttgcgtttggagggaccgtgcggctgctaatcgatttgtgtgtgaaattgcgttgctagatgtgaaattacaactgcattcactgtgtaaacccaatgcatacgattggggaaaagatgttgcggtattataggcattggggttacgtgtaggtaatgttagtttaattttcgcatttataaccgtgcagctatgctgatttgtaactataatgatgtaagtgtgtacgcaataatgggtgtttttagtcaggtaactaattacggacaacttcaacacaaggtcaaaaacggaggttgtttgaagggtattgtagaccactttatctataaagcaaaggtgat

SEQ ID NO: 9393 - DNA, 2497 bp, Zea Mays
ccctcctcttctcgctccatccccatcttcgcctcctcctcctcctccttggcttcaactccactcctcgcacgcttgcttgctttccaaaccaagggataacggataacataaccgccgcccgtctaagcgcttccaccaccaccacgtactacgccgcccatcccaactgcactgcactgcacccagcaacagccaacagggcctgtctgtctggtggtctcaaaacctgcatcaggagcctctgtgcctgctgcatgggccctccgcggccggcctcgccggcctgtgccaccgccggcgtcacggtcaaggtcgagatcaaaaacggcatctttgacctgacgctgtccaacccggacgggatcgtcaccggcgtgcgctacaacggcgtggacaatctcatggagattctcaacaaggaagacaaccgagggtactgggaccttgtttggaacccaccaggacagaaaactggcatctttgatgtgatcaaaggcaccgaattccgcatcgtttaccaagatgagaaccaggctgaggtatccttcaccagaaattgggatccttcccttgaaggaaaagctgtccccttgaacatcgataagaggttcatcgttctccgtggctcatccgggttctacacctatggtatctatgagcataaggaaggatggcctgatttcggcttgggagagacgagggtggctttcaagctgcggaaagacatgtttcattacatggcattggctgacgacaggcagagaattatgccaatgcccgatgaccggttgcctcctcgaggacagccattagcataccctgaggctgtgctccttgtggacccaatcaaccctgaacttagaggggaggttgacgacaagtaccagtactcttgcgaagaccagtacaacaatgtccatggttggatgtcattcgatcctccaattggcttctggcagatcactccaagtgatgagttcaggacaggaggacctctgaagcaaaacttgacttctcatgttggccctactatgctggctatgtttcttagtgcacattatgcaggagatgacctctcaccaaagttcacgaatggagagtactggaaaaaggtccatggaccggtattcatgtatcttaattccagttgggatgcaagtgacccaactatgctatgggaagatgcaaaagttcagatgatgattgagaaaggaaactggccgtactgttttgcactttcagaggattttcagaagacagagcaaaggggttgtgtctctggtagattactagtccgagacaggtatatagatgatcaagacctttatgcctcaggagcctatgtaggcttggccctaccaggagaagctggatcctggcaaagagagtgcaagggataccagttctggtgtagagcagatgtagacgggagcttctacataaggaacattgtaactgggaactacaacctgtatgcttgggttccagggtttctaggggactacaagctagatgccacagtgaccatagcttcaggggatgatatttatctgggtgacctcgtgtatgagccgccaagagacgggccgacgatgtgggagattggagtacctgatcgatctgctgctgagttttatgttccggatcctaaccccaactacgtcaatagattgtacgtcaaccaccctgcagatagatttagacagtatgggctctgggaacgatacgcggaactataccctgacagtgacctggtatacacagttggccaaagtgactatagcacggattggttctatgctcaagttaacaggaaaattgatgacaacacttaccagccaacaacatggcaaatcaagttcgaccttgacagtgtcagcccaagcagcacctacaagttcagggtggctctggcgtcttctgcgctcgctgagttgcagatttccttcaacgaccaggacagggctgttcctcacttcgccaccgggctgatcggcagggacaacgccatagcaaggcacgggatccatgggctctactggctgtttaacatcgatgtggccagtgcttggcttgtgcaaggggtgaacaccatctacctgaagcagcccaggagccagagcccgtttcaggggttgatgtacgactacttgcgtttggagggaccgtgcggctgctaatcgatttgtgtgtgaaattgcgttgctagatgtgaaattacaactgcattcactgtgtaaacccaatgcatacgattggggaaaagatgttgcggtattataggcattggggttacgtgtaggtaatgttagtttaattttcgcatttataaccgtgcagctatgctgatttgtaactataatgatgtaagtgtgtacgcaataatgggtgtttttagtcaggtaactaattacggacaacttcaacacaaggtcaaaaacggaggttgtttgaagggtattgtagaccactttatctataaagcaaaggtgat

SEQ ID NO: 9394 - DNA, 2701 bp, Zea Mays
cgaacattaggcactcacagccacagatgaaacaaggctccttgaaggcggcaggtgtgcactgcctgcctgccgactagaccaaccaactaccaagaattaaaagacgcggccgagcgagcgagggccggggggctaggacgccggccattgccgccctcctcttctcgctccatccccatcttcgcctcctcctcctcctccttggcttcaactccactcctcgcacgcttgcttgctttccaaaccaagggataacggataacataaccgccgcccgtctaagcgcttccaccaccaccacgtactacgccgcccatcccaactgcactgcactgcacccagcaacagccaacaggggtagtggaaagacgaaaggactcgctgatctgcccatcatccatccaatccatatggagaagcttaggagcctctgtgcctgctgcatgggccctccgcggccggcctcgccggcctgtgccaccgccggcgtcacggtcaaggtcagcgacagatacgtcgagatcaaaaacggcatctttgacctgacgctgtccaacccggacgggatcgtcaccggcgtgcgctacaacggcgtggacaatctcatggagattctcaacaaggaagacaaccgagggtactgggaccttgtttggaacccaccaggacagaaaactggcatctttgatgtgatcaaaggcaccgaattccgcatcgtttaccaagatgagaaccaggctgaggtatccttcaccagaaattgggatccttcccttgaaggaaaagctgtccccttgaacatcgataagaggttcatcgttctccgtggctcatccgggttctacacctatggtatctatgagcataaggaaggatggcctgatttcggcttgggagagacgagggtggctttcaagctgcggaaagacatgtttcattacatggcattggctgacgacaggcagagaattatgccaatgcccgatgaccggttgcctcctcgaggacagccattagcataccctgaggctgtgctccttgtggacccaatcaaccctgaacttagaggggaggttgacgacaagtaccagtactcttgcgaagaccagtacaacaatgtccatggttggatgtcattcgatcctccaattggcttctggcagatcactccaagtgatgagttcaggacaggaggacctctgaagcaaaacttgacttctcatgttggccctactatgctggctatgtttcttagtgcacattatgcaggagatgacctctcaccaaagttcacgaatggagagtactggaaaaaggtccatggaccggtattcatgtatcttaattccagttgggatgcaagtgacccaactatgctatgggaagatgcaaaagttcagatgatgattgagaaaggaaactggccgtactgttttgcactttcagaggattttcagaagacagagcaaaggggttgtgtctctggtagattactagtccgagacaggtatatagatgatcaagacctttatgcctcaggagcctatgtaggcttggccctaccaggagaagctggatcctggcaaagagagtgcaagggataccagttctggtgtagagcagatgtagacgggagcttctacataaggaacattgtaactgggaactacaacctgtatgcttgggttccagggtttctaggggactacaagctagatgccacagtgaccatagcttcaggggatgatatttatctgggtgacctcgtgtatgagccgccaagagacgggccgacgatgtgggagattggagtacctgatcgatctgctgctgagttttatgttccggatcctaaccccaactacgtcaatagattgtacgtcaaccaccctgcagatagatttagacagtatgggctctgggaacgatacgcggaactataccctgacagtgacctggtatacacagttggccaaagtgactatagcacggattggttctatgctcaagttaacaggaaaattgatgacaacacttaccagccaacaacatggcaaatcaagttcgaccttgacagtgtcagcccaagcagcacctacaagttcagggtggctctggcgtcttctgcgctcgctgagttgcagatttccttcaacgaccaggacagggctgttcctcacttcgccaccgggctgatcggcagggacaacgccatagcaaggcacgggatccatgggctctactggctgtttaacatcgatgtggccagtgcttggcttgtgcaaggggtgaacaccatctacctgaagcagcccaggagccagagcccgtttcaggggttgatgtacgactacttgcgtttggagggaccgtgcggctgctaatcgatttgtgtgtgaaattgcgttgctagatgtgaaattacaactgcattcactgtgtaaacccaatgcatacgattggggaaaagatgttgcggtattataggcattggggttacgtgtaggtaatgttagtttaattttcgcatttataaccgtgcagctatgctgatttgtaactataatgatgtaagtgtgtacgcaataatgggtgtttttagtcaggtaactaattacggacaacttcaacacaaggtcaaaaacggaggttgtttgaagggtattgtagaccactttatctataaagcaaaggtgat

SEQ ID NO: 9395 - DNA, 1436 bp, Zea Mays
ctgctcctaaacacgtattccagtgaattacgttttcactcgcgatatcgtacttttggttcgtcgtgtactcgtgtggaaggcggctgcctgctcccgcggtctcttccgtctcggaggtgggagagagcgatcagcggcgtcgccgggtggatccaaagcgcgcgagaaaatgcagggcggatccagcggcatcgtgtatggtggcctcaagtaccaggcgcggtgtatcgccgacatacgcgcggacgccggctcgaccaccttcctcgccggcaccctcagcctcaaggaggagaacgaggtgcacctgatccggttttcgccggcggagagcgagctggtgtgcgatggcctcttctaccaccccaacgagatttgggacctcaaatcatgccccttcgatcacagggttttctccacagtctacacgtctggtgagggctatggtgcatcagtttggaagatcccggagctcaatgggcaatcaaactcaccacaacttgagcagctctttgagcttagtgggcatacgggcaagattagacgtgtgatctggtggccacttggaaagcatgataaactaattagcattgatgaccgaaatatttttctttggaacatagacacgtcaaaaaaaatagctaaggtgatctcacagggatcaactgacatgcttccaaatttacgtggtggagcttgggatccacacaatcataatttagttgctgcaatatctgattcatcacttcagctgtgggatctacgttctatggaaaaatcaactgcaattgaacatgcacatatacgggatgtggattataaccccaagaagcaaaacattgttgcaacagcagaagaggaatttggaattcgcttgtgggatctcagaatgcttaagtatcctctaaaagatctccctgggcactcacattggacatgggctgttcggcacaatcctgcgtatgatgagctccttctgagtgctggaacagattcaactgtaaatttatggttggctaaagttagcagtgacgatcctgaatctgatagcccttctgctttatccaataggcaagaagtaccattactcaactcatatactgactatgaagacagcatctatggtattgcatggagctcccatgatccatcattattcgcttctttgtcatatgatggaagggttgtcttggaatcagtcaagccctacttgcagagaaaatgaaccttgtctagttttctaaattgtaagacaacaaattatagtgaaggctcctctcatcccccgtcgcttggtggatcacccccacgaaaccagcctagccaaagacagttttctatagatttacccagcaaaaactcccagcttggaagccagcaatgacacctggatttcctgatgcaagattggagagtgaattgtgatgcccagc

SEQ ID NO: 9396 - DNA, 1970 bp, Zea Mays
gtgaattacgttttcactcgcgatatcgtacttttggttcgtcgtgtactcgtgtggaaggcggctgcctgctcccgcggtctcttccgtctcggaggtgggagagagcgatcagcggcgtcgccgggtggatccaaagcgcgcgagaaaatgcagggcggatccagcggcatcgtgtatggtggcctcaagtaccaggcgcggtgtatcgccgacatacgcgcggacgccggctcgaccaccttcctcgccggcaccctcagcctcaaggaggagaacgaggtgcacctgatccggttttcgccggcggagagcgagctggtgtgcgatggcctcttctaccaccccaacgagatttgggacctcaaatcatgccccttcgatcacagggttttctccacagtctacacgtctggtgagggctatggtgcatcagtttggaagatcccggagctcaatgggcaatcaaactcaccacaacttgagcagctctttgagcttagtgggcatacgggcaagattagacgtgtgatctggtggccacttggaaagcatgataaactaattagcattgatgaccgaaatatttttctttggaacatagacacgtcaaaaaaaatagctaaggtgatctcacagggatcaactgacatgcttccaaatttacgtggtggagcttgggatccacacaatcataatttagttgctgcaatatctgattcatcacttcagctgtgggatctacgttctatggaaaaatcaactgcaattgaacatgcacatatacgggatgtggattataaccccaagaagcaaaacattgttgcaacagcagaagaggaatttggaattcgcttgtgggatctcagaatgcttaagtatcctctaaaagatctccctgggcactcacattggacatgggctgttcggcacaatcctgcgtatgatgagctccttctgagtgctggaacagattcaactgtaaatttatggttggctaaagttagcagtgacgatcctgaatctgatagcccttctgctttatccaataggcaagaagtaccattactcaactcatatactgactatgaagacagcatctatggtattgcatggagctcccatgatccatcattattcgcttctttgtcatatgatggaagggttgtcttggaatcagtcaagccctacttgcagagaaaatgaaccttgtctagttttctaaattctgagtagctttgccttgccattctgtagcctcttaacaagcatttatgtgatgattcggtttactgttgtagcaatggcagaaaaatggataacaagattgttacagaaatcaatttttaggatgttgtatatttgaagtgtccatgaaaaggtcttgtgttatatgatgaggtagaattgagcaaatttggtaaaacaaacagattaacgagaataagttattttatgaactatcatgttatgtattcaatatttttcttatttgcacaatacttgcccatcttctttgcaaggtacatgtcctatagttggttcatgcccaaaaatgtgtttaatggctcaattagtcatcacatatgtgcattcgtcaaattagaaaaaaaaaggttgtgaacttttccaacgcccgtgtacagctaggcaatccaagttctttgaactaataagtgaaccataatctaatattctgctgtattaacttatatcatgtagttggctcacgtttcattgtcatacttaggcttttaagtagacttgcacaatggtaaaaccagactcaatgtagcagtagtaggtcagatttggttgtattaaacagtgtatgcctctttggaatgcaggatttttttgttttttgtgtttttcctgtaaaaatgaattgatctctcctgcatgattcctcttaaatttctgcattccaaaggggcgtacatttgcacaagttaatacgtacccaaaag

SEQ ID NO: 9397 - DNA, 1869 bp, Zea Mays
cctccatgtcaccatccgcttcgttattctctgctactacgctgtctgctcctaaacacgtattccagtgaattacgttttcactcgcgatatcgtacttttggttcgtcgtgtactcgtgtggaaggcggctgcctgctcccgcggtctcttccgtctcggaggtgggagagagcgatcagcggcgtcgccgggtggatccaaagcgcgcgagaaaatgcagggcggatccagcggcatcgtgtatggtggcctcaagtaccaggcgcggtgtatcgccgacatacgcgcggacgccggctcgaccaccttcctcgccggcaccctcagcctcaaggaggagaacgaggtgcacctgatccggttttcgccggcggagagcgagctggtgtgcgatggcctcttctaccaccccaacgagatttgggacctcaaatcatgccccttcgatcacagggttttctccacagtctacacgtctggtgagggctatggtgcatcagtttggaagatcccggagctcaatgggcaatcaaactcaccacaacttgagcagctctttgagcttagtgggcatacgggcaagattagacgtgtgatctggtggccacttggaaagcatgataaactaattagcattgatgaccgaaatatttttctttggaacatagacacgtcaaaaaaaatagctaaggtgatctcacagggatcaactgacatgcttccaaatttacgtggtggagcttgggatccacacaatcataatttagttgctgcaatatctgattcatcacttcagctgtgggatctacgttctatggaaaaatcaactgcaattgaacatgcacatatacgggatgtggattataaccccaagaagcaaaacattgttgcaacagcagaagaggaatttggaattcgcttgtgggatctcagaatgcttaagtatcctctaaaagatctccctgggcactcacattggacatgggctgttcggcacaatcctgcgtatgatgagctccttctgagtgctggaacagattcaactgtaaatttatggttggctaaagttagcagtgacgatcctgaatctgatagcccttctgctttatccaataggcaagaagtaccattactcaactcatatactgactatgaagacagcatctatggtattgcatggagctcccatgatccatcattattcgcttctttgtcatatgatggaagggttgtcttggaatcagtcaagccctacttgcagagaaaatgaaccttgtctagttttctaaattgtaaggtagaattgagcaaatttggtaaaacaaacagattaacgagaataagttattttatgaactatcatgttatgtattcaatatttttcttatttgcacaatacttgcccatcttctttgcaaggtacatgtcctatagttggttcatgcccaaaaatgtgtttaatggctcaattagtcatcacatatgtgcattcgtcaaattagaaaaaaaaaggttgtgaacttttccaacgcccgtgtacagctaggcaatccaagttctttgaactaataagtgaaccataatctaatattctgctgtattaacttatatcatgtagttggctcacgtttcattgtcatacttaggcttttaagtagacttgcacaatggtaaaaccagactcaatgtagcagtagtaggtcagatttggttgtattaaacagtgtatgcctctttggaatgcaggatttttttgttttttgtgtttttcctgtaaaaatgaattgatctctcctgcatgattcctcttaaatttctgcattccaaaggggcgtacatttgcacaagttaatacgtacccaaaag

SEQ ID NO: 9398 - DNA, 1479 bp, Zea Mays
gtgaattacgttttcactcgcgatatcgtacttttggttcgtcgtgtactcgtgtggaaggcggctgcctgctcccgcggtctcttccgtctcggaggtgggagagagcgatcagcggcgtcgccgggtggatccaaagcgcgcgagaaaatgcagggcggatccagcggcatcgtgtatggtggcctcaagtaccaggcgcggtgtatcgccgacatacgcgcggacgccggctcgaccaccttcctcgccggcaccctcagcctcaaggaggagaacgaggtgcacctgatccggttttcgccggcggagagcgagctggtgtgcgatggcctcttctaccaccccaacgagatttgggacctcaaatcatgccccttcgatcacagggttttctccacagtctacacgtctggtgagggctatggtgcatcagtttggaagatcccggagctcaatgggcaatcaaactcaccacaacttgagcagctctttgagcttagtgggcatacgggcaagattagacgtgtgatctggtggccacttggaaagcatgataaactaattagcattgatgaccgaaatatttttctttggaacatagacacgtcaaaaaaaatagctaaggtgatctcacagggatcaactgacatgcttccaaatttacgtggtggagcttgggatccacacaatcataatttagttgctgcaatatctgattcatcacttcagctgtgggatctacgttctatggaaaaatcaactgcaattgaacatgcacatatacgggatgtggattataaccccaagaagcaaaacattgttgcaacagcagaagaggaatttggaattcgcttgtgggatctcagaatgcttaagtatcctctaaaagatctccctgggcactcacattggacatgggctgttcggcacaatcctgcgtatgatgagctccttctgagtgctggaacagattcaactgtaaatttatggttggctaaagttagcagtgacgatcctgaatctgatagcccttctgctttatccaataggcaagaagtaccattactcaactcatatactgactatgaagacagcatctatggtattgcatggagctcccatgatccatcattattcgcttctttgtcatatgatggaagggttgtcttggaatcagtcaagccctacttgcagagaaaatgaaccttgtctagttttctaaattgtaagctgagtagctttgccttgccattctgtagcctcttaacaagcatttatgtgatgattcggtttactgttgtagcaatggcagaaaaatggataacaagattgttacagaaatcaatttttaggatgttgtatatttgaagtgtccatgaaaaggtcttgtgttatatgatgaggcagaattgagcaaacttggtaaaccattcagattaacgagaataagttattttatgaactatcatgttatgt

SEQ ID NO: 9399 - DNA, 1576 bp, Zea Mays
gtgaattacgttttcactcgcgatatcgtacttttggttcgtcgtgtactcgtgtggaaggcggctgcctgctcccgcggtctcttccgtctcggaggtgggagagagcgatcagcggcgtcgccgggtggatccaaagcgcgcgagaaaatgcagggcggatccagcggcatcgtgtatggtggcctcaagtaccaggcgcggtgtatcgccgacatacgcgcggacgccggctcgaccaccttcctcgccggcaccctcagcctcaaggaggagaacgaggtgcacctgatccggttttcgccggcggagagcgagctggtgtgcgatggcctcttctaccaccccaacgagatttgggacctcaaatcatgccccttcgatcacagggttttctccacagtctacacgtctggtgagggctatggtgcatcagtttggaagatcccggagctcaatgggcaatcaaactcaccacaacttgagcagctctttgagcttagtgggcatacgggcaagattagacgtgtgatctggtggccacttggaaagcatgataaactaattagcattgatgaccgaaatatttttctttggaacatagacacgtcaaaaaaaatagctaaggtgatctcacagggatcaactgacatgcttccaaatttacgtggtggagcttgggatccacacaatcataatttagttgctgcaatatctgattcatcacttcagctgtgggatctacgttctatggaaaaatcaactgcaattgaacatgcacatatacgggatgtggattataaccccaagaagcaaaacattgttgcaacagcagaagaggaatttggaattcgcttgtgggatctcagaatgcttaagtatcctctaaaagatctccctgggcactcacattggacatgggctgttcggcacaatcctgcgtatgatgagctccttctgagtgctggaacagattcaactgtaaatttatggttggctaaagttagcagtgacgatcctgaatctgatagcccttctgctttatccaataggcaagaagtaccattactcaactcatatactgactatgaagacagcatctatggtattgcatggagctcccatgatccatcattattcgcttctttgtcatatgatggaagggttgtcttggaatcagtcaagccctacttgcagagaaaatgaaccttgtctagttttctaaattgtaagctttgccttgccattctgtagcctcttaacaagcatttatgtgatgattcggtttactgttgtagcaatggcagaaaaatggataacaagattgttacagaaatcaatttttaggatgttgtatatttgaagtgtccatgaaaaggtcttgtgttatatgatgaggtggggttgaactcaatttgtaaaaccgttcagaatttcagattagtaggattagttttttttttttacttttctgtttcgcattcagaatttcgttctttgcaggcagaattgagcaaacttggtaaaccattcagattaacgagaataagttattttatgaactatcatgttatgt

SEQ ID NO: 9400 - DNA, 1401 bp, Zea Mays
gtgaattacgttttcactcgcgatatcgtacttttggttcgtcgtgtactcgtgtggaaggcggctgcctgctcccgcggtctcttccgtctcggaggtgggagagagcgatcagcggcgtcgccgggtggatccaaagcgcgcgagaaaatgcagggcggatccagcggcatcgtgtatggtggcctcaagtaccaggcgcggtgtatcgccgacatacgcgcggacgccggctcgaccaccttcctcgccggcaccctcagcctcaaggaggagaacgaggtgcacctgatccggttttcgccggcggagagcgagctggtgtgcgatggcctcttctaccaccccaacgagatttgggacctcaaatcatgccccttcgatcacagggttttctccacagtctacacgtctggtgagggctatggtgcatcagtttggaagatcccggagctcaatgggcaatcaaactcaccacaacttgagcagctctttgagcttagtgggcatacgggcaagattagacgtgtgatctggtggccacttggaaagcatgataaactaattagcattgatgaccgaaatatttttctttggaacatagacacgtcaaaaaaaatagctaaggtgatctcacagggatcaactgacatgcttccaaatttacgtggtggagcttgggatccacacaatcataatttagttgctgcaatatctgattcatcacttcagctgtgggatctacgttctatggaaaaatcaactgcaattgaacatgcacatatacgggatgtggattataaccccaagaagcaaaacattgttgcaacagcagaagaggaatttggaattcgcttgtgggatctcagaatgcttaagtatcctctaaaagatctccctgggcactcacattggacatgggctgttcggcacaatcctgcgtatgatgagctccttctgagtgctggaacagattcaactgtaaatttatggttggctaaagttagcagtgacgatcctgaatctgatagcccttctgctttatccaataggcaagaagtaccattactcaactcatatactgactatgaagacagcatctatggtattgcatggagctcccatgatccatcattattcgcttctttgtcatatgatggaagggttgtcttggaatcagtcaagccctacttgcagagaaaatgaaccttgtctagttttctaaattcaatggcagaaaaatggataacaagattgttacagaaatcaatttttaggatgttgtatatttgaagtgtccatgaaaaggtcttgtgttatatgatgaggcagaattgagcaaacttggtaaaccattcagattaacgagaataagttattttatgaactatcatgttatgt

SEQ ID NO: 9401 - DNA, 1306 bp, Zea Mays
gtgaattacgttttcactcgcgatatcgtacttttggttcgtcgtgtactcgtgtggaaggcggctgcctgctcccgcggtctcttccgtctcggaggtgggagagagcgatcagcggcgtcgccgggtggatccaaagcgcgcgagaaaatgcagggcggatccagcggcatcgtgtatggtggcctcaagtaccaggcgcggtgtatcgccgacatacgcgcggacgccggctcgaccaccttcctcgccggcaccctcagcctcaaggaggagaacgaggtgcacctgatccggttttcgccggcggagagcgagctggtgtgcgatggcctcttctaccaccccaacgagatttgggacctcaaatcatgccccttcgatcacagggttttctccacagtctacacgtctggtgagggctatggtgcatcagtttggaagatcccggagctcaatgggcaatcaaactcaccacaacttgagcagctctttgagcttagtgggcatacgggcaagattagacgtgtgatctggtggccacttggaaagcatgataaactaattagcattgatgaccgaaatatttttctttggaacatagacacgtcaaaaaaaatagctaaggtgatctcacagggatcaactgacatgcttccaaatttacgtggtggagcttgggatccacacaatcataatttagttgctgcaatatctgattcatcacttcagctgtgggatctacgttctatggaaaaatcaactgcaattgaacatgcacatatacgggatgtggattataaccccaagaagcaaaacattgttgcaacagcagaagaggaatttggaattcgcttgtgggatctcagaatgcttaagtatcctctaaaagatctccctgggcactcacattggacatgggctgttcggcacaatcctgcgtatgatgagctccttctgagtgctggaacagattcaactgtaaatttatggttggctaaagttagcagtgacgatcctgaatctgatagcccttctgctttatccaataggcaagaagtaccattactcaactcatatactgactatgaagacagcatctatggtattgcatggagctcccatgatccatcattattcgcttctttgtcatatgatggaagggttgtcttggaatcagtcaagccctacttgcagagaaaatgaaccttgtctagttttctaaattgtaaggcagaattgagcaaacttggtaaaccattcagattaacgagaataagttattttatgaactatcatgttatgt

SEQ ID NO: 9402 - DNA, 1302 bp, Zea Mays
gtgaattacgttttcactcgcgatatcgtacttttggttcgtcgtgtactcgtgtggaaggcggctgcctgctcccgcggtctcttccgtctcggaggtgggagagagcgatcagcggcgtcgccgggtggatccaaagcgcgcgagaaaatgcagggcggatccagcggcatcgtgtatggtggcctcaagtaccaggcgcggtgtatcgccgacatacgcgcggacgccggctcgaccaccttcctcgccggcaccctcagcctcaaggaggagaacgaggtgcacctgatccggttttcgccggcggagagcgagctggtgtgcgatggcctcttctaccaccccaacgagatttgggacctcaaatcatgccccttcgatcacagggttttctccacagtctacacgtctggtgagggctatggtgcatcagtttggaagatcccggagctcaatgggcaatcaaactcaccacaacttgagcagctctttgagcttagtgggcatacgggcaagattagacgtgtgatctggtggccacttggaaagcatgataaactaattagcattgatgaccgaaatatttttctttggaacatagacacgtcaaaaaaaatagctaaggtgatctcacagggatcaactgacatgcttccaaatttacgtggtggagcttgggatccacacaatcataatttagttgctgcaatatctgattcatcacttcagctgtgggatctacgttctatggaaaaatcaactgcaattgaacatgcacatatacgggatgtggattataaccccaagaagcaaaacattgttgcaacagcagaagaggaatttggaattcgcttgtgggatctcagaatgcttaagtatcctctaaaagatctccctgggcactcacattggacatgggctgttcggcacaatcctgcgtatgatgagctccttctgagtgctggaacagattcaactgtaaatttatggttggctaaagttagcagtgacgatcctgaatctgatagcccttctgctttatccaataggcaagaagtaccattactcaactcatatactgactatgaagacagcatctatggtattgcatggagctcccatgatccatcattattcgcttctttgtcatatgatggaagggttgtcttggaatcagtcaagccctacttgcagagaaaatgaaccttgtctagttttctaaattgtaagaattgagcaaacttggtaaaccattcagattaacgagaataagttattttatgaactatcatgttatgt

SEQ ID NO: 9403 - DNA, 708 bp, Zea Mays
caatcatctcgtgatctggtggatcacatgctcatcttgccgccgtgcagttcaccacttggttacacatgagaaggattcttgctgtctgctggtcaagcgtacacgctgctagtgcacaagcaatggagagcagagacacgactacaggactagcaatatcatcaataatccaccttgcagtgatgtgattatgttggaatcaggtgattaaatgcaactagcctgggaacttgaagctggaggctagcagaggcatctggttgtagcttcctacagtggcaacttgcctgttgatcagtcatctcatcatgatgctcatctcactgcccttcaaccgtgcaggcgagtttgccgcccatattgcggacatgaccagtgttattaaaactacgtttaaacgatgtttaaactacgtttaaacgtcaaaactctaattagaggttgaaaccacgttttagcgttttggcgttctaaactgtaaaacgcagtgttttatgcattttagaccattagctacttttgggcccagtctattagttacttttgaggttcaatccaactcattggtgaagttttggtacgccagtaacctctctgttttggtatttaacttcatattattgtatgaaattatgatgtattggtatttttcctatgttgtttaaaactacgtttaaacaaagtttaaacgtttaaaagtcaaaa

SEQ ID NO: 9404 - DNA, 984 bp, Zea Mays
gagctgactaaaggacgcgagctttttgtacgtcgtatgcctattttttttgaaacatttccggtcattttggtagatgaagagggaattgtgagagcggacattccttctagaagagcaaaatccaaatatagtgttgaacaagtagacataacggtggagttctatggtggcaaatttaatggagtaagttattctgatcctactactgtaaaaaaaaatatgcgcagcgtgctcaattaggggaaatttttgaattagatcgagctactttgaaatcagatggtgtttttcgtagcagaccaaggggttggttcacttttggtcatgctacctatgctttgctctcgcatcacgcacgaaccttgttccgagatgtttttgatggtattgggaataggcagcctgataccacattgctattgccatgaaaatacattcgttccgagttggacccttggacagtcgccgtccggcggcggcgggataaagtccggtgccaccccaccaccaatgcaacgctgagtagccgagtccgtggcctcgaggtggagaaggcggcggggtcgccgacgcccgacgacgaggacgaaacgggtgggaggaccgcgaggagcgctctacaattcgaaagccgcggcggagccaattcaggggacgggaagttgaattctatcactgacccccaaagctccctggtccctacacacacaactccgtctggtacggaccatgccatttggctcctcccgatctgtaagggcgacacgcacctttgcctcgccttcaacttggctgattcagctggtttagggcggctgaaatttggtttactgcaccaacgtggtagggggaatctggatgattaatttattctgctatttcagcttaaccattgtggctgtgatctggcatgcttcttgtacgcagggcaagatccacaaattaagcatccgaaaacaaagcaatccttactgaatgcac

SEQ ID NO: 9405 - DNA, 1158 bp, Zea Mays
ccaaaatgcaaaaaattcgggtccagtgttcagtgggcggcgacggcggttctctaaggtcgactccggcggaaggatttggacctcgccaccatcgttgattcgtcggatccgcggtccagaggagaaggcctgagccaagtgcatgattgacataaaggacaatgttccatgagtgggaggtgccgagctggtgaagtttcagtgcccttcttacaagataagcgaattattgttggccacctatttatagtttctgtttcttctagttgtagttcttgagaaggctcttagatatatattctttaagtttagtgcatttatccggatattcacaaattcaatttgtaattgaattcaccaatcaatcaccactgtatcttcagagaaagacatccccgcacacatacaatgaagagaaattgtctaagttagtgactctcagctagggctagaaacgagccgagctcggctcggtgcggcttggtgcctgaacgagctgggctcggctcgtccattccacgagctggcgaaagaggctcggctcgaccttgactcgcgagccatattctggtacttatcgttgcattatttggtgaattaacattatataaatttgaaatatagaatcatcattgaacattatgagtaaattaaattataacttgtaatatattcatcatcgaagactaaaaaatgagctattatctataaaattatctaatattcattattatttcataaattgatcatttttgcaaggctcgcgagccggaacaagccggctcggctcggctcgctgcaaaaacgagctcaaagaaggggctcggctcggctcgttcgaggctcgcgagccgctccgagccgagccgctccgagctcgagccggctcgggagcctcgagcttattttctagccctactctcagccaagcaactcgagtgtgtttggttggacgtacaaggagggatcgaagggggtggccacagtttctatagtgtttggataagagtcacgtgggggcgagctgtcctccatgttgaacgagatgaaagatggaaagcgaaaattgacagcaggaaaatagacccaaaacatcgatttccagcactagagttgttgtatgatctatctacaaagtgagagtgttcagaagag

SEQ ID NO: 9406 - DNA, 2772 bp, Zea Mays
aaattcgggtccagtgttcagtgggcggcgacggcggttctctaaggtcgactccggcggaaggatttggacctcgccaccatcgttgattcgtcggatccgcggtccagaggagaaggcctgagccaagtgcatgattgacataaaggacaatgttccatgagtgggaggtgccgagctggtgaagtttcagtgcccttcttacaagataagcgaattattgttggccacctatttatagtttctgtttcttctagttgtagttcttgagaaggctcttagatatatattctttaagtttagtgcatttatccggatattcacaaattcaatttgtaattgaattcaccaatcaatcaccactgtatcttcagagaaagacatccccgcacacatacaatgaagagaaattgtctaagttagtgactctcagctagggctagaaacgagccgagctcggctcggtgcggcttggtgcctgaacgagctgggctcggctcgtccattccacgagctggcgaaagaggctcggctcgaccttgactcgcgagccatattctggtacttatcgttgcattatttggtgaattaacattatataaatttgaaatatagaatcatcattgaacattatgagtaaattaaattataacttgtaatatattcatcatcgaagactaaaaaatgagctattatctataaaattatctaatattcattattatttcataaattgatcatttttgcaaggctcgcgagccggaacaagccggctcggctcggctcgctgcaaaaacgagctcaaagaaggggctcggctcggctcgttcgaggctcgcgagccgctccgagccgagccgctccgagctcgagccggctcgggagcctcgagcttattttctagccctactctcagccaagcaactcgagtgtgtttggttggacgtacaaggagggatcgaagggggtggccacagtttctatagtgtttggataagagtcacgtgggggcgaggtaaacaccgtagtaatttttgatgacggcgtgatccaaaaaaatcgaggggacggtgtcgccctcacctcatcctattttgaccttaaatcaaacacatactaaggaatcatcgaggacatgtgagggtgctcccattgtgcggcagcaaacccctcttccagtttactgcttttttcactattattattgcttctatatgttccaagcacttgtaagcttctgataactgcgaactaatttaaaaccggtaaccgtgaactaacttcaatttcactaccattcattttactcacaagagctcaagttgcaaacccccacaggtgaagctaatgatagctttatatatcgttttcacgttggtcacatttgtgtcttaatgaattaggttttatcctatttgtctctagaactcctctagcagggaggagattttgaagcgaaagtcagcttgtggagcttggttttgacagctgtaacacaagcgctcaagctgttcaaagggaagcataatcgaaacttgtctaatggaaagagagtagaaattgaattgaaccattctatttctgattttgtggctttggcctttttcatgttaacctattgttttcctgtaatcaatgtaacttttcaaacgagctatggtaatagacaaaagagaacatatctggtgtacatggaagtttagtgcacatattaaatcatcagcattcatcttatatctaacgtatgtagttgtttggtatattttactaatcacaccctccaacgtggtggagtgtagtggtggaatgtgttatttataaattgcaataatcaactagagacgttagatataagatgagtggtgatgatttaatatatgcaccatatgtactaagcttccatgtgcactagatatgtcctctagacaaaaatagggaaacattaaacaaaatgtggaggtttgatgtcatttttttaaatgactatctcatttatacgagtctatttagatgatatataaaaaacgtagtaatgcacgaacatctaactagtgatttctaatgcctcatcaatgcctgatatttcaccctgacacaagtttaccttcagtccacaacagttgttagaacaagcataaaagggatatttatagacctctccaaatcagtttgcacccaaaaaaacagtatggtaataaaaagagttgtattggatgtttcaataactggcagcaaaaccatctgcacgggtgcatagtttagtgtaagattcagatcgtgagattggagagcaaagttgtgcagctgttggctaggctaggctggttgatacatgctagattgctagtggaaggaacagttgacttcagcgttcttggtacttcatgacactgacaggctggtctgtttctcctgcctgctgtgcgttaagcatttagaatctgaatcctgcaatttcaagatgatcacatgccttccaaatttcttatgcgttggcaccttaccgaatgctgaacaactattagttgcatgtgcaaatctcatggctagagttggcatgctatcagttaaaggagcaagatccactttattaggatcttatgtctatcgttaaaattaacaggccgataatggaccgaatcatcagcaccttatgatagtttatttttctgaagaaacttcaactgcagcactcccatttcattgattgtttttttttatttagctgtcctccatgttgaacgagatgaaagatggaaagcgaaaattgac

SEQ ID NO: 9407 - DNA, 521 bp, Zea Mays
aaattcgggtccagtgttcagtgggcggcgacggcggttctctaaggtcgactccggcggaaggatttggacctcgccaccatcgttgattcgtcggatccgcggtccagaggagaaggcctgagccaagtgcatgattgacataaaggacaatgttccatgagtgggaggtgccgagctggtgaagtttcagtgcccttcttacaagggctcgcgagccggaacaagccggctcggctcggctcgctgcaaaaacgagctcaaagaaggggctcggctcggctcgttcgaggctcgcgagccgctccgagccgagccgctccgagctcgagccggctcgggagcctcgagcttattttctagccctactctcagccaagcaactcgagtgtgtttggttggacgtacaaggagggatcgaagggggtggccacagtttctatagtgtttggataagagtcacgtgggggcgagctgtcctccatgttgaacgagatgaaagatggaaagcgaaaattgac

SEQ ID NO: 9408 - DNA, 187 bp, Zea Mays
cgagtcttgtaattagtatagtatacatgatcattcctaacattcaggcacagccaggggattctttcttttcttttcttttcttttcttttacacaaaatggaagataagagagagcagggaggccggaggaactaagctatccacgagccacgaatcctctcgccatcttggctctccttctcat

SEQ ID NO: 9409 - DNA, 792 bp, Zea Mays
aaagcagatccttccttcatctagcgactagcaccgtcactttgagtttcagtttcagttgcaatttcaagctgcaaggcttgtttgacatagattacgtgagaagggcgaggtcttgattcggaattattaggccaggagcaaagcaaaagctttgatatcgacagatccaaacattcgtctcggaggccaagccacgagcaactggaagattcagtgtggcttgcatccttgaaggcaagtggcgccagttctatgaaaataacgtcatggtggtcggcgcccactgtgttccgatctggattagcaattgcagtggcgaccttgcttggtgcacaaattgcaccggatcatcctgtggtcggcttgctatgattcggcaaggttgcggttcttgattcttaggagccatccaagttattttcagaccggaagcagattagagcggtagtagatcagcaatggggatagaattctgtgtaggttttttgttggtggataggtgctagcgctagagaaggaacgatgtgttacaagttggcaatcggaattccatgaatgcattacataagcacattgcctttcagaaacattgctctttgaattataatcttctgtgtgcatcaactgtttttctttggggtggcggggggcgtgatccacgccgcacgctgatccggcgtcactttggaatgagaataaaatatacgatctgatgttctgttatcatcgggtccttgtttctatttttccagtaaggcgtataaacaatctcaaatggattttgtaacc

SEQ ID NO: 9410 - DNA, 1094 bp, Zea Mays
agggaatccactccgtctcagtttgaattggctggttgcttgcctgtggcggccggtcctccccgtccccggcggttataaaaccggcaagccacgcacgccacgccttccggctccccgcagccccacgtcggcacatcccacgttcccccctgctccgcaagcgagcgctggccgtgcgggtcgcgaccacttccaccacctccaccactcccctccccaaccgccgccgccgccttattactcggccgcacccgccccgccgccccggtccatgagtccatcctccctctagctagcactaatcgtccatccagtctcacagtcaagctccccgaccaccagcgcgcctcgagctcgagcttccctcctgacagcgtgctggtcgcttcaatggcatctcgggcgcacctgccgggctcgccggcctcgatcgccgtcctcatcctctccttcttccaagcgacagatccaaacattcgtctcggaggccaagccacgagcaactggaagattcagtgtggcttgcatccttgaaggcaagtggcgccagttctatgaaaataacgtcatggtggtcggcgcccactgtgttccgatctggattagcaattgcagtggcgaccttgcttggtgcacaaattgcaccggatcatcctgtggtcggcttgctatgattcggcaaggttgcggttcttgattcttaggagccatccaagttattttcagaccggaagcagattagagcggtagtagatcagcaatggggatagaattctgtgtaggttttttgttggtggataggtgctagcgctagagaaggaacgatgtgttacaagttggcaatcggaattccatgaatgcattacataagcacattgcctttcagaaacattgctctttgaattataatcttctgtgtgcatcaactgtttttctttggggtggcggggggcgtgatccacgccgcacgctgatccggcgtcactttggaatgagaataaaatatacgatctgatgttctgttatcatcgggtccttgtttctatttttccagtaaggcgtataaacaatctcaaatggattttgtaacc

SEQ ID NO: 9411 - DNA, 2169 bp, Zea Mays
ctcgtttgtactcctacttctgtccctttgaataggaccgttccaaatcgctgattgctcgtaataggtgacgctaggagagaacgaaaaacagggaatccactccgtctcagtttgaattggctggttgcttgcctgtggcggccggtcctccccgtccccggcggttataaaaccggcaagccacgcacgccacgccttccggctccccgcagccccacgtcggcacatcccacgttcccccctgctccgcaagcgagcgctggccgtgcgggtcgcgaccacttccaccacctccaccactcccctccccaaccgccgccgccgccttattactcggccgcacccgccccgccgccccggtccatgagtccatcctccctctagctagcactaatcgtccatccagtctcacagtcaagctccccgaccaccagcgcgcctcgagctcgagcttccctcctgacagcgtgctggtcgcttcaatggcatctcgggcgcacctgccgggctcgccggcctcgatcgccgtcctcatcctctccttcttccaagggtcggtatgcggcatcacgttcaccttcaccaaccgctgcggcgacacggtgtggccgggcctgctgtccggctcggggacgccgccgctggagaccacgggcttcgcgctcgcgccggggcagtcgcgctcgctgtacgcgccgcaggggtggtcgggccgcttctggggccgctccggctgcgccttcgacgcctccggcaaggggtcctgcgccacgggcgactgcggctccggcgaagtcgagtgccgcggcgcgggggcgtcgccgcccgccacgctcgccgagttcacgctcgacggcgacggcggcaaggacttctacgacgtcagcctcgtcgacggctacaacctgcccatgctcgtgcagcccgccgcggccggctgccccgacacggggtgccttgtcgacctcaacgagcggtgccccgacgagctccgcgccgacggcggccgcgcctgccgcagcgcctgcgaggcgttcggcagccccgagtattgctgcaacggcgcctacggcaaccccaacacctgccacccgtcccagtactcgcagctcttcaagtcggcgtgccccaagtcctacagctacgcctacgacgacgccacatccaccttcacatgcaaccacaccgattacaccatcaccttctgccccgaatcaactccatccaggttcttcttactgcctcctgcccaaagcagatccttccttcatctagcgactagcaccgtcactttgagtttcagtttcagttgcaatttcaagctgcaaggcttgtttgacatagattacgtgagaagggcgaggtcttgattcggaattattaggccaggagcaaagcaaaagctttgatatgtactcctctctttcccatcttttcccgtctgtccccactcagcaccttgccaccttgtgtggtgtgtgactagaaagccacagctgccgagttggaactgcaaggaacacatgagactgaggcgacagatccaaacattcgtctcggaggccaagccacgagcaactggaagattcagtgtggcttgcatccttgaaggcaagtggcgccagttctatgaaaataacgtcatggtggtcggcgcccactgtgttccgatctggattagcaattgcagtggcgaccttgcttggtgcacaaattgcaccggatcatcctgtggtcggcttgctatgattcggcaaggttgcggttcttgattcttaggagccatccaagttattttcagaccggaagcagattagagcggtagtagatcagcaatggggatagaattctgtgtaggttttttgttggtggataggtgctagcgctagagaaggaacgatgtgttacaagttggcaatcggaattccatgaatgcattacataagcacattgcctttcagaaacattgctctttgaattataatcttctgtgtgcatcaactgtttttctttggggtggcggggggcgtgatccacgccgcacgctgatccggcgtcactttggaatgagaataaaatatacgatctgatgttctgttatcatcgggtccttgtttctatttttccagtaaggcgtataaacaatctcaaatggattttgtaacc

SEQ ID NO: 9412 - DNA, 1005 bp, Zea Mays
ctttcctgatccacttttcaaaaggagtatgtgcctaaatgccttgttaatgcaaaatcaaggattcattgaggattgtcactcaagtctcaagatttgactgccttatttctggctgttaggctgtattgtagttttgttatggagtatgacatccatacaattctagatacagctacacttgcagctactctttttgttatttacatgattcggttcaaactgaggtcgacatatatgctggataaagacaactttgccttgtactatgtggtattgccctgtgctgtgctagcgctacttgttcatccttcaacatcgcacaacattgtgaacagaatctgctgggccttctgtgtttatttggaagcagtttcagtgttgccccagttgcgcttgatgcaaaataccaagattgtggagccgttcacagctcattatgtgtttgcgctgggtgttgcaaggtttcttagctgtgcacactgggtccttcaggttttggacacccgaggcggattgttgactgcgctgggctacggtctgtggccttcaatggttctcctctccgaaatcgtccagacattcatccttgcagatttctgctactactatgtgaagagtgttttcggcgggcaactggtgctgcggcttccgtccggggtggtctgaaaaactgcagcgagaaagaaaagcatactgttcgtcccttctgtgttagatcatacaaagcgacagtcattgtgctcctagcgcccaaacttttgcactcgtaaagtggattagcagagggccgttaattttttttttcagttgtaaactgtttacgtgaatgctgtaccgataccgtgataccgtctgactttttcatccatgctagagttgaagcaggtagcatccacatcgagttgtcgcattttcagactagagatcagattctccgatgccagtgactgtttatctttcattctagtttttcttgtgtcgtcgaaatagacgaaatgtgag

SEQ ID NO: 9413 - DNA, 972 bp, Zea Mays
ctttcgcttagggtgcgtgcatcaacaggtcaagctcgaggattgtcactcaagtctcaagatttgactgccttatttctggctgttaggctgtattgtagttttgttatggagtatgacatccatacaattctagatacagctacacttgcagctactctttttgttatttacatgattcggttcaaactgaggtcgacatatatgctggataaagacaactttgccttgtactatgtggtattgccctgtgctgtgctagcgctacttgttcatccttcaacatcgcacaacattgtgaacagaatctgctgggccttctgtgtttatttggaagcagtttcagtgttgccccagttgcgcttgatgcaaaataccaagattgtggagccgttcacagctcattatgtgtttgcgctgggtgttgcaaggtttcttagctgtgcacactgggtccttcaggttttggacacccgaggcggattgttgactgcgctgggctacggtctgtggccttcaatggttctcctctccgaaatcgtccagacattcatccttgcagatttctgctactactatgtgaagagtgttttcggcgggcaactggtgctgcggcttccgtccggggtggtctgaaaaactgcagcgagaaagaaaagcatactgttcgtcccttctgtgttagatcatacaaagcgacagtcattgtgctcctagcgcccaaacttttgcactcgtaaagtggattagcagagggccgttaattttttttttcagttgtaaactgtttacgtgaatgctgtaccgataccgtgataccgtctgactttttcatccatgctagagttgaagcaggtagcatccacatcgagttgtcgcattttcagactagagatcagattctccgatgccagtgactgtttatctttcattctagtttttcttgtgtcgtcgaaatagacgaaatgtgag

SEQ ID NO: 9414 - DNA, 3049 bp, Zea Mays
tcggtatgcttatattgcattttatatatgctgtgagccaccaaactctgcagacaaacatcatataaaagagctgtgaaagctccattgcaactgcagtggatgtctgcccacatgtatgtatagctccgtgcaatttcactaaaaaaaatgtcctgtgcattccatgcttttctatttgctgatgtagaaagtgatggtgatttggttactttagagtaaactggaagcaagagtttaagtctgacctataataaattgtaccatgtcaagcccttgctaaaaaaacagttacaaatcgtgcggcagcatcatagggtactactactagggttgataatcatgttcattcaaatgagatgtgtcagcatctttgaccaagctgattatttacttcaatattacaatatggtacaaaaggatggtgtgatcttaattaactagcatactgaaatgaacaacaccctatttgcagataaattagctcaaatttctagttagctatccttttctaaacacgggaatttgtttgcagatgatgcaacaggaactaaagtatgattatctctaagtattgaagcctccattccccacaaaagcatatatgtgtgccgcccctgttgccatcttaagcaactatatctcaccaaccattttatcattgtgttgcactataacagataaactggagtacggtaggggcagagggaatttctggtggagcggtgaaatgcattgagatcggaaagacaccaactcattcttctgctgaatctgcatatgcaagaagctccaatctgtgaaagactgtgcactaaaactagagcatcttattatttatatagacaaatataacacaagacagaaagtttaacagattattatttctacataaacacaatccaatccaaggaaaatgttagcaactgctgatagaacagcatcaatcttctgatacacaatgctaactcattcttctgcatgcatcttgtataaaaaataagagaaaaaatgtccatgcaaacaaaatgcccacaccataaaaattgcaactgtttaattgttactctcagagtctgtgcactgttgctatcccaggtagcgatgtgtgtttctgtgttgaaaagtaaaagcagtaaacagaagtttgctttttgaagagaagtggcagatgaaaacaataatttcctaggtcataggtatcatccatccagccttccaatatttatcaataagctataatttgtgatgtacatttccatgagacataatgcagatgagcagatcacacactagctatcatgacaaatactatcattttgttcctaaaagataatatgaaaacttctaaaacaactgtaaaggtagtactcaaggatctaccatcatacgaattttcagtttcacattgcaattcagttgagtagagaaaaaggcaaggggagaagtgtgtcaatcctaaatcctaacttctgtttgtatcctttaccccttagaattcatcaatagatggttgttaattacatcaagatgaatcaaacaagcgatatcgtctcatataggttcttaatggtaaaattttgtcccagatttactttttaccaaaccatttaagtttcaatttctatgtaaccctaccagatgaatcaaactaccaaattccctacttgaaagtattagcctatcattccaagttcaattgtgattcaccaatgatcaagctgatcaatgaaatggacaaaacacgcagaagaaactagaaattcaccaccagttaggcagttactgacagataaaagtataaaaccacagtatagtgcaacatcctagcaaaagacttgtattcctgaatcagacttggtattcctgaatcttccatgaacatgactactgctcacattacgaagactaactttaggagatgccactaaaagagaatgggctgggtatcgctacatcccgtcagactaattcactgattgacagcctggattaccaaccttccagctatgaaacagtgcaactgatgtagattgacaaggggaaaaaagtcttgattaggggaggcattctaaatatttaggccttgaaatatgatcacctagccactttagttttgaattaagtggtcctcagtaccacattccacaagctttcggcacaagaactttctgaaagggtaaaaatttgactatgcttacaaaaaagattgcacctacttctccaaagagaaaccaatttaaaaatccagctagtaaatgtagcttctatgagcctccaagtgctccattattggttacaaaattttgcagataattaacaaggtattccatttgaagaattcagtggagccggctatactgacgtcttcatgaagaatggataccgacaacaaagttggaatgttcctgtcgtgcattcaatctgcagtatttgaggaagctactggtattacacactttcattcaatctcccatctgaatgcagcacatgctggattatctgagcacagaggtacaggtcttgcaaggaatcaacagcaccaccaaagggagaggactgtcctagtacctacttgatcactccctgcgaccaaattccatgactttgagcatgctattccgaacaaactctcatcccaaaacgtgggaagtccaacccttttgcggaacaaacacctgacatatcaggccgctgttttaaccacgacaagagataaaagatggggatccccaagctgacacctctgagcgtaagtaggccttcgatctagctaagcattgcagcgaattttggatggcaagcctcggtgcatccgaaagcacaaggaagacgcgcatgacctcgtttcgcagcgattaccgtgtcggccatacacgagctgtggaagcggaactcaacagcacagggagggaaggaagcatagcatcaggtctccgtcgtccccaccaagattagcaaggactcgaaaaagctaagctgggtaccgcaactcgcaagcatgtggctgcaagtaaatcgagcgaggagacgcagaatctcaactcac

SEQ ID NO: 9415 - DNA, 2311 bp, Zea Mays
ctaccgcaccaactcttttaacccccttcctctccagggaacgagaccagaatcccccgtcgacgcgcacgcgcagagctccgcatccgcaccggccgccggcggcgtggatggggaagctctccgccctgaagcgggaagcggtcggagtggactaggcgctcggtgacttcctagtttagaagcggtaggtggaggcgatgcggggcggggcgatgaaggccctgcggcgatccagcacctcctcggcgccatcgccaagggtgccgtcttccccgcggtcttattcgtggatccaccgccggtcgcttctcgttacctcgccggcctcgccggcgacgtcctctgtgtctgaatcggcgaatttgcccgcggagggttcggattcagcgccagcgtcagtggtggcagcttcctcgtcgccctcgctggctgcttcgtctccgaacatggaatgcaaatgggaagcttcgtgatgggggaagaaagtttctaaagaaggttcgcagtggggggattgaaccgggcataagggctgaagtttggccatttctgcttggagtctatgatttgaacagctctgaagaggacaggaatactatcaagataaagaaaaggaaagaatatgaaaaattgaggcgacagtgccaccgcatcctgcattgtaatagagaaaatggtctgaatgttataaatgagttcatgaacgaggacttttctgatggggctgaaggttcagagtcaccatattcaaatggtgttagtaagagggtttgtgtgatgcccaaagaattgaaatctttaggcagtaaggcagaagaatcagagagttctaactgggatgctgtgaaatgcatagatgaagacataacctctgttgatccatgtttggtagaatcagaatcttctgaatctgagtcttcctatgaagaggaccctgatagaacacctgtctctaccaatatggaagagaactgtggtcccaaaccaaaatttgcccggaccgcttcatctaagtcggagattattatttcagacagaactcctgaggattttgccacatggcagcgcattatacgtgtagatgctattcgagcaaatacagaatgggttctgtttgcccgtaaccaggctgaagtctctaaagagaaagcgctgcagtctgcaatatctgtcgggttgaaagattttgaccatttagagccttacatgatctatcatgctgcacgattagttgcactgcttgaggcatatgcactttatgatccagagatcgggtactgtcaaggaatgagtgatctcttgtcaccaataattgcagtcatggaggaagatcatgaagcgttctggtgctttgtgggtttcatgaggaaagccagacacaacttcaggcttgacgaggttgggataaaaagacagctgaaaaccgtctcgcagatcatcaagcgcaaggattcacacctctacaggcacctgcagaaacttcaggcggaagactgcttctttctgtaccgaatggtggtggttctcttcaggagggagctcacttttgagcagactatgtgtctgtgggaggtcatgtgggctgaccaggccgcgatacgagctgggattggaaggtccacttgggcaaggataaggcttcatgccccgccaaccgacgacttgctgctctacgccatcgcagcctgcgtcttgcagaagaggaagctgataatcgagaagtacagcagcatggatgagatactgcgggagtgtaatagcatggccgggcagctagatgtctggaagctcctagatgatgcccaccacttggttgttgaccttcatgacaaaatctgatgcgactgccttcctcagctatgtttttgggtagagtatgcagacatgaacacattttccgaggtgtatttagtaagctgttgtgtactgttcatcacccggaataaaaaaaaactttcatgggagtacatgtagagaaccttgtagcttcaagtgaggacgaagttgtcttccactttggttaagctgataaaccattggatagcgcaatggtttattcaagccatccatagttaaaacttcatggaaaattttgttcttgcttctaatgtctgtccttggcagaaacaacattttccatgaagttttttacaggaaagttaagttcccagattttgggtgtaatgtgtagtaataatgaaatcacagcagtttctttcatcatgtgtagtaatgtactccctctgttttattttagttgtagctggatagtgcaaaattgaactatcaagcgacaactaaaaagaaa

SEQ ID NO: 9416 - DNA, 2404 bp, Zea Mays
ctaccgcaccaactcttttaacccccttcctctccagggaacgagaccagaatcccccgtcgacgcgcacgcgcagagctccgcatccgcaccggccgccggcggcgtggatggggaagctctccgccctgaagcgggaagcggtcggagtggactaggcgctcggtgacttcctagtttagaagcggtaggtggaggcgatgcggggcggggcgatgaaggccctgcggcgatccagcacctcctcggcgccatcgccaagggtgccgtcttccccgcggtcttattcgtggatccaccgccggtcgcttctcgttacctcgccggcctcgccggcgacgtcctctgtgtctgaatcggcgaatttgcccgcggagggttcggattcagcgccagcgtcagtggtggcagcttcctcgtcgccctcgctggctgcttcgtctccgaacatggaatgtacatttcattctaggggtggaattaaatctccgtggtctcgaagaaaaaggaaacgggcgcttacttgtcaacactggaatcgtctattttcagcaaatgggaagcttcgtgatgggggaagaaagtttctaaagaaggttcgcagtggggggattgaaccgggcataagggctgaagtttggccatttctgcttggactatgatttgaacagctctgaagaggacaggaatactatcaagataaagaaaaggaaagaatatgaaaaattgaggcgacagtgccaccgcatcctgcattgtaatagagaaaatggtctgaatgttataaatgagttcatgaacgaggacttttctgatggggctgaaggttcagagtcaccatattcaaatggtgttagtaagagggtttgtgtgatgcccaaagaattgaaatctttaggcagtaaggcagaagaatcagagagttctaactgggatgctgtgaaatgcatagatgaagacataacctctgttgatccatgtttggtagaatcagaatcttctgaatctgagtcttcctatgaagaggaccctgatagaacacctgtctctaccaatatggaagagaactgtggtcccaaaccaaaatttgcccggaccgcttcatctaagtcggagattattatttcagacagaactcctgaggattttgccacatggcagcgcattatacgtgtagatgctattcgagcaaatacagaatgggttctgtttgcccgtaaccaggctgaagtctctaaagagaaagcgctgcagtctgcaatatctgtcgggttgaaagattttgaccatttagagccttacatgatctatcatgctgcacgattagttgcactgcttgaggcatatgcactttatgatccagagatcgggtactgtcaaggaatgagtgatctcttgtcaccaataattgcagtcatggaggaagatcatgaagcgttctggtgctttgtgggtttcatgaggaaagccagacacaacttcaggcttgacgaggttgggataaaaagacagctgaaaaccgtctcgcagatcatcaagcgcaaggattcacacctctacaggcacctgcagaaacttcaggcggaagactgcttctttctgtaccgaatggtggtggttctcttcaggagggagctcacttttgagcagactatgtgtctgtgggaggtcatgtgggctgaccaggccgcgatacgagctgggattggaaggtccacttgggcaaggataaggcttcatgccccgccaaccgacgacttgctgctctacgccatcgcagcctgcgtcttgcagaagaggaagctgataatcgagaagtacagcagcatggatgagatactgcgggagtgtaatagcatggccgggcagctagatgtctggaagctcctagatgatgcccaccacttggttgttgaccttcatgacaaaatctgatgcgactgccttcctcagctatgtttttgggtagagtatgcagacatgaacacattttccgaggtgtatttagtaagctgttgtgtactgttcatcacccggaataaaaaaaaactttcatgggagtacatgtagagaaccttgtagcttcaagtgaggacgaagttgtcttccactttggttaagctgataaaccattggatagcgcaatggtttattcaagccatccatagttaaaacttcatggaaaattttgttcttgcttctaatgtctgtccttggcagaaacaacattttccatgaagttttttacaggaaagttaagttcccagattttgggtgtaatgtgtagtaataatgaaatcacagcagtttctttcatcatgtgtagtaatgtactccctctgttttattttagttgtagctggatagtgcaaaattgaactatcaagcgacaactaaaaagaaa

SEQ ID NO: 9417 - DNA, 2360 bp, Zea Mays
accgatgcctaccgcaccaactcttttaacccccttcctctccagggaacgagaccagaatcccccgtcgacgcgcacgcgcagagctccgcatccgcaccggccgccggcggcgtggatggggaagctctccgccctgaagcgggaagcggtcggagtggactaggcgctcggtgacttcctagtttagaagcggtaggtggaggcgatgcggggcggggcgatgaaggccctgcggcgatccagcacctcctcggcgccatcgccaagggtgccgtcttccccgcggtcttattcgtggatccaccgccggtcgcttctcgttacctcgccggcctcgccggcgacgtcctctgtgtctgaatcggcgaatttgcccgcggagggttcggattcagcgccagcgtcagtggtggcagcttcctcgtcgccctcgctggctgcttcgtctccgaacatggaatgtacatttcattctaggggtggaattaaatctccgtggtctcgaagaaaaaggaaacgggcgcttacttgtcaacactggaatcgtctattttcagcaaatgggaagcttcgtgatgggggaagaaagtttctaaagaaggttcgcagtggggggattgaaccgggcataagggctgaagtttggccatttctgcttggagtgaaagaatatgaaaaattgaggcgacagtgccaccgcatcctgcattgtaatagagaaaatggtctgaatgttataaatgagttcatgaacgaggacttttctgatggggctgaaggttcagagtcaccatattcaaatggtgttagtaagagggtttgtgtgatgcccaaagaattgaaatctttaggcagtaaggcagaagaatcagagagttctaactgggatgctgtgaaatgcatagatgaagacataacctctgttgatccatgtttggtagaatcagaatcttctgaatctgagtcttcctatgaagaggaccctgatagaacacctgtctctaccaatatggaagagaactgtggtcccaaaccaaaatttgcccggaccgcttcatctaagtcggagattattatttcagacagaactcctgaggattttgccacatggcagcgcattatacgtgtagatgctattcgagcaaatacagaatgggttctgtttgcccgtaaccaggctgaagtctctaaagagaaagcgctgcagtctgcaatatctgtcgggttgaaagattttgaccatttagagccttacatgatctatcatgctgcacgattagttgcactgcttgaggcatatgcactttatgatccagagatcgggtactgtcaaggaatgagtgatctcttgtcaccaataattgcagtcatggaggaagatcatgaagcgttctggtgctttgtgggtttcatgaggaaagccagacacaacttcaggcttgacgaggttgggataaaaagacagctgaaaaccgtctcgcagatcatcaagcgcaaggattcacacctctacaggcacctgcagaaacttcaggcggaagactgcttctttctgtaccgaatggtggtggttctcttcaggagggagctcacttttgagcagactatgtgtctgtgggaggtcatgtgggctgaccaggccgcgatacgagctgggattggaaggtccacttgggcaaggataaggcttcatgccccgccaaccgacgacttgctgctctacgccatcgcagcctgcgtcttgcagaagaggaagctgataatcgagaagtacagcagcatggatgagatactgcgggagtgtaatagcatggccgggcagctagatgtctggaagctcctagatgatgcccaccacttggttgttgaccttcatgacaaaatctgatgcgactgccttcctcagctatgtttttgggtagagtatgcagacatgaacacattttccgaggtgtatttagtaagctgttgtgtactgttcatcacccggaataaaaaaaaactttcatgggagtacatgtagagaaccttgtagcttcaagtgaggacgaagttgtcttccactttggttaagctgataaaccattggatagcgcaatggtttattcaagccatccatagttaaaacttcatggaaaattttgttcttgcttctaatgtctgtccttggcagaaacaacattttccatgaagttttttacaggaaagttaagttcccagattttgggtgtaatgtgtagtaataatgaaatcacagcagtttctttcatcatgtgtagtaatgtactccctctgttttattttagttgtagctggatagtgcaaaattgaactatcaagcgacaactaaaaagaaa

SEQ ID NO: 9418 - DNA, 1718 bp, Zea Mays
agatatagcactcgctgctcgccttggtcccaactacccgctccctgtccagcgtccagcgtgcaaccaacacctcccacgagtccgcgacgcgtcagcgtcaccgtccgtcgtcgcaaacgagcccagtggcgattcgctttcgaaccgcactcgccctcctccgttctcttctctccctcctcctatagttggcttctcgcaaccctctgctttcgatcagctttctccgctccccatttccctctccaactccaatccatggcctccacggatcgctccacgccggcggaggacgagcaacagcagaagcgcccgtctctcttctcgccgtaccagatgccccgcttccgcctcgcccaccggttccctcgtgtccctgggatatacaatcaagaacagactgatgcatggagaaaggtggttgatgctgttcatgccaagggagctatctttttctgccaactatggcatgtaggccgagcttctcaccaagtatatcagccgggtgctgctgctccgatatcctcaactgataagccaatatcatcaagatggaggatactgatgcccgatggatcctatggcaagtatccaactccgaggcgcctagccacatccgagataccagaaattgttgagcaataccgtcaagcagccgtaaacgccatcaaagcaggtttcgatggcatcgagatccatggcgcccatggctacctcatcgatcagttcctcaagggcggtatcaacgaccggactgacgagtacggtggctcactctccaaccgttgccggttcctcctggaggtgacccgagccgtggtctctgcgataggggcagaccgcgtcgcggtccgagtgtccccggccatcgaccatctcgacgcctacgactccaaccccctgcagctcggcctggccgtggtggagcgtctcaacgctctccagcaggaggccgggcggctggcctacctccacgtgacgcagccacggtacacggcgtacgggcagacagagtctggccagcacgggagtgccgaggaggagagccggctgatgcgtgccgtgcgaggtgcctaccgtggcacgttcatgtgcagcggtgggtacacgcgggagctcggggtcgaggccatcgagtccggggacgctgacctggtgtcctacgggcggctgttcatcgctaatcccgacctggtggagcggtttcggcgcgacgccccgctgaacaaatacgtgcgcaagacgttctacacgccggaccccgtcgtcggttacacggactacacattcctcggccagcctaaggcacgcatgtgatttgattattagtgcgttgccgtaattataagaggcggagtattgtttgtatgttgtgacttgagaaaacaagcaaacatctgggtaatgccgcgattgttacgtattcctactatatatgtgttaccaatattcgggcctacagattgtatcttgataaccactggcagatctagaattttactatatgatatgctatttaatctagaattttattgtaggataatgccatttaaaatttacatatacattggatcaagcttcaagacaattagcaaaatatttttacaagataattagcataatatttttctatgttaaacatttttagatgtctttttattctttttataattgtgtgtatatatataatataaagtctattaagaatctaatgt

SEQ ID NO: 9419 - DNA, 962 bp, Zea Mays
aattccactcgccgcggaaaccttccttctgggcctcgtccggtcgtccgtcccttcgcgcccctgaaattgtccgaccgcgtggcgactcgggtcggacggatgccggtcgacgtcgaggcggcgatggccccgccccaggcggcatcggcctgcagctcgtcgtcgataggcagggacagcgacgagtgctcgccgccggggaaggaggaggaaggggagggggaggtgcagagcgcgtacgagggaggaggagggggcagcctcgctgggttggaggcattggaggaggcgctgcctattcgacattactaagtcagagaatgcatactccagaaaacggaagaatctctttgcctacatcatcatgtatggaaattcacatgaaccacgggcagctcaagtttatgaaactgccgcccctaagaggcatgctagtttgagtagaaactctttggtgactttggctagcagcagttccaggagcagcagcagtatcagcattgaagagcatgaactgcccgagcatcttgattctccgcgttcacctgatggttttatatccgcaccacgatctggctcttgcgtgcctgatgcatctgtgcctaggtcattgtcaatgatggacttgcatcgtctgaataggtcaagttcctcagttcgtctcaaagatgggaaataggaaatacgactggacttggatccagaggattttctatttctttttgtcatcttttgctcgaggtttctagcaccatcttctctaatagaactaaggatggcatggaggtttctggataaataagtgatcacttagtttggcgaggggtatatatgtgtttgtaaaatagttcttcactccattgtaattagcatataatgtactaatatgaatgcctctactcatgtgaccatcttcagctgtaaattaacaaatacctttttatgccgtttgtcgtttg

SEQ ID NO: 9420 - DNA, 1846 bp, Zea Mays
gtaaaatgttgatccccaaggagataagcgggctagtggtgatccatacttgcagcattgtgtggagactgcggttcatctggccaatattggtgcaaacgcaaccgttgtgtctgctggccttctccatgacacaattgatgattcgttcatggactatgatcatatcttcaggatgtttggtgctggtgtggccgatcttgttgaaggggtttcgaagttaagccatttgagcaaacttgctcgggacaacaatactgcaagtaggactgttgaagctgatcgcctgcatacaatgtttcttgcaatggctgatgcacgagctgttcttataaagttagcagatcgtctgcacaacatgaatacgatagaagctttgcctttggttaaacaacaaaggtttgctaaagagactatggaaatatttgtgccattggccaaccgattaggaattgctagctggaaagaccacttggagaatatttgcttcaaacacttgaacccagaggagcacaaggagctttcctctaaacttctgatgtcttttgatgaagcacttcttacatctacgcttcataacttggataaaagccttagagatgaaggcatttcatatcacagtctttctggaaggcacaagagtttgtacagtatatactccaagatgataaagaagaacttaacaatggacgatgtccatgacatccatggtctacggcttgtggttgaaacagaggaagattgttatcgagcacttgacatagtgcacaagctgtggccccgagttaccggaagatttaaagactatatttgtcatccgaagttgaatgggtatcggtcgctgcacactgtcatcatgtgtgagggtgtccatccatttgaaatccagatccgaacaaaggaaatgcacctacaggctgaatatggattcgcagcgcactggaggtacaaagaaggtggctgcaggcattcctttgtgctccaaatggtggaatgggcgaggtgggtgctcacatggcaatgcgagacattgagcaaagagcgtccctcgtctttgagcagttctgttggcataaggccaccatgcccttttcccctgcattcggaagattgctcctactcttacagccgacagtgcaactatgaaggccctatatttgtcatcatgcttgaacatgacaagatgtctgtccaagagctcccagccaactcgactgtagttgatctaatggagcgagtcggggccaacagtccgagatggagcccttgcagcttcccactgaaagaggagctgcgaccgagggttaaccacaagcccataagcgacccaaataggaagctcagcatgggcgacgtggtggagctgacgcctgcgctccctgacaagtcgctgtccgagtaccgggaggagatccagcgcatgtatgagcggggagggtttgcgctcgccaccacccctagaagctgacaccatcgtcgccatgttaacctgctgctgtacaatacacctgtaaatacgaactaatccttgcagcagagaaatcccagatgaacaaaccccccaactgaattggctaatggtgcggggtttgatccaggacgctgctgtgtgtaacgctttttacaagttgaaatgtggccaagttcctccgaagattcatgagaaacatgaagtacttgtgtccttgtacgcttttggtttggtttcaatgtttcatttggactggatcaagtccgacctcttccgcgctctaatcaggacgcgacaactgtgttgattgtggcttctcttccacaccatgtaaataagcaggaaaatatgaaccaacgttatcgtaccttctcg

SEQ ID NO: 9421 - DNA, 2001 bp, Zea Mays
cacaaaccacgcagcggaggcgacccacaaaaaacacgcgcggcaggaggaaggcgaggaagcatccccttgtgcgcgcccccctcatcctctcaatcccacggattcgccggggtaatctcgccacggccgtgctttgacgccgaattcgtgctctgtaggttcaattgaccccaccaccgcccgctgctgcttcgtttctagctcgagagagtttagtgggttgcttgattccgaagctccgagctcgtgggattgaattgagcccccccaagatcagaattggagcagcgggttttggtttcctgcttggtgccgctgattggagtacgcttcttttgtggtggttgagaggctgctcggcttccgccgaccatgtccaatgtttcttgcaatggctgatgcacgagctgttcttataaagttagcagatcgtctgcacaacatgaatacgatagaagctttgcctttggttaaacaacaaaggtttgctaaagagactatggaaatatttgtgccattggccaaccgattaggaattgctagctggaaagaccacttggagaatatttgcttcaaacacttgaacccagaggagcacaaggagctttcctctaaacttctgatgtcttttgatgaagcacttcttacatctacgcttcataacttggataaaagccttagagatgaaggcatttcatatcacagtctttctggaaggcacaagagtttgtacagtatatactccaagatgataaaaagaacttaacaatggacgatgtccatgacatccatggtctacggcttgtggttgaaacagaggaagattgttatcgagcacttgacatagtgcacaagctgtggccccgagttaccggaagatttaaagactatatttgtcatccgaagttgaatgggtatgcatcagaaaaggccgagtcttttaaagatctctactgaaatcgttgctaatttactatctgcaggtatcggtcgctgcacactgtcatcatgtgtgagggtgtccatccatttgaaatccagatccgaacaaaggaaatgcacctacaggctgaatatggattcgcagcgcactggaggtacaaagaaggtggctgcaggcattcctttgtgctccaaatggtggaatgggcgaggtgggtgctcacatggcaatgcgagacattgagcaaagagcgtccctcgtctttgagcagttctgttggcataaggccaccatgcccttttcccctgcattcggaagattgctcctactcttacagccgacagtgcaactatgaaggccctatatttgtcatcatgcttgaacatgacaagatgtctgtccaagagctcccagccaactcgactgtagttgatctaatggagcgagtcggggccaacagtccgagatggagcccttgcagcttcccactgaaagaggagctgcgaccgagggttaaccacaagcccataagcgacccaaataggaagctcagcatgggcgacgtggtggagctgacgcctgcgctccctgacaagtcgctgtccgagtaccgggaggagatccagcgcatgtatgagcggggagggtttgcgctcgccaccacccctagaagctgacaccatcgtcgccatgttaacctgctgctgtacaatacacctgtaaatacgaactaatccttgcagcagagaaatcccagatgaacaaaccccccaactgaattggctaatggtgcggggtttgatccaggacgctgctgtgtgtaacgctttttacaagttgaaatgtggccaagttcctccgaagattcatgagaaacatgaagtacttgtgtccttgtacgcttttggtttggtttcaatgtttcatttggactggatcaagtccgacctcttccgcgctctaatcaggacgcgacaactgtgttgattgtggcttctcttccacaccatgtaaataagcaggaaaatatgaaccaacgttatcgtaccttctcg

SEQ ID NO: 9422 - DNA, 2835 bp, Zea Mays
cttctggccacgcacccgaaatccacacctcacaaaccacgcagcggaggcgacccacaaaaaacacgcgcggcaggaggaaggcgaggaagcatccccttgttcaattgaccccaccaccgcccgctgctgcttcgtttctagctcgagagagtttagtgggttgcttgattccgaagctccgagctcgtgggattgaattgagcccccccaagatcagaattggagcagcgggttttggtttcctgcttggtgccgctgattggagtacgcttcttttgtggtggttgagaggctgctcggcttccgccgaccatgtccgtgccggcgatagccgtgtacaccagcccgcccggcgccgtctacgcgccgccggagctcgagtccagctcgcgcggctcggcgccgtgcgcggccgcggcgtccccgtcagcgccgagctcccaccgccacgcggccgtcgcgggcggcttgtcctgcctattttcgtccccgtccgcggccccgcgggcaacggcgcacgaggagctcggcgcgctctggcacgacagatccgatgagccgccctccgtcgccgggggcttcggcggcgggggctactcgtacccccagtcgtcgccgtcgccgctcaagctgcgggaccacctccaccgcagcccggtgtctctgttccacacccctgcctcctccccggcgtccaggagcccctcggtttcctggctcgctggccgtgagcgcgagcgcctcttctctagcttcgtgcgcaacgcgcttggctcctgcattgactacgcaccggtcaccagcttcccgctgggtgtgcgccccgcggccactggtgtcgacgccgcggagctggccttcgagcttgacgaaaacctctctgaggcggagccgtcctgcgaacctgatgctcatgaactcctcgccggcgcccaggctcgccaccacatcttccgcgacgagcttgtcgtcaaggccttcaaggaggccgagcgggcacaccgtggccagaagcgggctagtggtgatccatacttgcagcattgtgtggagactgcggttcatctggccaatattggtgcaaacgcaaccgttgtgtctgctggccttctccatgacacaattgatgattcgttcatggactatgatcatatcttcaggatgtttggtgctggtgtggccgatcttgttgaaggggtttcgaagttaagccatttgagcaaacttgctcgggacaacaatactgcaagtaggactgttgaagctgatcgcctgcatacaatgtttcttgcaatggctgatgcacgagctgttcttataaagttagcagatcgtctgcacaacatgaatacgatagaagctttgcctttggttaaacaacaaaggtttgctaaagagactatggaaatatttgtgccattggccaaccgattaggaattgctagctggaaagaccacttggagaatatttgcttcaaacacttgaacccagaggagcacaaggagctttcctctaaacttctgatgtcttttgatgaagcacttcttacatctacgcttcataacttggataaaagccttagagatgaaggcatttcatatcacagtctttctggaaggcacaagagtttgtacagtatatactccaagatgataaagaagaacttaacaatggacgatgtccatgacatccatggtctacggcttgtggttgaaacagaggaagattgttatcgagcacttgacatagtgcacaagctgtggccccgagttaccggaagatttaaagactatatttgtcatccgaagttgaatgggtatcggtcgctgcacactgtcatcatgtgtgagggtgtccatccatttgaaatccagatccgaacaaaggaaatgcacctacaggctgaatatggattcgcagcgcactggaggtacaaagaaggtggctgcaggcattcctttgtgctccaaatggtggaatgggcgaggtgggtgctcacatggcaatgcgagacattgagcaaagagcgtccctcgtctttgagcagttctgttggcataaggccaccatgcccttttcccctgcattcggaagattgctcctactcttacagccgacagtgcaactatgaaggccctatatttgtcatcatgcttgaacatgacaagatgtctgtccaagagctcccagccaactcgactgtagttgatctaatggagcgagtcggggccaacagtccgagatggagcccttgcagcttcccactgaaagaggagctgcgaccgagggttaaccacaagcccataagcgacccaaataggaagctcagcatgggcgacgtggtggagctgacgcctgcgctccctgacaagtcgctgtccgagtaccgggaggagatccagcgcatgtatgagcggggagggtttgcgctcgccaccacccctagaagctgacaccatcgtcgccatgttaacctgctgctgtacaatacacctgtaaatacgaactaatccttgcagcagagaaatcccagatgaacaaaccccccaactgaattggctaatggtgcggggtttgatccaggacgctgctgtgtgtaacgctttttacaagttgaaatgtggccaagttcctccgaagattcatgagaaacatgaagtacttgtgtccttgtacgcttttggtttggtttcaatgtttcatttggactggatcaagtccgacctcttccgcgctctaatcaggacgcgacaactgtgttgattgtggcttctcttccacaccatgtaaataagcaggaaaatatgaaccaacgttatcgtaccttctcg

SEQ ID NO: 9423 - DNA, 1872 bp, Zea Mays
attcttctggccacgcacccgaaatccacacctcacaaaccacgcagcggaggcgacccacaaaaaacacgcgcggcaggaggaaggcgaggaagcatccccttgttcaattgaccccaccaccgcccgctgctgcttcgtttctagctcgagagagtttagtgggttgcttgattccgaagctccgagctcgtgggattgaattgagcccccccaagatcagaattggagcagcgggttttggtttcctgcttggtgccgctgattggagtacgcttcttttgtggtggttgagaggctgctcggcttccgccgaccatgtccaatgtttcttgcaatggctgatgcacgagctgttcttataaagttagcagatcgtctgcacaacatgaatacgatagaagctttgcctttggttaaacaacaaaggtttgctaaagagactatggaaatatttgtgccattggccaaccgattaggaattgctagctggaaagaccacttggagaatatttgcttcaaacacttgaacccagaggagcacaaggagctttcctctaaacttctgatgtcttttgatgaagcacttcttacatctacgcttcataacttggataaaagccttagagatgaaggcatttcatatcacagtctttctggaaggcacaagagtttgtacagtatatactccaagatgataaaaacttaacaatggacgatgtccatgacatccatggtctacggcttgtggttgaaacagaggaagattgttatcgagcacttgacatagtgcacaagctgtggccccgagttaccggaagatttaaagactatatttgtcatccgaagttgaatgggtatcggtcgctgcacactgtcatcatgtgtgagggtgtccatccatttgaaatccagatccgaacaaaggaaatgcacctacaggctgaatatggattcgcagcgcactggaggtacaaagaaggtggctgcaggcattcctttgtgctccaaatggtggaatgggcgaggtgggtgctcacatggcaatgcgagacattgagcaaagagcgtccctcgtctttgagcagttctgttggcataaggccaccatgcccttttcccctgcattcggaagattgctcctactcttacagccgacagtgcaactatgaaggccctatatttgtcatcatgcttgaacatgacaagatgtctgtccaagagctcccagccaactcgactgtagttgatctaatggagcgagtcggggccaacagtccgagatggagcccttgcagcttcccactgaaagaggagctgcgaccgagggttaaccacaagcccataagcgacccaaataggaagctcagcatgggcgacgtggtggagctgacgcctgcgctccctgacaagtcgctgtccgagtaccgggaggagatccagcgcatgtatgagcggggagggtttgcgctcgccaccacccctagaagctgacaccatcgtcgccatgttaacctgctgctgtacaatacacctgtaaatacgaactaatccttgcagcagagaaatcccagatgaacaaaccccccaactgaattggctaatggtgcggggtttgatccaggacgctgctgtgtgtaacgctttttacaagttgaaatgtggccaagttcctccgaagattcatgagaaacatgaagtacttgtgtccttgtacgcttttggtttggtttcaatgtttcatttggactggatcaagtccgacctcttccgcgctctaatcaggacgcgacaactgtgttgattgtggcttctcttccacaccatgtaaataagcaggaaaatatgaaccaacgttatcgtaccttctcg

SEQ ID NO: 9424 - DNA, 2014 bp, Zea Mays
ccgaaagtagccagaagcggtcaagcggatgaggtaaaagctgaattccggctgtacatcctggctgtctggcggtggggcagtttcgccataccagccgcgcgcggctattgttggcgtggatgcccccaaccccagattcttctggccacgcacccgaaatccacacctcacaaaccacgcagcggaggcgacccacaaaaaacacgcgcggcaggaggaaggcgaggaagcatccccttgttcaattgaccccaccaccgcccgctgctgcttcgtttctagctcgagagagtttagtgggttgcttgattccgaagctccgagctcgtgggattgaattgagcccccccaagatcagaattggagcagcgggttttggtttcctgcttggtgccgctgattggagtacgcttcttttgtggtggttgagaggctgctcggcttccgccgaccatgtccaatgtttcttgcaatggctgatgcacgagctgttcttataaagttagcagatcgtctgcacaacatgaatacgatagaagctttgcctttggttaaacaacaaaggtttgctaaagagactatggaaatatttgtgccattggccaaccgattaggaattgctagctggaaagaccacttggagaatatttgcttcaaacacttgaacccagaggagcacaaggagctttcctctaaacttctgatgtcttttgatgaagcacttcttacatctacgcttcataacttggataaaagccttagagatgaaggcatttcatatcacagtctttctggaaggcacaagagtttgtacagtatatactccaagatgataaagaagaacttaacaatggacgatgtccatgacatccatggtctacggcttgtggttgaaacagaggaagattgttatcgagcacttgacatagtgcacaagctgtggccccgagttaccggaagatttaaagactatatttgtcatccgaagttgaatgggtatcggtcgctgcacactgtcatcatgtgtgagggtgtccatccatttgaaatccagatccgaacaaaggaaatgcacctacaggctgaatatggattcgcagcgcactggaggtacaaagaaggtggctgcaggcattcctttgtgctccaaatggtggaatgggcgaggtgggtgctcacatggcaatgcgagacattgagcaaagagcgtccctcgtctttgagcagttctgttggcataaggccaccatgcccttttcccctgcattcggaagattgctcctactcttacagccgacagtgcaactatgaaggccctatatttgtcatcatgcttgaacatgacaagatgtctgtccaagagctcccagccaactcgactgtagttgatctaatggagcgagtcggggccaacagtccgagatggagcccttgcagcttcccactgaaagaggagctgcgaccgagggttaaccacaagcccataagcgacccaaataggaagctcagcatgggcgacgtggtggagctgacgcctgcgctccctgacaagtcgctgtccgagtaccgggaggagatccagcgcatgtatgagcggggagggtttgcgctcgccaccacccctagaagctgacaccatcgtcgccatgttaacctgctgctgtacaatacacctgtaaatacgaactaatccttgcagcagagaaatcccagatgaacaaaccccccaactgaattggctaatggtgcggggtttgatccaggacgctgctgtgtgtaacgctttttacaagttgaaatgtggccaagttcctccgaagattcatgagaaacatgaagtacttgtgtccttgtacgcttttggtttggtttcaatgtttcatttggactggatcaagtccgacctcttccgcgctctaatcaggacgcgacaactgtgttgattgtggcttctcttccacaccatgtaaataagcaggaaaatatgaaccaacgttatcgtaccttctcg

SEQ ID NO: 9425 - DNA, 1736 bp, Zea Mays
cagccgtccgccgccacccttcctatatcccagactctctctctctctctctcaggcacattcccctggctggacccgcgctagctcgcggccgcggcagctagatagtagtagctctccagcccatagcttaggtcggtcgccttgtttcgtagggtctggttcggccgttggtcgataagtcggcgggcgatgggggaagcgccgcagcccaagtcgccgccgaggtacccggacctgtgcggccgccgccgcctgcagctcgaggtgcagatcctcaaccgggaggtcggcttcctcgagcaagagatacagggactcgagcgcattcagcccgtctcgcgatgttgcaatgagttgcaggataagtggtagctagtgtatcaggaaaccaacataatagtaatacagtaggtgggtcctgtgcagttcttctttctcttttttttttgaaaaaaggtactattgaacagtaatattatagttgcgtgtgtctttgattacgatgttttgctcacaaagttgctactgctttccaataattcttgacagcgtcaacgagtttgtcagtgcaaagaccgacccaatgataccagtgtatgaattcttaacttgattctctcatgccaggccagcagaaccatggcccatggttccccttatcagtgtctctttctctctctctcttttttggctgactttgctgcttgcagaagcaaaaggagacatggatcttgcagcttctcgcggtggatcagatcaaaattgcgcacatgcttttcatgcctgtgctgctggtgccactgcttgccgaagcccaatgcgccaagctgcttcagctgttcttgttgcacctgccgcgacacgcagtgctgtactccgatctgccgctgttcaaagaccccttcgtgcagccccggctgctgcacctgcagccttcccagctgcagctgcaagacgccaccaggctgcggccattgccgaccccagtgcagcagctgctgctctagtggttgcagctgcgcggactgcccgtgctcctgctcctgccccccgtgctgcagctgccccggcttcttctcctgtgaggggtgctcggctggctgcctcggcgctctcaaccggtgtctcggcggcctgtcgtcgtgctgcagtgagatgcgaccttcctgctgcaagtgccagtcgtcgtgctgcgaggggggttcgtcctgccgcggcaccggcacgggagcgtgctgccgcggttcgtgcctcggtgccccggcgtcgtcgtgcccggagtgctcctgcggctgcgtgtgctcctgctccaggtgcaaaggaggatgccgctgcccgtcctgtggtagtaatccctgctgtcccggtggatgcttgtgctagatcagagtattatattactactagctagtgtgtctgttgctcttcttttcctgttgtggatgatttggcgtttgatttggatggaacctcgctagtgcataatattcactgtcatgaattaactttgacgcccgtcgccactgcgccagctgcgtacgtaacggaaattgatttagatctaatttcaaaattaaacaataatctgaaaagattagtatcacgaaccttgtagaacagttagatgtcctcgtaatggcctcgtaatggtctagatgaatcaaaacactagtaacaattgaaaacaaccagaatcaagctaagaatgtaattggtcaacaaataaaaaggaa

SEQ ID NO: 9426 - DNA, 1960 bp, Zea Mays
ccttccgcctcggctagagcctacagcgcccctctcgccctgacggcccaaccgagccggttataaacacagccgtccgccgccacccttcctatatcccagactctctctctctctctctcaggcacattcccctggctggacccgcgctagctcgcggccgcggcagctagatagtagtagctctccagcccatagcttaggtcggtcgccttgtttcgtagggtctggttcggccgttggtcgataagtcggcgggcgatgggggaagcgccgcagcccaagtcgccgccgaggtacccggacctgtgcggccgccgccgcctgcagctcgaggtgcagatcctcaaccgggaggtcggcttcctcgagcaagagatacagggactcgagcgcattcagcccgtctcgcgatgttgcaatgagtaaataataaaaaccctctcccgctcttccgctttctctcgtctggaactggaactcaaacatcgtcactgcaccattattttctgttatttcattttagaatcatttcacttgatattcagaaataagcagttgtaacagcagttaccacttcatttgtcgcgacaagaaaatagggaaaaaacaataaataaaatatcttcatttgtggcttgatattccttgaccccacgcattgcattcccccctgggaagaaaacagactcacatgaacagcgagaagaagtacactgtagtttttcttgaacgtttgcttcgtgtactaattatatcttgtcctggtcgtctcatactccacatttggactgttcacacatagctcagattccatttacattcctgtttgaggttgcaggataagtggtagctagtgtatcaggaaaccaacataatagtaatacagtagcgtcaacgagtttgtcagtgcaaagaccgacccaatgataccagtaagcaaaaggagacatggatcttgcagcttctcgcggtggatcagatcaaaattgcgcacatgcttttcatgcctgtgctgctggtgccactgcttgccgaagcccaatgcgccaagctgcttcagctgttcttgttgcacctgccgcgacacgcagtgctgtactccgatctgccgctgttcaaagaccccttcgtgcagccccggctgctgcacctgcagccttcccagctgcagctgcaagacgccaccaggctgcggccattgccgaccccagtgcagcagctgctgctctagtggttgcagctgcgcggactgcccgtgctcctgctcctgccccccgtgctgcagctgccccggcttcttctcctgtgaggggtgctcggctggctgcctcggcgctctcaaccggtgtctcggcggcctgtcgtcgtgctgcagtgagatgcgaccttcctgctgcaagtgccagtcgtcgtgctgcgaggggggttcgtcctgccgcggcaccggcacgggagcgtgctgccgcggttcgtgcctcggtgccccggcgtcgtcgtgcccggagtgctcctgcggctgcgtgtgctcctgctccaggtgcaaaggaggatgccgctgcccgtcctgtggtagtaatccctgctgtcccggtggatgcttgtgctagatcagagtattatattactactagctagtgtgtctgttgctcttcttttcctgttgtggatgatttggcgtttgatttggatggaacctcgctagtgcataatattcactgtcatgaattaactttgacgcccgtcgccactgcgccagctgcgtacgtaacggaaattgatttagatctaatttcaaaattaaacaataatctgaaaagattagtatcacgaaccttgtagaacagttagatgtcctcgtaatggcctcgtaatggtctagatgaatcaaaacactagtaacaattgaaaacaaccagaatcaagctaagaatgtaattggtcaacaaataaaaaggaa

SEQ ID NO: 9427 - DNA, 1018 bp, Zea Mays
gaaaaacattctcaaagccaggctgaactggtccggcggtgctctgatcttgaggaaaagtattcccaaagccagactgggctggcccaggtttctgctgctctgaatgatgctaacatgctaaattctactctccgcgctcagctcgattatgaaaagacaaggtaaaccgtgctgttagcaccgcaatctatttcctacttcccgcagggagtgtttcccgtctccaccgcattccctgtgctgaaacctggcacttctacaagggagagcctctcacggtcttcgagcttcacgacgacggtcacattgaccttactgtcattggcccacaccttgaggcaggccagcgcccccagtataccgtgccaccgaacgtgtggtttgggtcgttccccacactagacgtcgagtcgttcgcatctgatggcagcgttcttgtcaagtctcggaagagggaccctgagctgcattactcccttgttggctgcacctgtgcccctggcttccagtacgaggattttgaaatggccaaatttgaggacgtgagatccatcgctcccaaggctgaacctttcctcaagtttcttattccctctaccgattaactccagagcagcctcagatgattgtggatgggttctcagcgactttctatactgcatactgtacggatggtgtttctagtgtgattccatgagagttctgctttcacgacagtgtagacagtaaactgtacctttgtggtggcaccggttgaaacgtttggtgcattgaaacagaataacagctggtcttgatgttgaatagcaggtgcttttgcaaaaccctgaaaccgtactaggatgctgggagcataggaggatctgataaggtttcacgtgattaaattcaaccgttcatggctctcgatcgtgcagagcttctcccgctgcaaagagtaagcctgcaaggcagaagccaagcgagtcgtgcttgtccaatccgtttttttcatgttctgcttctgctgcttgtc

SEQ ID NO: 9428 - DNA, 2702 bp, Zea Mays
ggataaaagaaaaggaaaaattggaaatgtcgtgggttcgtagctctcgcttcctggtcgtcgcgagtccaaacaaaaagaagttcacaatcaccgcgagcacgcagaaatgaacggaggcttgcgcttgcctgtatcgcgcgaccggagctgagcagcagcacagagtggagccagctcgcttcgcctcctcggtcgcctccacttctatatcacttccccgtctggccccttccccgtgcgccaccgcgcacaatcacacgcgcgcgcccacacgtgcggcttcccggattcgcgccgccgcgccagagccagccaggccagcttcggatcgaggaagaggaggtggcgaaggtgaggagtcaacccagcttccgagccatggacggatcggccgcggagctggaggcggcggagcgggtggtgatgcggtgggactcatcctcggcgggcgccggcgcggacgagccgatgctgttcgacggcggcggggaccgggccgaggcggacaggttcctccgcgccgtcgacgatctgcgtcggctcgcgccgccgtcgcccgcggcagtcggcagcccgcgccgcctctcgtcgtcctcggtggcggcgagcggcgccgtgcaggtcgctatggcgcggctcgaggacgagttccgccacgtgctgtcgacgcgcgccctcgacctcgagatcgaggcgctcgccgacctcagctcgctctccatcaacagtgaccgcaccaactcggcctcctccgccgacctccccgccgctgacgaggacgactccgtgtcctcctccatcggccgccgcagcaccgcctaccgctcgctccggagcatccgcgagatcgacctgctacccgacgacgccgtcgcggacctccgcgccatcgcgtcccgcatggccgccgccgggtacggccgcgagtgcgcgcaggtgtacgcctccgtccgcaagcccgccgtcgacgcctccctgcgccggctcggtgtcgagcgcctcagcatcggcgacgtccagcgcctcgagtgggacgcgctcgaggccaagatccgccgatggatccgcgccgcccgcgccgccgtccgcggcgtctttgccagcgagcgccgcctctgcttccacatcttccacgaccttcctatctccaccaccaccatctccgccgcctcagcgtccgccacgcacgacatccctttcgccgaagccgtcaagggcgccgcgctgcagctcttcggcttcaccgaggccatcagcatcggtcgccgctcccctgagaagctcttcaagatcatagacctccacgacgcgctctcggacctcctccccgacgtctccgacatcttcgccgcctccaaggtcgcggagtccatatacgtgcaggccgttgagatccggtctcgcctcgccgatgccgtgagagggatactctcggagttcgagaacgccgtgctccgcgacccgcccaagaccgcggtgcctggcggtaccatccacccgctcactcggtatgtgatgaactatagcagcctcatttgcgactacaaggtcacgctctccgagctgatcatatcacgtccatcagctagcgctcgtctttctgctgagggcaatgagctcgcgccgtccttggccgacctcgagctccctgagcttgagaaccagttaccgcttgcctctcacattgtctggatcattgttgttcttgaacacaacctggagggcaaggcggcactctacaaggatccagctctctcgcatctgttcatgatgaacaatgttcactacattgtccacaaggttaaagattcgccagatctctggagcatgatcggtgataattacttgaaacggcttactaccaagttcacaatggcggccacaaactaccagcgcacctcatggttgaagatcttgaattgtttgcgtgatgaggggctccatgtaagtggtggcttttcgtcggggatatccaagtcggcactgcgggagcggttcaagtccttcaatgctgcatttgaggatgcgcatagggtgcagtcagggtggtgtgtgccagacaaccagctgagggaggagctcaggatctcaattgctgagaagctgctgccagcataccggtcattccttggcagatttcgacatcatatagagaacgggaagcatccagagctctacattaagttctccgttgaggaccttgagatagctgtgagcgatttctttgaaggtgttcctccttccccacataacaggaggaaatcacatggatgagggacttttacctcaggcacaagaaattactctattgcactctccattgacgtaccaatgcgtgtaactggaaacagcctgtccatattgctgtatatattatgttctggaatcacatgatccagcattgcctatgactatgatgtaatttataaaagtatactatggaatcagagatcatgtgttatgcgccatacgtgtaaccttgcggggactgatgaaatttgaagccctaccagctgattgcctttttgagctataatgttcgtgatcttttcaagaatgcaattatgtatgctgaaagatttgtcatcgtatactttgatacgaacaggccatcatattcatatgtacaggcgacatgtatcgtttggcatacgtatatggaatttttttatatctataatctcagtatctagttgtct

SEQ ID NO: 9429 - DNA, 1570 bp, Zea Mays
ctgatgctgtgttgagacattctgccaaccaagtgttttagagttgtatatatatctgcactatatatacgacgtggatgtacatttctgtgccgctggcgctttacgtcggggaacggacgctacgggccttccgatccaaggcctacgcagtcaagattctcaaggtgtgcctcctgccggggaacgtcctgaccgttaccatgtcgaagccctacgggttccgctacaggagcgggcagtacatattcctccagtgtccaacaatctccccgttcgagtggcaccctttctccatcacctcagctcccggagacgactgcgtcagcgtccacgtccagaccaggggcgactggacacaggagctcaagcgcatcttcgtcgagaactacttcacgccgtgcgtgcccagacgggctgccttcggggacctaggcgcggtggaccacaagaccaagagcccgccgaggttgctggtcgacggcccctacggcgcccccgcgcaggacttcaggaactacgacgtgctgctcctcgtcggcctcgggatcggcgccacgcccttcatcagcatcctcagagacctcctcaacaacatcaagctggccgacgagctcatggacctggcaatggagaccggccgggccgaggacagcgccagcaacctgagcgcgtcgacggcgagcggcggcggcaacaagaggagggcgtaccgaacgacctgcgcccacttctactgggtcacgagggagcctgggtcgttcgagtggttcaagggggtgatgaacgaggtcgccgagatggacaataagggtgtcattgagctgcacaactacctgacaagcgtgtacgaggagcgagacgcgaggacgactctgctgtccatggtgcaggccctcaaccacgccaagcatggcgtcgacattgtgtcagggacaagggtcaggacacattttgcaaggcctaactggaaagaagtatttacgaggatagcgtccaagcacccaaattctacagtcggggtattttactgtgggagacctacacttgccaaagaactgaagaaactgtcacttgacatgagccacagaacgggaacccgatttgatttccacaaggagtacttctgatggaaaatacaagtgcccctgatttcttttagtactagaagatacagataaaaaaattcacaaattttgcgtagaagcgaactgatcctctttcacagtatgtaaatgtacatggtataaagcagagagtagttagaaacgtttttttttctttcttaaccaaatgggagggtgaaaatatgtcctgcgctttcagacagccattggttactgcagatataactgtatagatcatatcattgtatgctaagcatgcaagagacttgaggccaacaatctgaatgcgtatcactcaattaactggtcgtgtttactttattacagccagtggcatcgcgcagaaatcatatatatggtcaattgattcttcatgtaggcctcagctgttgaagcaaactagcatgcttgctggggccgatttgcattaggttagatagttt

SEQ ID NO: 9430 - DNA, 2026 bp, Zea Mays
cttttatggtcctgtcgggcaaaggagaatgcaccaatcaacacgtgtgcatgcaccttagttgaatccagttttcgctaacgaatcattattcgacagaaagcatagagaatcagatcatcgcgacggcgatcgcgctgggcatctgcctgcacgcggggaaccacctggcgtgcgacttcccgcggctgatcgcgtcggcgcccgaggagtaccgtctggtggcgcgcttcttcgggcgggacaggcccagctaccgcgggctcctggcgggcgcggagggcgtgacggggatcgtcatggtcacgctcatggccgtgtccttcaccctggccacgcggccgttccggaagcgggaggaggccagcagggacaagaagaaggcggcggcctgcgcatgcaggggcgtcccgctcgccggcttcaacgccttctggtactcgcaccacctgctcatcgtcgtctacctcctgctcctcgtccacggctggttcatgttcctcgtcgacaagtggtaccagaggacgacgtggatgtacatttctgtgccgctggcgctttacgtcggggaacggacgctacgggccttccgatccaaggcctacgcagtcaagattctcaaggtgtgcctcctgccggggaacgtcctgaccgttaccatgtcgaagccctacgggttccgctacaggagcgggcagtacatattcctccagtgtccaacaatctccccgttcgagtggcaccctttctccatcacctcagctcccggagacgactgcgtcagcgtccacgtccagaccaggggcgactggacacaggagctcaagcgcatcttcgtcgagaactacttcacgccgtgcgtgcccagacgggctgccttcggggacctaggcgcggtggaccacaagaccaagagcccgccgaggttgctggtcgacggcccctacggcgcccccgcgcaggacttcaggaactacgacgtgctgctcctcgtcggcctcgggatcggcgccacgcccttcatcagcatcctcagagacctcctcaacaacatcaagctggccgacgagctcatggacctggcaatggagaccggccgggccgaggacagcgccagcaacctgagcgcgtcgacggcgagcggcggcggcaacaagaggagggcgtaccgaacgacctgcgcccacttctactgggtcacgagggagcctgggtcgttcgagtggttcaagggggtgatgaacgaggtcgccgagatggacaataagggtgtcattgagctgcacaactacctgacaagcgtgtacgaggagcgagacgcgaggacgactctgctgtccatggtgcaggccctcaaccacgccaagcatggcgtcgacattgtgtcagggacaagggtcaggacacattttgcaaggcctaactggaaagaagtatttacgaggatagcgtccaagcacccaaattctacagtcggggtattttactgtgggagacctacacttgccaaagaactgaagaaactgtcacttgacatgagccacagaacgggaacccgatttgatttccacaaggagtacttctgatggaaaatacaagtgcccctgatttcttttagtactagaagatacagataaaaaaattcacaaattttgcgtagaagcgaactgatcctctttcacagtatgtaaatgtacatggtataaagcagagagtagttagaaacgtttttttttctttcttaaccaaatgggagggtgaaaatatgtcctgcgctttcagacagccattggttactgcagatataactgtatagatcatatcattgtatgctaagcatgcaagagacttgaggccaacaatctgaatgcgtatcactcaattaactggtcgtgtttactttattacagccagtggcatcgcgcagaaatcatatatatggtcaattgattcttcatgtaggcctcagctgttgaagcaaactagcatgcttgctggggccgatttgcattaggttagatagttt

SEQ ID NO: 9431 - DNA, 3835 bp, Zea Mays
tgttaaagggaaggaaccgatcataatgatacttataaaacaaagtcggtatccagttcagtagccctaatgcaatgaatttgacgagaatacgcaaaaaaaaaaactattgaactaaaattagttaaattcgtgcaggcgagagcctttcagtggctgcgctaataagcccgtgtcacacgacagacacccaccgttcgcctgctttcgcatcgtcctcttggctggaagcgtccgcggctcggcgcaccgaatcccaaccaccggtagtgccgcatatacatcgccctgccgctcggcccggctcgcgacaagcaagctgatcacctgagcaagctcggtgaggccaagcagagcggcgctccagttccagccaggccccggagatatgcagatgcggcggtgagggccgggccggcagcagtggtgcctagctagaagcgtacgtaggggcgggcccagccatgtgggcgccgtcgcgggggtcgtcgtcggggagcgggcgaaggacctggcgccggcgcatcgcggactacctcgccgacgaccagaccgacgtgtcggacaatgagtccttcatcacggcgcacagcgacgagcacgccgccccggcgtccggcgccgggggaatgctgccggcgttcctcgcggaccagggcgacctcgtggaggtgatgctggagctggacgaggagtccatggtggtgcgcagcgtcacgcccaccgccgccgcgctgtgcgggcccacgtcgctgcccctgcccggcgcgcggagcctgagccggtgctcgtccacgtcgtcgcggattcgccggaagttcgcgtggctgcggtcgccgtcgccgcgccccccggccgcgaccgcggcgtccgaccagcaggtggtggtgcgggaggcggcgctggcggcccgcgagcggcgccgcgcccaggcccgcctggaccggtcgcggtccggggccaggcgcgcgctcaagggcctccggttcatcagccgcaccacgggctcctccgacgccgacgccggcgccggcgccgggctctggcgcggcgtggaggagcgcttcaacgcgctcgcgaccgacggcctcctcgcccgcgacgacttcggcgactgcatcgggatggtggactccaaggagttcgccgtgggcatcttcgacgcgctggcgcggcggcggcgccagaacctggagcggatcagcaaggacgagctctacgagttctggctgcaaatctccgaccagagcttcgacgcgcgcctccaaatcttcttcgacatggtggacaccaacgtggacggtaggatcacgagggaggaagtgcaagagctgatcgttctgagcgcgtcggcgaacaagctgtcaaaactcaaggagcaggctgaggagtacgcgtccctgatcatggaggagctcgatccggagaaccttggctacatagagctgtggcagctggaggcgctgctcctgcagcgcgacgcgtacatgacctacagccggccgatgagcagcggcagcgcggcgcagtggagccagggcctgagcggcggcgcgggcgcgggcgggcagccgtcggcgcagcagcagcagggcgtcgcgtcgcggtggcggcggtggagcccgcgtcgcgcggcggcgcgggcgcgcgtggcggcggcggagagctggcggcgcgcgtgggtgctggcgctgtgggtcgcggccatggcggcgctgttcgcgtggcggttcgtgcagtaccggcggtcggcggcgttccgggtgatggggtactgcctccccacggccaagggcgccgccgagacgctcaagctcaacatggcgctcgtgctcctccccgtgtgccgcaacacgctgacgtggctccgctccacctgggcgcgcttcttcgtccccttcgacgacagcatcgccttccacaagatcatcgcgacggcgatcgcgctgggcatctgcctgcacgcggggaaccacctggcgtgcgacttcccgcggctgatcgcgtcggcgcccgaggagtaccgtctggtggcgcgcttcttcgggcgggacaggcccagctaccgcgggctcctggcgggcgcggagggcgtgacggggatcgtcatggtcacgctcatggccgtgtccttcaccctggccacgcggccgttccggaagcgggaggaggccagcagggacaagaagaaggcggcggcctgcgcatgcaggggcgtcccgctcgccggcttcaacgccttctggtactcgcaccacctgctcatcgtcgtctacctcctgctcctcgtccacggctggttcatgttcctcgtcgacaagtggtaccagaggacgacgtggatgtacatttctgtgccgctggcgctttacgtcggggaacggacgctacgggccttccgatccaaggcctacgcagtcaagattctcaaggtgtgcctcctgccggggaacgtcctgaccgttaccatgtcgaagccctacgggttccgctacaggagcgggcagtacatattcctccagtgtccaacaatctccccgttcgagtggcaccctttctccatcacctcagctcccggagacgactgcgtcagcgtccacgtccagaccaggggcgactggacacaggagctcaagcgcatcttcgtcgagaactacttcacgccgtgcgtgcccagacgggctgccttcggggacctaggcgcggtggaccacaagaccaagagcccgccgaggttgctggtcgacggcccctacggcgcccccgcgcaggacttcaggaactacgacgtgctgctcctcgtcggcctcgggatcggcgccacgcccttcatcagcatcctcagagacctcctcaacaacatcaagctggccgacgagctcatggacctggcaatggagaccggccgggccgaggacagcgccagcaacctgagcgcgtcgacggcgagcggcggcggcaacaagaggagggcgtaccgaacgacctgcgcccacttctactgggtcacgagggagcctgggtcgttcgagtggttcaagggggtgatgaacgaggtcgccgagatggacaataagggtgtcattgagctgcacaactacctgacaagcgtgtacgaggagcgagacgcgaggacgactctgctgtccatggtgcaggccctcaaccacgccaagcatggcgtcgacattgtgtcagggacaagggtcaggacacattttgcaaggcctaactggaaagaagtatttacgaggatagcgtccaagcacccaaattctacagtcggggtattttactgtgggagacctacacttgccaaagaactgaagaaactgtcacttgacatgagccacagaacgggaacccgatttgatttccacaaggagtacttctgatggaaaatacaagtgcccctgatttcttttagtactagaagatacagataaaaaaattcacaaattttgcgtagaagcgaactgatcctctttcacagtatgtaaatgtacatggtataaagcagagagtagttagaaacgtttttttttctttcttaaccaaatgggagggtgaaaatatgtcctgcgctttcagacagccattggttactgcagatataactgtatagatcatatcattgtatgctaagcatgcaagagacttgaggccaacaatctgaatgcgtatcactcaattaactggtcgtgtttactttattacagccagtggcatcgcgcagaaatcatatatatggtcaattgattcttcatgtaggcctcagctgttgaagcaaactagcatgcttgctggggccgatttgcattaggttagatagttt

SEQ ID NO: 9432 - DNA, 1638 bp, Zea Mays
accatccattcattcactcatcaaataaaaccactgttcgctgacgtagggtgtttttccctgttgctagcaaacctcatcatggactggacaggcgcaggagctgcctaagctctcacaaggaattctcctcaatccagtggaagccaaaaaaaaagtcctcgtaattcactctaatacaactccatccacatggtttagttataaaactaacaaggcctgccggtcccgttccaatccatggattgtgcgagctgctgggcgctgaacgcctttacacctcggcaatggtcccggcgttttgagttttgacctacccactagatagatccttggcgcttggcaatctgatccactgaatgctagtacgtagtaccttttttgtaaagatcaggtgtcacccgtgtcgatttgaccggatgactaggatctgggacccggcttgtttgttgtttctcatctcagctcaggcattggcttggctgactaagcgaatgacgagaaagagactggttgctgctggtcatatcatgcgtacccttgggccttggataagaggtacccagttgcagagctgcggcgtcaacattgtacaactgatgaatgaagaatgaaatactgacctggaccatcgctcttcgtaatccgttattcagtacgagtaagtatattaaaagtcgaactcgagttgaacaacaattcagggagggaacacagggcgtgtttgcgagactgcttggccagctcggctcgttcaactagttcaggctgaggctagcctgtctcagctactgcaacttattttgtttgcgcacttataccatacgagcctggctcagacgagctggtgtttgtcacccagtatacagccgggctagaagactaaaactacctaaacatgaaatacttgcgccacgagcagccaggctcccagaaaacagaccctgatctcgttcctgtggagccaggctgagaggctaaatttgtacacgcacagctagactcccaagcaggccaggcgacacaaacacgggagctgcagcccgagagcgcagccagactgctgggccatggcggcaaacacatccacaaccgctgcagttggaacgcaaaaggtttccaggcgagcagaagaaaatgcacagctacatcgtagcatcacacacacacaaaacactgctactactaccagtacgaggtggtgcttgggataattacagaggggaggagtacttgcggagcttgccgaggccggagtccggtcgcgggccggccaccgtctcgtcccagagctgatcgaggaggcccattccggccaccaccagacccggacggacgcgattggttggctggcccctgcgtgccttggacgacgtatgcgctgcgcgcgcgtcgcgttgtcttgtcacgtcgcggcgagtgagggacggacgagagagaagagaagacgggcttgggttggcccggctgccgtgccgtgccgtgcctggatctggagcagttgtgggtggggcggatgacgatccctctgttcttctctcgggaacggtggactggggaggggattttatagagaaaaaggaggtgaggactgactgaggagcggacggacgtgagaggattctgccgagatatatt

SEQ ID NO: 9433 - DNA, 959 bp, Zea Mays
cctgccacactcggcgccgcgcctataagtagcgcgcatgcgccggcgcagcactgcacccacggctcgagctcgcagcgacaggcacaggcagcaaggctggtttccttcctcgtcgaacgtctgccgctgctcgcgatggccggacgcggaggaggtagcaagagtagcctgtacgcggcgctgggcgtggccagcgactgctccgacgccgagctgcgcagcgcctaccgcaagctcgccatgaaatggcacccggacaagtgcgccggcgcagggagctccggcggcggcgcggacgccgccaaggccaggttccagaagatccagggagcgtacgccgtcctgtcggaccccaacaagcggatcctgtatgacgtcggggcctacgacggcgaaggcgacgatgacggcgccggggagatcctcggagacattctcgaggccatgagccaggcaggccctgccgccgacaacggcaagggggagagcctggaggacctgcagcggcagttcgaggagctgttcctgaggccgtcgccgtcgtccttctcgccgcagaacgacgcagctgggaagtcggcttccaagagtaggcctgctgggaggaaatagacaggacactgcggcgaataggtcggtccagctactcctgttccagataagctacgacctacgaggtaccgatacctggccaggagcccaggacagcgacctgcgacggcgacgaggctgccagtgctgcacgctcaagtacatgctccgagttgtagctactactgtagatcggcacggcagtcgccagaatggtaccataaggcggccgtacgcacacacgcatgaacgctgtttttaccatctcaggttcgctgcaaaatttccagcgtgttctctgtaaaatccctgcatgattgctataaagaaattcttcgtgggtactaataaatggagtgctcagt

SEQ ID NO: 9434 - DNA, 1048 bp, Zea Mays
caggccatagaaatttggaacatcatctcaaatggtggttacttgtatatttgcggtgatgccaagggaatggctagagatgtacacaaaatgcttcatacaatagtccaagagcagagatctttggatagctccaaaaccgagagctatgtaaagagcatgcagatggaaggcaggtacctccgtgatgagcacgagatgagcgcgttgatgtacttagtactgtgaaatcaaactggaggaggctgcaattctgcattacacctacaaaaaattctcaaacctaacctcaagaagggatagatgtggctgcaaaccaactaaagaagatgtgaagcaatgttttatcttggaatttgaccgtttggtaccgggaacatgttgcatggaccgatagagacaccaacttgaaacttttaaggaaggatgtattaacacatatatatgtgcccatggcattcatcggtggcctcaaggaatccgacgtctatcaatgcaataacatcagcgaaagcacaataaaaaacaaagtcatcaaacatgggtctcggaaacaaggaccacatccggctaaactgaactgctggtcagtccaaattggaaggcggtcacgggaaggtgcaggtaagcgtcagaaagatcctagaaatggttgatgcccaggaaggagcagcgaggccgccaatgtcgcccccaggttttcttgagctggctgaaagcaccactgccttttcatgacattatgtgaggcattgtttgagtattgactgaggttggtttaaccatgcgtgatacatgcagccttgagcatacagtgagtcactcaacaactttggcgaaagcccagatgttttcttgcagtttttgaaaaatattccgcgccctgatttcatgattgtgtgccatcgcaacacacgggcaactggctattatatatataagttatcatggtattatatggtcccgttgcaacgcacgggcactcacctagttattttatatgtgtatagtaggatttaggagatgatttaggacttgtttggttatt

SEQ ID NO: 9435 - DNA, 965 bp, Zea Mays
caggccatagaaatttggaacatcatctcaaatggtggttacttgtatatttgcggtgatgccaagggaatggctagagatgtacacaaaatgcttcatacaatagtccaagagcagagatctttggatagctccaaaaccgagagctatgtaaagagcatgcagatggaaggcagctgacactggtcacccaggagcacgagatgagcgcgttgatgtacttagtactgtgaaatcaaactggaggaggctgcaattctgcattacacctacaaaaaattctcaaacctaacctcaagaagggatagatgtggctgcaaaccaactaaagaagatgtgaagcaatgttttatcttggaatttgaccgtttggcattcatcggtggcctcaaggaatccgacgtctatcaatgcaataacatcagcgaaagcacaataaaaaacaaagtcatcaaacatgggtctcggaaacaaggaccacatccggctaaactgaactgctggtcagtccaaattggaaggcggtcacgggaaggtgcaggtaagcgtcagaaagatcctagaaatggttgatgcccaggaaggagcagcgaggccgccaatgtcgcccccaggttttcttgagctggctgaaagcaccactgccttttcatgacattatgtgaggcattgtttgagtattgactgaggttggtttaaccatgcgtgatacatgcagccttgagcatacagtgagtcactcaacaactttggcgaaagcccagatgttttcttgcagtttttgaaaaatattccgcgccctgatttcatgattgtgtgccatcgcaacacacgggcaactggctattatatatataagttatcatggtattatatggtcccgttgcaacgcacgggcactcacctagttattttatatgtgtatagtaggatttaggagatgatttaggacttgtttggttatt

SEQ ID NO: 9436 - DNA, 949 bp, Zea Mays
accaggccatagaaatttggaacatcatctcaaatggtggttacttgtatatttgcggtgatgccaagggaatggctagagatgtacacaaaatgcttcatacaatagtccaagagcagagatctttggatagctccaaaaccgagagctatgtaaagagcatgcagatggaaggcaggagcacgagatgagcgcgttgatgtacttagtactgtgaaatcaaactggaggaggctgcaattctgcattacacctacaaaaaattctcaaacctaacctcaagaagggatagatgtggctgcaaaccaactaaagaagatgtgaagcaatgttttatcttggaatttgaccgtttggcattcatcggtggcctcaaggaatccgacgtctatcaatgcaataacatcagcgaaagcacaataaaaaacaaagtcatcaaacatgggtctcggaaacaaggaccacatccggctaaactgaactgctggtcagtccaaattggaaggcggtcacgggaaggtgcaggtaagcgtcagaaagatcctagaaatggttgatgcccaggaaggagcagcgaggccgccaatgtcgcccccaggttttcttgagctggctgaaagcaccactgccttttcatgacattatgtgaggcattgtttgagtattgactgaggttggtttaaccatgcgtgatacatgcagccttgagcatacagtgagtcactcaacaactttggcgaaagcccagatgttttcttgcagtttttgaaaaatattccgcgccctgatttcatgattgtgtgccatcgcaacacacgggcaactggctattatatatataagttatcatggtattatatggtcccgttgcaacgcacgggcactcacctagttattttatatgtgtatagtaggatttaggagatgatttaggacttgtttggttatt

SEQ ID NO: 9437 - DNA, 1052 bp, Zea Mays
gtcagatacaacattcacccttccttaatatactatcacttttcaagtgttttgagtattcaatgtccactagaaaatgtgctcaactagatttacttctttttgttaccaggccatagaaatttggaacatcatctcaaatggtggttacttgtatatttgcggtgatgccaagggaatggctagagatgtacacaaaatgcttcatacaatagtccaagagcagagatctttggatagctccaaaaccgagagctatgtaaagagcatgcagatggaaggagcacgagatgagcgcgttgatgtacttagtactgtgaaatcaaactggaggaggctgcaattctgcattacacctacaaaaaattctcaaacctaacctcaagaagggatagatgtggctgcaaaccaactaaagaagatgtgaagcaatgttttatcttggaatttgaccgtttggcattcatcggtggcctcaaggaatccgacgtctatcaatgcaataacatcagcgaaagcacaataaaaaacaaagtcatcaaacatgggtctcggaaacaaggaccacatccggctaaactgaactgctggtcagtccaaattggaaggcggtcacgggaaggtgcaggtaagcgtcagaaagatcctagaaatggttgatgcccaggaaggagcagcgaggccgccaatgtcgcccccaggttttcttgagctggctgaaagcaccactgccttttcatgacattatgtgaggcattgtttgagtattgactgaggttggtttaaccatgcgtgatacatgcagccttgagcatacagtgagtcactcaacaactttggcgaaagcccagatgttttcttgcagtttttgaaaaatattccgcgccctgatttcatgattgtgtgccatcgcaacacacgggcaactggctattatatatataagttatcatggtattatatggtcccgttgcaacgcacgggcactcacctagttattttatatgtgtatagtaggatttaggagatgatttaggacttgtttggttatt

SEQ ID NO: 9438 - DNA, 1131 bp, Zea Mays
ttcataagatggtggaaaaggccatagaaatttggaacatcatctcaaatggtggttacttgtatatttgcggtgatgccaagggaatggctagagatgtacacaaaatgcttcatacaatagtccaagagcagagatctttggatagctccaaaaccgagagctatgtaaagagcatgcagatggaaggcaggtacctccgtgatgtatggtgacacatcacctcaaataagccatagctctagcgtgtggaagtaaagctggctttgcgtgagcacgagatgagcgcgttgatgtacttagtactgtgaaatcaaactggaggaggctgcaattctgcattacacctacaaaaaattctcaaacctaacctcaagaagggatagatgtggctgcaaaccaactaaagaagatgtgaagcaatgttttatcttggaatttgaccgtttggtaccgggaacatgttgcatggaccgatagagacaccaacttgaaacttttaaggaaggatgtattaacacatatatatgtgcccatggcattcatcggtggcctcaaggaatccgacgtctatcaatgcaataacatcagcgaaagcacaataaaaaacaaagtcatcaaacatgggtctcggaaacaaggaccacatccggctaaactgaactgctggtcagtccaaattggaaggcggtcacgggaaggtgcaggtaagcgtcagaaagatcctagaaatggttgatgcccaggaaggagcagcgaggccgccaatgtcgcccccaggttttcttgagctggctgaaagcaccactgccttttcatgacattatgtgaggcattgtttgagtattgactgaggttggtttaaccatgcgtgatacatgcagccttgagcatacagtgagtcactcaacaactttggcgaaagcccagatgttttcttgcagtttttgaaaaatattccgcgccctgatttcatgattgtgtgccatcgcaacacacgggcaactggctattatatatataagttatcatggtattatatggtcccgttgcaacgcacgggcactcacctagttattttatatgtgtatagtaggatttaggagatgatttaggacttgtttggttatt

SEQ ID NO: 9439 - DNA, 1043 bp, Zea Mays
ttcataagatggtggaaaaggccatagaaatttggaacatcatctcaaatggtggttacttgtatatttgcggtgatgccaagggaatggctagagatgtacacaaaatgcttcatacaatagtccaagagcagagatctttggatagctccaaaaccgagagctatgtaaagagcatgcagatggaaggcaggtacctccgtgatgtatggtgacacatcacctcaaataagccatagctctagcgtgtggaagtaaagctggctttgcgtgagcacgagatgagcgcgttgatgtacttagtactgtgaaatcaaactggaggaggctgcaattctgcattacacctacaaaaaattctcaaacctaacctcaagaagggatagatgtggctgcaaaccaactaaagaagatgtgaagcaatgttttatcttggaatttgaccgtttggcattcatcggtggcctcaaggaatccgacgtctatcaatgcaataacatcagcgaaagcacaataaaaaacaaagtcatcaaacatgggtctcggaaacaaggaccacatccggctaaactgaactgctggtcagtccaaattggaaggcggtcacgggaaggtgcaggtaagcgtcagaaagatcctagaaatggttgatgcccaggaaggagcagcgaggccgccaatgtcgcccccaggttttcttgagctggctgaaagcaccactgccttttcatgacattatgtgaggcattgtttgagtattgactgaggttggtttaaccatgcgtgatacatgcagccttgagcatacagtgagtcactcaacaactttggcgaaagcccagatgttttcttgcagtttttgaaaaatattccgcgccctgatttcatgattgtgtgccatcgcaacacacgggcaactggctattatatatataagttatcatggtattatatggtcccgttgcaacgcacgggcactcacctagttattttatatgtgtatagtaggatttaggagatgatttaggacttgtttggttatt

SEQ ID NO: 9440 - DNA, 946 bp, Zea Mays
gtttcataagatggtggaaaaggccatagaaatttggaacatcatctcaaatggtggttacttgtatatttgcggtgatgccaagggaatggctagagatgtacacaaaatgcttcatacaatagtccaagagcagagatctttggatagctccaaaaccgagagctatgtaaagagcatgcagatggaaggagcacgagatgagcgcgttgatgtacttagtactgtgaaatcaaactggaggaggctgcaattctgcattacacctacaaaaaattctcaaacctaacctcaagaagggatagatgtggctgcaaaccaactaaagaagatgtgaagcaatgttttatcttggaatttgaccgtttggtaccgggaacatgttgcatggaccgatagagacaccaacttgaaacttttaaggaaggatgtattaacacatatatatgtgcccatggcattcatcggtggcctcaaggaatccgacgtctatcaatgcaataacatcagcgaaagcacaataaaaaacaaagtcatcaaacatgggtctcggaaacaaggaccacatccggctaaactgaactgctggtcagtccaaattggaaggcggtcacgggaaggtgcaggtaagcgtcagaaagatcctagaaatggttgatgcccaggaaggagcagcgaggccgccaatgtcgcccccagccttgagcatacagtgagtcactcaacaactttggcgaaagcccagatgttttcttgcagtttttgaaaaatattccgcgccctgatttcatgattgtgtgccatcgcaacacacgggcaactggctattatatatataagttatcatggtattatatggtcccgttgcaacgcacgggcactcacctagttattttatatgtgtatagtaggatttaggagatgatttaggacttgtttggttatt

SEQ ID NO: 9441 - DNA, 1054 bp, Zea Mays
gtttcataagatggtggaaaaggccatagaaatttggaacatcatctcaaatggtggttacttgtatatttgcggtgatgccaagggaatggctagagatgtacacaaaatgcttcatacaatagtccaagagcagagatctttggatagctccaaaaccgagagctatgtaaagagcatgcagatggaaggcaggagcacgagatgagcgcgttgatgtacttagtactgtgaaatcaaactggaggaggctgcaattctgcattacacctacaaaaaattctcaaacctaacctcaagaagggatagatgtggctgcaaaccaactaaagaagatgtgaagcaatgttttatcttggaatttgaccgtttggtaccgggaacatgttgcatggaccgatagagacaccaacttgaaacttttaaggaaggatgtattaacacatatatatgtgcccatggcattcatcggtggcctcaaggaatccgacgtctatcaatgcaataacatcagcgaaagcacaataaaaaacaaagtcatcaaacatgggtctcggaaacaaggaccacatccggctaaactgaactgctggtcagtccaaattggaaggcggtcacgggaaggtgcaggtaagcgtcagaaagatcctagaaatggttgatgcccaggaaggagcagcgaggccgccaatgtcgcccccaggttttcttgagctggctgaaagcaccactgccttttcatgacattatgtgaggcattgtttgagtattgactgaggttggtttaaccatgcgtgatacatgcagccttgagcatacagtgagtcactcaacaactttggcgaaagcccagatgttttcttgcagtttttgaaaaatattccgcgccctgatttcatgattgtgtgccatcgcaacacacgggcaactggctattatatatataagttatcatggtattatatggtcccgttgcaacgcacgggcactcacctagttattttatatgtgtatagtaggatttaggagatgatttaggacttgtttggttatt

SEQ ID NO: 9442 - DNA, 1643 bp, Zea Mays
ggccaacaagacgctgctcgccaccgcttgagtcggtagtgagatcttagggggagaagccctgcagcccccatgctcccactccctcctgcaccccacgcttaccggcgagccgctcgacctcattggagcttgccaagccgtcatgtgccccagtgcggtggtcgacatcatccacggcgtcgaccgcgtgctggtcctgcgctcaatgcaggagtccttcaactggcggcggtggagcaaccgtactaccacagcgcgtacacaggacgcagagaacaactccagaaggcgagccccaacccctagatctgcgatgcagtcttctcaactgaaaaaagagggcagagaacaactccagaaggcgagccccaaccccagatctgcgttgtagtcttctcgactgaaaaaagagggcatctctaccgccaccaaccactagcaggcggcagacgttgctggcaataggcaatggcatgcatcaggcattgtttgcacaaaggacggagatctgtcgtcgaagaccacctcattgtttctcatggcaggcttgcttgctctagcttggcacaatatgtcgcttcaggcttcagtcggttatgtgatcaccagaacattatgggctctaaagtaggacttttgagaaatgccaggcgatggtgcatgcatgatgaagctgttgtccattatattgacatgattgatcagaccacgcttggtcaccggatgatcaagaaacaattcaacaagactccaagagctggctggcaaatcgatccttttggacattctgcagttcaagcttatttgcttggagcagagcttggcttcgattctttgcattttgcaagaatcgattaccaagataagaaaaagtgtaaagctggcaaaggcttagaggttatatagtgtggctcaagaacttttggttcatcttcacaggttcttattcttcttacaccacaattagttctgtctattccattcattagcacaatggatcgaattttgatttttttgaagggaatttgactctgtggtggttaaattgcatatatttacaaatgtatttcctgtcgattatagccctccagatggctttggctttgaagttttagatgaaaatatcttgcatgtctaggtacatgtacgcaaccatttccatgctcctcgaaccttacatgcatcttagattgaaatttgtaggatgacatactgatgtttgactataatgttgaagaacgagttaatgattttgttgttgtagccatagaacaggatggccaagtgcatgcactgtattctaccccatccatttacacagatgcaaaacatttgtcaaatgtatcttggccagtaaaatatgatgagtatttcccctatgctgattcaaaaaattcatattggactgggtactatacaagccgtccaactttcaagcgatatgttcgagtgttgagtggttattacctggctgcacgtcaaatagaatttttagtaggtaggaggagttccttagggttgttcacgaccagcttggaagacccaatggcaattgcccagcatcatgatgcagtctcaggtacaacaaacaacacacgacagatgactacttgaaacaccttgctcttggagcatctaag

SEQ ID NO: 9443 - DNA, 1396 bp, Zea Mays
atggagtcggccaatgaagagcggaaggaggagagggtcaacgggggctcaatagctggttggtgtagatgttgctggtttgagaatagtggcggcaagatctcatggagagaagctatgcggactcccagaaaaggcgaaatcatcgtgcgattgtggagattgtcgatgggaggctccaccagcgctagggtgcggccaacaagacgctgctcgccaccgcttgagtcggtagtgagatcttagggggagaagccctgcagcccccatgctcccactccctcctgcaccccacgcttaccggcgagccgctcgacctcattggagcttgccaagccgtcatgtgccccagtgcggtggtcgacatcatccacggcgtcgaccgcgtgctggtcctgcgctcaatgcaggagtccttcaactggcggcggtggagcaaccgtactaccacagcgcgtacacaggacgcagagaacaactccagaaggcgagccccaacccctagatctgcgatgcagtcttctcaactgaaaaaagagggcagagaacaactccagaaggcgagccccaaccccagatctgcgttgtagtcttctcgactgaaaaaagagggcatctctaccgccaccaaccactagcaggcggcagacgttgctggcaataggcaatggcatgcatcaggcattgtttgcacaaaggacggagatctgtcgtcgaagaccacctcattgtttctcatggcaggcttgcttgctctagcttggcacaatatgtcgcttcaggcttcagtcggttatgtgatcaccagaacattatgggctctaaagtaggacttttgagaaatgccaggcgatggtgcatgcatgatgaagctgttgtccattatattgacatgattgatcagaccacgcttggtcaccggatgatcaagaaacaattcaacaagactccaagagctggctggcaaatcgatccttttggacattctgcagttcaagcttatttgcttggagcagaggcaaattttacgcgtacaaaccacataatgtggaccatgggagatgattttagttatcagtatgcagaatcttggttccggaatatggacaaacttatctatcatgtgaacaagctatgctgattcaaaaaattcatattggactgggtactatacaagccgtccaactttcaagcgatatgttcgagtgttgagtggttattacctggctgcacgtcaaatagaatttttagtaggtaggaggagttccttagggttgttcacgaccagcttggaagacccaatggcaattgcccagcatcatgatgcagtctcaggtacaacaaacaacacacgacagatgactacttgaaacaccttgctcttggagcatctaag

SEQ ID NO: 9444 - DNA, 1484 bp, Zea Mays
atggagtcggccaatgaagagcggaaggaggagagggtcaacgggggctcaatagctggttggtgtagatgttgctggtttgagaatagtggcggcaagatctcatggagagaagctatgcggactcccagaaaaggcgaaatcatcgtgcgattgtggagattgtcgatgggaggctccaccagcgctagggcacaatatgtcgcttcaggcttcagtcggttatgtgatcaccagaacattatgggctctaaagtaggacttttgagaaatgccaggcgatggtgcatgcatgatgaagctgttgtccattatattgacatgattgatcagaccacgcttggtcaccggatgatcaagaaacaattcaacaagactccaagagctggctggcaaatcgatccttttggacattctgcagttcaagcttatttgcttggagcagagcttggcttcgattctttgcattttgcaagaatcgattaccaagataagaaaaagtgtaaagctggcaaaggcttagaggttatatagtgtggctcaagaacttttggttcatcttcacaggttcttattcttcttacaccacaattagttctgtctattccattcattagcacaatggatcgaattttgatttttttgaagggaatttgactctgtggtggttaaattgcatatatttacaaatgtatttcctgtcgattatagccctccagatggctttggctttgaagttttagatgaaaatatcttgcatgtctaggtacatgtacgcaaccatttccatgctcctcgaaccttacatgcatcttagattgaaatttgtaggatgacatactgatgtttgactataatgttgaagaacgagttaatgattttgttgttgtagccatagaacaggtaaactttcaatattgttgccacaggctgtagttcactagagcaattaattatgcttcgttcaaagtaagaaattggatttaattaacttgtgatgatcaggcaaattttacgcgtacaaaccacataatgtggaccatgggagatgattttagttatcagtatgcagaatcttggttccggaatatggacaaacttatctatcatgtgaacaaggatggccaagtgcatgcactgtattctaccccatccatttacacagatgcaaaacatttgtcaaatgtatcttggccagtaaaatatgatgagtatttcccctatgctgattcaaaaaattcatattggactgggtactatacaagccgtccaactttcaagcgatatgttcgagtgttgagtggttattacctggctgcacgtcaaatagaatttttagtaggtaggaggagttccttagggttgttcacgaccagcttggaagacccaatggcaattgcccagcatcatgatgcagtctcaggtacaacaaacaacacacgacagatgactacttgaaacaccttgctcttggagcatctaag

SEQ ID NO: 9445 - DNA, 1836 bp, Zea Mays
atggagtcggccaatgaagagcggaaggaggagagggtcaacgggggctcaatagctggttggtgtagatgttgctggtttgagaatagtggcggcaagatctcatggagagaagctatgcggactcccagaaaaggcgaaatcatcgtgcgattgtggagattgtcgatgggaggctccaccagcgctagggtgcggccaacaagacgctgctcgccaccgcttgagtcggtagtgagatcttagggggagaagccctgcagcccccatgctcccactccctcctgcaccccacgcttaccggcgagccgctcgacctcattggagcttgccaagccgtcatgtgccccagtgcggtggtcgacatcatccacggcgtcgaccgcgtgctggtcctgcgctcaatgcaggagtccttcaactggcggcggtggagcaaccgtactaccacagcgcgtacacaggacgcagagaacaactccagaaggcgagccccaacccctagatctgcgatgcagtcttctcaactgaaaaaagagggcagagaacaactccagaaggcgagccccaaccccagatctgcgttgtagtcttctcgactgaaaaaagagggcatctctaccgccaccaaccactagcaggcggcagacgttgctggcaataggcaatggcatgcatcaggcattgtttgcacaaaggacggagatctgtcgtcgaagaccacctcattgtttctcatggcaggcttgcttgctctagcttggcacaatatgtcgcttcaggcttcagtcggttatgtgatcaccagaacattatgggctctaaagtaggacttttgagaaatgccaggcgatggtgcatgcatgatgaagctgttgtccattatattgacatgattgatcagaccacgcttggtcaccggatgatcaagaaacaattcaacaagactccaagagctggctggcaaatcgatccttttggacattctgcagttcaagcttatttgcttggagcagaggtaactactattaacatcatatttgggatgaagccatttttttaccaaaaccagtatgataagctcctacatttttctaaacagaaaatacaattctcataattatcatttttcagtctggcattgtaggcacatgatatactaattaaagttactaaatgaatattatatttgtacggtggatgcaaatgttaagccttagtgattttcctgtgtttaattctcaatacattttttttcttgacaatcaacatgcgactgtgcaaaacatatgaatataacattttttattgcaaactgtagcttggcttcgattctttgcattttgcaagaatcgattaccaagataagaaaaagtgtaaagctggcaaaggcttagaggatgacatactgatgtttgactataatgttgaagaacgagttaatgattttgttgttgtagccatagaacaggatggccaagtgcatgcactgtattctaccccatccatttacacagatgcaaaacatttgtcaaatgtatcttggccagtaaaatatgatgagtatttcccctatgctgattcaaaaaattcatattggactgggtactatacaagccgtccaactttcaagcgatatgttcgagtgttgagtggttattacctggctgcacgtcaaatagaatttttagtaggtaggaggagttccttagggttgttcacgaccagcttggaagacccaatggcaattgcccagcatcatgatgcagtctcaggtacaacaaacaacacacgacagatgactacttgaaacaccttgctcttggagcatctaag

SEQ ID NO: 9446 - DNA, 1671 bp, Zea Mays
atggagtcggccaatgaagagcggaaggaggagagggtcaacgggggctcaatagctggttggtgtagatgttgctggtttgagaatagtggcggcaagatctcatggagagaagctatgcggactcccagaaaaggcgaaatcatcgtgcgattgtggagattgtcgatgggaggctccaccagcgctagggtgcggccaacaagacgctgctcgccaccgcttgagtcggtagtgagatcttagggggagaagccctgcagcccccatgctcccactccctcctgcaccccacgcttaccggcgagccgctcgacctcattggagcttgccaagccgtcatgtgccccagtgcggtggtcgacatcatccacggcgtcgaccgcgtgctggtcctgcgctcaatgcaggagtccttcaactggcggcggtggagcaaccgtactaccacagcgcgtacacaggacgcagagaacaactccagaaggcgagccccaacccctagatctgcgatgcagtcttctcaactgaaaaaagagggcagagaacaactccagaaggcgagccccaaccccagatctgcgttgtagtcttctcgactgaaaaaagagggcatctctaccgccaccaaccactagcaggcggcagacgttgctggcaataggcaatggcatgcatcaggcattgtttgcacaaaggacggagatctgtcgtcgaagaccacctcattgtttctcatggcaggcttgcttgctctagcttggcacaatatgtcgcttcaggcttcagtcggttatgtgatcaccagaacattatgggctctaaagtaggacttttgagaaatgccaggcgatggtgcatgcatgatgaagctgttgtccattatattgacatgattgatcagaccacgcttggtcaccggatgatcaagaaacaattcaacaagactccaagagctggctggcaaatcgatccttttggacattctgcagttcaagcttatttgcttggagcagaggatgacatactgatgtttgactataatgttgaagaacgagttaatgattttgttgttgtagccatagaacaggtaaactttcaatattgttgccacaggctgtagttcactagagcaattaattatgcttcgttcaaagtaagaaattggatttaattaacttgtgatgatcaggcaaattttacgcgtacaaaccacataatgtggaccatgggagatgattttagttatcagtatgcagaatcttggttccggaatatggacaaacttatctatcatgtgaacaaggatggccaagtgcatgcactgtattctaccccatccatttacacagatgcaaaacatttgtcaaatgtatcttggccagtaaaatatgatgagtatttcccctatgctgattcaaaaaattcatattggactgggtactatacaagccgtccaactttcaagcgatatgttcgagtgttgagtggttattacctggctgcacgtcaaatagaatttttagtaggtaggaggagttccttagggttgttcacgaccagcttggaagacccaatggcaattgcccagcatcatgatgcagtctcaggtacaacaaacaacacacgacagatgactacttgaaacaccttgctcttggagcatctaag

SEQ ID NO: 9447 - DNA, 926 bp, Zea Mays
atggagtcggccaatgaagagcggaaggaggagagggtcaacgggggctcaatagctggttggtgtagatgttgctggtttgagaatagtggcggcaagatctcatggagagaagctatgcggactcccagaaaaggcgaaatcatcgtgcgattgtggagattgtcgatgggaggctccaccagcgctagggcacaatatgtcgcttcaggcttcagtcggttatgtgatcaccagaacattatgggctctaaagtaggacttttgagaaatgccaggcgatggtgcatgcatgatgaagctgttgtccattatattgacatgattgatcagaccacgcttggtcaccggatgatcaagaaacaattcaacaagactccaagagctggctggcaaatcgatccttttggacattctgcagttcaagcttatttgcttggagcagaggcaaattttacgcgtacaaaccacataatgtggaccatgggagatgattttagttatcagtatgcagaatcttggttccggaatatggacaaacttatctatcatgtgaacaaggatggccaagtgcatgcactgtattctaccccatccatttacacagatgcaaaacatttgtcaaatgtatcttggccagtaaaatatgatgagtatttcccctatgctgattcaaaaaattcatattggactgggtactatacaagccgtccaactttcaagcgatatgttcgagtgttgagtggttattacctggctgcacgtcaaatagaatttttagtaggtaggaggagttccttagggttgttcacgaccagcttggaagacccaatggcaattgcccagcatcatgatgcagtctcaggtacaacaaacaacacacgacagatgactacttgaaacaccttgctcttggagcatctaag

SEQ ID NO: 9448 - DNA, 1339 bp, Zea Mays
atggagtcggccaatgaagagcggaaggaggagagggtcaacgggggctcaatagctggttggtgtagatgttgctggtttgagaatagtggcggcaagatctcatggagagaagctatgcggactcccagaaaaggcgaaatcatcgtgcgattgtggagattgtcgatgggaggctccaccagcgctagggtgcggccaacaagacgctgctcgccaccgcttgagtcggtagtgagatcttagggggagaagccctgcagcccccatgctcccactccctcctgcaccccacgcttaccggcgagccgctcgacctcattggagcttgccaagccgtcatgtgccccagtgcggtggtcgacatcatccacggcgtcgaccgcgtgctggtcctgcgctcaatgcaggagtccttcaactggcggcggtggagcaaccgtactaccacagcgcgtacacaggacgcagagaacaactccagaaggcgagccccaacccctagatctgcgatgcagtcttctcaactgaaaaaagagggcagagaacaactccagaaggcgagccccaaccccagatctgcgttgtagtcttctcgactgaaaaaagagggcatctctaccgccaccaaccactagcaggcggcagacgttgctggcaataggcaatggcatgcatcaggaaatgccaggcgatggtgcatgcatgatgaagctgttgtccattatattgacatgattgatcagaccacgcttggtcaccggatgatcaagaaacaattcaacaagactccaagagctggctggcaaatcgatccttttggacattctgcagttcaagcttatttgcttggagcagaggcaaattttacgcgtacaaaccacataatgtggaccatgggagatgattttagttatcagtatgcagaatcttggttccggaatatggacaaacttatctatcatgtgaacaaggatggccaagtgcatgcactgtattctaccccatccatttacacagatgcaaaacatttgtcaaatgtatcttggccagtaaaatatgatgagtatttcccctatgctgattcaaaaaattcatattggactgggtactatacaagccgtccaactttcaagcgatatgttcgagtgttgagtggttattacctggctgcacgtcaaatagaatttttagtaggtaggaggagttccttagggttgttcacgaccagcttggaagacccaatggcaattgcccagcatcatgatgcagtctcaggtacaacaaacaacacacgacagatgactacttgaaacaccttgctcttggagcatctaag

SEQ ID NO: 9449 - DNA, 1537 bp, Zea Mays
atggagtcggccaatgaagagcggaaggaggagagggtcaacgggggctcaatagctggttggtgtagatgttgctggtttgagaatagtggcggcaagatctcatggagagaagctatgcggactcccagaaaaggcgaaatcatcgtgcgattgtggagattgtcgatgggaggctccaccagcgctagggcacaatatgtcgcttcaggcttcagtcggttatgtgatcaccagaacattatgggctctaaagtaggacttttgagaaatgccaggcgatggtgcatgcatgatgaagctgttgtccattatattgacatgattgatcagaccacgcttggtcaccggatgatcaagaaacaattcaacaagactccaagagctggctggcaaatcgatccttttggacattctgcagttcaagcttatttgcttggagcagaggtaactactattaacatcatatttgggatgaagccatttttttaccaaaaccagtatgataagctcctacatttttctaaacagaaaatacaattctcataattatcatttttcagtctggcattgtaggcacatgatatactaattaaagttactaaatgaatattatatttgtacggtggatgcaaatgttaagccttagtgattttcctgtgtttaattctcaatacattttttttcttgacaatcaacatgcgactgtgcaaaacatatgaatataacattttttattgcaaactgtagcttggcttcgattctttgcattttgcaagaatcgattaccaagataagaaaaagtgtaaagctggcaaaggcttagaggttatatagtgtggctcaagaacttttggttcatcttcacagattgaaatttgtaggatgacatactgatgtttgactataatgttgaagaacgagttaatgattttgttgttgtagccatagaacaggtaaactttcaatattgttgccacaggctgtagttcactagagcaattaattatgcttcgttcaaagtaagaaattggatttaattaacttgtgatgatcaggcaaattttacgcgtacaaaccacataatgtggaccatgggagatgattttagttatcagtatgcagaatcttggttccggaatatggacaaacttatctatcatgtgaacaaggatggccaagtgcatgcactgtattctaccccatccatttacacagatgcaaaacatttgtcaaatgtatcttggccagtaaaatatgatgagtatttcccctatgctgattcaaaaaattcatattggactgggtactatacaagccgtccaactttcaagcgatatgttcgagtgttgagtggttattacctggctgcacgtcaaatagaatttttagtaggtaggaggagttccttagggttgttcacgaccagcttggaagacccaatggcaattgcccagcatcatgatgcagtctcaggtacaacaaacaacacacgacagatgactacttgaaacaccttgctcttggagcatctaag

SEQ ID NO: 9450 - DNA, 2257 bp, Zea Mays
atggagtcggccaatgaagagcggaaggaggagagggtcaacgggggctcaatagctggttggtgtagatgttgctggtttgagaatagtggcggcaagatctcatggagagaagctatgcggactcccagaaaaggcgaaatcatcgtgcgattgtggagattgtcgatgggaggctccaccagcgctagggtgcggccaacaagacgctgctcgccaccgcttgagtcggtagtgagatcttagggggagaagccctgcagcccccatgctcccactccctcctgcaccccacgcttaccggcgagccgctcgacctcattggagcttgccaagccgtcatgtgccccagtgcggtggtcgacatcatccacggcgtcgaccgcgtgctggtcctgcgctcaatgcaggagtccttcaactggcggcggtggagcaaccgtactaccacagcgcgtacacaggacgcagagaacaactccagaaggcgagccccaacccctagatctgcgatgcagtcttctcaactgaaaaaagagggcagagaacaactccagaaggcgagccccaaccccagatctgcgttgtagtcttctcgactgaaaaaagagggcatctctaccgccaccaaccactagcaggcggcagacgttgctggcaataggcaatggcatgcatcaggcattgtttgcacaaaggacggagatctgtcgtcgaagaccacctcattgtttctcatggcaggcttgcttgctctagcttggcacaatatgtcgcttcaggcttcagtcggttatgtgatcaccagaacattatgggctctaaagtaggacttttgagaaatgccaggcgatggtgcatgcatgatgaagctgttgtccattatattgacatgattgatcagaccacgcttggtcaccggatgatcaagaaacaattcaacaagactccaagagctggctggcaaatcgatccttttggacattctgcagttcaagcttatttgcttggagcagaggtaactactattaacatcatatttgggatgaagccatttttttaccaaaaccagtatgataagctcctacatttttctaaacagaaaatacaattctcataattatcatttttcagtctggcattgtaggcacatgatatactaattaaagttactaaatgaatattatatttgtacggtggatgcaaatgttaagccttagtgattttcctgtgtttaattctcaatacattttttttcttgacaatcaacatgcgactgtgcaaaacatatgaatataacattttttattgcaaactgtagcttggcttcgattctttgcattttgcaagaatcgattaccaagataagaaaaagtgtaaagctggcaaaggcttagaggttatatagtgtggctcaagaacttttggttcatcttcacaggttcttattcttcttacaccacaattagttctgtctattccattcattagcacaatggatcgaattttgatttttttgaagggaatttgactctgtggtggttaaattgcatatatttacaaatgtatttcctgtcgattatagccctccagatggctttggctttgaagttttagatgaaaatatcttgcatgtctaggtacatgtacgcaaccatttccatgctcctcgaaccttacatgcatcttagattgaaatttgtaggatgacatactgatgtttgactataatgttgaagaacgagttaatgattttgttgttgtagccatagaacaggtaaactttcaatattgttgccacaggctgtagttcactagagcaattaattatgcttcgttcaaagtaagaaattggatttaattaacttgtgatgatcaggcaaattttacgcgtacaaaccacataatgtggaccatgggagatgattttagttatcagtatgcagaatcttggttccggaatatggacaaacttatctatcatgtgaacaagctatgctgattcaaaaaattcatattggactgggtactatacaagccgtccaactttcaagcgatatgttcgagtgttgagtggttattacctggctgcacgtcaaatagaatttttagtaggtaggaggagttccttagggttgttcacgaccagcttggaagacccaatggcaattgcccagcatcatgatgcagtctcaggtacaacaaacaacacacgacagatgactacttgaaacaccttgctcttggagcatctaag

SEQ ID NO: 9451 - DNA, 2342 bp, Zea Mays
atggagtcggccaatgaagagcggaaggaggagagggtcaacgggggctcaatagctggttggtgtagatgttgctggtttgagaatagtggcggcaagatctcatggagagaagctatgcggactcccagaaaaggcgaaatcatcgtgcgattgtggagattgtcgatgggaggctccaccagcgctagggtgcggccaacaagacgctgctcgccaccgcttgagtcggtagtgagatcttagggggagaagccctgcagcccccatgctcccactccctcctgcaccccacgcttaccggcgagccgctcgacctcattggagcttgccaagccgtcatgtgccccagtgcggtggtcgacatcatccacggcgtcgaccgcgtgctggtcctgcgctcaatgcaggagtccttcaactggcggcggtggagcaaccgtactaccacagcgcgtacacaggacgcagagaacaactccagaaggcgagccccaacccctagatctgcgatgcagtcttctcaactgaaaaaagagggcagagaacaactccagaaggcgagccccaaccccagatctgcgttgtagtcttctcgactgaaaaaagagggcatctctaccgccaccaaccactagcaggcggcagacgttgctggcaataggcaatggcatgcatcagggacggagatctgtcgtcgaagaccacctcattgtttctcatggcaggcttgcttgctctagcttggcacaatatgtcgcttcaggcttcagtcggttatgtgatcaccagaacattatgggctctaaagtaggacttttgagaaatgccaggcgatggtgcatgcatgatgaagctgttgtccattatattgacatgattgatcagaccacgcttggtcaccggatgatcaagaaacaattcaacaagactccaagagctggctggcaaatcgatccttttggacattctgcagttcaagcttatttgcttggagcagaggtaactactattaacatcatatttgggatgaagccatttttttaccaaaaccagtatgataagctcctacatttttctaaacagaaaatacaattctcataattatcatttttcagtctggcattgtaggcacatgatatactaattaaagttactaaatgaatattatatttgtacggtggatgcaaatgttaagccttagtgattttcctgtgtttaattctcaatacattttttttcttgacaatcaacatgcgactgtgcaaaacatatgaatataacattttttattgcaaactgtagcttggcttcgattctttgcattttgcaagaatcgattaccaagataagaaaaagtgtaaagctggcaaaggcttagaggttatatagtgtggctcaagaacttttggttcatcttcacaggttcttattcttcttacaccacaattagttctgtctattccattcattagcacaatggatcgaattttgatttttttgaagggaatttgactctgtggtggttaaattgcatatatttacaaatgtatttcctgtcgattatagccctccagatggctttggctttgaagttttagatgaaaatatcttgcatgtctaggtacatgtacgcaaccatttccatgctcctcgaaccttacatgcatcttagattgaaatttgtaggatgacatactgatgtttgactataatgttgaagaacgagttaatgattttgttgttgtagccatagaacaggtaaactttcaatattgttgccacaggctgtagttcactagagcaattaattatgcttcgttcaaagtaagaaattggatttaattaacttgtgatgatcaggcaaattttacgcgtacaaaccacataatgtggaccatgggagatgattttagttatcagtatgcagaatcttggttccggaatatggacaaacttatctatcatgtgaacaaggatggccaagtgcatgcactgtattctaccccatccatttacacagatgcaaaacatttgtcaaatgtatcttggccagtaaaatatgatgagtatttcccctatgctgattcaaaaaattcatattggactgggtactatacaagccgtccaactttcaagcgatatgttcgagtgttgagtggttattacctggctgcacgtcaaatagaatttttagtaggtaggaggagttccttagggttgttcacgaccagcttggaagacccaatggcaattgcccagcatcatgatgcagtctcaggtacaacaaacaacacacgacagatgactacttgaaacaccttgctcttggagcatctaag

SEQ ID NO: 9452 - DNA, 1710 bp, Zea Mays
atggagtcggccaatgaagagcggaaggaggagagggtcaacgggggctcaatagctggttggtgtagatgttgctggtttgagaatagtggcggcaagatctcatggagagaagctatgcggactcccagaaaaggcgaaatcatcgtgcgattgtggagattgtcgatgggaggctccaccagcgctagggtgcggccaacaagacgctgctcgccaccgcttgagtcggtagtgagatcttagggggagaagccctgcagcccccatgctcccactccctcctgcaccccacgcttaccggcgagccgctcgacctcattggagcttgccaagccgtcatgtgccccagtgcggtggtcgacatcatccacggcgtcgaccgcgtgctggtcctgcgctcaatgcaggagtccttcaactggcggcggtggagcaaccgtactaccacagcgcgtacacaggacgcagagaacaactccagaaggcgagccccaacccctagatctgcgatgcagtcttctcaactgaaaaaagagggcagagaacaactccagaaggcgagccccaaccccagatctgcgttgtagtcttctcgactgaaaaaagagggcatctctaccgccaccaaccactagcaggcggcagacgttgctggcaataggcaatggcatgcatcaggcattgtttgcacaaaggacggagatctgtcgtcgaagaccacctcattgtttctcatggcaggcttgcttgctctagcttggcacaatatgtcgcttcaggcttcagtcggttatgtgatcaccagaacattatgggctctaaagtaggacttttgagaaatgccaggcgatggtgcatgcatgatgaagctgttgtccattatattgacatgattgatcagaccacgcttggtcaccggatgatcaagaaacaattcaacaagactccaagagctggctggcaaatcgatccttttggacattctgcagttcaagcttatttgcttggagcagaggcaaattttacgcgtacaaaccacataatgtggaccatgggagatgattttagttatcagtatgcagaatcttggttccggaatatggacaaacttatctatcatgtgaacaaggtattgctgattttaaactgaagctctcaagttttgatacacagttttcatgttcaactgtcattttaatttacctttctgcaatgatactactacgtacaaagtcttttttctgtaagatgctgcctaagcacattagtcatgtgcaatatgccacggttaattgatgtcgtggaaccaatgaattagaaaataatgcccggattgctgcaggatggccaagtgcatgcactgtattctaccccatccatttacacagatgcaaaacatttgtcaaatgtatcttggccagtaaaatatgatgagtatttcccctatgctgattcaaaaaattcatattggactgggtactatacaagccgtccaactttcaagcgatatgttcgagtgttgagtggttattacctggctgcacgtcaaatagaatttttagtaggtaggaggagttccttagggttgttcacgaccagcttggaagacccaatggcaattgcccagcatcatgatgcagtctcaggtacaacaaacaacacacgacagatgactacttgaaacaccttgctcttggagcatctaag

SEQ ID NO: 9453 - DNA, 2142 bp, Zea Mays
atggagtcggccaatgaagagcggaaggaggagagggtcaacgggggctcaatagctggttggtgtagatgttgctggtttgagaatagtggcggcaagatctcatggagagaagctatgcggactcccagaaaaggcgaaatcatcgtgcgattgtggagattgtcgatgggaggctccaccagcgctagggtgcggccaacaagacgctgctcgccaccgcttgagtcggtagtgagatcttagggggagaagccctgcagcccccatgctcccactccctcctgcaccccacgcttaccggcgagccgctcgacctcattggagcttgccaagccgtcatgtgccccagtgcggtggtcgacatcatccacggcgtcgaccgcgtgctggtcctgcgctcaatgcaggagtccttcaactggcggcggtggagcaaccgtactaccacagcgcgtacacaggacgcagagaacaactccagaaggcgagccccaacccctagatctgcgatgcagtcttctcaactgaaaaaagagggcagagaacaactccagaaggcgagccccaaccccagatctgcgttgtagtcttctcgactgaaaaaagagggcatctctaccgccaccaaccactagcaggcggcagacgttgctggcaataggcaatggcatgcatcaggcattgtttgcacaaaggacggagatctgtcgtcgaagaccacctcattgtttctcatggcaggcttgcttgctctagcttggcacaatatgtcgcttcaggcttcagtcggttatgtgatcaccagaacattatgggctctaaagtaggacttttgagaaatgccaggcgatggtgcatgcatgatgaagctgttgtccattatattgacatgattgatcagaccacgcttggtcaccggatgatcaagaaacaattcaacaagactccaagagctggctggcaaatcgatccttttggacattctgcagttcaagcttatttgcttggagcagaggtaactactattaacatcatatttgggatgaagccatttttttaccaaaaccagtatgataagctcctacatttttctaaacagaaaatacaattctcataattatcatttttcagtctggcattgtaggcacatgatatactaattaaagttactaaatgaatattatatttgtacggtggatgcaaatgttaagccttagtgattttcctgtgtttaattctcaatacattttttttcttgacaatcaacatgcgactgtgcaaaacatatgaatataacattttttattgcaaactgtagcttggcttcgattctttgcattttgcaagaatcgattaccaagataagaaaaagtgtaaagctggcaaaggcttagaggttatatagtgtggctcaagaacttttggttcatcttcacaggttcttattcttcttacaccacaattagttctgtctattccattcattagcacaatggatcgaattttgatttttttgaagggaatttgactctgtggtggttaaattgcatatatttacaaatgtatttcctgtcgattatagccctccagatggctttggctttgaagttttagatgaaaatatcttgcatgtctaggtacatgtacgcaaccatttccatgctcctcgaaccttacatgcatcttagattgaaatttgtaggatgacatactgatgtttgactataatgttgaagaacgagttaatgattttgttgttgtagccatagaacaggatggccaagtgcatgcactgtattctaccccatccatttacacagatgcaaaacatttgtcaaatgtatcttggccagtaaaatatgatgagtatttcccctatgctgattcaaaaaattcatattggactgggtactatacaagccgtccaactttcaagcgatatgttcgagtgttgagtggttattacctggctgcacgtcaaatagaatttttagtaggtaggaggagttccttagggttgttcacgaccagcttggaagacccaatggcaattgcccagcatcatgatgcagtctcaggtacaacaaacaacacacgacagatgactacttgaaacaccttgctcttggagcatctaag

SEQ ID NO: 9454 - DNA, 1920 bp, Zea Mays
atggagtcggccaatgaagagcggaaggaggagagggtcaacgggggctcaatagctggttggtgtagatgttgctggtttgagaatagtggcggcaagatctcatggagagaagctatgcggactcccagaaaaggcgaaatcatcgtgcgattgtggagattgtcgatgggaggctccaccagcgctagggtgcggccaacaagacgctgctcgccaccgcttgagtcggtagtgagatcttagggggagaagccctgcagcccccatgctcccactccctcctgcaccccacgcttaccggcgagccgctcgacctcattggagcttgccaagccgtcatgtgccccagtgcggtggtcgacatcatccacggcgtcgaccgcgtgctggtcctgcgctcaatgcaggagtccttcaactggcggcggtggagcaaccgtactaccacagcgcgtacacaggacgcagagaacaactccagaaggcgagccccaacccctagatctgcgatgcagtcttctcaactgaaaaaagagggcagagaacaactccagaaggcgagccccaaccccagatctgcgttgtagtcttctcgactgaaaaaagagggcatctctaccgccaccaaccactagcaggcggcagacgttgctggcaataggcaatggcatgcatcaggcattgtttgcacaaaggacggagatctgtcgtcgaagaccacctcattgtttctcatggcaggcttgcttgctctagcttggcacaatatgtcgcttcaggcttcagtcggttatgtgatcaccagaacattatgggctctaaagtaggacttttgagaaatgccaggcgatggtgcatgcatgatgaagctgttgtccattatattgacatgattgatcagaccacgcttggtcaccggatgatcaagaaacaattcaacaagactccaagagctggctggcaaatcgatccttttggacattctgcagttcaagcttatttgcttggagcagaggtaactactattaacatcatatttgggatgaagccatttttttaccaaaaccagtatgataagctcctacatttttctaaacagaaaatacaattctcataattatcatttttcagtctggcattgtaggcacatgatatactaattaaagttactaaatgaatattatatttgtacggtggatgcaaatgttaagccttagtgattttcctgtgtttaattctcaatacattttttttcttgacaatcaacatgcgactgtgcaaaacatatgaatataacattttttattgcaaactgtagcttggcttcgattctttgcattttgcaagaatcgattaccaagataagaaaaagtgtaaagctggcaaaggcttagaggttatatagtgtggctcaagaacttttggttcatcttcacaggcaaattttacgcgtacaaaccacataatgtggaccatgggagatgattttagttatcagtatgcagaatcttggttccggaatatggacaaacttatctatcatgtgaacaaggatggccaagtgcatgcactgtattctaccccatccatttacacagatgcaaaacatttgtcaaatgtatcttggccagtaaaatatgatgagtatttcccctatgctgattcaaaaaattcatattggactgggtactatacaagccgtccaactttcaagcgatatgttcgagtgttgagtggttattacctggctgcacgtcaaatagaatttttagtaggtaggaggagttccttagggttgttcacgaccagcttggaagacccaatggcaattgcccagcatcatgatgcagtctcaggtacaacaaacaacacacgacagatgactacttgaaacaccttgctcttggagcatctaag

SEQ ID NO: 9455 - DNA, 1758 bp, Zea Mays
atggagtcggccaatgaagagcggaaggaggagagggtcaacgggggctcaatagctggttggtgtagatgttgctggtttgagaatagtggcggcaagatctcatggagagaagctatgcggactcccagaaaaggcgaaatcatcgtgcgattgtggagattgtcgatgggaggctccaccagcgctagggtgcggccaacaagacgctgctcgccaccgcttgagtcggtagtgagatcttagggggagaagccctgcagcccccatgctcccactccctcctgcaccccacgcttaccggcgagccgctcgacctcattggagcttgccaagccgtcatgtgccccagtgcggtggtcgacatcatccacggcgtcgaccgcgtgctggtcctgcgctcaatgcaggagtccttcaactggcggcggtggagcaaccgtactaccacagcgcgtacacaggacgcagagaacaactccagaaggcgagccccaacccctagatctgcgatgcagtcttctcaactgaaaaaagagggcagagaacaactccagaaggcgagccccaaccccagatctgcgttgtagtcttctcgactgaaaaaagagggcatctctaccgccaccaaccactagcaggcggcagacgttgctggcaataggcaatggcatgcatcagggcacaatatgtcgcttcaggcttcagtcggttatgtgatcaccagaacattatgggctctaaagtaggacttttgagaaatgccaggcgatggtgcatgcatgatgaagctgttgtccattatattgacatgattgatcagaccacgcttggtcaccggatgatcaagaaacaattcaacaagactccaagagctggctggcaaatcgatccttttggacattctgcagttcaagcttatttgcttggagcagagcttggcttcgattctttgcattttgcaagaatcgattaccaagataagaaaaagtgtaaagctggcaaaggcttagaggttatatagtgtggctcaagaacttttggttcatcttcacaggttcttattcttcttacaccacaattagttctgtctattccattcattagcacaatggatcgaattttgatttttttgaagggaatttgactctgtggtggttaaattgcatatatttacaaatgtatttcctgtcgattatagccctccagatggctttggctttgaagttttagatgaaaatatcttgcatgtctaggtacatgtacgcaaccatttccatgctcctcgaaccttacatgcatcttagattgaaatttgtaggatgacatactgatgtttgactataatgttgaagaacgagttaatgattttgttgttgtagccatagaacaggatggccaagtgcatgcactgtattctaccccatccatttacacagatgcaaaacatttgtcaaatgtatcttggccagtaaaatatgatgagtatttcccctatgctgattcaaaaaattcatattggactgggtactatacaagccgtccaactttcaagcgatatgttcgagtgttgagtggttattacctggctgcacgtcaaatagaatttttagtaggtaggaggagttccttagggttgttcacgaccagcttggaagacccaatggcaattgcccagcatcatgatgcagtctcaggtacaacaaacaacacacgacagatgactacttgaaacaccttgctcttggagcatctaag

SEQ ID NO: 9456 - DNA, 1688 bp, Zea Mays
atggagtcggccaatgaagagcggaaggaggagagggtcaacgggggctcaatagctggttggtgtagatgttgctggtttgagaatagtggcggcaagatctcatggagagaagctatgcggactcccagaaaaggcgaaatcatcgtgcgattgtggagattgtcgatgggaggctccaccagcgctagggcacaatatgtcgcttcaggcttcagtcggttatgtgatcaccagaacattatgggctctaaagtaggacttttgagaaatgccaggcgatggtgcatgcatgatgaagctgttgtccattatattgacatgattgatcagaccacgcttggtcaccggatgatcaagaaacaattcaacaagactccaagagctggctggcaaatcgatccttttggacattctgcagttcaagcttatttgcttggagcagaggtaactactattaacatcatatttgggatgaagccatttttttaccaaaaccagtatgataagctcctacatttttctaaacagaaaatacaattctcataattatcatttttcagtctggcattgtaggcacatgatatactaattaaagttactaaatgaatattatatttgtacggtggatgcaaatgttaagccttagtgattttcctgtgtttaattctcaatacattttttttcttgacaatcaacatgcgactgtgcaaaacatatgaatataacattttttattgcaaactgtagcttggcttcgattctttgcattttgcaagaatcgattaccaagataagaaaaagtgtaaagctggcaaaggcttagaggttatatagtgtggctcaagaacttttggttcatcttcacaggttcttattcttcttacaccacaattagttctgtctattccattcattagcacaatggatcgaattttgatttttttgaagggaatttgactctgtggtggttaaattgcatatatttacaaatgtatttcctgtcgattatagccctccagatggctttggctttgaagttttagatgaaaatatcttgcatgtctagaacgagttaatgattttgttgttgtagccatagaacaggtaaactttcaatattgttgccacaggctgtagttcactagagcaattaattatgcttcgttcaaagtaagaaattggatttaattaacttgtgatgatcaggcaaattttacgcgtacaaaccacataatgtggaccatgggagatgattttagttatcagtatgcagaatcttggttccggaatatggacaaacttatctatcatgtgaacaaggatggccaagtgcatgcactgtattctaccccatccatttacacagatgcaaaacatttgtcaaatgtatcttggccagtaaaatatgatgagtatttcccctatgctgattcaaaaaattcatattggactgggtactatacaagccgtccaactttcaagcgatatgttcgagtgttgagtggttattacctggctgcacgtcaaatagaatttttagtaggtaggaggagttccttagggttgttcacgaccagcttggaagacccaatggcaattgcccagcatcatgatgcagtctcaggtacaacaaacaacacacgacagatgactacttgaaacaccttgctcttggagcatctaag

SEQ ID NO: 9457 - DNA, 1100 bp, Zea Mays
atggagtcggccaatgaagagcggaaggaggagagggtcaacgggggctcaatagctggttggtgtagatgttgctggtttgagaatagtggcggcaagatctcatggagagaagctatgcggactcccagaaaaggcgaaatcatcgtgcgattgtggagattgtcgatgggaggctccaccagcgctagggcacaatatgtcgcttcaggcttcagtcggttatgtgatcaccagaacattatgggctctaaagtaggacttttgagaaatgccaggcgatggtgcatgcatgatgaagctgttgtccattatattgacatgattgatcagaccacgcttggtcaccggatgatcaagaaacaattcaacaagactccaagagctggctggcaaatcgatccttttggacattctgcagttcaagcttatttgcttggagcagaggatgacatactgatgtttgactataatgttgaagaacgagttaatgattttgttgttgtagccatagaacaggtaaactttcaatattgttgccacaggctgtagttcactagagcaattaattatgcttcgttcaaagtaagaaattggatttaattaacttgtgatgatcaggcaaattttacgcgtacaaaccacataatgtggaccatgggagatgattttagttatcagtatgcagaatcttggttccggaatatggacaaacttatctatcatgtgaacaaggatggccaagtgcatgcactgtattctaccccatccatttacacagatgcaaaacatttgtcaaatgtatcttggccagtaaaatatgatgagtatttcccctatgctgattcaaaaaattcatattggactgggtactatacaagccgtccaactttcaagcgatatgttcgagtgttgagtggttattacctggctgcacgtcaaatagaatttttagtaggtaggaggagttccttagggttgttcacgaccagcttggaagacccaatggcaattgcccagcatcatgatgcagtctcaggtacaacaaacaacacacgacagatgactacttgaaacaccttgctcttggagcatctaag

SEQ ID NO: 9458 - DNA, 1685 bp, Zea Mays
atggagtcggccaatgaagagcggaaggaggagagggtcaacgggggctcaatagctggttggtgtagatgttgctggtttgagaatagtggcggcaagatctcatggagagaagctatgcggactcccagaaaaggcgaaatcatcgtgcgattgtggagattgtcgatgggaggctccaccagcgctagggtgcggccaacaagacgctgctcgccaccgcttgagtcggtagtgagatcttagggggagaagccctgcagcccccatgctcccactccctcctgcaccccacgcttaccggcgagccgctcgacctcattggagcttgccaagccgtcatgtgccccagtgcggtggtcgacatcatccacggcgtcgaccgcgtgctggtcctgcgctcaatgcaggagtccttcaactggcggcggtggagcaaccgtactaccacagcgcgtacacaggacgcagagaacaactccagaaggcgagccccaacccctagatctgcgatgcagtcttctcaactgaaaaaagagggcagagaacaactccagaaggcgagccccaaccccagatctgcgttgtagtcttctcgactgaaaaaagagggcatctctaccgccaccaaccactagcaggcggcagacgttgctggcaataggcaatggcatgcatcaggcattgtttgcacaaaggacggagatctgtcgtcgaagaccacctcattgtttctcatggcaggcttgcttgctctagcttggcacaatatgtcgcttcaggcttcagtcggttatgtgatcaccagaacattatgggctctaaagtaggacttttgagaaatgccaggcgatggtgcatgcatgatgaagctgttgtccattatattgacatgattgatcagaccacgcttggtcaccggatgatcaagaaacaattcaacaagactccaagagctggctggcaaatcgatccttttggacattctgcagttcaagcttatttgcttggagcagagattgaaatttgtaggatgacatactgatgtttgactataatgttgaagaacgagttaatgattttgttgttgtagccatagaacaggtaaactttcaatattgttgccacaggctgtagttcactagagcaattaattatgcttcgttcaaagtaagaaattggatttaattaacttgtgatgatcaggcaaattttacgcgtacaaaccacataatgtggaccatgggagatgattttagttatcagtatgcagaatcttggttccggaatatggacaaacttatctatcatgtgaacaaggatggccaagtgcatgcactgtattctaccccatccatttacacagatgcaaaacatttgtcaaatgtatcttggccagtaaaatatgatgagtatttcccctatgctgattcaaaaaattcatattggactgggtactatacaagccgtccaactttcaagcgatatgttcgagtgttgagtggttattacctggctgcacgtcaaatagaatttttagtaggtaggaggagttccttagggttgttcacgaccagcttggaagacccaatggcaattgcccagcatcatgatgcagtctcaggtacaacaaacaacacacgacagatgactacttgaaacaccttgctcttggagcatctaag

SEQ ID NO: 9459 - DNA, 1000 bp, Zea Mays
cgacggacggctaatcgcctaatcggcagcggctggcctctcggcctcctccggccgacatgcggtccccacattgcctcttccgccgcgccgcaccacccgattttatttcccttatatattcaatccacccttgttgccttggccgtcgcctcgtctgcactctgcagtcccatttcccaaccataaccttctccccccatcttcttcttcttcttcttccattcttccttcctcccctgttcttgtacttgaattcggcgcgcgtctggtgtgttagccaggcctcgccccatccgaagtccgaccgaaggagggagagagagagaggcaacaatggcgaagggcgggctgagcaagctccggtgcatgatcaagaggtggcactcgtcgagccgcatcgtctcccgcgccccgtcgccatcatcagcccacgacggcgccacctccggcgacgcgcactgcgcctcgttccacggcgcggacgaggtgcccaagggcctccacccggtctacgtcggcaagtcgcgccgccggtacctcgtcgccgaggagctcgtgggccacccgctattccagaccctcgtccaccgcaccggcggcaccaccgggggagcggcagcaggcaccgtcgtcggctgcgaggtcgtcctcttcgagcacctcctctggatgctggagaacgccgacccgcagccggagtccctcgacgagctggtcgactactacgcttgctgagtcagtgctgactgctccgacttggaagcctcccgaatcctccaagccgcgcgcggggcactcttgtttcccggggaggcgagagagaggcgagagagagggggccaccggcagcggtgtgagggagggcagcggcggagcgaggggagatgaggcggcggtgggtcgcaaggaggcaggggttactgtacgtgacagatagaagaaaatgatctaaataatattgattattacatttaaataaaagagatgatagttatcc

SEQ ID NO: 9460 - DNA, 646 bp, Zea Mays
gttagctcgacctactaccgtaacaattgactgcggcgtgcgatcggtcgaaattttggtgatcaccgagctaatttatcgtcataatccaaccagttcgcgtcgggctccttgcatccggtgtataaattcgagactcgcaccccctccttgtccctctgtgcccacgctgagagcttcgccatcggcaaggaaagctttggagccgctgtccgatcgtccttgactattggtcgcgggacaaagccaggaaactataggagctcgtgcaccgatcggctaaacccgaagtcattccgtgcacaaggaattgctcgttggagctccgtcttcgccgcaaaaccactgctcaccgtagcccacgacactggcatctccatcacaggtaagatcttccccaagtgtttctccttggtacctgcacctcttcgcaccacttgagaaagcattttggatacgggagcgtcgattgcatgccgccggtggggtgcgccgccacggtgacgcaggcgccgctcgacgttggtcagctgggtgggagaacaactcctgaccgtcgatctagctcagtgtggactagattagatgatggcgtacccattcattctattgaatctgagccgttgatccggtagcggaaggtcga

SEQ ID NO: 9461 - DNA, 913 bp, Zea Mays
tatgctactgtaatagaatgaagttgcgacattcagataaagagttggagaaaagccttaaagctacctgtgaagagtttataatgtccataactaaattagtagttgacccaatgctttcttttgttactaaggtaactgccgtcaaagttgcattgtcctctggtagccagggtcagaaattagattcagttctagcaaaacctttgaagactcaagcttttgcttctcctgataaagttgctgagctagttcagaaggttgccgctgccattcaacaagatttgcccaaagtaatgaccaagatgaggttgtatttgcaaaatccatctactcggatgatcttattcaaacctatcaagacaaatatagttgaggctcatatacagctgcattcccttctgaagtcggagtactctagtgaagaaatgcaatccatcggtatgttgccgatacctgacctgcagtctcagcttgacagccttttgtagtttgcatacaccatacagcggcgctgctgtagtccatgttgacgttgcagtgcagttctttcaagtaacgcaagtaaagttgttaccacaatttcgaacctctctaccatatcgttgttgtaacttttcattgtttatattgaaaaatggaaatggaacgcctcccatgattcatgtgattgtggacaatctggaagtttgaactcatatcctgtggtgacttatgtatattgtacacgcacgttgtttcctcctctgaaattgactggaatagtttcaacagatcatgggttcatcctcttgtgagatctgcctatctgtggcatggcttcccaatcctcactgttatgttttagaagaattatgccttctcaccgaaatccattggaagtttcctactcttctagacatctaggcaggcc

SEQ ID NO: 9462 - DNA, 1043 bp, Zea Mays
ttttaaccaaacccaaaattcgcccccgagggggatggaatttgggacctggaggatcacctaagaaggattctcaggggtcaggtctcattatttgattggtccaggtcaacatcactagctaggaccttttctcctcgtgttttggagaaccaaattgatgccagaaaagagttggagaaaagccttaaagctacctgtgaagagtttataatgtccataactaaattagtagttgacccaatgctttcttttgttactaaggtaactgccgtcaaagttgcattgtcctctggtagccagggtcagaaattagattcagttctagcaaaacctttgaagactcaagcttttgcttctcctgataaagttgctgagctagttcagaaggttgccgctgccattcaacaagatttgcccaaagtaatgaccaagatgaggttgtatttgcaaaatccatctactcggatgatcttattcaaacctatcaagacaaatatagttgaggctcatatacagctgcattcccttctgaagtcggagtactctagtgaagaaatgcaatccatcggtatgttgccgatacctgacctgcagtctcagcttgacagccttttgtagtttgcatacaccatacagcggcgctgctgtagtccatgttgacgttgcagtgcagttctttcaagtaacgcaagtaaagttgttaccacaatttcgaacctctctaccatatcgttgttgtaacttttcattgtttatattgaaaaatggaaatggaacgcctcccatgattcatgtgattgtggacaatctggaagtttgaactcatatcctgtggtgacttatgtatattgtacacgcacgttgtttcctcctctgaaattgactggaatagtttcaacagatcatgggttcatcctcttgtgagatctgcctatctgtggcatggcttcccaatcctcactgttatgttttagaagaattatgccttctcaccgaaatccattggaagtttcctactcttctagacatctaggcaggcc

SEQ ID NO: 9463 - DNA, 1358 bp, Zea Mays
cttttctgttccaacatactctccagttacaaaaacagtatcatttctggacatctaatttttgaccgggttggtgacaactcagacatatatataacatggtacagaccattggagaaaacagtttcatgcctttcaaagctatatcgctgcttagagccttctgtcttcactggattagcccaggaagctgtagaagtttgctcaacatctcttcagaatgcaagcagggttatctcaaagaaagcaaccccaatggatggtcagctttttctgattaagcacctcctcattctacgagaacagattgctccatttgatattgagttctctgtcacacataaggagttggatttctcccatttattggatcacctaagaaggattctcaggggtcaggtctcattatttgattggtccaggtcaacatcactagctaggaccttttctcctcgtgttttggagaaccaaattgatgccagaaaagagttggagaaaagccttaaagctacctgtgaagagtttataatgtccataactaaattagtagttgacccaatgctttcttttgttactaaggtaactgccgtcaaagttgcattgtcctctggtagccagggtcagaaattagattcagttctagcaaaacctttgaagactcaagcttttgcttctcctgataaagttgctgagctagttcagaaggttgccgctgccattcaacaagatttgcccaaagtaatgaccaagatgaggttgtatttgcaaaatccatctactcggatgatcttattcaaacctatcaagacaaatatagttgaggctcatatacagctgcattcccttctgaagtcggagtactctagtgaagaaatgcaatccatcggtatgttgccgatacctgacctgcagtctcagcttgacagccttttgtagtttgcatacaccatacagcggcgctgctgtagtccatgttgacgttgcagtgcagttctttcaagtaacgcaagtaaagttgttaccacaatttcgaacctctctaccatatcgttgttgtaacttttcattgtttatattgaaaaatggaaatggaacgcctcccatgattcatgtgattgtggacaatctggaagtttgaactcatatcctgtggtgacttatgtatattgtacacgcacgttgtttcctcctctgaaattgactggaatagtttcaacagatcatgggttcatcctcttgtgagatctgcctatctgtggcatggcttcccaatcctcactgttatgttttagaagaattatgccttctcaccgaaatccattggaagtttcctactcttctagacatctaggcaggcc

SEQ ID NO: 9464 - DNA, 2353 bp, Zea Mays
ggaccttcacatgaggagatcatgtcatgtttgccttgccggtgaacaggagccgttgttggtcaacagggacatgatcagctaccgatggtctggagcagaatatgagaggtcaagaggagatcaagagccatagccaccattcttggaaacaggtatcaagcagcttttactctcaaaatatgaacattggaaatgaacagtttcttccactgttgaagcgccttgatgattgtatctcgtatgttgaaaacaacccgcaatatgctgaatctgctgtttatttggtcaaatttcgccaacttcaatctcgtgcactgggtatgattcgctcacatgtgttgtcaatacttaaaggtgcttcatcccaggttcaagctgcaattcgaagcagcgattctggcaaaaacattgtcacagagggtgtggaggcatctcttatctatgttcgcttcaaggcggctgctagcgagctaaaaccaatattaggtgaaattgaaagtagatcttctaggaaggagtacgcacagattctttctgagtgtcacagtttgttctgtgagcagcggctgtacttggtacgaggcatggtgcagcaacgaatcttggagtttgcaagaaaagaggccttgccttctttgacaaggtctggctgtgcctatctgatggaggcatgccagtttgagcaccagctttttgcccacttcttcccagcatctgctgctgatgtttctagtatggctcctttaatggaccctctgtgcacctacttgtatgatactctgaggcctagactgatatatgaaggaaacattgattctctttgcgaacttgttgatattctgaaagttgaagtgctgggggaacaactaagcagacgcggtgaatcagtagccggtctccgtccaatattgcaaaggatacttgcagatgttcatgagcggctagcattttgtgctcggactcatatccgtgaagagattgcaaatttccgtccttctgtcgaagatctagattatcctgggaaacttgaacgacctgtggatatgtcttcaagtgctactgttggtgacaactcagacatatatataacatggtacagaccattggagaaaacagtttcatgcctttcaaagctatatcgctgcttagagccttctgtcttcactggattagcccaggaagctgtagaagtttgctcaacatctcttcagaatgcaagcagggttatctcaaagaaagcaaccccaatggatggtcagctttttctgattaagcacctcctcattctacgagaacagattgctccatttgatattgagttctctgtcacacataaggagttggatttctcccatttattggatcacctaagaaggattctcaggggtcaggtctcattatttgattggtccaggtcaacatcactagctaggaccttttctcctcgtgttttggagaaccaaattgatgccagaaaagagttggagaaaagccttaaagctacctgtgaagagtttataatgtccataactaaattagtagttgacccaatgctttcttttgttactaaggtaactgccgtcaaagttgcattgtcctctggtagccagggtcagaaattagattcagttctagcaaaacctttgaagactcaagcttttgcttctcctgataaagttgctgagctagttcagaaggttgccgctgccattcaacaagatttgcccaaagtaatgaccaagatgaggttgtatttgcaaaatccatctactcggatgatcttattcaaacctatcaagacaaatatagttgaggctcatatacagctgcattcccttctgaagtcggagtactctagtgaagaaatgcaatccatcggtatgttgccgatacctgacctgcagtctcagcttgacagccttttgtagtttgcatacaccatacagcggcgctgctgtagtccatgttgacgttgcagtgcagttctttcaagtaacgcaagtaaagttgttaccacaatttcgaacctctctaccatatcgttgttgtaacttttcattgtttatattgaaaaatggaaatggaacgcctcccatgattcatgtgattgtggacaatctggaagtttgaactcatatcctgtggtgacttatgtatattgtacacgcacgttgtttcctcctctgaaattgactggaatagtttcaacagatcatgggttcatcctcttgtgagatctgcctatctgtggcatggcttcccaatcctcactgttatgttttagaagaattatgccttctcaccgaaatccattggaagtttcctactcttctagacatctaggcaggcc

SEQ ID NO: 9465 - DNA, 3484 bp, Zea Mays
tcaagtaaaactcctccagccccaccgccacctcccctcatgacaggaaagaaagcgcctgtgcccccacctccaccacctcaagcaccaaaacctcctggagttgtgcctccaccaccaccaccaagctcaaagatctcaaatgcaccagcaccacctccattattgggaaggggacgtggcaacacaactggaccaactaaaggccgtggcattggtttggcacaacaaagtaatcctcccaagaaggcttcactgaagcctctacattgggtgaaagtcacgagagcaatgcaagggagtctctgggctgatgcccagaaacaagggaatcaggctaggtctcctgatatcgatttatccgaactggagagcttgttctccactgcagttgtaaccagcacaagtgaaaagggggcaacaagacgtggttcagctattaacaagccagaaattgttcacctggttgacatgcgacgagcaaacaattgtgagataatgcttacgaaaattaaaatgcctctacctgatatgattaatgcaattttggctctggacacttccgttcttgataatgaccaagtggagaatctcattaagttttgccctacaaaggaagagatcgagatgttgaagggttataatggcaacaaagaaatgcttgggaaatgtgaacagttcttcctggagctgatgaaagttccacgtgtagaggccaagctaagagtttttgctttcagaattactttctcaacacaggtagatgaactaagaactaacctaaccaccataaacgatgcaacgaaggaggtcaaagaatctctgaagttacggcagataatgaagaccattctcacattggggaatgcattaaatcaagggacagcacgaggatctgctgttggcttcagattagacagcctccttaagctgtcggatactcgatctagaaacaataaaatgacgctgatgcattatttatgcaagcttcttgctgagaaaatgcccgaacttcttgattttgacaaagacctaatttatctggaagcagcttccaagatccaactgaaattgcttgcggaagaaatgcaagcaataaacaaaggtcttgagaaggtggagcaggagctagctgcttcagaaagtgatggtgcgatttcagttggctttcgtaaggcattgaaaagctttcttgatgcagcagaagctgaggttaggtccctcatttccttatacgctgaagtgggaaggaacgctgattcgctagctcagtattttggtgaggatcctgcacgctgcccgtttgaacaagtgacatcaattttagttattttcgtgaatatgttcaaaaaatcacgtgatgaaaatgctcgaaacgctgaggctgagaaaaagaaactggaaaaggaaaaagaaaaggcaagtgtgtctgctaaataaggtttggaatgagactgctgctctgccaaagttgcatctttgtgaagctgtcgtgctggactgacaaagaggacctgcagtataatttgcggcagtgcagaacctgctttgaaacaccttctgtacgtacagagatgctgtgccaggagtctcgctatctggttgccatccattaaatggtttcctttgcgaattccaaggtctaggagctttcgtgctcatgtacagtgggaatgtttgaacagatgactgaacaaacatgcccacgccacggctgctgtagtttttgcgtgtaaatataacagaaactggagtatagctgtctcgcctgtacataaaattagtccagggcccgaagcggggacgaagaaactacaccactgttcatttttttctataataacaactgtacaatgttgctgtattactaaagagcaaacaaatgacgagtacaaatcatttgcacttcatacttttatccattgcgaggcatgtagcatgttactctttatcccacttgtacttagattaggtgcaggtgtcatgttttacttgttgcacaccgtttcactgatgagtagctcccataccccataatttgactgatgagctaagataaggaatgaccaaccatttaacatcatctttcaaaccatcgacaaattttgtggcataatacagaggatcaacattgagctgataagcattcagttggtccacaagttgtgcaaactgctcaatataatcagagacaataaaggtttgtcttccagcttggcgtggagcacgacgatgtcattggtgtttgcggccaccgtcttctctagcgctccccaatgcatgtcctgtcctgtggctcaggccgatcacatagctaccagagaagcttggattgtatggcgatgttcttcgattgcgattcgatttgcttggactgtgtgctgccaacaccatcactatgctaggatccgacacaccatccatcttcgccattcatgtgaagtatatactagcataatagtcctagaattccgattcacaaatacgacatgtctgacagcatccaaatcagtacaaacaagtgttcaggtgacacactgtacatggattatggtcatatcaactcagcaccttatctcgtccgtccgtggatgaacatgctcccaacaatggacgattagtgatttaccaccatgcataggcaaactaggcatagatgacttcctctgcttcatcgacatcctctggtctccacaagaatatgtgctcacgcccagaagccgtacttgacaggtgtcccggtgggcttgagccacggctcggcgtgcaagaagttctgcacggtgaacttttcggcctcctccttgctgatcaccttcttgtagccgggccatgtgacgcggccggcggtgtcggcgccgggcccccggttggcgtactcggcgtaccacagcgtcttgagcccgaagtcgccattccacggcaggtacccggccttgtcgatgaacgcggggatgtcggactccatgatgagcgtgcgcgagaactcgcgccaggggcgggcgaggtagctccggatgggcgggcgggacgcgtccttgagccccgtctcggcggtgaagcggcagtactggaagacgaagcccgtgctctcgcgcccgtccgcgcggccctgcgccgtggcgatgttctgctggttgtccatgggccggcggaggaccaggatgcagttctggaacacggcggccgcgtcgccgaagatgaagtcgatggtcccggagatgacgcagttgcggtagaactgcgccttggagtgcgcgtacagcgtgtcctggtacgcgtccatgcggcagttgaggaagatggacctgtccgactgcaccagcagcgccaccgcctggtgcttggccgcgccggccgtgttgcggaaccccagggcgatgccgatgaagccgtcgccttgcgcgtctgcagcgaccagagatttgaggccacgcgtggtgaggccgtcgacgaagttcctgctgccgctgatgacggtctt

SEQ ID NO: 9466 - DNA, 3457 bp, Zea Mays
tcaagtaaaactcctccagccccaccgccacctcccctcatgacaggaaagaaagcgcctgtgcccccacctccaccacctcaagcaccaaaacctcctggagttgtgcctccaccaccaccaccaagctcaaagatctcaaatgcaccagcaccacctccattattgggaaggggacgtggcaacacaactggaccaactaaaggccgtggcattggtttggcacaacaaagtaatcctcccaagaaggcttcactgaagcctctacattgggtgaaagtcacgagagcaatgcaagggagtctctgggctgatgcccagaaacaagggaatcaggctaggtctcctgatatcgatttatccgaactggagagcttgttctccactgcagttgtaaccagcacaagtgaaaagggggcaacaagacgtggttcagctattaacaagccagaaattgttcacctggttgacatgcgacgagcaaacaattgtgagataatgcttacgaaaattaaaatgcctctacctgatatgattaatgcaattttggctctggacacttccgttcttgataatgaccaagtggagaatctcattaagttttgccctacaaaggaagagatcgagatgttgaagggttataatggcaacaaagaaatgcttgggaaatgtgaacagttcttcctggagctgatgaaagttccacgtgtagaggccaagctaagagtttttgctttcagaattactttctcaacacaggtagatgaactaagaactaacctaaccaccataaacgatgcaacgaaggaggtcaaagaatctctgaagttacggcagataatgaagaccattctcacattggggaatgcattaaatcaagggacagcacgaggatctgctgttggcttcagattagacagcctccttaagctgtcggatactcgatctagaaacaataaaatgacgctgatgcattatttatgcaagcttcttgctgagaaaatgcccgaacttcttgattttgacaaagacctaatttatctggaagcagcttccaagatccaactgaaattgcttgcggaagaaatgcaagcaataaacaaaggtcttgagaaggtggagcaggagctagctgcttcagaaagtgatggtgcgatttcagttggctttcgtaaggcattgaaaagctttcttgatgcagcagaagctgaggttaggtccctcatttccttatacgctgaagtgtattttggtgaggatcctgcacgctgcccgtttgaacaagtgacatcaattttagttattttcgtgaatatgttcaaaaaatcacgtgatgaaaatgctcgaaacgctgaggctgagaaaaagaaactggaaaaggaaaaagaaaaggcaagtgtgtctgctaaataaggtttggaatgagactgctgctctgccaaagttgcatctttgtgaagctgtcgtgctggactgacaaagaggacctgcagtataatttgcggcagtgcagaacctgctttgaaacaccttctgtacgtacagagatgctgtgccaggagtctcgctatctggttgccatccattaaatggtttcctttgcgaattccaaggtctaggagctttcgtgctcatgtacagtgggaatgtttgaacagatgactgaacaaacatgcccacgccacggctgctgtagtttttgcgtgtaaatataacagaaactggagtatagctgtctcgcctgtacataaaattagtccagggcccgaagcggggacgaagaaactacaccactgttcatttttttctataataacaactgtacaatgttgctgtattactaaagagcaaacaaatgacgagtacaaatcatttgcacttcatacttttatccattgcgaggcatgtagcatgttactctttatcccacttgtacttagattaggtgcaggtgtcatgttttacttgttgcacaccgtttcactgatgagtagctcccataccccataatttgactgatgagctaagataaggaatgaccaaccatttaacatcatctttcaaaccatcgacaaattttgtggcataatacagaggatcaacattgagctgataagcattcagttggtccacaagttgtgcaaactgctcaatataatcagagacaataaaggtttgtcttccagcttggcgtggagcacgacgatgtcattggtgtttgcggccaccgtcttctctagcgctccccaatgcatgtcctgtcctgtggctcaggccgatcacatagctaccagagaagcttggattgtatggcgatgttcttcgattgcgattcgatttgcttggactgtgtgctgccaacaccatcactatgctaggatccgacacaccatccatcttcgccattcatgtgaagtatatactagcataatagtcctagaattccgattcacaaatacgacatgtctgacagcatccaaatcagtacaaacaagtgttcaggtgacacactgtacatggattatggtcatatcaactcagcaccttatctcgtccgtccgtggatgaacatgctcccaacaatggacgattagtgatttaccaccatgcataggcaaactaggcatagatgacttcctctgcttcatcgacatcctctggtctccacaagaatatgtgctcacgcccagaagccgtacttgacaggtgtcccggtgggcttgagccacggctcggcgtgcaagaagttctgcacggtgaacttttcggcctcctccttgctgatcaccttcttgtagccgggccatgtgacgcggccggcggtgtcggcgccgggcccccggttggcgtactcggcgtaccacagcgtcttgagcccgaagtcgccattccacggcaggtacccggccttgtcgatgaacgcggggatgtcggactccatgatgagcgtgcgcgagaactcgcgccaggggcgggcgaggtagctccggatgggcgggcgggacgcgtccttgagccccgtctcggcggtgaagcggcagtactggaagacgaagcccgtgctctcgcgcccgtccgcgcggccctgcgccgtggcgatgttctgctggttgtccatgggccggcggaggaccaggatgcagttctggaacacggcggccgcgtcgccgaagatgaagtcgatggtcccggagatgacgcagttgcggtagaactgcgccttggagtgcgcgtacagcgtgtcctggtacgcgtccatgcggcagttgaggaagatggacctgtccgactgcaccagcagcgccaccgcctggtgcttggccgcgccggccgtgttgcggaaccccagggcgatgccgatgaagccgtcgccttgcgcgtctgcagcgaccagagatttgaggccacgcgtggtgaggccgtcgacgaagttcctgctgccgctgatgacggtctt

SEQ ID NO: 9467 - DNA, 3205 bp, Zea Mays
tcaagtaaaactcctccagccccaccgccacctcccctcatgacaggaaagaaagcgcctgtgcccccacctccaccacctcaagcaccaaaacctcctggagttgtgcctccaccaccaccaccaagctcaaagatctcaaatgcaccagcaccacctccattattgggaaggggacgtggcaacacaactggaccaactaaaggccgtggcattggtttggcacaacaaagtaatcctcccaagaaggcttcactgaagcctctacattgggtgaaagtcacgagagcaatgcaagggagtctctgggctgatgcccagaaacaagggaatcaggctaggtctcctgatatcgatttatccgaactggagagcttgttctccactgcagttgtaaccagcacaagtgaaaagggggcaacaagacgtggttcagctattaacaagccagaaattgttcacctggttgacatgcgacgagcaaacaattgtgagataatgcttacgaaaattaaaatgcctctacctgatatgattaatgcaattttggctctggacacttccgttcttgataatgaccaagtggagaatctcattaagttttgccctacaaaggaagagatcgagatgttgaagggttataatggcaacaaagaaatgcttgggaaatgtgaacagttcttcctggagctgatgaaagttccacgtgtagaggccaagctaagagtttttgctttcagaattactttctcaacacaggtagatgaactaagaactaacctaaccaccataaacgatgcaacgaaggagaatctctgaagttacggcagataatgaagaccattctcacattggggaatgcattaaatcaagggacagcacgaggatctgctgttggcttcagattagacagcctccttaagctgtcggatactcgatctagaaacaataaaatgacgctgatgcattatttatgcaagcttcttgctgagaaaatgcccgaacttcttgattttgacaaagacctaatttatctggaagcagcttccaagatccaactgaaattgcttgcggaagaaatgcaagcaataaacaaaggtcttgagaaggtggagcaggagctagctgcttcagaaagtgatggtgcgatttcagttggctttcgtaaggcattgaaaagctttcttgatgcagcagaagctgaggttaggtccctcatttccttatacgctgaagtgggaaggaacgctgattcgctagctcagtattttggtgaggatcctgcacgctgcccgtttgaacaagtgacatcaattttagttattttcgtgaatatgttcaaaaaatcacgtgatgaaaatgctcgaaacgctgaggctgagaaaaagaaactggaaaaggaaaaagaaaaggcaagtgtgtctgctaaataaggtttggaatgagactgctgctctgccaaagttgcatctttgtgaagctgtcgtgctggactgacaaagaggacctgcagtataatttgcggcagtgcagaacctgctttgaaacaccttctgtacgtacagagatgctgtgccaggagtctcgctatctggttgccatccattaaatggtttcctttgcgaattccaaggtctaggagctttcgtgctcatgtacagtgggaatgtttgaacagatgactgaacaaacatgcccacgccacggctgctgtagtttttgcgtgtaaatataacagaaactggagtatagctgtctcgcctgtacataaaattagtccagggcccgaagcggggacgaagaaactacaccactgttcatttttttctataataacaactgtacaatgttgctgtattactaaagagcaaacaaatgacgagtacaaatcatttgcacttcatacttttatccattgcgaggcatgtagcatgttactctttatcccacttgtacttagattaggtgcaggtgtcatgttttacttgttgcacaccgtttcactgatgagtagctcccataccccataatttgactgatgagctaagataaggaatgaccaaccatttaacatcatctttcaaaccatcgacaaattttgtggcataatacagaggatcaacattgagctgataagcattcagttggtccacaagttgtgcaaactgctcaatataatcagagacaataaaggtttgtcttccagcttggcgtggagcacgacgatgtcattggtgtttgcggccaccgtcttctctagcgctccccaatgcatgtcctgtcctgtggctcaggccgatcacatagctaccagagaagcttggattgtatggcgatgttcttcgattgcgattcgatttgcttggactgtgtgctgccaacaccatcactatgctaggatccgacacaccatccatcttcgccattcatgtgaagtatatactagcataatagtcctagaattccgattcacaaatacgacatgtctgacagcatccaaatcagtacaaacaagtgttcaggtgacacactgtacatggattatggtcatatcaactcagcaccttatctcgtccgtccgtggatgaacatgctcccaacaatggacgattagtgatttaccaccatgcataggcaaactaggcatagatgacttcctctgcttcatcgacatcctctggtctccacaagaatatgtgctcacgcccagaagccgtacttgacaggtgtcccggtgggcttgagccacggctcggcgtgcaagaagttctgcacggtgaacttttcggcctcctccttgctgatcaccttcttgtagccgggccatgtgacgcggccggcggtgtcggcgccgggcccccggttggcgtactcggcgtaccacagcgtcttgagcccgaagtcgccattccacggcaggtacccggccttgtcgatgaacgcggggatgtcggactccatgatgagcgtgcgcgagaactcgcgccaggggcgggcgaggtagctccggatgggcgggcgggacgcgtccttgagccccgtctcggcggtgaagcggcagtactggaagacgaagcccgtgctctcgcgcccgtccgcgcggccctgcgccgtggcgatgttctgctggttgtccatgggccggcggaggaccaggatgcagttctggaacacggcggccgcgtcgccgaagatgaagtcgatg

SEQ ID NO: 9468 - DNA, 3208 bp, Zea Mays
tcaagtaaaactcctccagccccaccgccacctcccctcatgacaggaaagaaagcgcctgtgcccccacctccaccacctcaagcaccaaaacctcctggagttgtgcctccaccaccaccaccaagctcaaagatctcaaatgcaccagcaccacctccattattgggaaggggacgtggcaacacaactggaccaactaaaggccgtggcattggtttggcacaacaaagtaatcctcccaagaaggcttcactgaagcctctacattgggtgaaagtcacgagagcaatgcaagggagtctctgggctgatgcccagaaacaagggaatcaggctaggtctcctgatatcgatttatccgaactggagagcttgttctccactgcagttgtaaccagcacaagtgaaaagggggcaacaagacgtggttcagctattaacaagccagaaattgttcacctggttgacatgcgacgagcaaacaattgtgagataatgcttacgaaaattaaaatgcctctacctgatatgattaatgcaattttggctctggacacttccgttcttgataatgaccaagtggagaatctcattaagttttgccctacaaaggaagagatcgagatgttgaagggttataatggcaacaaagaaatgcttgggaaatgtgaacagttcttcctggagctgatgaaagttccacgtgtagaggccaagctaagagtttttgctttcagaattactttctcaacacagatgaactaagaactaacctaaccaccataaacgatgcaacgaaggaggtcaaagaatctctgaagttacggcagataatgaagaccattctcacattggggaatgcattaaatcaagggacagcacgaggatctgctgttggcttcagattagacagcctccttaagctgtcggatactcgatctagaaacaataaaatgacgctgatgcattatttatgcaagcttcttgctgagaaaatgcccgaacttcttgattttgacaaagacctaatttatctggaagcagcttccaagatccaactgaaattgcttgcggaagaaatgcaagcaataaacaaaggtcttgagaaggtggagcaggagctagctgcttcagaaagtgatggtgcgatttcagttggctttcgtaaggcattgaaaagctttcttgatgcagcagaagctgaggttaggtccctcatttccttatacgctgaagtgggaaggaacgctgattcgctagctcagtattttggtgaggatcctgcacgctgcccgtttgaacaagtgacatcaattttagttattttcgtgaatatgttcaaaaaatcacgtgatgaaaatgctcgaaacgctgaggctgagaaaaagaaactggaaaaggaaaaagaaaaggcaagtgtgtctgctaaataaggtttggaatgagactgctgctctgccaaagttgcatctttgtgaagctgtcgtgctggactgacaaagaggacctgcagtataatttgcggcagtgcagaacctgctttgaaacaccttctgtacgtacagagatgctgtgccaggagtctcgctatctggttgccatccattaaatggtttcctttgcgaattccaaggtctaggagctttcgtgctcatgtacagtgggaatgtttgaacagatgactgaacaaacatgcccacgccacggctgctgtagtttttgcgtgtaaatataacagaaactggagtatagctgtctcgcctgtacataaaattagtccagggcccgaagcggggacgaagaaactacaccactgttcatttttttctataataacaactgtacaatgttgctgtattactaaagagcaaacaaatgacgagtacaaatcatttgcacttcatacttttatccattgcgaggcatgtagcatgttactctttatcccacttgtacttagattaggtgcaggtgtcatgttttacttgttgcacaccgtttcactgatgagtagctcccataccccataatttgactgatgagctaagataaggaatgaccaaccatttaacatcatctttcaaaccatcgacaaattttgtggcataatacagaggatcaacattgagctgataagcattcagttggtccacaagttgtgcaaactgctcaatataatcagagacaataaaggtttgtcttccagcttggcgtggagcacgacgatgtcattggtgtttgcggccaccgtcttctctagcgctccccaatgcatgtcctgtcctgtggctcaggccgatcacatagctaccagagaagcttggattgtatggcgatgttcttcgattgcgattcgatttgcttggactgtgtgctgccaacaccatcactatgctaggatccgacacaccatccatcttcgccattcatgtgaagtatatactagcataatagtcctagaattccgattcacaaatacgacatgtctgacagcatccaaatcagtacaaacaagtgttcaggtgacacactgtacatggattatggtcatatcaactcagcaccttatctcgtccgtccgtggatgaacatgctcccaacaatggacgattagtgatttaccaccatgcataggcaaactaggcatagatgacttcctctgcttcatcgacatcctctggtctccacaagaatatgtgctcacgcccagaagccgtacttgacaggtgtcccggtgggcttgagccacggctcggcgtgcaagaagttctgcacggtgaacttttcggcctcctccttgctgatcaccttcttgtagccgggccatgtgacgcggccggcggtgtcggcgccgggcccccggttggcgtactcggcgtaccacagcgtcttgagcccgaagtcgccattccacggcaggtacccggccttgtcgatgaacgcggggatgtcggactccatgatgagcgtgcgcgagaactcgcgccaggggcgggcgaggtagctccggatgggcgggcgggacgcgtccttgagccccgtctcggcggtgaagcggcagtactggaagacgaagcccgtgctctcgcgcccgtccgcgcggccctgcgccgtggcgatgttctgctggttgtccatgggccggcggaggaccaggatgcagttctggaacacggcggccgcgtcgccgaagatgaagtcgatg

SEQ ID NO: 9469 - DNA, 3217 bp, Zea Mays
tcaagtaaaactcctccagccccaccgccacctcccctcatgacaggaaagaaagcgcctgtgcccccacctccaccacctcaagcaccaaaacctcctggagttgtgcctccaccaccaccaccaagctcaaagatctcaaatgcaccagcaccacctccattattgggaaggggacgtggcaacacaactggaccaactaaaggccgtggcattggtttggcacaacaaagtaatcctcccaagaaggcttcactgaagcctctacattgggtgaaagtcacgagagcaatgcaagggagtctctgggctgatgcccagaaacaagggaatcaggctaggtctcctgatatcgatttatccgaactggagagcttgttctccactgcagttgtaaccagcacaagtgaaaagggggcaacaagacgtggttcagctattaacaagccagaaattgttcacctggttgacatgcgacgagcaaacaattgtgagataatgcttacgaaaattaaaatgcctctacctgatatgattaatgcaattttggctctggacacttccgttcttgataatgaccaagtggagaatctcattaagttttgccctacaaaggaagagatcgagatgttgaagggttataatggcaacaaagaaatgcttgggaaatgtgaacagttcttcctggagctgatgaaagttccacgtgtagaggccaagctaagagtttttgctttcagaattactttctcaacacaggtttggtagatgaactaagaactaacctaaccaccataaacgatgcaacgaaggaggtcaaagaatctctgaagttacggcagataatgaagaccattctcacattggggaatgcattaaatcaagggacagcacgaggatctgctgttggcttcagattagacagcctccttaagctgtcggatactcgatctagaaacaataaaatgacgctgatgcattatttatgcaagcttcttgctgagaaaatgcccgaacttcttgattttgacaaagacctaatttatctggaagcagcttccaagatccaactgaaattgcttgcggaagaaatgcaagcaataaacaaaggtcttgagaaggtggagcaggagctagctgcttcagaaagtgatggtgcgatttcagttggctttcgtaaggcattgaaaagctttcttgatgcagcagaagctgaggttaggtccctcatttccttatacgctgaagtgggaaggaacgctgattcgctagctcagtattttggtgaggatcctgcacgctgcccgtttgaacaagtgacatcaattttagttattttcgtgaatatgttcaaaaaatcacgtgatgaaaatgctcgaaacgctgaggctgagaaaaagaaactggaaaaggaaaaagaaaaggcaagtgtgtctgctaaataaggtttggaatgagactgctgctctgccaaagttgcatctttgtgaagctgtcgtgctggactgacaaagaggacctgcagtataatttgcggcagtgcagaacctgctttgaaacaccttctgtacgtacagagatgctgtgccaggagtctcgctatctggttgccatccattaaatggtttcctttgcgaattccaaggtctaggagctttcgtgctcatgtacagtgggaatgtttgaacagatgactgaacaaacatgcccacgccacggctgctgtagtttttgcgtgtaaatataacagaaactggagtatagctgtctcgcctgtacataaaattagtccagggcccgaagcggggacgaagaaactacaccactgttcatttttttctataataacaactgtacaatgttgctgtattactaaagagcaaacaaatgacgagtacaaatcatttgcacttcatacttttatccattgcgaggcatgtagcatgttactctttatcccacttgtacttagattaggtgcaggtgtcatgttttacttgttgcacaccgtttcactgatgagtagctcccataccccataatttgactgatgagctaagataaggaatgaccaaccatttaacatcatctttcaaaccatcgacaaattttgtggcataatacagaggatcaacattgagctgataagcattcagttggtccacaagttgtgcaaactgctcaatataatcagagacaataaaggtttgtcttccagcttggcgtggagcacgacgatgtcattggtgtttgcggccaccgtcttctctagcgctccccaatgcatgtcctgtcctgtggctcaggccgatcacatagctaccagagaagcttggattgtatggcgatgttcttcgattgcgattcgatttgcttggactgtgtgctgccaacaccatcactatgctaggatccgacacaccatccatcttcgccattcatgtgaagtatatactagcataatagtcctagaattccgattcacaaatacgacatgtctgacagcatccaaatcagtacaaacaagtgttcaggtgacacactgtacatggattatggtcatatcaactcagcaccttatctcgtccgtccgtggatgaacatgctcccaacaatggacgattagtgatttaccaccatgcataggcaaactaggcatagatgacttcctctgcttcatcgacatcctctggtctccacaagaatatgtgctcacgcccagaagccgtacttgacaggtgtcccggtgggcttgagccacggctcggcgtgcaagaagttctgcacggtgaacttttcggcctcctccttgctgatcaccttcttgtagccgggccatgtgacgcggccggcggtgtcggcgccgggcccccggttggcgtactcggcgtaccacagcgtcttgagcccgaagtcgccattccacggcaggtacccggccttgtcgatgaacgcggggatgtcggactccatgatgagcgtgcgcgagaactcgcgccaggggcgggcgaggtagctccggatgggcgggcgggacgcgtccttgagccccgtctcggcggtgaagcggcagtactggaagacgaagcccgtgctctcgcgcccgtccgcgcggccctgcgccgtggcgatgttctgctggttgtccatgggccggcggaggaccaggatgcagttctggaacacggcggccgcgtcgccgaagatgaagtcgatg

SEQ ID NO: 9470 - DNA, 3151 bp, Zea Mays
tcaagtaaaactcctccagccccaccgccacctcccctcatgacaggaaagaaagcgcctgtgcccccacctccaccacctcaagcaccaaaacctcctggagttgtgcctccaccaccaccaccaagctcaaagatctcaaatgcaccagcaccacctccattattgggaaggggacgtggcaacacaactggaccaactaaaggccgtggcattggtttggcacaacaaagtaatcctcccaagaaggcttcactgaagcctctacattgggtgaaagtcacgagagcaatgcaagggagtctctgggctgatgcccagaaacaagggaatcaggctaggtctcctgatatcgatttatccgaactggagagcttgttctccactgcagttgtaaccagcacaagtgaaaagggggcaacaagacgtggttcagctattaacaagccagaaattgttcacctggttgacatgcgacgagcaaacaattgtgagataatgcttacgaaaattaaaatgcctctacctgatatgattaatgcaattttggctctggacacttccgttcttgataatgaccaagtggagaatctcattaagttttgccctacaaaggaagagatcgagatgttgaagggttataatggcaacaaagaaatgcttgggaaatgtgaacagctttaaactacaatgtagttcttcctggagctgatgaaagttccacgtgtagaggccaagctaagagtttttgctttcagaattactttctcaacacaggtagatgaactaagaactaacctaaccaccataaacgatgcaacgaaggaggtcaaagaatctctgaagttacggcagataatgaagaccattctcacattggggaatgcattaaatcaagggacagcacgaggatctgctgttggcttcagattagacagcctccttaagctgtcggatactcgatctagaaacaataaaatgacgctgatgcattatttatgcaagcttcttgctgagaaaatgcccgaacttcttgattttgacaaagacctaatttatctggaagcagcttccaagatccaactgaaattgcttgcggaagaaatgcaagcaataaacaaaggtcttgagaaggtggagcaggagctagctgcttcagaaagtgatggtgcgatttcagttggctttcgtaaggcattgaaaagctttcttgatgcagcagaagctgaggttaggtccctcatttccttatacgctgaagtgggaaggaacgctgattcgctagctcagtattttggtgaggatcctgcacgctgcccgtttgaacaagtgacatcaattttagttattttcgtgaatatgttcaaaaaatcacgtgatgaaaatgctcgaaacgctgaggctgagaaaaagaaactggaaaaggaaaaagaaaaggcaagtgtgtctgctaaataagtataatttgcggcagtgcagaacctgctttgaaacaccttctgtacgtacagagatgctgtgccaggagtctcgctatctggttgccatccattaaatggtttcctttgcgaattccaaggtctaggagctttcgtgctcatgtacagtgggaatgtttgaacagatgactgaacaaacatgcccacgccacggctgctgtagtttttgcgtgtaaatataacagaaactggagtatagctgtctcgcctgtacataaaattagtccagggcccgaagcggggacgaagaaactacaccactgttcatttttttctataataacaactgtacaatgttgctgtattactaaagagcaaacaaatgacgagtacaaatcatttgcacttcatacttttatccattgcgaggcatgtagcatgttactctttatcccacttgtacttagattaggtgcaggtgtcatgttttacttgttgcacaccgtttcactgatgagtagctcccataccccataatttgactgatgagctaagataaggaatgaccaaccatttaacatcatctttcaaaccatcgacaaattttgtggcataatacagaggatcaacattgagctgataagcattcagttggtccacaagttgtgcaaactgctcaatataatcagagacaataaaggtttgtcttccagcttggcgtggagcacgacgatgtcattggtgtttgcggccaccgtcttctctagcgctccccaatgcatgtcctgtcctgtggctcaggccgatcacatagctaccagagaagcttggattgtatggcgatgttcttcgattgcgattcgatttgcttggactgtgtgctgccaacaccatcactatgctaggatccgacacaccatccatcttcgccattcatgtgaagtatatactagcataatagtcctagaattccgattcacaaatacgacatgtctgacagcatccaaatcagtacaaacaagtgttcaggtgacacactgtacatggattatggtcatatcaactcagcaccttatctcgtccgtccgtggatgaacatgctcccaacaatggacgattagtgatttaccaccatgcataggcaaactaggcatagatgacttcctctgcttcatcgacatcctctggtctccacaagaatatgtgctcacgcccagaagccgtacttgacaggtgtcccggtgggcttgagccacggctcggcgtgcaagaagttctgcacggtgaacttttcggcctcctccttgctgatcaccttcttgtagccgggccatgtgacgcggccggcggtgtcggcgccgggcccccggttggcgtactcggcgtaccacagcgtcttgagcccgaagtcgccattccacggcaggtacccggccttgtcgatgaacgcggggatgtcggactccatgatgagcgtgcgcgagaactcgcgccaggggcgggcgaggtagctccggatgggcgggcgggacgcgtccttgagccccgtctcggcggtgaagcggcagtactggaagacgaagcccgtgctctcgcgcccgtccgcgcggccctgcgccgtggcgatgttctgctggttgtccatgggccggcggaggaccaggatgcagttctggaacacggcggccgcgtcgccgaagatgaagtcgatg

SEQ ID NO: 9471 - DNA, 1015 bp, Zea Mays
tcaagtaaaactcctccagccccaccgccacctcccctcatgacaggaaagaaagcgcctgtgcccccacctccaccacctcaagcaccaaaacctcctggagttgtgcctccaccaccaccaccaagctcaaagatctcaaatgcaccagcaccacctccattattgggaaggggacgtggcaacacaactggaccaactaaaggccgtggcattggtttggcacaacaaagtaatcctcccaagaaggcttcactgaagcctctacattgggtgaaagtcacgagagcaatgcaagggagtctctgggctgatgcccagaaacaagggaatcaggctaggtctcctgatatcgatttatccgaactggagagcttgttctccactgcagttgtaaccagcacaagtgaaaagggggcaacaagacgtggttcagctattaacaagccagaaattgttcacctggttgacatgcgacgagcaaacaattgtgagataatgcttacgaaaattaaaatgcctctacctgatatgattaatgcaattttggctctggacacttccgttcttgataatgaccaagtggagaatctcattaagttttgccctacaaaggaagagatcgagatgttgaagggttataatggcaacaaagaaatgcttgggaaatgtgaacagttcttcctggagctgatgaaagttccacgtgtagaggccaagctaagagtttttgctttcagaattactttctcaacacaggtagatgaactaagaactaacctaaccaccataaacgatgcaacgaaggaggtcaaagaatctctgaagttacggcagataatgaagaccattctcacattggggaatgcattaaatcaagggacagcacgaggatctgctgttggcttcagattagacagcctccttaagctgtcggatactcgatctagaaacaataaaatgacgctgatgcattatttatgcaagtttcatggcaagcccactttgctctttg

SEQ ID NO: 9472 - DNA, 946 bp, Zea Mays
ttagcttatttggttaagttcctattcagcgtatgaggtcgtcattggtttactccataggacttcttggtacatggcagttaaatcgcagtgcttttgagatagcacctagaaatcctgtgcagtttgcccaccaacacaaaaaaaatcctgagcagttatatcgacatttcttcattcacatgaaatgtcacttcttagtagattcttctacaagaggcctcctgatggactactggagtttcttgacaggatctatgtttttgattcatgcttcagcactgaagttttgcctcagggaatgtacccagtgtatttaattgggattcttacagagttgcatgaagagcatgtagaatcctcatttctggcaattaacttcagagatggagataagagaagccagcttgctgatatactacgtgaatacaacattccagtcattgattacccccgtcattttgagggttgtcctgtgcttcctttatctcttattcagcatttccttcgtgtatgtgagcactggttatccagtgggaccaatcagaacattatattactccattgtgaaagaggggcgtggcctttgttggcttttcttttatcttgtcttctcatctacaagaaactgaacagtgctgagcataaaactctggacattatttaccgtgaggcacctaaagggttcctacagcttttttctgcccttaatccaatgccatctcaactccgttacatgcagtatgtagccagaagaaatatatctccacagtggcctccaatggaaagatcactctctttggattgcctgattcttcgagctattccaagttttgattctgataacggatgcaggccattagtccgcatttttggtcgaaatcttcttggcaagttttctagcatgactaacatgactttttccatgccaaagaagaaatctctt

SEQ ID NO: 9473 - DNA, 991 bp, Zea Mays
ccatcactcatagtctgctgcccgtcttcggcggcggcgttcctcgtgggcagtggagtggagatccacacgggcgttggttggttttctgtccatttttgttgttggttattttgaaatcaatctatttttgcagtgcttttgagatagcacctagaaatcctgtgcagtttgcccaccaacacaaaaaaaatcctgagcagttatatcgacatttcttcattcacatgaaatgtcacttcttagtagattcttctacaagaggcctcctgatggactactggagtttcttgacaggatctatgtttttgattcatgcttcagcactgaagttttgcctcagggaatgtacccagtgtatttaattgggattcttacagagttgcatgaagagcatgtagaatcctcatttctggcaattaacttcagagatggagataagagaagccagcttgctgatatactacgtgaatacaacattccagtcattgattacccccgtcattttgagggttgtcctgtgcttcctttatctcttattcagcatttccttcgtgtatgtgagcactggttatccagtgggaccaatcagaacattatattactccattgtgaaagaggggcgtggcctttgttggcttttcttttatcttgtcttctcatctacaagaaactgaacagtgctgagcataaaactctggacattatttaccgtgaggcacctaaagggttcctacagcttttttctgcccttaatccaatgccatctcaactccgttacatgcagtatgtagccagaagaaatatatctccacagtggcctccaatggaaagatcactctctttggattgcctgattcttcgagctattccaagttttgattctgataacggatgcaggccattagtccgcatttttggtcgaaatcttcttggcaagttttctagcatgactaacatgactttttccatgccaaagaagaaatctctt

SEQ ID NO: 9474 - DNA, 791 bp, Zea Mays
cccatcactcatagtctgctgcccgtcttcggcggcggcgttcctcgtgggcagtggagtggagatccacacgggcgttggttggttttctgtccatttttgttgtttttgattcatgcttcagcactgaagttttgcctcagggaatgtacccagtgtatttaattgggattcttacagagttgcatgaagagcatgtagaatcctcatttctggcaattaacttcagagatggagataagagaagccagcttgctgatatactacgtgaatacaacattccagtcattgattacccccgtcattttgagggttgtcctgtgcttcctttatctcttattcagcatttccttcgtgtatgtgagcactggttatccagtgggaccaatcagaacattatattactccattgtgaaagaggggcgtggcctttgttggcttttcttttatcttgtcttctcatctacaagaaactgaacagtgctgagcataaaactctggacattatttaccgtgaggcacctaaagggttcctacagcttttttctgcccttaatccaatgccatctcaactccgttacatgcagtatgtagccagaagaaatatatctccacagtggcctccaatggaaagatcactctctttggattgcctgattcttcgagctattccaagttttgattctgataacggatgcaggccattagtccgcatttttggtcgaaatcttcttggcaagttttctagcatgactaacatgactttttccatgccaaagaagaaatctctt

SEQ ID NO: 9475 - DNA, 979 bp, Zea Mays
ccaccagtcctctccctcccccatcactcatagtctgctgcccgtcttcggcggcggcgttcctcgtgggcagtggagtggagatccacacgggcgttggttggttttctgtccatttttgttgtgcttttgagatagcacctagaaatcctgtgcagtttgcccaccaacacaaaaaaaatcctgagcagttatatcgacatttcttcattcacatgaaatgtcacttcttagtagattcttctacaagaggcctcctgatggactactggagtttcttgacaggatctatgtttttgattcatgcttcagcactgaagttttgcctcagggaatgtacccagtgtatttaattgggattcttacagagttgcatgaagagcatgtagaatcctcatttctggcaattaacttcagagatggagataagagaagccagcttgctgatatactacgtgaatacaacattccagtcattgattacccccgtcattttgagggttgtcctgtgcttcctttatctcttattcagcatttccttcgtgtatgtgagcactggttatccagtgggaccaatcagaacattatattactccattgtgaaagaggggcgtggcctttgttggcttttcttttatcttgtcttctcatctacaagaaactgaacagtgctgagcataaaactctggacattatttaccgtgaggcacctaaagggttcctacagcttttttctgcccttaatccaatgccatctcaactccgttacatgcagtatgtagccagaagaaatatatctccacagtggcctccaatggaaagatcactctctttggattgcctgattcttcgagctattccaagttttgattctgataacggatgcaggccattagtccgcatttttggtcgaaatcttcttggcaagttttctagcatgactaacatgactttttccatgccaaagaagaaatctctt

SEQ ID NO: 9476 - DNA, 3768 bp, Zea Mays
tgcgtagagagttaagggagtagatgctgcaactcttgtggcctacgctcgagctgaagccagattagtggtggctacttggagtagacatgaagaaaaggtcaacatgctatacctatttggagaatatgttctaagcgcagatgctaaaggtaatgtattcatgtgggccttcagaggagcagaaccaaacattgaaccagttggaagcatatcattaggagacaagttcaccccaacgtgtatcatgcatcctgatacttatctgaataaggtaattgttggtagcgaagaaggcttcttgcagctgtggaatatcagcacaaaaaagaaactgtatgatttcaatggttggaactcacctgttcggtgttgtgtctcttctcctgtcctggatgtagttgctgtcggatgttctgatgggtcagttcatgttcataatatgattgccaaggtcgcagttgtgttccatgatgtgaatgtggcacattcttcacatcagtatgttgccactggaatgccgacaaaggcagctctaaagatcagtgtcgaaactccagttgattgtgcaactgttgttgtccaaggagtcttaaatgcagatgctgaaagtgaaaagctatggaagaaaaaagatgtaattcaaaagtaagtgcacttgtcttcttaggtccatttttaacagtgaatattttcatgtttcaatgttgttcaatattatctataacatatctgttatagtacacggaggctacaaaatgcactggcacataaaattaatcatgtcaaacacatccacacaatctatctccaaaattcaatcaacaatatatagtgtacatagtttactgaagaatgtaaggtttagtgggaagggagacaggaatactaagaaatccagactcaaagaaacagggaaaagaaaaaggatgcagagtttacaacgagtaaactcgagcgcttttattcggagatgatgcagagctctctgtggggttatccaaagttaatatatgtgttttgtttaatttatgcccttattagtcattcttttgaaattactacctctactcttttttcatttgatgctttggaaattgacatggtctttaaagcatatcttcagtttctactttctctaagcatttgttgttaaaccctaacgagaatgtagtcatctagaaatgtttgacattacaaatctactaatgttatttctatgtcgaaaataatgattttttgtctgaatcatctctatctctactccttcgtgctggacgacgaggactcgttcgtgtggcccgcgatgacggacctgtcgttccctctcctggaggttggaggaagaggtgggtgggggacgcgaggcctctttctaccctgctgctgcacaaacccacgagagaatgtttggacgcgactggaagaagatcgaggagcatgtcggcaccaagacgacggtccagatacggagccacgcccagaaatacttcctcaaggtccagaagcttgggctggctgctgggctgccgccgatgtacccgaggcaccacttcgccatgcagcagcagcagcagagctcggtggccggtggtagcagcgcggccgccatgccgctgctacacggccggcaacctacttgtgcgtcggtcgccatgccaggtctggccgagcccgacgccgttgcccatcacggttccatcggctggagcagccccagtgtggtcgtccccgcggccagcagcgccgcaaggatgcaaggcttggacttggagtgggcgacagacgcttcggttctaggggcggcggcggcggcacgagtgaacgccgatgcgtagaggcagagcacaccgccattattcgccgccgataattttgcctggcgacggatctcgattcccgcagccaaaaccttggtggagaaaatgactcaactggttcgtgctggtttaggtggtagccagttcatcggggcgccgagcttgtgcgacaccagcatagactgggctggcggcggcggcggcagcggtagcccaagtgaagcgccagcgatgggcgccgtgcaggactaacagcagatcgagctcccgttgtcacccggtacgtacacaaacaccttccgaccaccaaaaccttcctctgaacccaacgcgaccggtgaaagtggaacaacacgtccgcttcagaaaataaagcgtgagctgttgccccctccttcggcagaggacgtgtcgtttgcgcaggtgtacaggttcgtcggcgacatgttcgacgcggacgcgccggtcccggtggaagcccacctgcagaagctgaaggagatggacaacatcacaaccaagacagtcctgctggtgctgcggaacctcgagaacaacctgtcggcgccccagttcgagcctgtgagaaggctgctatcgatgtatgatccgacaagagccctgtttggccagttgtagagcgcaaacaccttgagacaagctggcaagtgggagctgcagcctgcagctaacacgcacggatggacggacgttttttttctctagttgtttgttcgacgaacgaggcaaggaggaggctgaaacgcagcagaatagatgggttacacagacaccgatgcgcctggtttttctggagcaagccataacacattcttttgccgtatctagataaaagcctaatccataaagaatacttacgtttaccaattactcccatgtaccgattgttaaggagtggagtagtacacgtccttctagcgtcttttctttctttttcttttttggggtaaaattcgcgttgtctattcagatggaacttacgagattgtccgatacaagcaagcttgatcgactctccactccagacgcattcaacatgtgccgtattgctcgaccagaaccaggatgtctgatgctaggggggactgtatcaaagcgttgttctggtcctggccctgttgggaaggcaatcaagctgaacgaagagaaaacagaggccctgcagctggaaaaggcatgtgttgtcgcttccctgattcaggtcatcaacacacaaaaagcgtcgggcgttcggcgaagattgtattatgggcccgttcctatcatgggccgaactaatctggatgctgggaccgatttggttgccaaaacccaaaagtacccacttagcaatttcaaggatgacatgttacactttaggaaaaaattggctgctatattactattttcagatataaacaagagaaaggggtgtccgttatataagtatgacaaagaagtcgatgctggaagctcctctgatgttcagatattagatagtcccacaaatcctaagaagatgaaactactttgtgtatcttaagatagcgaagtattgatggaagatgatgatggccccatcactcaagcagacttagaaaggtggtttgttcatgattgggataaaagaactcctataaaaatatcgatcgatgagtgcactaatgaatttttactgagtggcctttccacaaaggaaatgccagtgaccaaagccgatttaatagatgttctatgtgattacatcatgacaattcaagatgatatgacattagagtaagtgcttattattttatctattttataggtaccaactacgtagagttttgatatagacttttgtcatgctgcattacaggataacatggatgcgaagtttcaacccttttaagatagaaatatccgtcaaaaacctgcaaaacgtattaagggtaaatctagatatgac

SEQ ID NO: 9477 - DNA, 2055 bp, Zea Mays
atgcgtagagagttaagggagtagatgctgcaactcttgtggcctacgctcgagctgaagccagattagtggtggctacttggagtagacatgaagaaaaggtcaacatgctatacctatttggagaatatgttctaagcgcagatgctaaaggtaatgtattcatgtgggccttcagaggagcagaaccaaacattgaaccagttggaagcatatcattaggagacaagttcaccccaacgtgtatcatgcatcctgatacttatctgaataaggtaattgttggtagcgaagaaggcttcttgcagctgtggaatatcagcacaaaaaagaaactgtatgatttcaatggttggaactcacctgttcggtgttgtgtctcttctcctgtcctggatgtagttgctgtcggatgttctgatgggtcagttcatgttcataatatgattgccaaggtcgcagttgtgttccatgatgtgaatgtggcacattcttcacatcagtatgttgccactggaatgccgacaaaggcagctctaaagatcagtgtcgaaactccagttgattgtgcaactgttgttgtccaaggagtcttaaatgcagatgctgaaagtgaaaagctatggaagaaaaaagatgtaattcaaaagtaagtgcacttgtcttcttaggtccatttttaacagtgaatattttcatgtttcaatgttgttcaatattatctataacatatctgttatagtacacggaggctacaaaatgcactggcacataaaattaatcatgtcaaacacatccacacaatctatctccaaaattcaatcaacaatatatagtgtacatagtttactgaagaatgtaaggtttagtgggaagggagacaggaatactaagaaatccagactcaaagaaacagggaaaagaaaaaggatgcagagtttacaacgagtaaactcgagcgcttttattcggagatgatgcagagctctctgtggggttatccaaagttaatatatgtgttttgtttaatttatgcccttattagtcattcttttgaaattactacctctactcttttttcatttgatgctttggaaattgacatggtctttaaagcatatcttcagtttctactttctctaagcatttgttgttaaaccctaacgagaatgtagtcatctagaaatgtttgacattacaaatctactaatgttatttctatgtcgaaaataatgattttttgtctgaatcatctctatctctactccttcgtgctggacgacgaggactcgttcgtgtggcccgcgatgacggacctgtcgttccctctcctggaggttggaggaagaggtgggtgggggacgcgaggcctctttctaccctgctgctgcacaaacccacgagagaatgtttggacgcgactggaagaagatcgaggagcatgtcggcaccaagacgacggtccaggatgacatgttacactttaggaaaaaattggctgctatattactattttcagatataaacaagagaaaggggtgtccgttatataagtatgacaaagaagtcgatgctggaagctcctctgatgttcagatattagatagtcccacaaatcctaagaagatgaaactactttgtgtatcttaagatagcgaagtattgatggaagatgatgatggccccatcactcaagcagacttagaaaggtggtttgttcatgattgggataaaagaactcctataaaaatatcgatcgatgagtgcactaatgaatttttactgagtggcctttccacaaaggaaatgccagtgaccaaagccgatttaatagatgttctatgtgattacatcatgacaattcaagatgatatgacattagagtaagtgcttattattttatctattttataggtaccaactacgtagagttttgatatagacttttgtcatgctgcattacaggataacatggatgcgaagtttcaacccttttaagatagaaatatccgtcaaaaacctgcaaaacgtattaagggtaaatctagatatgac

SEQ ID NO: 9478 - DNA, 3446 bp, Zea Mays
aattggagctcgaactggagatgcgtagagagttaagggagtagatgctgcaactcttgtggcctacgctcgagctgaagccagattagtggtggctacttggagtagacatgaagaaaaggtcaacatgctatacctatttggagaatatgttctaagcgcagatgctaaaggtaatgtattcatgtgggccttcagaggagcagaaccaaacattgaaccagttggaagcatatcattaggagacaagttcaccccaacgtgtatcatgcatcctgatacttatctgaataaggtaattgttggtagcgaagaaggcttcttgcagctgtggaatatcagcacaaaaaagaaactgtatgatttcaatggttggaactcacctgttcggtgttgtgtctcttctcctgtcctggatgtagttgctgtcggatgttctgatgggtcagttcatgttcataatgtaagatatgatgaagaattgatgtctttcaaccaccagattcgtggtgctgtgactgcactgtcatttcgaacagttgtgttccatgatgtgaatgtggcacattcttcacatcagtatgttgccactggaatgccgacaaaggcagctctaaagatcagtgtcgaaactccagttgattgtgcaactgttgttgtccaaggagtcttaaatgcagatgctgaaagtgaaaagctatggaagaaaaaagatgtaattcaaaagtaagtgcacttgtcttcttaggtccatttttaacagtgaatattttcatgtttcaatgttgttcaatattatctataacatatctgttatagtacacggaggctacaaaatgcactggcacataaaattaatcatgtcaaacacatccacacaatctatctccaaaattcaatcaacaatatatagtgtacatagtttactgaagaatgtaaggtttagtgggaagggagacaggaatactaagaaatccagactcaaagaaacagggaaaagaaaaaggatgcagagtttacaacgagtaaactcgagcgcttttattcggagatgatgcagagctctctgtggggttatccaaagttaatatatgtgttttgtttaatttatgcccttattagtcattcttttgaaattactacctctactcttttttcatttgatgctttggaaattgacatggtctttaaagcatatcttcagtttctactttctctaagcatttgttgttaaaccctaacgagaatgtagtcatctagaaatgtttgacattacaaatctactaatgttatttctatgtcgaaaataatgattttttgtctgaatcatctctatctctactccttcgtgctggacgacgaggactcgttcgtgtggcccgcgatgacggacctgtcgttccctctcctggaggttggaggaagaggtgggtgggggacgcgaggcctctttctaccctgctgctgcacaaacccacgagagaatgtttggacgcgactggaagaagatcgaggagcatgtcggcaccaagacgacggtccagatacggagccacgcccagaaatacttcctcaaggtccagaagcttgggctggctgctgggctgccgccgatgtacccgaggcaccacttcgccatgcagcagcagcagcagagctcggtggccggtggtagcagcgcggccgccatgccgctgctacacggccggcaacctacttgtgcgtcggtcgccatgccaggtctggccgagcccgacgccgttgcccatcacggttccatcggctggagcagccccagtgtggtcgtccccgcggccagcagcgccgcaaggatgcaaggcttggacttggagtgggcgacagacgcttcggttctaggggcggcggcggcggcacgagtgaacgccgatgcgtagaggcagagcacaccgccattattcgccgccgataattttgcctggcgacggatctcgattcccgcagccaaaaccttggtggagaaaatgactcaactggttcgtgctggtttaggtggtagccagttcatcggggcgccgagcttgtgcgacaccagcatagactgggctggcggcggcggcggcagcggtagcccaagtgaagcgccagcgatgggcgccgtgcaggactaacagcagatcgagctcccgttgtcacccgaggacgtgtcgtttgcgcaggtgtacaggttcgtcggcgacatgttcgacgcggacgcgccggtcccggtggaagcccacctgcagaagctgaaggagatggacaacatcacaaccaagacagtgagtagcagcagcttagcgctgctgagcctacccctccttcctcgcgtctgtctcgcgtttcacgagccttcctcagttcctcttctgtcgttgagctagaccgaaaccgtctcctgactcctgcaggtcctgctggtgctgcggaacctcgagaacaacctgtcggcgccccagttcgagcctgtgatggaacttacgagattgtccgatacaagcaagcttgatcgactctccactccagacgcattcaacatgtgccgtattgctcgaccagaaccaggatgtctgatgctaggggggactgtatcaaagcgttgttctggtcctggccctgttgggaaggcaatcaagctgaacgaagagaaaacagaggccctgcagctggaaaaggcatgtgttgtcgcttccctgattcaggtcatcaacacacaaaaagcgtcgggcgttcggcgaagattgtattatgggcccgttcctatcatgggccgaactaatctggatgctgggaccgatttggttgccaaaacccaaaagtacccacttagcaatttcaaggatgacatgttacactttaggaaaaaattggctgctatattactattttcagatataaacaagagaaaggggtgtccgttatataagtatgacaaagaagtcgatgctggaagctcctctgatgttcagatattagatagtcccacaaatcctaagaagatgaaactactttgtgtatcttaagatagcgaagtattgatggaagatgatgatggccccatcactcaagcagacttagaaaggtggtttgttcatgattgggataaaagaactcctataaaaatatcgatcgatgagtgcactaatgaatttttactgagtggcctttccacaaaggaaatgccagtgaccaaagccgatttaatagatgttctatgtgattacatcatgacaattcaagatgatatgacattagagtaagtgcttattattttatctattttataggtaccaactacgtagagttttgatatagacttttgtcatgctgcattacaggataacatggatgcgaagtttcaacccttttaagatagaaatatccgtcaaaaacctgcaaaacgtattaagggtaaatctagatatgac

SEQ ID NO: 9479 - DNA, 2970 bp, Zea Mays
agcaattggagctcgaactggagatgcgtagagagttaagggagtagatgctgcaactcttgtggcctacgctcgagctgaagccagattagtggtggctacttggagtagacatgaagaaaaggtcaacatgctatacctatttggagaatatgttctaagcgcagatgctaaaggtaatgtattcatgtgggccttcagaggagcagaaccaaacattgaaccagttggaagcatatcattaggagacaagttcaccccaacgtgtatcatgcatcctgatacttatctgaataaggtaattgttggtagcgaagaaggcttcttgcagctgtggaatatcagcacaaaaaagaaactgtatgatttcaatggttggaactcacctgttcggtgttgtgtctcttctcctgtcctggatgtagttgctgtcggatgttctgatgggtcagttcatgttcataatatgattgccaaggtcgcagttgtgttccatgatgtgaatgtggcacattcttcacatcagtatgttgccactggaatgccgacaaaggcagctctaaagatcagtgtcgaaactccagttgattgtgcaactgttgttgtccaaggagtcttaaatgcagatgctgaaagtgaaaagctatggaagaaaaaagatgtaattcaaaagtttggacgcgactggaagaagatcgaggagcatgtcggcaccaagacgacggtccagatacggagccacgcccagaaatacttcctcaaggtccagaagcttgggctggctgctgggctgccgccgatgtacccgaggcaccacttcgccatgcagcagcagcagcagagctcggtggccggtggtagcagcgcggccgccatgccgctgctacacggccggcaacctacttgtgcgtcggtcgccatgccaggtctggccgagcccgacgccgttgcccatcacggttccatcggctggagcagccccagtgtggtcgtccccgcggccagcagcgccgcaaggatgcaaggcttggacttggagtgggcgacagacgcttcggttctaggggcggcggcggcggcacgagtgaacgccgatgcgtagaggcagagcacaccgccattattcgccgccgataattttgcctggcgacggatctcgattcccgcagccaaaaccttggtggagaaaatgactcaactggttcgtgctggtttaggtggtagccagttcatcggggcgccgagcttgtgcgacaccagcatagactgggctggcggcggcggcggcagcggtagcccaaaggacgtgtcgtttgcgcaggtgtacaggttcgtcggcgacatgttcgacgcggacgcgccggtcccggtggaagcccacctgcagaagctgaaggagatggacaacatcacaaccaagacagtcctgctggtgctgcggaacctcgagaacaacctgtcggcgccccagttcgagcctgtgagaaggctgctatcgatgtatgatccgacaagagccctgtttggccagttgtagagcgcaaacaccttgagacaagctggcaagtgggagctgcagcctgcagctaacacgcacggatggacggacgttttttttctctagttgtttgttcgacgaacgaggcaaggaggaggctgaaacgcagcagaatagatgggttacacagacaccgatgcgcctggtttttctggagcaagccataacacattcttttgccgtatctagataaaagcctaatccataaagaatacttacgtttaccaattactcccatgtaccgattgttaaggagtggagtagtacacgtccttctagcgtcttttctttctttttcttttttggggtaaaattcgcgttgtctattcagatggaacttacgagattgtccgatacaagcaaggtgtgtgtctggtcatctgaatctgttttggcaacaaggatccacgtctgaactggacaggcgtgtgccagaacaacaatgaatcaatttgcgcacatttttcacaccaaacttgttcggtgagcttgatcgactctccactccagacgcattcaacatgtgccgtattgctcgaccagaaccaggatgtctgatgctaggggggactgtatcaaagcgttgttctggtcctggccctgttgggaaggcaatcaagctgaacgaagagaaaacagaggccctgcagctggaaaaggcatgtgttgtcgcttccctgattcaggtcatcaacacacaaaaagcgtcgggcgttcggcgaagattgtattatgggcccgttcctatcatgggccgaactaatctggatgctgggaccgatttggttgccaaaacccaaaagtacccacttagcaatttcaaggatgacatgttacactttaggaaaaaattggctgctatattactattttcagatataaacaagagaaaggggtgtccgttatataagtatgacaaagaagtcgatgctggaagctcctctgatgttcagatattagatagtcccacaaatcctaagaagatgaaactactttgtgtatcttaagatagcgaagtattgatggaagatgatgatggccccatcactcaagcagacttagaaaggtggtttgttcatgattgggataaaagaactcctataaaaatatcgatcgatgagtgcactaatgaatttttactgagtggcctttccacaaaggaaatgccagtgaccaaagccgatttaatagatgttctatgtgattacatcatgacaattcaagatgatatgacattagagtaagtgcttattattttatctattttataggtaccaactacgtagagttttgatatagacttttgtcatgctgcattacaggataacatggatgcgaagtttcaacccttttaagatagaaatatccgtcaaaaacctgcaaaacgtattaagggtaaatctagatatgac

SEQ ID NO: 9480 - DNA, 3469 bp, Zea Mays
gagcaattggagctcgaactggagatgcgtagagagttaagggagtagatgctgcaactcttgtggcctacgctcgagctgaagccagattagtggtggctacttggagtagacatgaagaaaaggtcaacatgctatacctatttggagaatatgttctaagcgcagatgctaaaggtaatgtattcatgtgggccttcagaggagcagaaccaaacattgaaccagttggaagcatatcattaggagacaagttcaccccaacgtgtatcatgcatcctgatacttatctgaataaggtaattgttggtagcgaagaaggcttcttgcagctgtggaatatcagcacaaaaaagaaactgtatgatttcaatggttggaactcacctgttcggtgttgtgtctcttctcctgtcctggatgtagttgctgtcggatgttctgatgggtcagttcatgttcataatatgattgccaaggtcgcagttgtgttccatgatgtgaatgtggcacattcttcacatcagtatgttgccactggaatgccgacaaaggcagctctaaagatcagtgtcgaaactccagttgattgtgcaactgttgttgtccaaggagtcttaaatgcagatgctgaaagtgaaaagctatggaagaaaaaagatgtaattcaaaagtaagtgcacttgtcttcttaggtccatttttaacagtgaatattttcatgtttcaatgttgttcaatattatctataacatatctgttatagtacacggaggctacaaaatgcactggcacataaaattaatcatgtcaaacacatccacacaatctatctccaaaattcaatcaacaatatatagtgtacatagtttactgaagaatgtaaggtttagtgggaagggagacaggaatactaagaaatccagactcaaagaaacagggaaaagaaaaaggatgcagagtttacaacgagtaaactcgagcgcttttattcggagatgatgcagagctctctgtggggttatccaaagttaatatatgtgttttgtttaatttatgcccttattagtcattcttttgaaattactacctctactcttttttcatttgatgctttggaaattgacatggtctttaaagcatatcttcagtttctactttctctaagcatttgttgttaaaccctaacgagaatgtagtcatctagaaatgtttgacattacaaatctactaatgttatttctatgtcgaaaataatgattttttgtctgaatcatctctatctctactccttcgtgctggacgacgaggactcgttcgtgtggcccgcgatgacggacctgtcgttccctctcctggaggttggaggaagaggtgggtgggggacgcgaggcctctttctaccctgctgctgcacaaacccacgagagaatgtttggacgcgactggaagaagatcgaggagcatgtcggcaccaagacgacggtccagatacggagccacgcccagaaatacttcctcaaggtccagaagcttgggctggctgctgggctgccgccgatgtacccgaggcaccacttcgccatgcagcagcagcagcagagctcggtggccggtggtagcagcgcggccgccatgccgctgctacacggccggcaacctacttgtgcgtcggtcgccatgccaggtctggccgagcccgacgccgttgcccatcacggttccatcggctggagcagccccagtgtggtcgtccccgcggccagcagcgccgcaagtggtagccagttcatcggggcgccgagcttgtgcgacaccagcatagactgggctggcggcggcggcggcagcggtagcccaagtgaagcgccagcgatgggcgccgtgcaggactaacagcagatcgagctcccgttgtcacccgaggacgtgtcgtttgcgcaggtgtacaggttcgtcggcgacatgttcgacgcggacgcgccggtcccggtggaagcccacctgcagaagctgaaggagatggacaacatcacaaccaagacagtcctgctggtgctgcggaacctcgagaacaacctgtcggcgccccagttcgagcctgtgagaaggctgctatcgatgtatgatccgacaagagccctgtttggccagttgtagagcgcaaacaccttgagacaagctggcaagtgggagctgcagcctgcagctaacacgcacggatggacggacgttttttttctctagttgtttgttcgacgaacgaggcaaggaggaggctgaaacgcagcagaatagatgggttacacagacaccgatgcgcctggtttttctggagcaagccataacacattcttttgccgtatctagataaaagcctaatccataaagaatacttacgtttaccaattactcccatgtaccgattgttaaggagtggagtagtacacgtccttctagcgtcttttctttctttttcttttttggggtaaaattcgcgttgtctattcagatggaacttacgagattgtccgatacaagcaagcttgatcgactctccactccagacgcattcaacatgtgccgtattgctcgaccagaaccaggatgtctgatgctaggggggactgtatcaaagcgttgttctggtcctggccctgttgggaaggcaatcaagctgaacgaagagaaaacagaggccctgcagctggaaaaggcatgtgttgtcgcttccctgattcaggtcatcaacacacaaaaagcgtcgggcgttcggcgaagattgtattatgggcccgttcctatcatgggccgaactaatctggatgctgggaccgatttggttgccaaaacccaaaagtacccacttagcaatttcaaggatgacatgttacactttaggaaaaaattggctgctatattactattttcagatataaacaagagaaaggggtgtccgttatataagtatgacaaagaagtcgatgctggaagctcctctgatgttcagatattagatagtcccacaaatcctaagaagatgaaactactttgtgtatcttaagatagcgaagtattgatggaagatgatgatggccccatcactcaagcagacttagaaaggtggtttgttcatgattgggataaaagaactcctataaaaatatcgatcgatgagtgcactaatgaatttttactgagtggcctttccacaaaggaaatgccagtgaccaaagccgatttaatagatgttctatgtgattacatcatgacaattcaagatgatatgacattagagtaagtgcttattattttatctattttataggtaccaactacgtagagttttgatatagacttttgtcatgctgcattacaggataacatggatgcgaagtttcaacccttttaagatagaaatatccgtcaaaaacctgcaaaacgtattaagggtaaatctagatatgac

SEQ ID NO: 9481 - DNA, 3406 bp, Zea Mays
gagcaattggagctcgaactggagatgcgtagagagttaagggagtagatgctgcaactcttgtggcctacgctcgagctgaagccagattagtggtggctacttggagtagacatgaagaaaaggtcaacatgctatacctatttggagaatatgttctaagcgcagatgctaaaggtaatgtattcatgtgggccttcagaggagcagaaccaaacattgaaccagttggaagcatatcattaggagacaagttcaccccaacgtgtatcatgcatcctgatacttatctgaataaggtaattgttggtagcgaagaaggcttcttgcagctgtggaatatcagcacaaaaaagaaactgtatgatttcaatggttggaactcacctgttcggtgttgtgtctcttctcctgtcctggatgtagttgctgtcggatgttctgatgggtcagttcatgttcataatatgattgccaaggtcgcagttgtgttccatgatgtgaatgtggcacattcttcacatcagtatgttgccactggaatgccgacaaaggcagctctaaagatcagtgtcgaaactccagttgattgtgcaactgttgttgtccaaggagtcttaaatgcagatgctgaaagtgaaaagctatggaagaaaaaagatgtaattcaaaagtaagtgcacttgtcttcttaggtccatttttaacagtgaatattttcatgtttcaatgttgttcaatattatctataacatatctgttatagtacacggaggctacaaaatgcactggcacataaaattaatcatgtcaaacacatccacacaatctatctccaaaattcaatcaacaatatatagtgtacatagtttactgaagaatgtaaggtttagtgggaagggagacaggaatactaagaaatccagactcaaagaaacagggaaaagaaaaaggatgcagagtttacaacgagtaaactcgagcgcttttattcggagatgatgcagagctctctgtggggttatccaaagttaatatatgtgttttgtttaatttatgcccttattagtcattcttttgaaattactacctctactcttttttcatttgatgctttggaaattgacatggtctttaaagcatatcttcagtttctactttctctaagcatttgttgttaaaccctaacgagaatgtagtcatctagaaatgtttgacattacaaatctactaatgttatttctatgtcgaaaataatgattttttgtctgaatcatctctatctctactccttcgtgctggacgacgaggactcgttcgtgtggcccgcgatgacggacctgtcgttccctctcctggaggttggaggaagaggtgggtgggggacgcgaggcctctttctaccctgctgctgcacaaacccacgagagaatgtttggacgcgactggaagaagatcgaggagcatgtcggcaccaagacgacggtccagatacggagccacgcccagaaatacttcctcaaggtccagaagcttgggctggctgctgggctgccgccgatgtacccgaggcaccacttcgccatgcagcagcagcagcagagctcggtggccggtggtagcagcgcggccgccatgccgctgctacacggccggcaacctacttgtgcgtcggtcgccatgccaggtctggccgagcccgacgccgttgcccatcacggttccatcggctggagcagccccagtgtggtcgtccccgcggccagcagcgccgcaagtggtagccagttcatcggggcgccgagcttgtgcgacaccagcatagactgggctggcggcggcggcggcagcggtagcccaaaggacgtgtcgtttgcgcaggtgtacaggttcgtcggcgacatgttcgacgcggacgcgccggtcccggtggaagcccacctgcagaagctgaaggagatggacaacatcacaaccaagacagtcctgctggtgctgcggaacctcgagaacaacctgtcggcgccccagttcgagcctgtgagaaggctgctatcgatgtatgatccgacaagagccctgtttggccagttgtagagcgcaaacaccttgagacaagctggcaagtgggagctgcagcctgcagctaacacgcacggatggacggacgttttttttctctagttgtttgttcgacgaacgaggcaaggaggaggctgaaacgcagcagaatagatgggttacacagacaccgatgcgcctggtttttctggagcaagccataacacattcttttgccgtatctagataaaagcctaatccataaagaatacttacgtttaccaattactcccatgtaccgattgttaaggagtggagtagtacacgtccttctagcgtcttttctttctttttcttttttggggtaaaattcgcgttgtctattcagatggaacttacgagattgtccgatacaagcaagcttgatcgactctccactccagacgcattcaacatgtgccgtattgctcgaccagaaccaggatgtctgatgctaggggggactgtatcaaagcgttgttctggtcctggccctgttgggaaggcaatcaagctgaacgaagagaaaacagaggccctgcagctggaaaaggcatgtgttgtcgcttccctgattcaggtcatcaacacacaaaaagcgtcgggcgttcggcgaagattgtattatgggcccgttcctatcatgggccgaactaatctggatgctgggaccgatttggttgccaaaacccaaaagtacccacttagcaatttcaaggatgacatgttacactttaggaaaaaattggctgctatattactattttcagatataaacaagagaaaggggtgtccgttatataagtatgacaaagaagtcgatgctggaagctcctctgatgttcagatattagatagtcccacaaatcctaagaagatgaaactactttgtgtatcttaagatagcgaagtattgatggaagatgatgatggccccatcactcaagcagacttagaaaggtggtttgttcatgattgggataaaagaactcctataaaaatatcgatcgatgagtgcactaatgaatttttactgagtggcctttccacaaaggaaatgccagtgaccaaagccgatttaatagatgttctatgtgattacatcatgacaattcaagatgatatgacattagagtaagtgcttattattttatctattttataggtaccaactacgtagagttttgatatagacttttgtcatgctgcattacaggataacatggatgcgaagtttcaacccttttaagatagaaatatccgtcaaaaacctgcaaaacgtattaagggtaaatctagatatgac

SEQ ID NO: 9482 - DNA, 2572 bp, Zea Mays
gagcaattggagctcgaactggagatgcgtagagagttaagggagtagatgctgcaactcttgtggcctacgctcgagctgaagccagattagtggtggctacttggagtagacatgaagaaaaggtcaacatgctatacctatttggagaatatgttctaagcgcagatgctaaaggtaatgtattcatgtgggccttcagaggagcagaaccaaacattgaaccagttggaagcatatcattaggagacaagttcaccccaacgtgtatcatgcatcctgatacttatctgaataaggtaattgttggtagcgaagaaggcttcttgcagctgtggaatatcagcacaaaaaagaaactgtatgatttcaatggttggaactcacctgttcggtgttgtgtctcttctcctgtcctggatgtagttgctgtcggatgttctgatgggtcagttcatgttcataatatgattgccaaggtcgcagttgtgttccatgatgtgaatgtggcacattcttcacatcagtatgttgccactggaatgccgacaaaggcagctctaaagatcagtgtcgaaactccagttgattgtgcaactgttgttgtccaaggagtcttaaatgcagatgctgaaagtgaaaagctatggaagaaaaaagatgtaattcaaaagtaagtgcacttgtcttcttaggtccatttttaacagtgaatattttcatgtttcaatgttgttcaatattatctataacatatctgttatagtacacggaggctacaaaatgcactggcacataaaattaatcatgtcaaacacatccacacaatctatctccaaaattcaatcaacaatatatagtgtacatagtttactgaagaatgtaaggtttagtgggaagggagacaggaatactaagaaatccagactcaaagaaacagggaaaagaaaaaggatgcagagtttacaacgagtaaactcgagcgcttttattcggagatgatgcagagctctctgtggggttatccaaagttaatatatgtgttttgtttaatttatgcccttattagtcattcttttgaaattactacctctactcttttttcatttgatgctttggaaattgacatggtctttaaagcatatcttcagtttctactttctctaagcatttgttgttaaaccctaacgagaatgtagtcatctagaaatgtttgacattacaaatctactaatgttatttctatgtcgaaaataatgattttttgtctgaatcatctctatctctactccttcgtgctggacgacgaggactcgttcgtgtggcccgcgatgacggacctgtcgttccctctcctggaggttggaggaagaggtgggtgggggacgcgaggcctctttctaccctgctgctgcacaaacccacgagagaatgtttggacgcgactggaagaagatcgaggagcatgtcggcaccaagacgacggtccagatggaacttacgagattgtccgatacaagcaaggtgtgtgtctggtcatctgaatctgttttggcaacaaggatccacgtctgaactggacaggcgtgtgccagaacaacaatgaatcaatttgcgcacatttttcacaccaaacttgttcggtgagcttgatcgactctccactccagacgcattcaacatgtgccgtattgctcgaccagaaccaggatgtctgatgctaggggggactgtatcaaagcgttgttctggtcctggccctgttgggaaggcaatcaagctgaacgaagagaaaacagaggccctgcagctggaaaaggcatgtgttgtcgcttccctgattcaggtcatcaacacacaaaaagcgtcgggcgttcggcgaagattgtattatgggcccgttcctatcatgggccgaactaatctggatgctgggaccgatttggttgccaaaacccaaaagtacccacttagcaatttcaaggatgacatgttacactttaggaaaaaattggctgctatattactattttcagatataaacaagagaaaggggtgtccgttatataagtatgacaaagaagtcgatgctggaagctcctctgatgttcagatattagatagtcccacaaatcctaagaagatgaaactactttgtgtatcttaagatagcgaagtattgatggaagatgatgatggccccatcactcaagcagacttagaaaggtggtttgttcatgattgggataaaagaactcctataaaaatatcgatcgatgagtgcactaatgaatttttactgagtggcctttccacaaaggaaatgccagtgaccaaagccgatttaatagatgttctatgtgattacatcatgacaattcaagatgatatgacattagagtaagtgcttattattttatctattttataggtaccaactacgtagagttttgatatagacttttgtcatgctgcattacaggataacatggatgcgaagtttcaacccttttaagatagaaatatccgtcaaaaacctgcaaaacgtattaagggtaaatctagatatgac

SEQ ID NO: 9483 - DNA, 4135 bp, Zea Mays
atgaacctcacgatacgccacatggctcaaattaatatctttattcgttttttctacctacacccccaatccaggccgcacggcttcgatcgacaaatgccgtttgctagctggtggtttcttctcctttcagggcacctagaagcgacaatgctgcagaagttgcagctgcgaagagaagcttatcagttttatcatcaagaaccgatttcacaagggtcaggcgtcctgctagatttacttgctttcctcttcttcggcctactgaagcagccacaccagaactctttaattcttcatgcttttacggatctggtttgttcatatgtccgagtgaatcttcttttatctagcaaggtaaacaggcagggcaacatatctagaatggctgacatgtacctgaccggacggtcattacacgctaagaacaataatgtgcgagctactgaatttacaatcaagcaagggtggttgcatactggtgatattggatactttgatgaggggggtcagcttttcgtagttgatagacttaaagaactgattaagtacaaaggttttcagattgcacctgccgagcttgaagggctacttctgtctcatctagaaattatggatgctgttgttatcccgttacccaatgctaaagctggtgaagttcctattgcctacatcgtaaggtcccccgacagttctttgactgaagttgatgttcagaaatttattgaaaagcaggttacgaccacgagtcctacagggacacacaaattagccaatccaaaaggtttttcactgcatttcagtggctctgacattggtggtggctatgagctttatgttgatgaagccaagccaagaggcgacgaccagcgtggtggtggtagatctggtggccgttctggtgggagatttggtgaccgttctggtggccgacgtggtggtggtagatttggtgaaagatctggggcagggatggtggcggcagattcgatggccgacgcggtggaagtggagctggacggcgacgtctacatcacggggaacggcagcctcgtgctcctctctggcgcctccctgacctgcgagaagtacgggtgcgttatatccgccaatttcttaggcgaggtgcgcctcagccgcggcgtccgcgtcacagccggcagggtctcgctggttgccaccaacatcacggtcgctgacacggtcgttgtgaataccagcgcgctcgctggtgatccgcctgaccagaccagtggcgttcccacggggacgcatggcaacggtggcgagcacggtggccgtggcgccagctgcttcgtcaagcaagggcagacgcaggaggattcatggggcggcgatgcctatgcatggtctgacctcgaacacccctggagctacgggagcaaagggggctcgaccagagttgagaaggactatggtggtgccggtggtggcatcgtgtggctgtttgctgaggacctggtcatgaatggcatagttctcgccaacggtggggatagcaatgagaagggtggaggtggttctggagggagcatctttataagggctgcatcgattgatttgagatgtgggaatgcaagcttagttaatcaagcagaatttggaaaacagttaccaattggggaagaccagcagtataaattggagctagatgtgatgatgagaaatcactttgtatgtctcaaatgagcttggcgaagagatttggctaatccagatcttttgttgcctccactctgatggaatatgtttgtgttcctgcaggttttggatcctaaaggagaaagcgggtcctaagggaggaagcagagcaattggagctcgaactggagatgcgtagagagttaagggagtagatgctgcaactcttgtggcctacgctcgagctgaagccagattagtggtggctacttggagtagacatgaagaaaaggtcaacatgctatacctatttggagaatatgttctaagcgcagatgctaaaggtaatgtattcatgtgggccttcagaggagcagaaccaaacattgaaccagttggaagcatatcattaggagacaagttcaccccaacgtgtatcatgcatcctgatacttatctgaataaggtaattgttggtagcgaagaaggcttcttgcagctgtggaatatcagcacaaaaaagaaactgtatgatttcaatggttggaactcacctgttcggtgttgtgtctcttctcctgtcctggatgtagttgctgtcggatgttctgatgggtcagttcatgttcataatgtaagatatgatgaagaattgatgtctttcaaccaccagattcgtggtgctgtgactgcactgtcatttcgaacaggtgatgcgatagtatattgtaaaatgaaaaagaaactttagataatggaattttattagtgtttagtcaactatattgttacaagaacaacagaaaatccttattttctaagtgatggtatttctaaccatggccactcggtaaccttgagatgattgccaaggtcgcagttgtgttccatgatgtgaatgtggcacattcttcacatcagtatgttgccactggaatgccgacaaaggcagctctaaagatcagtgtcgaaactccagttgattgtgcaactgttgttgtccaaggagtcttaaatgcagatgctgaaagtgaaaagctatggaagaaaaaagatgtaattcaaaagtaagtgcacttgtcttcttaggtccatttttaacagtgaatattttcatgtttcaatgttgttcaatattatctataacatatctgttatagtacacggaggctacaaaatgcactggcacataaaattaatcatgtcaaacacatccacacaatctatctccaaaattcaatcaacaatatatagtgtacatagtttactgaagaatgtaaggtttagtgggaagggagacaggaatactaagaaatccagactcaaagaaacagggaaaagaaaaaggatgcagagtttacaacgagtaaactcgagcgcttttattcggagatgatgcagagctctctgtggggttatccaaagttaatatatgtgttttgtttaatttatgcccttattagtcattcttttgaaattactacctctactcttttttcatttgatgctttggaaattgacatggtctttaaagcatatcttcagtttctactttctctaagcatttgttgttaaaccctaacgagaatgtagtcatctagaaatgtttgacattacaaatctactaatgttatttctatgtcgaaaataatgattttttgtctgaatcatctctatctctactccttcgtgctggacgacgaggactcgttcgtgtggcccgcgatgacggacctgtcgttccctctcctggaggttggaggaagaggtgggtgggggacgcgaggcctctttctaccctgctgctgcacaaacccacgagagaatgtttggacgcgactggaagaagatcgaggagcatgtcggcaccaagacgacggtccaggatgacatgttacactttaggaaaaaattggctgctatattactattttcagatataaacaagagaaaggggtgtccgttatataagtatgacaaagaagtcgatgctggaagctcctctgatgttcagatattagatagtcccacaaatcctaagaagatgaaactactttgtgtatcttaagatagcgaagtattgatggaagatgatgatggccccatcactcaagcagacttagaaaggtggtttgttcatgattgggataaaagaactcctataaaaatatcgatcgatgagtgcactaatgaatttttactgagtggcctttccacaaaggaaatgccagtgaccaaagccgatttaatagatgttctatgtgattacatcatgacaattcaagatgatatgacattagagtaagtgcttattattttatctattttataggtaccaactacgtagagttttgatatagacttttgtcatgctgcattacaggataacatggatgcgaagtttcaacccttttaagatagaaatatccgtcaaaaacctgcaaaacgtattaagggtaaatctagatatgac

SEQ ID NO: 9484 - DNA, 5098 bp, Zea Mays
atgaacctcacgatacgccacatggctcaaattaatatctttattcgttttttctacctacacccccaatccaggccgcacggcttcgatcgacaaatgccgtttgctagctggtggtttcttctcctttcagggcacctagaagcgacaatgctgcagaagttgcagctgcgaagagaagcttatcagttttatcatcaagaaccgatttcacaagggtcaggcgtcctgctagatttacttgctttcctcttcttcggcctactgaagcagccacaccagaactctttaattcttcatgcttttacggatctggtttgttcatatgtccgagtgaatcttcttttatctagcaaggtaaacaggcagggcaacatatctagaatggctgacatgtacctgaccggacggtcattacacgctaagaacaataatgtgcgagctactgaatttacaatcaagcaagggtggttgcatactggtgatattggatactttgatgaggggggtcagcttttcgtagttgatagacttaaagaactgattaagtacaaaggttttcagattgcacctgccgagcttgaagggctacttctgtctcatctagaaattatggatgctgttgttatcccgttacccaatgctaaagctggtgaagttcctattgcctacatcgtaaggtcccccgacagttctttgactgaagttgatgttcagaaatttattgaaaagcaggttacgaccacgagtcctacagggacacacaaattagccaatccaaaaggtttttcactgcatttcagtggctctgacattggtggtggctatgagctttatgttgatgaagccaagccaagaggcgacgaccagcgtggtggtggtagatctggtggccgttctggtgggagatttggtgaccgttctggtggccgacgtggtggtggtagatttggtgaaagatctggggcagggatggtggcggcagattcgatggccgacgcggtggaagtggagctggacggcgacgtctacatcacggggaacggcagcctcgtgctcctctctggcgcctccctgacctgcgagaagtacgggtgcgttatatccgccaatttcttaggcgaggtgcgcctcagccgcggcgtccgcgtcacagccggcagggtctcgctggttgccaccaacatcacggtcgctgacacggtcgttgtgaataccagcgcgctcgctggtgatccgcctgaccagaccagtggcgttcccacggggacgcatggcaacggtggcgagcacggtggccgtggcgccagctgcttcgtcaagcaagggcagacgcaggaggattcatggggcggcgatgcctatgcatggtctgacctcgaacacccctggagctacgggagcaaagggggctcgaccagagttgagaaggactatggtggtgccggtggtggcatcgtgtggctgtttgctgaggacctggtcatgaatggcatagttctcgccaacggtggggatagcaatgagaagggtggaggtggttctggagggagcatctttataagggctgcatcgattgatttgagatgtgggaatgcaagcttagttaatcaagcagaatttggaaaacagttaccaattggggaagaccagcagtataaattggtggctacttggagtagacatgaagaaaaggtcaacatgctatacctatttggagaatatgttctaagcgcagatgctaaaggtaatgtattcatgtgggccttcagaggagcagaaccaaacattgaaccagttggaagcatatcattaggagacaagttcaccccaacgtgtatcatgcatcctgatacttatctgaataaggtaattgttggtagcgaagaaggcttcttgcagctgtggaatatcagcacaaaaaagaaactgtatgatttcaatggttggaactcacctgttcggtgttgtgtctcttctcctgtcctggatgtagttgctgtcggatgttctgatgggtcagttcatgttcataatgtaagatatgatgaagaattgatgtctttcaaccaccagattcgtggtgctgtgactgcactgtcatttcgaacaggtgatgcgatagtatattgtaaaatgaaaaagaaactttagataatggaattttattagtgtttagtcaactatattgttacaagaacaacagaaaatccttattttctaagtgatggtatttctaaccatggccactcggtaaccttgagatgattgccaaggtcgcagttgtgttccatgatgtgaatgtggcacattcttcacatcagtatgttgccactggaatgccgacaaaggcagctctaaagatcagtgtcgaaactccagttgattgtgcaactgttgttgtccaaggagtcttaaatgcagatgctgaaagtgaaaagctatggaagaaaaaagatgtaattcaaaagtaagtgcacttgtcttcttaggtccatttttaacagtgaatattttcatgtttcaatgttgttcaatattatctataacatatctgttatagtacacggaggctacaaaatgcactggcacataaaattaatcatgtcaaacacatccacacaatctatctccaaaattcaatcaacaatatatagtgtacatagtttactgaagaatgtaaggtttagtgggaagggagacaggaatactaagaaatccagactcaaagaaacagggaaaagaaaaaggatgcagagtttacaacgagtaaactcgagcgcttttattcggagatgatgcagagctctctgtggggttatccaaagttaatatatgtgttttgtttaatttatgcccttattagtcattcttttgaaattactacctctactcttttttcatttgatgctttggaaattgacatggtctttaaagcatatcttcagtttctactttctctaagcatttgttgttaaaccctaacgagaatgtagtcatctagaaatgtttgacattacaaatctactaatgttatttctatgtcgaaaataatgattttttgtctgaatcatctctatctctactccttcgtgctggacgacgaggactcgttcgtgtggcccgcgatgacggacctgtcgttccctctcctggaggttggaggaagaggtgggtgggggacgcgaggcctctttctaccctgctgctgcacaaacccacgagagaatgtttggacgcgactggaagaagatcgaggagcatgtcggcaccaagacgacggtccagatacggagccacgcccagaaatacttcctcaaggtccagaagcttgggctggctgctgggctgccgccgatgtacccgaggcaccacttcgccatgcagcagcagcagcagagctcggtggccggtggtagcagcgcggccgccatgccgctgctacacggccggcaacctacttgtgcgtcggtcgccatgccaggtctggccgagcccgacgccgttgcccatcacggttccatcggctggagcagccccagtgtggtcgtccccgcggccagcagcgccgcaagtaccttccttttttgtttgtccactctctgcattcttttcagaaatctgagcagtgtttctcgccacgttgtttgtgaacatttctattctctttctagggatgcaaggcttggacttggagtgggcgacagacgcttcggttctaggggcggcggcggcggcacgagtgaacgccgatgcgtagaggcagagcacaccgccattattcgccgccgataattttgcctggcgacggatctcgattcccgcagccaaaaccttggtggagaaaatgactcaactggttcgtgctggtttaggtggtagccagttcatcggggcgccgagcttgtgcgacaccagcatagactgggctggcggcggcggcggcagcggtagcccaaaggacgtgtcgtttgcgcaggtgtacaggttcgtcggcgacatgttcgacgcggacgcgccggtcccggtggaagcccacctgcagaagctgaaggagatggacaacatcacaaccaagacagtcctgctggtgctgcggaacctcgagaacaacctgtcggcgccccagttcgagcctgtgatggaacttacgagattgtccgatacaagcaagcttgatcgactctccactccagacgcattcaacatgtgccgtattgctcgaccagaaccaggatgtctgatgctaggggggactgtatcaaagcgttgttctggtcctggccctgttgggaaggcaatcaagctgaacgaagagaaaacagaggccctgcagctggaaaaggcatgtgttgtcgcttccctgattcaggtcatcaacacacaaaaagcgtcgggcgttcggcgaagattgtattatgggcccgttcctatcatgggccgaactaatctggatgctgggaccgatttggttgccaaaacccaaaagtacccacttagcaatttcaaggatgacatgttacactttaggaaaaaattggctgctatattactattttcagatataaacaagagaaaggggtgtccgttatataagtatgacaaagaagtcgatgctggaagctcctctgatgttcagatattagatagtcccacaaatcctaagaagatgaaactactttgtgtatcttaagatagcgaagtattgatggaagatgatgatggccccatcactcaagcagacttagaaaggtggtttgttcatgattgggataaaagaactcctataaaaatatcgatcgatgagtgcactaatgaatttttactgagtggcctttccacaaaggaaatgccagtgaccaaagccgatttaatagatgttctatgtgattacatcatgacaattcaagatgatatgacattagagtaagtgcttattattttatctattttataggtaccaactacgtagagttttgatatagacttttgtcatgctgcattacaggataacatggatgcgaagtttcaacccttttaagatagaaatatccgtcaaaaacctgcaaaacgtattaagggtaaatctagatatgac

SEQ ID NO: 9485 - DNA, 5322 bp, Zea Mays
atgaacctcacgatacgccacatggctcaaattaatatctttattcgttttttctacctacacccccaatccaggccgcacggcttcgatcgacaaatgccgtttgctagctggtggtttcttctcctttcagggcacctagaagcgacaatgctgcagaagttgcagctgcgaagagaagcttatcagttttatcatcaagaaccgatttcacaagggtcaggcgtcctgctagatttacttgctttcctcttcttcggcctactgaagcagccacaccagaactctttaattcttcatgcttttacggatctggtttgttcatatgtccgagtgaatcttcttttatctagcaaggtaaacaggcagggcaacatatctagaatggctgacatgtacctgaccggacggtcattacacgctaagaacaataatgtgcgagctactgaatttacaatcaagcaagggtggttgcatactggtgatattggatactttgatgaggggggtcagcttttcgtagttgatagacttaaagaactgattaagtacaaaggttttcagattgcacctgccgagcttgaagggctacttctgtctcatctagaaattatggatgctgttgttatcccgttacccaatgctaaagctggtgaagttcctattgcctacatcgtaaggtcccccgacagttctttgactgaagttgatgttcagaaatttattgaaaagcaggttacgaccacgagtcctacagggacacacaaattagccaatccaaaaggtttttcactgcatttcagtggctctgacattggtggtggctatgagctttatgttgatgaagccaagccaagaggcgacgaccagcgtggtggtggtagatctggtggccgttctggtgggagatttggtgaccgttctggtggccgacgtggtggtggtagatttggtgaaagatctggggcagggatggtggcggcagattcgatggccgacgcggtggaagtggagctggacggcgacgtctacatcacggggaacggcagcctcgtgctcctctctggcgcctccctgacctgcgagaagtacgggtgcgttatatccgccaatttcttaggcgaggtgcgcctcagccgcggcgtccgcgtcacagccggcagggtctcgctggttgccaccaacatcacggtcgctgacacggtcgttgtgaataccagcgcgctcgctggtgatccgcctgaccagaccagtggcgttcccacggggacgcatggcaacggtggcgagcacggtggccgtggcgccagctgcttcgtcaagcaagggcagacgcaggaggattcatggggcggcgatgcctatgcatggtctgacctcgaacacccctggagctacgggagcaaagggggctcgaccagagttgagaaggactatggtggtgccggtggtggcatcgtgtggctgtttgctgaggacctggtcatgaatggcatagttctcgccaacggtggggatagcaatgagaagggtggaggtggttctggagggagcatctttataagggctgcatcgattgatttgagatgtgggaatgcaagcttagttaatcaagcagaatttggaaaacagttaccaattggggaagaccagcagtataaattggtggctacttggagtagacatgaagaaaaggtcaacatgctatacctatttggagaatatgttctaagcgcagatgctaaaggtaatgtattcatgtgggccttcagaggagcagaaccaaacattgaaccagttggaagcatatcattaggagacaagttcaccccaacgtgtatcatgcatcctgatacttatctgaataaggtaattgttggtagcgaagaaggcttcttgcagctgtggaatatcagcacaaaaaagaaactgtatgatttcaatggttggaactcacctgttcggtgttgtgtctcttctcctgtcctggatgtagttgctgtcggatgttctgatgggtcagttcatgttcataatgtaagatatgatgaagaattgatgtctttcaaccaccagattcgtggtgctgtgactgcactgtcatttcgaacaggtgatgcgatagtatattgtaaaatgaaaaagaaactttagataatggaattttattagtgtttagtcaactatattgttacaagaacaacagaaaatccttattttctaagtgatggtatttctaaccatggccactcggtaaccttgagatgattgccaaggtcgcagttgtgttccatgatgtgaatgtggcacattcttcacatcagtatgttgccactggaatgccgacaaaggcagctctaaagtgtcgaaactccagttgattgtgcaactgttgttgtccaaggagtcttaaatgcagatgctgaaagtgaaaagctatggaagaaaaaagatgtaattcaaaagtaagtgcacttgtcttcttaggtccatttttaacagtgaatattttcatgtttcaatgttgttcaatattatctataacatatctgttatagtacacggaggctacaaaatgcactggcacataaaattaatcatgtcaaacacatccacacaatctatctccaaaattcaatcaacaatatatagtgtacatagtttactgaagaatgtaaggtttagtgggaagggagacaggaatactaagaaatccagactcaaagaaacagggaaaagaaaaaggatgcagagtttacaacgagtaaactcgagcgcttttattcggagatgatgcagagctctctgtggggttatccaaagttaatatatgtgttttgtttaatttatgcccttattagtcattcttttgaaattactacctctactcttttttcatttgatgctttggaaattgacatggtctttaaagcatatcttcagtttctactttctctaagcatttgttgttaaaccctaacgagaatgtagtcatctagaaatgtttgacattacaaatctactaatgttatttctatgtcgaaaataatgattttttgtctgaatcatctctatctctactccttcgtgctggacgacgaggactcgttcgtgtggcccgcgatgacggacctgtcgttccctctcctggaggttggaggaagaggtgggtgggggacgcgaggcctctttctaccctgctgctgcacaaacccacgagagaatgtttggacgcgactggaagaagatcgaggagcatgtcggcaccaagacgacggtccagatacggagccacgcccagaaatacttcctcaaggtccagaagcttgggctggctgctgggctgccgccgatgtacccgaggcaccacttcgccatgcagcagcagcagcagagctcggtggccggtggtagcagcgcggccgccatgccgctgctacacggccggcaacctacttgtgcgtcggtcgccatgccaggtctggccgagcccgacgccgttgcccatcacggttccatcggctggagcagccccagtgtggtcgtccccgcggccagcagcgccgcaagtggtagccagttcatcggggcgccgagcttgtgcgacaccagcatagactgggctggcggcggcggcggcagcggtagcccaaaggacgtgtcgtttgcgcaggtgtacaggttcgtcggcgacatgttcgacgcggacgcgccggtcccggtggaagcccacctgcagaagctgaaggagatggacaacatcacaaccaagacagtcctgctggtgctgcggaacctcgagaacaacctgtcggcgccccagttcgagcctgtgagaaggctgctatcgatgtatgatccgacaagagccctgtttggccagttgtagagcgcaaacaccttgagacaagctggcaagtgggagctgcagcctgcagctaacacgcacggatggacggacgttttttttctctagttgtttgttcgacgaacgaggcaaggaggaggctgaaacgcagcagaatagatgggttacacagacaccgatgcgcctggtttttctggagcaagccataacacattcttttgccgtatctagataaaagcctaatccataaagaatacttacgtttaccaattactcccatgtaccgattgttaaggagtggagtagtacacgtccttctagcgtcttttctttctttttcttttttggggtaaaattcgcgttgtctattcagatggaacttacgagattgtccgatacaagcaaggtgtgtgtctggtcatctgaatctgttttggcaacaaggatccacgtctgaactggacaggcgtgtgccagaacaacaatgaatcaatttgcgcacatttttcacaccaaacttgttcggtgagcttgatcgactctccactccagacgcattcaacatgtgccgtattgctcgaccagaaccaggatgtctgatgctaggggggactgtatcaaagcgttgttctggtcctggccctgttgggaaggcaatcaagctgaacgaagagaaaacagaggccctgcagctggaaaaggcatgtgttgtcgcttccctgattcaggtcatcaacacacaaaaagcgtcgggcgttcggcgaagattgtattatgggcccgttcctatcatgggccgaactaatctggatgctgggaccgatttggttgccaaaacccaaaagtacccacttagcaatttcaaggatgacatgttacactttaggaaaaaattggctgctatattactattttcagatataaacaagagaaaggggtgtccgttatataagtatgacaaagaagtcgatgctggaagctcctctgatgttcagatattagatagtcccacaaatcctaagaagatgaaactactttgtgtatcttaagatagcgaagtattgatggaagatgatgatggccccatcactcaagcagacttagaaaggtggtttgttcatgattgggataaaagaactcctataaaaatatcgatcgatgagtgcactaatgaatttttactgagtggcctttccacaaaggaaatgccagtgaccaaagccgatttaatagatgttctatgtgattacatcatgacaattcaagatgatatgacattagagtaagtgcttattattttatctattttataggtaccaactacgtagagttttgatatagacttttgtcatgctgcattacaggataacatggatgcgaagtttcaacccttttaagatagaaatatccgtcaaaaacctgcaaaacgtattaagggtaaatctagatatgac

SEQ ID NO: 9486 - DNA, 318 bp, Zea Mays
atggcgatagtgcccgcacgtgcggccgaccagcgatggcggcgtccgcccgctggctcggccagcgacggcggcgccctcgtgtggctgctaagacagcaggccggcggtgggaggacagaggaaggccagtggggaagggccgacgacctggggaggagtcgtgcgacaccactgggcctgacagcagatctggtctgcggccacgcggtggaggacgatgactgcgtcctggttgggcccgcgtcatggggagaggaaggggagctacatgtcgtcagaggcggtggccttgagctgcaccggcgtggcctatag

SEQ ID NO: 9487 - DNA, 572 bp, Zea Mays
aagccccacccacagatcaagtcaagcatctcctaataacctagacatcagcaggcctctcccgtcgacccccttgcttctctccggttgccgtcaacatctttactaggcggaagaatccgatgtcaccatgcgccaaggtcagttgtgcgggtgcgccgctgcccaatctcgaccgaaatgctcaacggacatcacatcacgccgtggaagaagggtgtcttttctagacaccagccaccgaccaagcctcatggagtggcctcccattgctgctgaccactgcgctcaccaaggtcaagagggggaagccagtgagaggggctcatcgatagttagaccccgccattggtggaggatagggacagaacattcaaagttagtttagtgaagccaataaccacagagcgaggctgacagagtgagcaataaaattttcaggttttgttaacggtaaatgtttcaattgcttttctcagtaccaccagttagcaaattgacaacactaaggccctgtttgggaacaaagtttttttaaaccacagtttttaaaatactacagtatattttag

SEQ ID NO: 9488 - DNA, 720 bp, Zea Mays
aaggcggatctagaatggcagatcactcgtgcaactcttctgccccatcgcaaatcaaaatcccaccgaatcaccccgtgacccctcctcccctcccacaatcccagccacaatccaccaagccccacccacagatcaagtcaagcatctcctaataacctagacatcagcaggcctctcccgtcgacccccttgcttctctccggttgccgtcaacatctttactaggcggaagaatccgatgtcaccatgcgccaaggtcagttgtgcgggtgaggcggcagttgctgtgccagctcaggtgcgccgctgcccaatctcgaccgaaatgctcaacggacatcacatcacgccgtggaagaagggtgtcttttctagacaccagccaccgaccaagcctcatggagtggcctcccattgctgctgaccactgcgctcaccaaggtcaagagggggaagccagtgagaggggctcatcgatagttagaccccgccattggtggaggatagggacagaacattcaaagttagtttagtgaagccaataaccacagagcgaggctgacagagtgagcaataaaattttcaggttttgttaacggtaaatgtttcaattgcttttctcagtaccaccagttagcaaattgacaacactaaggccctgtttgggaacaaagtttttttaaaccacagtttttaaaatactacagtatattttag

SEQ ID NO: 9489 - DNA, 980 bp, Zea Mays
cttccgacctatcgattcgaaggcggatctagaatggcagatcactcgtgcaactcttctgccccatcgcaaatcaaaatcccaccgaatcaccccgtgacccctcctcccctcccacaatcccagccacaatccaccaagccccacccacagatcaagtcaagcatctcctaataacctagacatcagcaggcctctcccgtcgacccccttgcttctctccggttgccgtcaacatctttactaggcggaagaatccgatgtcaccatgcgccaaggtcagttgtgcgggtgaggcggcagttgctgtgccagctcaggttcgacttgattcgaccactccatcctaggccaacgtaaatctcgaacatgtacctagatcaacttctacaagatcagctctagaggaaatcaacctagtccaatacaaaagatcctaggcaagagtttctaggcgcagaagcggaaccaaaaattgaagtcgcagagagtttttcaagcaaaggtgtactgttgcttagaaggggaaagagaaattggttgaacatctttcaattgcaggtgcgccgctgcccaatctcgaccgaaatgctcaacggacatcacatcacgccgtggaagaagggtgtcttttctagacaccagccaccgaccaagcctcatggagtggcctcccattgctgctgaccactgcgctcaccaaggtcaagagggggaagccagtgagaggggctcatcgatagttagaccccgccattggtggaggatagggacagaacattcaaagttagtttagtgaagccaataaccacagagcgaggctgacagagtgagcaataaaattttcaggttttgttaacggtaaatgtttcaattgcttttctcagtaccaccagttagcaaattgacaacactaaggccctgtttgggaacaaagtttttttaaaccacagtttttaaaatactacagtatattttag

SEQ ID NO: 9490 - DNA, 4167 bp, Zea Mays
cttcttcattcttgtgtggagccgtcggcgtagtaggacagagggcgtctcgcttgcttgcagttgcaatcgaggagggggaaaaagggatcttctgctcacttctataccaaattttcggggacaagatgaagctggttttatggcatcagttttttctcttcttcgtgttagtttcaacatcacagggtatgagttcagatggcctagctcttcttgctctgtccaaaagcctcatactaccaagtcccataagaaccaactggagtgattctgatgcaactccctgtacatggagcggtgttggttgcaatggaaggaacagagtcatctctctcgacctatcatcgtcaggtgtttcgggttctataggacctgcaatagggcgtctgaaatacctgcggattctcatcttatcagctaacaacatatctggtttgatccctctagaattgggagactgcaatatgcttgaagaactggatttgtcccaaaacctgttttctggcaatataccagcatcattgggcaacctcaagaaattgtcatcactgtcactgtaccgcaactccttcaatggaacaataccagaggagttgttcaagaaccagtttctggagcaagtgtacctacatgacaatcagctcagtggttcggtgcccttatcggttggtgaaatgacaagccttaagtcactgtggttacaggaaaatatgttgtctggagttttgcccagttcaattggaaactgcaccaagttggaggatctgtatctactcgataatcaactgagtggcagtattcctgaaaccttgggtatgatcaaaggtctcaaggtttttgatgctactaccaatagtttcacaggtgagatctctttcagttttgaggactgcaagctagaaatattcatcttgtctttcaataatataaaaggtgaaattccatcatggctggggaactgcatgagcttgcaacaacttggatttgtcaataatagtttgtatggcaaaattccaaattctcttggcttattgagcaacctcacatatcttttactttcacagaactccctttctgggccgatcccacctgagattggtaactgtcagtcgctgcagtggctagagttagatgcaaaccagctggatggcactgttcctgaagaatttgcaaatttacggagtttgtcaaagctctttctttttgagaatcgcctcatgggagacttccctgagaatatttggagtatccaaaccctcgagagtgtcctactttatagcaacagattcacagggaagctaccttcagtgttagctgagctgaagttcctaaagaacatcacactgtttgataatttcttcactggagtcataccacaggagctaggtgttaatagccccttggtccagatagatttcacaaacaacagttttgttggtagtatcccaccaaacatctgttcaagaaaagcattgagaattttggacttagggtttaatcatctcaacggtagcatcccatccagtgttgtggactgcccaagtttgaagcgagtcattttacaaaacaataaccttaacgggtctattccacaatttgtaaactgtgcaaatctaagttatatggacctaagccacaattccttgagtggtaacattccagcaagcttcagcagatgtgtaaacattactgagataaactggtcagagaacaagctttttggagcaataccacctgaaattggaaacttagtgaatctgaaaagacttgacctctcacacaacatattgcatggttcgatccctgtgcaaatttccagttgctccaagttgtactcacttgatttgagttttaactcattgaatggttcggccctccgcaccgtaagcaacttgaagtttctgacacagctacgattgcaagagaatagattcagcggaggcttgcctgattctctctcacaattggaaatgcttattgagctgcaacttggtggaaatattcttgggggtagtatcccttcgtcattaggacagctggtgaaactgggcacagccttgaaccttagtagcaatggcctaatgggtgacattccaacacaattgggtaatttggtggagttgcaaaacttagatttttcatttaataatctcacaggaggccttgctacattgagaagtctaggctttttgcaggccttgaatgtttcttacaaccaatttagtggaccagtcccagataatcttctgaagtttctgagttccacaccatattcttttgatggaaacccaggcctctgtatctcctgcagcaccagtggctcttcttgcatgggagctaatgttttgaaaccttgtggtgggtcgaagaaaagaggagtacatggccaattgaaaattgttctcatagttctcggttcattatttgtgggaggagttcttgtacttgtactgtgttgcatccttctgaaatctcgagattggaagaaaaataaagtcagtaacatgtttgaaggttcctcatctaaattaaatgaggttacagaggccactgaaaatttcgatgacaagtatatcatcggtacaggtgctcacggaactgtttacaaggcaacactgaggtcaggggatgtttatgctataaagaagcttgcgatttctgcacacaaaggttcatacaaaagcatggttagagaactgaagacactgggtgaaattaagcacagaaacttgataaagctgaaagaattttggttgagaagtgataatggattcatactgtatgattttatggaaaagggcagcctccatgatattctgcatgtaattcagccagcaccagctttggactggtgtgtgaggtatgacatagctcttggcaccgcccatgggttagcatatcttcatgatgactgccgccctgcgatcattcaccgtgatattaaaccaagaaatatactgctcgacaaggacatggtgccacatatttcagattttggcattgcaaagcacatggaccagtcttctactactgctccacagaccactggaatcgttggcactattggatatatggccccagaattggcgttttccaccaagagcagcatggagtctgacgtgtacagctacggtgtggtgctactggagctgttgaccaggaggacggcggtggatcctttgttccccgacagcgcggacatagtcggctgggtgtcgtccgtgctggacggcaccgacaaaatcgaggccgtctgtgacccggccctcatggaggaagtcttcggcacggtggagatggaggaggtgcgtaaggtcctgtcggtggcgctccggtgcgcggccagggaggtgagccaaaggccctccatgactgccgtcgtgaaggagctgacggatgcgcggccagcctctgccagcagcggcagccggtcgttgtccaagtcgagggaagggaaaccgggattgcaatccagcagcagcgcgtactggcagtaggatttctgaattttattctgcggagctgttacggcctccgggacaccaacttcctctcttgtacctcctgattggttagttgacaaagattaactgacataatttgttacccactaacattgtagagcaggtacaagtattgtgaattgatgcatttcacttagaagacccgacgtggccttttctcaggtagcggtcctgttataattccgaaagacgttgttaatactccgagcaagaggagcaagaggcgtgaagattcggtaaatgaggactctcttgagagggcaaaaaggttaacagcaatcaggaatcttgatagtacaggtacttttcaggggcacatactggatgagacaatggatgctgctgctaaaggaagaagaaaaattacaagtaaagcagggatacaggctgcttgaagttgcaatgatgcaaatctttgctaaaaatggttggaactttagtaatcgattgtgcttgtaatctgtaatgttgtggtggcatctatgtttcgagtatggttttgttcctgtttgaacccagtatttttgatgtattggacagctatatgcccagtatttttgatgtattggacaactatatgcatattgtcatgcagaggctggaataatcaagttattcccttttctaaaaaaaatctcag

SEQ ID NO: 9491 - DNA, 3929 bp, Zea Mays
cgccgcgctgccggtgctctctcattctcgtccgccatggatgcttctactagtgctactagtgaaaactagagcaacgcctgccggtctctgtttcgcaggatcctcccgccctgcgtgcacagagttgctgtctctggagggggaaaaagggatcttctgctcacttctataccaaattttcggggacaagatgaagctggttttatggcatcagttttttctcttcttcgtgttagtttcaacatcacagggtatgagttcagatggcctagctcttcttgctctgtccaaaagcctcatactaccaagtcccataagaaccaactggagtgattctgatgcaactccctgtacatggagcggtgttggttgcaatggaaggaacagagtcatctctctcgacctatcatcgtcaggtgtttcgggttctataggacctgcaatagggcgtctgaaatacctgcggattctcatcttatcagctaacaacatatctggtttgatccctctagaattgggagactgcaatatgcttgaagaactggatttgtcccaaaacctgttttctggcaatataccagcatcattgggcaacctcaagaaattgtcatcactgtcactgtaccgcaactccttcaatggaacaataccagaggagttgttcaagaaccagtttctggagcaagtgtacctacatgacaatcagctcagtggttcggtgcccttatcggttggtgaaatgacaagccttaagtcactgtggttacaggaaaatatgttgtctggagttttgcccagttcaattggaaactgcaccaagttggaggatctgtatctactcgataatcaactgagtggcagtattcctgaaaccttgggtatgatcaaaggtctcaaggtttttgatgctactaccaatagtttcacagaactccctttctgggccgatcccacctgagattggtaactgtcagtcgctgcagtggctagagttagatgcaaaccagctggatggcactgttcctgaagaatttgcaaatttacggagtttgtcaaagctctttctttttgagaatcgcctcatgggagacttccctgagaatatttggagtatccaaaccctcgagagtgtcctactttatagcaacagattcacagggaagctaccttcagtgttagctgagctgaagttcctaaagaacatcacactgtttgataatttcttcactggagtcataccacaggagctaggtgttaatagccccttggtccagatagatttcacaaacaacagttttgttggtagtatcccaccaaacatctgttcaagaaaagcattgagaattttggacttagggtttaatcatctcaacggtagcatcccatccagtgttgtggactgcccaagtttgaagcgagtcattttacaaaacaataaccttaacgggtctattccacaatttgtaaactgtgcaaatctaagttatatggacctaagccacaattccttgagtggtaacattccagcaagcttcagcagatgtgtaaacattactgagataaactggtcagagaacaagctttttggagcaataccacctgaaattggaaacttagtgaatctgaaaagacttgacctctcacacaacatattgcatggttcgatccctgtgcaaatttccagttgctccaagttgtactcacttgatttgagttttaactcattgaatggttcggccctccgcaccgtaagcaacttgaagtttctgacacagctacgattgcaagagaatagattcagcggaggcttgcctgattctctctcacaattggaaatgcttattgagctgcaacttggtggaaatattcttgggggtagtatcccttcgtcattaggacagctggtgaaactgggcacagccttgaaccttagtagcaatggcctaatgggtgacattccaacacaattgggtaatttggtggagttgcaaaacttagatttttcatttaataatctcacaggaggccttgctacattgagaagtctaggctttttgcaggccttgaatgtttcttacaaccaatttagtggaccagtcccagataatcttctgaagtttctgagttccacaccatattcttttgatggaaacccaggcctctgtatctcctgcagcaccagtggctcttcttgcatgggagctaatgttttgaaaccttgtggtgggtcgaagaaaagaggagtacatggccaattgaaaattgttctcatagttctcggttcattatttgtgggaggagttcttgtacttgtactgtgttgcatccttctgaaatctcgagattggaagaaaaataaagtcagtaacatgtttgaaggttcctcatctaaattaaatgaggttacagaggccactgaaaatttcgatgacaagtatatcatcggtacaggtgctcacggaactgtttacaaggcaacactgaggtcaggggatgtttatgctataaagaagcttgcgatttctgcacacaaaggttcatacaaaagcatggttagagaactgaagacactgggtgaaattaagcacagaaacttgataaagctgaaagaattttggttgagaagtgataatggattcatactgtatgattttatggaaaagggcagcctccatgatattctgcatgtaattcagccagcaccagctttggactggtgtgtgaggtatgacatagctcttggcaccgcccatgggttagcatatcttcatgatgactgccgccctgcgatcattcaccgtgatattaaaccaagaaatatactgctcgacaaggacatggtgccacatatttcagattttggcattgcaaagcacatggaccagtcttctactactgctccacagaccactggaatcgttggcactattggatatatggccccagaattggcgttttccaccaagagcagcatggagtctgacgtgtacagctacggtgtggtgctactggagctgttgaccaggaggacggcggtggatcctttgttccccgacagcgcggacatagtcggctgggtgtcgtccgtgctggacggcaccgacaaaatcgaggccgtctgtgacccggccctcatggaggaagtcttcggcacggtggagatggaggaggtgcgtaaggtcctgtcggtggcgctccggtgcgcggccagggaggtgagccaaaggccctccatgactgccgtcgtgaaggagctgacggatgcgcggccagcctctgccagcagcggcagccggtcgttgtccaagtcgagggaagggaaaccgggattgcaatccagcagcagcgcgtactggcagtaggatttctgaattttattctgcggagctgttacggcctccgggacaccaacttcctctcttgtacctcctgattggccttttctcaggtagcggtcctgttataattccgaaagacgttgttaatactccgagcaagaggagcaagaggcgtgaagattcggtaaatgaggactctcttgagagggcaaaaaggttaacagcaatcaggaatcttgatagtacaggtacttttcaggggcacatactggatgagacaatggatgctgctgctaaaggaagaagaaaaattacaagtaaagcagggatacaggctgcttgaagttgcaatgatgcaaatctttgctaaaaatggttggaactttagtaatcgattgtgcttgtaatctgtaatgttgtggtggcatctatgtttcgagtatggttttgttcctgtttgaacccagtatttttgatgtattggacagctatatgcccagtatttttgatgtattggacaactatatgcatattgtcatgcagaggctggaataatcaagttattcccttttctaaaaaaaatctcag

SEQ ID NO: 9492 - DNA, 4068 bp, Zea Mays
cttcgctcgcttgtgctcgtgcctgcgccaacagtccgccgcgctgccggtgctctctcattctcgtccgccatggatgcttctactagtgctactagtgaaaactagagcaacgcctgccggtctctgtttcgcaggatcctcccgccctgcgtgcacagagttgctgtctctggagggggaaaaagggatcttctgctcacttctataccaaattttcggggacaagatgaagctggttttatggcatcagttttttctcttcttcgtgttagtttcaacatcacagggtatgagttcagatggcctagctcttcttgctctgtccaaaagcctcatactaccaagtcccataagaaccaactggagtgattctgatgcaactccctgtacatggagcggtgttggttgcaatggaaggaacagagtcatctctctcgacctatcatcgtcaggtgtttcgggttctataggacctgcaatagggcgtctgaaatacctgcggattctcatcttatcagctaacaacatatctggtttgatccctctagaattgggagactgcaatatgcttgaagaactggatttgtcccaaaacctgttttctggcaatataccagcatcattgggcaacctcaagaaattgtcatcactgtcactgtaccgcaactccttcaatggaacaataccagaggagttgttcaagaaccagtttctggagcaagtgtacctacatgacaatcagctcagtggttcggtgcccttatcggttggtgaaatgacaagccttaagtcactgtggttacaggaaaatatgttgtctggagttttgcccagttcaattggaaactgcaccaagttggaggatctgtatctactcgataatcaactgagtggcagtattcctgaaaccttgggtatgatcaaaggtctcaaggtttttgatgctactaccaatagtttcacagaactccctttctgggccgatcccacctgagattggtaactgtcagtcgctgcagtggctagagttagatgcaaaccagctggatggcactgttcctgaagaatttgcaaatttacggagtttgtcaaagctctttctttttgagaatcgcctcatgggagacttccctgagaatatttggagtatccaaaccctcgagagtgtcctactttatagcaacagattcacagggaagctaccttcagtgttagctgagctgaagttcctaaagaacatcacactgtttgataatttcttcactggagtcataccacaggagctaggtgttaatagccccttggtccagatagatttcacaaacaacagttttgttggtagtatcccaccaaacatctgttcaagaaaagcattgagaattttggacttagggtttaatcatctcaacggtagcatcccatccagtgttgtggactgcccaagtttgaagcgagtcattttacaaaacaataaccttaacgggtctattccacaatttgtaaactgtgcaaatctaagttatatggacctaagccacaattccttgagtggtaacattccagcaagcttcagcagatgtgtaaacattactgagataaactggtcagagaacaagctttttggagcaataccacctgaaattggaaacttagtgaatctgaaaagacttgacctctcacacaacatattgcatggttcgatccctgtgcaaatttccagttgctccaagttgtactcacttgatttgagttttaactcattgaatggttcggccctccgcaccgtaagcaacttgaagtttctgacacagctacgattgcaagagaatagattcagcggaggcttgcctgattctctctcacaattggaaatgcttattgagctgcaacttggtggaaatattcttgggggtagtatcccttcgtcattaggacagctggtgaaactgggcacagccttgaaccttagtagcaatggcctaatgggtgacattccaacacaattgggtaatttggtggagttgcaaaacttagatttttcatttaataatctcacaggaggccttgctacattgagaagtctaggctttttgcaggccttgaatgtttcttacaaccaatttagtggaccagtcccagataatcttctgaagtttctgagttccacaccatattcttttgatggaaacccaggcctctgtatctcctgcagcaccagtggctcttcttgcatgggagctaatgttttgaaaccttgtggtgggtcgaagaaaagaggagtacatggccaattgaaaattgttctcatagttctcggttcattatttgtgggaggagttcttgtacttgtactgtgttgcatccttctgaaatctcgagattggaagaaaaataaagtcagtaacatgtttgaaggttcctcatctaaattaaatgaggttacagaggccactgaaaatttcgatgacaagtatatcatcggtacaggtgctcacggaactgtttacaaggcaacactgaggtcaggggatgtttatgctataaagaagcttgcgatttctgcacacaaaggttcatacaaaagcatggttagagaactgaagacactgggtgaaattaagcacagaaacttgataaagctgaaagaattttggttgagaagtgataatggattcatactgtatgattttatggaaaagggcagcctccatgatattctgcatgtaattcagccagcaccagctttggactggtgtgtgaggtatgacatagctcttggcaccgcccatgggttagcatatcttcatgatgactgccgccctgcgatcattcaccgtgatattaaaccaagaaatatactgctcgacaaggacatggtgccacatatttcagattttggcattgcaaagcacatggaccagtcttctactactgctccacagaccactggaatcgttggcactattggatatatggccccagaattggcgttttccaccaagagcagcatggagtctgacgtgtacagctacggtgtggtgctactggagctgttgaccaggaggacggcggtggatcctttgttccccgacagcgcggacatagtcggctgggtgtcgtccgtgctggacggcaccgacaaaatcgaggccgtctgtgacccggccctcatggaggaagtcttcggcacggtggagatggaggaggtgcgtaaggtcctgtcggtggcgctccggtgcgcggccagggaggtgagccaaaggccctccatgactgccgtcgtgaaggagctgacggatgcgcggccagcctctgccagcagcggcagccggtcgttgtccaagtcgagggaagggaaaccgggattgcaatccagcagcagcgcgtactggcagtaggatttctgaattttattctgcggagctgttacggcctccgggacaccaacttcctctcttgtacctcctgattggttagttgacaaagattaactgacataatttgttacccactaacattgtagagcaggtacaagtattgtgaattgatgcatttcacttagaagacccgacgtggccttttctcaggtagcggtcctgttataattccgaaagacgttgttaatactccgagcaagaggagcaagaggcgtgaagattcggtaaatgaggactctcttgagagggcaaaaaggttaacagcaatcaggaatcttgatagtacaggtacttttcaggggcacatactggatgagacaatggatgctgctgctaaaggaagaagaaaaattacaagtaaagcagggatacaggctgcttgaagttgcaatgatgcaaatctttgctaaaaatggttggaactttagtaatcgattgtgcttgtaatctgtaatgttgtggtggcatctatgtttcgagtatggttttgttcctgtttgaacccagtatttttgatgtattggacagctatatgcccagtatttttgatgtattggacaactatatgcatattgtcatgcagaggctggaataatcaagttattcccttttctaaaaaaaatctcag

SEQ ID NO: 9493 - DNA, 485 bp, Zea Mays
gaacaactgggcttgggctacgtttatttttgtggccccgtgttgcgttctcctgttcaccccgcgtcgtcttcgctctcacgatccctcggcagtcggcgacggctgggcgaccgccacttccgccttctcttcctactgagcgtctccaggcacgcttctgaattcggagttgccagcattcgctcgaggtgccggaccagatctcaccatcatgcaggctagcgatagattcaacataaactctcagcttgagcatcttcaagccaaatatgttggtacagggcatgctgatttgtctagatttgaatgggctgtaaacatccagagagacagctatgcctcttatattgggcactatccaatgctagcatattttgccattgctgagaatgaatcgatcggaagagaacgttacaatttcatgcagggatcggatatatactcaattcttgtcaaagaaccctttgtgtatagaacagaat

SEQ ID NO: 9494 - DNA, 233 bp, Zea Mays
cacattaagcaccacaaaaatctcagccatggccatggagatgtacttctctgataaggccggacattacaagtggtcatattcaaccatgcttaagttagatgaaatctcatgattgtccacgcttgcccttgcccccacgagctcatcattcgacacaaccttatcaaactcaaacagaagctacatcgaagatcaatcatggaaggataccttagtggacacgctgtaat

SEQ ID NO: 9495 - DNA, 1261 bp, Zea Mays
cctcctgagctgagtcccttccctttcccccggtccagtggcggacgccctagccaggcaccacaggccacagcctgggctgccccactgcccctgtcgccgtcgggcaagcgccgtccaacctgtgcgtcaccgcctccgccttcagtttcgcctccagcaggggcgccgcgtggggtattcggttcgtcgtcgaggagagagagtcacttctgccgagggagcagggatggagccggtcgtggggatcgtggtgtcaaacaagatgcagaagtcggtggtggttgcggtggaccgcctcttccactataagatgtacaaccgctatgtcaagcgcacctctaagttcatggcacacgacgaggctgactcctgcaacattggcgaccgggttgtagggtggggattgggctcgagaagggcggcggcgctggggcgctgtcgtgaccctggctgggtcgcgcgcagggagaagattccaggagactctggcttcatctgggaagccagaataaattggttaggctggacccttctaggcccttgagcagatataagcactgggttgttgctgaaattcttcgcagagctaaggtatatgttccaccagctgcaacagcgtccagtcagtccagtgaacataatagcaaatctcaaaaggctggtgttgctaccaaatgatccatatgcagttactcaagcaagatgcagctatggctttttttcttcttctgtatgtttgtttggaatgtggatgccatgtttagccatggaagaaaaaatagcacgcagccaccatcttcgcttaatttagtttgttctcctgtggtgtcctccctttaatggtagccatcgaggatataattaccatattcaacaagaccagtggatactatatcggcagttgtctttgtatttgcatgcatggttggcaggtgtctaatactgctgaaatgagcaggcggaaagatccgaagagtaaagggttgtttggttcttggctacctgtctttaaactttaaggttaataagtcaaattgaagaactaaccttagatagaaaaatttagttgaactataacaaattagacaccacaccaaacaggccctaaaatgctgataataatctatatgaactggttgtctttgccgtgttcatattcgtactatcaggtggatgaatcgttttctgtgctgtttgctgcatactcgtaaattcatggtgatgtgcaatcaagattcggaaagtagacctcgatttc

SEQ ID NO: 9496 - DNA, 1128 bp, Zea Mays
cctcctgagctgagtcccttccctttcccccggtccagtggcggacgccctagccaggcaccacaggccacagcctgggctgccccactgcccctgtcgccgtcgggcaagcgccgtccaacctgtgcgtcaccgcctccgccttcagtttcgcctccagcaggggcgccgcgtggggtattcggttcgtcgtcgaggagagagagtcacttctgccgagggagcagggatggagccggtcgtggggatcgtggtgtcaaacaagatgcagaagtcggtggtggttgcggtggaccgcctcttccactataagatgtacaaccgctatgtcaagcgcacctctaagttcatggcacacgacgaggctgactcctgcaacattggcgaccgggctggacccttctaggcccttgagcagatataagcactgggttgttgctgaaattcttcgcagagctaaggtatatgttccaccagctgcaacagcgtccagtcagtccagtgaacataatagcaaatctcaaaaggctggtgttgctaccaaatgatccatatgcagttactcaagcaagatgcagctatggctttttttcttcttctgtatgtttgtttggaatgtggatgccatgtttagccatggaagaaaaaatagcacgcagccaccatcttcgcttaatttagtttgttctcctgtggtgtcctccctttaatggtagccatcgaggatataattaccatattcaacaagaccagtggatactatatcggcagttgtctttgtatttgcatgcatggttggcaggtgtctaatactgctgaaatgagcaggcggaaagatccgaagagtaaagggttgtttggttcttggctacctgtctttaaactttaaggttaataagtcaaattgaagaactaaccttagatagaaaaatttagttgaactataacaaattagacaccacaccaaacaggccctaaaatgctgataataatctatatgaactggttgtctttgccgtgttcatattcgtactatcaggtggatgaatcgttttctgtgctgtttgctgcatactcgtaaattcatggtgatgtgcaatcaagattcggaaagtagacctcgatttc

SEQ ID NO: 9497 - DNA, 1773 bp, Zea Mays
gcgcccttgccgagtcacttggttggatcgccgctgctcaccccgtcctagacgcgaggcgacgacgcctccctatccctctcctccgcaatggccaggccccgcaagaacggcggtaccgacgaggatgatgctaacgccgccacgggagccaccgggaagccgaagaagctgatgaagcgggcgcggaggaagagcgagagcccctccccgcgcagctccgcgtaccgcggcgtcacacggcaccggtggacggggcggttcgaggcgcacctgtgggacaaggacgcccgcaacggctcccggagcaagaaaggcaagcaaggtagcccatcaccgatccaccagctcgtccatggattccggttgttacgtttgcgatcgcgactgacctgacctctcccccgtgtgctttgcgtatgcgtggttcctcttccgctgctggcgccgtcctgcgatcgaccgggttggcgggcggtccgggctcacgtacggacgggggcgcgtgcctgcagtttatctcggcgcgtacgacgacgaggacgcggcggcgcgcgcgcacgacctggcggcgctcaagtactggggccccgccggcaccgtcctcaacttcccgctgagcggctacgacgaggagcggagggagatggaggggcagccccgggaggagtacgtcgcgtcgctgcggcggcggagcagcggcttcgcgcgaggggtgtccaagtacaggggcgttgccaggcatcatcacaacgggagatgggaggcgaggatcgggcgcgtgttaggcaacaagtacctctatctcggcacttacgcaacacaagaggaggcggcagtggcgtatgacatggcggctatagaacaccgcggcttcaacgcggtcaccaacttcgacatcagccattacatcaaccactggcatcgacattgccatggcccctgcgacggcagcctcggcgcgatggacgtcgcaccgaacgtctcgctcgaactagacctactcgagtgcccggccaccgtcggcctcggcctcgaggagaccacgggcgacgatgaattccacaaccgcgaggactacctggggcaccttttcggcgtgcagcagcttcccgacgagatggggccgccggctcatcagatggcaccagcatcgtcggcgctcgatctggtgttgcagtcgcctaggttcaaggagctgatgcaacaggtttccgcggcgggagcctccgagaccaacggcggcagcatgcgtagctcgccatcaacgtccctgtgttcgttctcgccttcgcctctggagctgccatcgccgccgctacagcaacctactgaattcatcgatggcgcgccgccgcggtgcagcttcccggatgacgtgcagtcgttcttcgatttcaagaacgataacgacatgagcttcgtctacgcggaggttgacacattcctcttcggcgacctaggcgcatacgctccgccaatgttcgacttcgacctgtacgagtgatcaggatccgactgccagcgttccaagacgccagtgttgttaaaatggcttcataatttttgtttatgatgatgatgagatgactgctatcaaggtttacttgaaagaggtaggattagttatttattctcgcccttttttcaaatagctagaagaggaaaatatgcttctctttttttcttttttccctaaaaggctcaaaggtgtatacaagtcgtcacgaagaactaattgacattgatgacatctctactattataatgcaa

SEQ ID NO: 9498 - DNA, 611 bp, Zea Mays
agaatttgtgaggtaccacggtccagccaaagcccacaaggagcaaacaacaacagaacatgaatcgtcacttcctccggctccggcgatctcctccaccgccgttgtcagcggtccggccgagatggggagcacttcctctatgctcacccaatacgatatcgaggaggtccaggaccattgtaaccacgcattctcgcagcaggagatcgtgtcgctgtaccaccgcttctgccagctcgaccgcaacggaggtggcttcgtctccgctgacgagttcatgtcggtacctgagttcgccgtaaatcccctctcccagaggctcctgaggatgctggatggtctcaacttcaaggagtttgtagcatttttgtcggcttttagcccccgcacaagcctacaggaaaagattgaatttattttcagggtttatgatactgactgcaacgggaaggttgcttttgatgacatcttaagcatcttgcgagatctgacaggttcatttatgacagagcaacagagacagattattggcaattctgagctcaagatggaggttgaagttcctattgactaaaaaccaaataagtatcatctagttgtatcgtgat

SEQ ID NO: 9499 - DNA, 1164 bp, Zea Mays
acgaataactcataacgccctctccgtccccgaccagaatcgtcacttcctccggctccggcgatctcctccaccgccgttgtcagcggtccggccgagatggggagcacttcctctatgctcacccaatacgatatcgaggaggtccaggaccattgtaaccacgcatgagatcgtgtcgctgtaccaccgcttctgccagctcgaccgcaacggaggtggcttcgtctccgctgacgagttcatgtcggtacctgagttcgccgtaaatcccctctcccagaggctcctgaggatgctggatggtctcaacttcaaggagtttgtagcatttttgtcggcttttagcccccgcacaagcctacaggaaaagattgaatttattttcagggtttatgatactgactgcaacgggaaggttgcttttgatgacatcttaagcatcttgcgagatctgacaggttcatttatgacagagcaacagagacagaaagtcttgactcatgtgttagaagaagctgggtacacaaaaaattcacatttcacactcccagactttatgaagattattggcaattctgagctcaagatggaggttgaagttcctattgactaaaaaccaaataagtatcatctagttgtatcgtgatgtgttgccgagagccccagacctgtatgttcatttgtgttgaattaagtctatggtgtatttatatccttgtaaatcaaatcatgatcatagatgtaattaaggaaacaaatgtacctgttatttggaggattagttgacttgcgctgatactccttaaggcttgtttggaagtaaggatattggaggagattgagagctgatttggtgaccagagaattggaaggattcatagggaggaatccttcgcaattcaaaattaaatagcaagaagattcctctctcatggatcctctctaaatccctagtcctaaaccagtcctgagggagctagaatcacttactatttaaaattgaatagtaggagattctagatctctcaatcccctacttgtgctcttaaacaagccctaatacttgttatacgccatgtgatagtccggataatcatattgatgtatggttcaccgctacacacattatgtcggaaaaaacagatgatcaagtcatcactg

SEQ ID NO: 9500 - DNA, 1160 bp, Zea Mays
ctgtgtaacatttccttcatctcatcggtactaacagaatttgtgaggtaccacggtccagccaaagcccacaaggagcaaacaacaacagaacatgaatcgtcacttcctccggctccggcgatctcctccaccgccgttgtcagcggtccggccgagatggggagcacttcctctatgctcacccaatacgatatcgaggaggtccaggaccattgtaaccacgcattctcgcagcaggagatcgtgtcgctgtaccaccgcttctgccagctcgaccgcaacggaggtggcttcgtctccgctgacgagttcatgtcggtacctgagttcgccgtaaatcccctctcccagaggctcctgaggatgctggatggtctcaacttcaaggagtttgtagcatttttgtcggcttttagcccccgcacaagcctacaggaaaagattgaatttattttcagggtttatgatactgactgcaacgggaaggttgcttttgatgacatcttaagcatcttgcgagatctgacaggttcatttatgacagagcaacagagacagattattggcaattctgagctcaagatggaggttgaagttcctattgactaaaaaccaaataagtatcatctagttgtatcgtgatgtgttgccgagagccccagacctgtatgttcatttgtgttgaattaagtctatggtgtatttatatccttgtaaatcaaatcatgatcatagatgtaattaaggaaacaaatgtacctgttatttggaggattagttgacttgcgctgatactccttaaggcttgtttggaagtaaggatattggaggagattgagagctgatttggtgaccagagaattggaaggattcatagggaggaatccttcgcaattcaaaattaaatagcaagaagattcctctctcatggatcctctctaaatccctagtcctaaaccagtcctgagggagctagaatcacttactatttaaaattgaatagtaggagattctagatctctcaatcccctacttgtgctcttaaacaagccctaatacttgttatacgccatgtgatagtccggataatcatattgatgtatggttcaccgctacacacattatgtcggaaaaaacagatgatcaagtcatcactg

SEQ ID NO: 9501 - DNA, 1298 bp, Zea Mays
ctgtgtaacatttccttcatctcatcggtactaacagaatttgtgaggtaccacggtccagccaaagcccacaaggagcaaacaacaacagaacatgaatcgtcacttcctccggctccggcgatctcctccaccgccgttgtcagcggtccggccgagatggggagcacttcctctatgctcacccaatacgatatcgaggaggtccaggaccattgtaaccacgcattctcgcagcaggagatcgtgtcgctgtaccaccgcttctgccagctcgaccgcaacggaggtggcttcgtctccgctgacgagttcatgtcggtacctgagttcgccgtaaatcccctctcccagaggctcctgaggatgctggatggtctcaacttcaaggagtttgtagcatttttgtcggcttttagcccccgcacaagcctacaggaaaagattgaatttattttcagggtttatgatactgactgcaacgggaaggttgcttttgatgacatcttaagcatcttgcgagatctgacaggttcatttatgacagagcaacagagacagaaagtcttgactcatgtgttagaagaagctgggtacacaaaaaattcacatttcacactcccagactttatgaagtaaagcatgatcttaccaagcatattggtgtcgacgctcattatacacgagcactaatacaagattattggcaattctgagctcaagatggaggttgaagttcctattgactaaaaaccaaataagtatcatctagttgtatcgtgatgtgttgccgagagccccagacctgtatgttcatttgtgttgaattaagtctatggtgtatttatatccttgtaaatcaaatcatgatcatagatgtaattaaggaaacaaatgtacctgttatttggaggattagttgacttgcgctgatactccttaaggcttgtttggaagtaaggatattggaggagattgagagctgatttggtgaccagagaattggaaggattcatagggaggaatccttcgcaattcaaaattaaatagcaagaagattcctctctcatggatcctctctaaatccctagtcctaaaccagtcctgagggagctagaatcacttactatttaaaattgaatagtaggagattctagatctctcaatcccctacttgtgctcttaaacaagccctaatacttgttatacgccatgtgatagtccggataatcatattgatgtatggttcaccgctacacacattatgtcggaaaaaacagatgatcaagtcatcactg

SEQ ID NO: 9502 - DNA, 786 bp, Zea Mays
ctgtgtaacatttccttcatctcatcggtactaacagaatttgtgaggtaccacggtccagccaaagcccacaaggagcaaacaacaacagaacatggtatggcaaggcaaacttaaaccagtatgcagatttggacggagtacaataatgctcaacagctcaagactgcttttgacgtacgaataactcataacgccctctccgtccccgaccagaatcgtcacttcctccggctccggcgatctcctccaccgccgttgtcagcggtccggccgagatggggagcacttcctctatgctcacccaatacgatatcgaggaggtccaggaccattgtaaccacgcattctcgcagcaggagatcgtgtcgctgtaccaccgcttctgccagctcgaccgcaacggaggtggcttcgtctccgctgacgagttcatgtcggtacctgagttcgccgtaaatcccctctcccagaggctcctgaggatgctggatggtctcaacttcaaggagtttgtagcatttttgtcggcttttagcccccgcacaagcctacaggaaaagattgaatttattttcagggtttatgatactgactgcaacgggaaggttgcttttgatgacatcttaagcatcttgcgagatctgacaggttcatttatgacagagcaacagagacagaaagtcttgactcatgtgttagaagaagctgggtacacaaaaaattcacatttcacactcccagactttatgaagctggaaggaagcaccattttttcattgacaa

SEQ ID NO: 9503 - DNA, 1818 bp, Zea Mays
ctaataatagcatacgcacacagtcagtcaaggatctcagtcagtcaaggtcgtcctaataaaaaaaaggagcgagaaggtgagattcttcccgcttgcatgggcggcccagagcatacgctaaggctaggtgttttcattggtatggtgagattacgacagcaaagcaagtggtcgaggacgaggagggtagtatctttgaaagaatcatacggaatttgtcatgggaaaagccgtaaactaacaacgaacggacggaggacccattgcagttgcagtccacggctgttacaaccaggattgcccgccgccgtcgaatcgggaagttgaatattccatcgcgtgattagaggtcggttggtaaagatcatcttgcagtcagcagtcgagcgaaactgaccttttcttgcccatgcatgttctttgtttgaaaataccggatggtggagtagtagtgtaaatattctacatgtttcgtaatagatgcttgcatgactcgccaatattcttattctacatgtaatgatgtggtaagagagatgcatgcatggttacttcttgtgtggtaaatgatgatcgatctaggtaggaccttggagatgacctaccgcagaggtcaccccctcccccaccaagcctgaagaaaaataaatttgctgcgagttgatgaagaaaattcctaggaagtttctgcggcgttccttcctctgtttcgtagatttgattaagctgcttacttgatagaaactagtatttctttgttttttttatttatcgcgttttagttaaaaaaaataaactagtggtcgacaaatattcgagaagttaagttctagacatacgtgcgttgcctgtacctccgtgaccgagcggtttctcttatagtgctaggtagaaagaacccaactctctgctccacatggcacacgcaggcctgcaacggaggaaccgaacagctagcagctgtgacatggttgcaggttgcagcacaaaacgcagacgcgagcaaatgcatctgctccggcctccgggtatactactacctactacacaagtcacgaatggtggtgacggcgatgacgacgtgatgtatggcagaaaaacggccttgccccgattggccaaagcgaacacggatggcatctagtacgcgtagtataatagtagctacacgctacttctccgtctccgagacgacgctgacgtacgctacagatttctaccgctccggacagatacgtttcgaagtggtcgcacgtactctatctagctaccgcttcgtgtggcagtaattgaggtctagagtattggccaccgccgtgagctagctagctagctagctgacttgcactagcatgcaaatattggtggcgtgtggtgtgtactagccgcgtctaccaactagctagcttgcacaggacgcgctctagccagtgtcagcgtcagtgatgatacacacaaaagagtggttcacctgaaccgccccccatacgttcgcccttcttcagctgacggccgctttgctttcgtgtgcagcacaagagccggccgatgaggtggatcgagcagtgtacgcgtaagtgaccggccgggccctgtccatcgttcacctactacgctgggatccaccggagtttaatttgcagtgtagtacgagtactaccacgctttgcttaattgctcgcgtcacctaattaataccaccagtggattcctatccaccggttcctaagcaagcaagcaagcaatgagtactatgaaatcagacctggctgggacggggtactcggggaagagcttggcgaggatgcggacgac

SEQ ID NO: 9504 - DNA, 1618 bp, Zea Mays
ggcccaccacctgtgtcctttcccctcccgcaagcgaaagccccaaacaaatcccccgcacgcctccgcagccgacgatgaccaccgccgcggacgccgacgtcgacgactaccaccactccgacggattcgtcatgtccgacgtcctcgccaagggccgggaggcctgctacaaggcacgggatgccttctacgcgtgcatagagaagcacgcggacaaaaagcccaccgagatcgccaccatgggtctcctctaccccgccgactgcaaaaagtcccgcgccgacttcgtcagcaactgccgccccacctgggtcaagcacttcgaccggcagtactgcgccaagaagcgggtgcagaggttgctcgacggcgatggggaccgccggggccccatgtcgctgccccagccctacaccttcaagcaataggaaactgaactataaagtaaacatcacaccctgatgatgtttgaagttccaccgtcatccctgaatcacaccgtgtctacaatgtctaatttttattctcaacaattctttctcttccttcataacaatgtaaataaagctctatgtgtagttttggtaattaatataactaggtggactaacatgttttatgagttccatgaatgagataggatgaagtccacaaagataagcaggtgctctacaagaatgaagattgataagagtaagacaaatgaagtgcctgacattgttggatctgggagatcattgatgctgcaggagcagagacttgtagaaaatcgtaaaagtaagatgcaaggcaaaggtataagctaggatattttgttttaccagtcaaggtataatagagtgtgtgattggatttaggataagtagttgtagtagtaatgtattaggacctaatgaatctgtgaagaacaatcttagacatcattgacttaggctaaatcatgatctaaagtgtttaaacaagcaggggttatgacttgttaaaagatggaaagatatttgacaaacagagggcgtcataccctaactgttgatggtgtcggactagtatagtgtcaatccaaccactaagtgtagagctttagcagagggttcatcagaccttgagctatggttcgatagtgggtgccagaataatacaactgactaggttactctctagaatgctcagacccgttgtctttggttcgacaattgagaaaaatgcagcatcatacaatacaatcacactattgaccatggggtcccactcataggtaaccgttgtgactaggaacaggggcatcggaccatggtgtttggttctgatggtggtcgtttgactagtttgatggcagaataatacagtcacgcttgctattacatattgtttcatcatcatattgtgaagtattctctattacttagtacactttcgcatataagttttattttagtttttgtgttaacttttattagagaaagaattttataggctatccaccccctattgccatctagatcctatcgagctgccagcagggtgggcagggccgccatgggtgggtgaagctgatacttgtaaggtggggtgctagccaatatggccgacatctattgctaggtttgctgctggc

SEQ ID NO: 9505 - DNA, 2726 bp, Zea Mays
accgctataaaagctgggcgccgcagagctgactctcctcgccacccaaaagccaccgcgatcccgtgcttccttctcgcacctgcggatctactctccgcacctgcggatctaccccccggcgaaacaagcgccccgacgcctcagggaatgcggagcgatgaggcggcgctcaggcactgacgtcgccggtcagcgcgagctgcgcggcgaccgaacctgccatcgcaagcacgtcgaggacgggtagactcgtccatccttccttcctcctgttagtcgtcgtagggtagtttgcactttgcagatagctagctagtagttaggggatcaggcatgggtgagggcgaggcggaggtgaagggcggggtgctgcagggccgctacgagctcggccgcgtgctgggtcacggcaacttcgggcgcgtccacgcggcgcgggacctgcgcaccgggcgggccgtggcggtgaaggtgctcgacaaggacaagatgctgcgcacgggcatgatggagcagatcaagcgcgagatcgccgtcatgaagcgcgtgtcccaccccaacatcgtggagctccacgaggtgatggccacgcgctccaagatctacctcgcgctggagctcgtccgcggaggggagctcttcgcgcggatcgtgcgcgccgggcgcgtcaaggaggacgtggcgcggcgctacttccggcagctcatacacgccgtggacttctgccacgcgcggggcgtgtaccaccgcgacctgaagctcgagaacctcctcctggacgacgcggggaacctcaaggtcgtcgactttggcctcagcgcgctggccgaccacgcgcgcagcgacgggctgctgcacacgctctgcggcacgcccgggtacgtcgcgccggaggtgttccggaacaagggctacgacggcgccaaggctgacatctggtcgtgcggcgtcatcctctacgtcctcctcgcagggtcgctgccgttcccggacgacaacgttgccgccatgttccggaagatgagccgcggcgactaccggtgcccgccgtggctgtccacggaggcgcgcaggctcatccccaagctgctcgaccccgaccccgacacccgcatcaccatcgcccagctcgtcgagacgccgtggttcaacaagccgtccgtctcgaggtccgtcagagccgccgccggcgcaaccgagccgccggccgagcctgcctcctccgcaaaggacggcggcgacaaggacgagccaccggagacgatgaacgcgttccacctgatctccctctccgcggggttcgacctctcaccgctgttcgacgtggaaggcggtccggcgagggggccccgggagggcggcatgcggttcgcgacgcgggagcccgcgagcggcgtcgtctcccgtctcgaggaggtggccgcccgcggcggcgggcggatgcgggtgaccaagagcggcgcccgcggcgttcggctcgagggcgcggagcgcgggggccgcaagggccggctagccgtggcggccgacatcttctgcgtggcgccgtcggtgctcgtcgtcgacgtgaagaaggacggcggcgactccctcgagtaccgctccttctgcagcgaggagctccggccggcgctcaaagacatcgtctgggcggccgacccccagcccgccgtcgtgtgacgcccgtgctgccgcctgcccgctcattgtttctggatcgtagtggtgccatagtttagtcagtgtcagttccatttccaaagtgattgcgtcactgttctcgattcgataatgatgtgagatctactgtttgtgggggggggggggggggggcgtcaagaatatgtatctccctcggcataattgcgttttattattattattgtgatggtttattatgcatggtttattatggacgcatcggctaaaggacgtgccaaatttcttgtggaaagctgccctatgcagttttgttgaggggctagggttcatttccaagctccatgctctcttaagcctgtaacgccatacgagatgtgtctcgagacaggcctgtcacgaatcaggaccgatcgccccgcgctgatagtagagccgacgggggaaaggagacaatctgccccggcagccagtggtctggatggaccacttgggacctggcctcctccgtctctcaaaacgtgtggtgcagccgtgcaggcgggcggcggggggcgctgtggatggataccgtatctctccggtggtggcctggtggtccgtggtgtctggcctctttcagttcccagccctccagcctctcggcgtcgtccgctccgccgctctcgccgagaaaaggcatcggcgggcaggaaacttctccaggcaaattcacgtttcgcaacgagaagtcgctgtttgggccacggcatagctgacgtgtggagtagctctggcagattcagatatcaatcatcgtctacatttcctgtttggaaggggggaaaaaggaatttagtggatccaatcggttacatttctacccgtgtgctcatggggcgacaggtgctcactggtccaatctaaggacaaggttggctcgtagcgctccagcatgcatggttaggccggatgcagtgtgtggcttttatcaatcaccagttcaccacatcagtaccgatcctgctagctagatcatcgttagttgttacctactataaaaatgtaattcataaaaataaaat

SEQ ID NO: 9506 - DNA, 888 bp, Zea Mays
aaaaccacagccgcgacgccgacgcgcaccgaacaacagctccgagaacgtatcgcccacaatcctccacgtctaccgcaatctgtcactatagcctgcgcattcgcatccgggcatccggcatcccaccccacccacctccttcctcttcccgcccgctaaaacccacgccaccgccgcgcgccgccggcagcgcaagggacgcacgatggccatgcaggtggtgcgcaacctcgacctggagcggtacgcggggcggtggtacgagatcgcgtgcttcccgtcccggttccagcccaagacgggcaccaacacgcgcgccacctacacgctgaacccggacggcactgtgaaggtggtgaacgagacgtgggccgacgggcgccgcggccacatcgagggcacggcctggcgcgccgaccctgccagcgacgaggccaagctcaagatcctttgcaggcagcctcacatggacgagtccgtgtacaaggaactggtggagcgtgccaaggaggaagggtacgacgtgtcgaagctccgcaagacggcgcaccctgacccgccgccggagagcgagcagagccccagggacggcgggatgtggtgggtcaagtccatctttggcaagtagccttgtggtggtgggtggcagcgcgggtgctgccgtgccgagcaggcgagcgcacgcaagagatgcctgtgaccgtcggttccgcgtgtacattcagcactagctggggattaagttggttcgttgttgctgtcgcgatctgcaaatggcgaaaagtgtgcttgtttcttgcccgtctgtattgtatcgaactttgagcgaatgtttcagtttgctgcatcatttgtttgtcatgtgctgaattccctgcttgaccg

SEQ ID NO: 9507 - DNA, 833 bp, Zea Mays
agaaataaccacgagacaccacttcctagcttcccttcccctcggctgccctcaaaaccccctcaaaatcctccgaaccccgccgccgacgagcgagctatggcgctggcgcggcggctgctccgccttactccctacctcggcacgctctcgctcccaccccccaactcgcatctcctccggaatcgcacctatatctctgacatgcgccgctctgccttcgtcgaccgcttgctccgttccgtacgctccgagatctccttcctcgataactccgccccgccaccgccaccaccgcctcctaagccattcaccattgaggaccgcccgggcgagcagtgggcccgcctgcgccgcgtgttccctgcggccgagggggaggaagaggaggtcagggtggacgccacgttggtcgacggcgcgctccctccctcccgctcgggcgcggacacgggcggcccgcccagaatgcatatcagtgttaaggttgaggtctccaaggccgcgcggcctggagtggcgctcaccttcgagtgctccgcgtggcctgacgagatggaggtgcggagggtctttcccgtccgccgcggcgggcctgccccagtgcagcagtacgtcggccgccaattcagtgagttggatgaggaaatgcaaagtgccgtacaagactacctggagaaaattggagtgaatgatgaccttgctgcatttttgcacgcctacatggaaaacaaggagcacactgaactgatcagatggctgaaaaacgttgagtgccatatcaagaagtgaacattctagtcggaggtcttcctagccgatgtaggtcggcc

SEQ ID NO: 9508 - DNA, 1249 bp, Zea Mays
agaaataaccacgagacaccacttcctagcttcccttcccctcggctgccctcaaaaccccctcaaaatcctccgaaccccgccgccgacgagcgagctatggcgctggcgcggcggctgctccgccttactccctacctcggcacgctctcgctcccaccccccaactcgcatctcctccggaatcgcacctatatctctgacatgcgccgctctgccttcgtcgaccgcttgctccgttccgtacgctccgagatctccttcctcgataactccgccccgccaccgccaccaccgcctcctaagccattcaccattgaggaccgcccgggcgagcagtgggcccgcctgcgccgcgtgttccctgcggccgagggggaggaagaggaggtcagggtggacgccacgttggtcgacggcgcgctccctccctcccgctcgggcgcggacacgggcggcccgcccagaatgcatatcagtgttaaggttgaggtctccaaggccgcgcggcctggagtggcgctcaccttcgagtgctccgcgtggcctgacgagatggaggtgcggagggtctttcccgtccgccgcggcgggcctgccccagtgcagcagtacgtcggccgccaattcaggcttccaaagtccactgctcccctccagacttccaatccagcacgtgggaatccaatctcgagttccaggcttccagcacgcgcgaatccagttcaccgacggactccagacttcatccttcaatctccagcacgcgcgaatccagtttttttcgtcggcatgagttcatcttctggagagtttggtcgtcgccgtcaggataatgttgaggtgatcttcccagaatcacaagttgtgggcagcggcaatccatcttctgttgcggataacacagttcttgcttcggcatcatcagcctcagccgctgcagattctgcagctctcgttgataaggctattgcaaagttgcctgctgatgttcgtgcacacgcaactggtatctgggacttgtagtattaataactatgagttggatgaggaaatgcaaagtgccgtacaagactacctggagaaaattggagtgaatgatgaccttgctgcatttttgcacgcctacatggaaaacaaggagcacactgaactgatcagatggctgaaaaacgttgagtgccatatcaagaagtgaacattctagtcgggagaagatgaggtgggtccactggttgccagacatgtg

SEQ ID NO: 9509 - DNA, 1322 bp, Zea Mays
agaaataaccacgagacaccacttcctagcttcccttcccctcggctgccctcaaaaccccctcaaaatcctccgaaccccgccgccgacgagcgagctatggcgctggcgcggcggctgctccgccttactccctacctcggcacgctctcgctcccaccccccaactcgcatctcctccggaatcgcacctatatctctgacatgcgccgctctgccttcgtcgaccgcttgctccgttccgtacgctccgagatctccttcctcgataactccgccccgccaccgccaccaccgcctcctaagccattcaccattgaggaccgcccgggcgagcagtgggcccgcctgcgccgcgtgttccctgcggccgagggggaggaagaggaggtcagggtggacgccacgttggtcgacggcgcgctccctccctcccgctcgggcgcggacacgggcggcccgcccagaatgcatatcagtgttaaggttgaggtctccaaggccgcgcggcctggagtggcgctcaccttcgagtgctccgcgtggcctgacgagatggaggtgcggagggtctttcccgtccgccgcggcgggcctgccccagtgcagcagtacgtcggccgccaattcagagtttggtcgtcgccgtcaggataatgttgaggtgatcttcccagaatcacaagttgtgggcagcggcaatccatcttctgttgcggataacacagttcttgcttcggcatcatcagcctcagccgctgcagattctgcagctctcgttgataaggctattgcaaagttgcctgctgatgttcgtgcacacgcaactggtatctgggacttgtagtattaataactatgagttggatgaggaaatgcaaagtgccgtacaagactacctggagaaaattggagtgaatgatgaccttgctgcatttttgcacgcctacatggaaaacaaggagcacactgaactgatcagatggctgaaaaacgttgagtgccatatcaagaagtgaacattctagtcgggttaatactttgtcctacagcacttgcagatgcagcttttgatcgcaatcttggaactttactaggccccatttaaatccttagaattgattaagctcatattgttgtatgagaaatatcacgcctacatggaaaacagggatcatactgaacttatcagatgactgaaaaacgtagtgccatatcaaaaaaaattgcattctagttgtgttaatactttgtcaacttaagggacgacgtaattttttttaagttaagttactgtagggagggcctacaatatttttatt

SEQ ID NO: 9510 - DNA, 704 bp, Zea Mays
agaaataaccacgagacaccacttcctagcttcccttcccctcggctgccctcaaaaccccctcaaaatcctccgaaccccgccgccgacgagcgagctatggcgctggcgcggcggctgctccgccttactccctacctcggcacgctctcgctcccaccccccaactcgcatctcctccggaatcgcacctatatctctgacatgcgccgctctgccttcgtcgaccgcttgctccgttccgtacgctccgagatctccttcctcgataactccgccccgccaccgccaccaccgcctcctaagccattcaccattgaggaccgcccgggcgagcagtgggcccgcctgcgccgcgtgttccctgcggccgagggggaggaagaggaggtcagggtggacgccacgttggtcgacggcgcgctccctccctcccgctcgggcgcggacacgggcggcccgcccagaatgcatatcagtgttaaggttgaggtctccaaggccgcgcggcctggagtggcgctcaccttcgagtgctccgcgtggcctgacgagatggaggtgcggagggtctttcccgtccgccgcggcgggcctgccccagtgcagcagtacgtcggccgccaattcagactatctgcaattcagcacccgttcctccacatgttcctttaccggtgataccgtagaggaatagagagaaa

SEQ ID NO: 9511 - DNA, 1187 bp, Zea Mays
ctcactagttcccaggcagtgcggatgggttcctgtttctccagattggatgctggtgttatttcctctggaagatctgtgctggagcgcactcgattggtcaatatttcgattgtcgaattcggtgcggaacaagtaaatgaaaaacaaaacagaaaaagaaaaggagtcagtacaaacctgaccagcaggaaagcacaacgtggccctactaaagcagtttccaaggaagtagaacggattgatcaatttttctatacttatgccgataactcatctgtcatgattgacccagaaggcattgaaacactctgttctcaccttgaagttccccacaccgacgttaggattctaatgttagcatggaaaatgggctgtgagaagcaaggttattttaccttggatgaatggagagctggtttgaaagctcttcgagcagacagcatcagtaaactgaagaaagcatttcctgaactggttcaagaggttacaaggccgtcaaatttccaggatttctacatatatgcatttcgttattgcctcacagaggataagaagaagtgtatagaaataccagttgcttgtgagttgctgaatctagtattaggcttgcagttccgccctcaggttgacaagcttagtaattacctcaaggcaatggattctacttttttatgtggttctactcatcctttcttcatgaagactcggtgctcaattgacatgctatatttggactgtgtttcagtaccaaaatgactacaagataaacttcccatcacttgacaattatgattcagaccttgcttggcctttgattctagacaattttgttgagtggctaagagaaaataaaagctagatcttctattcatgtggtggtgaagttgtcattcaaaatgtaatattcaagaattttctgcaccctggaggatgccgattcggcttgtttccggttgcttcggtggaggctgctcccagaaaatttaaagccttctcatgtcatcttttgattttgcatatttttaaaactggaaacggtctgcatctgtctgtaaaatttgtatcaggatgctatatttaatggccatgtcatgttaatcagtcttggtagagttttaagatcttgcaagttgcaaatatttccatagattataaataaaaagaaattaactggcgagttcatc

SEQ ID NO: 9512 - DNA, 1080 bp, Zea Mays
aaaaaaataaaatcgaatgcccctccgtcttcctccccttttgttctcccacaacgaactcggggctcgcacccagaagggagagaactcgtcgcgacgaggagagaagaacctgaggtggtcccgaatcagacgcggaagagggtgggttcaggagcaagccagcctgccgccaccatgaggcgcgcctcgaagaaatccttgtcgtctgccgcgaccgctagcgctggccctactaaagcagtttccaaggaagtagaacggattgatcaatttttctatacttatgccgataactcatctgtcatgattgacccagaaggcattgaaacactctgttctcaccttgaagttccccacaccgacgttaggattctaatgttagcatggatgaatggagagctggtttgaaagctcttcgagcagacagcatcagtaaactgaagaaagcatttcctgaactggttcaagaggttacaaggccgtcaaatttccaggatttctacatatatgcatttcgttattgcctcacagaggataagaagaagtgtatagaaataccagttgcttgtgagttgctgaatctagtattaggcttgcagttccgccctcaggttgacaagcttagtaattacctcaagtaccaaaatgactacaagataaacttcccatcacttgacaattatgattcagaccttgcttggcctttgattctagacaattttgttgagtggctaagagaaaataaaagctagatcttctattcatgtggtggtgaagttgtcattcaaaatgtaatattcaagaattttctgcaccctggaggatgccgattcggcttgtttccggttgcttcggtggaggctgctcccagaaaatttaaagccttctcatgtcatcttttgattttgcatatttttaaaactggaaacggtctgcatctgtctgtaaaatttgtatcaggatgctatatttaatggccatgtcatgttaatcagtcttggtagagttttaagatcttgcaagttgcaaatatttccatagattataaataaaaagaaattaactggcgagttcatc

SEQ ID NO: 9513 - DNA, 1117 bp, Zea Mays
aaaaaaataaaatcgaatgcccctccgtcttcctccccttttgttctcccacaacgaactcggggctcgcacccagaagggagagaactcgtcgcgacgaggagagaagaacctgaggtggtcccgaatcagacgcggaagagggtgggttcaggagcaagccagcctgccgccaccatgaggcgcgcctcgaagaaatccttgtcgtctgccgcgaccgctagcgctggccctactaaagcagtttccaaggaagtagaacggattgatcaatttttctatacttatgccgataactcatctgtcatgattgacccagaaggcattgaaacactctgttctcaccttgaagttccccacaccgacgttaggattctaatgttagcatggaaaatgggctgtgagaagcaaggttattttaccttggatgaatggagagctggtttgaaagctcttcgagcagacagcatcagtaaactgaagaaagcatttcctgaactggttcaagaggttacaaggccgtcaaatttccaggatttctacatatatgcatttcgttattgcctcacagaggataagaagaagtgtatagaaataccagttgcttgtgagttgctgaatctagtattaggcttgcagttccgccctcaggttgacaagcttagtaattacctcaagtaccaaaatgactacaagataaacttcccatcacttgacaattatgattcagaccttgcttggcctttgattctagacaattttgttgagtggctaagagaaaataaaagctagatcttctattcatgtggtggtgaagttgtcattcaaaatgtaatattcaagaattttctgcaccctggaggatgccgattcggcttgtttccggttgcttcggtggaggctgctcccagaaaatttaaagccttctcatgtcatcttttgattttgcatatttttaaaactggaaacggtctgcatctgtctgtaaaatttgtatcaggatgctatatttaatggccatgtcatgttaatcagtcttggtagagttttaagatcttgcaagttgcaaatatttccatagattataaataaaaagaaattaactggcgagttcatc

SEQ ID NO: 9514 - DNA, 1671 bp, Zea Mays
aaaaaaataaaatcgaatgcccctccgtcttcctccccttttgttctcccacaacgaactcggggctcgcacccagaagggagagaactcgtcgcgacgaggagagaagaacctgaggtggtcccgaatcagacgcggaagagggtgggttcaggagcaagccagcctgccgccaccatgaggcgcgcctcgaagaaatccttgtcgtctgccgcgaccgctagcgctggccctactaaagcagtttccaaggaagtagaacggattgatcaatttttctatacttatgccgataactcatctgtcatgattgacccagaaggcattgaaacactctgttctcaccttgaagttccccacaccgacgttaggattctaatgttagcatggaaaatgggctgtgagaagcaaggttattttaccttggatgaatggagagctggtttgaaagctcttcgagcagacagcatcagtaaactgaagaaagcatttcctgaactggttcaagaggttacaaggccgtcaaatttccaggatttctacatatatgcatttcgttattgcctcacagaggataagaagaagtgtatagaaataccagttgcttgtgagttgctgaatctagtattaggcttgcagttccgccctcaggttgacaagcttagtaattacctcaaggcaatggattctacttttttatgtggttctactcatcctttcttcatgaagactcggtgctcaattgacatgctatatttggactgtgtttcagtaccaaaatgactacaaggtgataaacatggatcagtggatgggatttatgcggttctgtaatgagataaacttcccatcacttgacaattatgattcagaccttgcttggcctttgattctagacaattttgttgagtggctaagagaaaataaaagctagatcttctattcatgtggtggtgaagttgtcattcaaaatgtaatattcaagaatgtaggtgactatatatatcattgtttacatttgtaagaccattttttgcccacctacttgtatatactgtcagtaatgcaaacttaggctccaataaacctactatttcacctcttattttaatctccactctgtaaatagtgtacagtgcaaaacaatattttgtacaatcatatgcatgatctggtgagcacggtcttactgaattatgtgtttagtagcagttttggcagccaccgagccacgttccattccacttgactgttcaagagttttagcctgatttacaattatgtcaactagtaaaaaacaacttaagtttgcaagcatgcatagtatgaacggggaattctccttttctttctttctatgtagaaattctctatgctcattacgatttgctatgctgtagtttctgcaccctggaggatgccgattcggcttgtttccggttgcttcggtggaggctgctcccagaaaatttaaagccttctcatgtcatcttttgattttgcatatttttaaaactggaaacggtctgcatctgtctgtaaaatttgtatcaggatgctatatttaatggccatgtcatgttaatcagtcttggtagagttttaagatcttgcaagttgcaaatatttccatagattataaataaaaagaaattaactggcgagttcatc

SEQ ID NO: 9515 - DNA, 1375 bp, Zea Mays
aaaaaaataaaatcgaatgcccctccgtcttcctccccttttgttctcccacaacgaactcggggctcgcacccagaagggagagaactcgtcgcgacgaggagagaagaacctgaggtggtcccgaatcagacgcggaagagggtgggttcaggagcaagccagcctgccgccaccatgaggcgcgcctcgaagaaatccttgtcgtctgccgcgaccgctagcgctggtgcggaacaagtaaatgaaaaacaaaacagaaaaagaaaaggagtcagtacaaacctgaccagcaggaaagcacaacgtggccctactaaagcagtttccaaggaagtagaacggattgatcaatttttctatacttatgccgataactcatctgtcatgattgaaaggcattgaaacactctgttctcaccttgaagttccccacaccgacgttaggattctaatgttagcatggaaaatgggctgtgagaagcaaggttattttaccttggatgaatggagagctggtttgaaagctcttcgagcagacagcatcagtaaactgaagaaagcatttcctgaactggttcaagaggttacaaggccgtcaaatttccaggatttctacatatatgcatttcgttattgcctcacaggtattgttgcatgctattgtatgttgtaactccaaagcaaagtgattaaggtggctgcttttcataactaatgattatgtttcctcagaggataagaagaagtgtatagaaataccagttgcttgtgagttgctgaatctagtattaggcttgcagttccgccctcaggttgacaagcttagtaattacctcaaggcaatggattctacttttttatgtggttctactcatcctttcttcatgaagactcggtgctcaattgacatgctatatttggactgtgtttcagtaccaaaatgactacaagataaacttcccatcacttgacaattatgattcagaccttgcttggcctttgattctagacaattttgttgagtggctaagagaaaataaaagctagatcttctattcatgtggtggtgaagttgtcattcaaaatgtaatattcaagaattttctgcaccctggaggatgccgattcggcttgtttccggttgcttcggtggaggctgctcccagaaaatttaaagccttctcatgtcatcttttgattttgcatatttttaaaactggaaacggtctgcatctgtctgtaaaatttgtatcaggatgctatatttaatggccatgtcatgttaatcagtcttggtagagttttaagatcttgcaagttgcaaatatttccatagattataaataaaaagaaattaactggcgagttcatc

SEQ ID NO: 9516 - DNA, 1222 bp, Zea Mays
aaaaaaataaaatcgaatgcccctccgtcttcctccccttttgttctcccacaacgaactcggggctcgcacccagaagggagagaactcgtcgcgacgaggagagaagaacctgaggtggtcccgaatcagacgcggaagagggtgggttcaggagcaagccagcctgccgccaccatgaggcgcgcctcgaagaaatccttgtcgtctgccgcgaccgctagcgctggccctactaaagcagtttccaaggaagtagaacggattgatcaatttttctatacttatgccgataactcatctgtcatgattgacccagaaggcattgaaacactctgttctcaccttgaagttccccacaccgacgttaggattctaatgttagcatggatgaatggagagctggtttgaaagctcttcgagcagacagcatcagtaaactgaagaaagcatttcctgaactggttcaagaggttacaaggccgtcaaatttccaggatttctacatatatgcatttcgttattgcctcacagaggataagaagaagtgtatagaaataccagttgcttgtgagttgctgaatctagtattaggcttgcagttccgccctcaggttgacaagcttagtaattacctcaaggcaatggattctacttttttatgtggttctactcatcctttcttcatgaagactcggtgctcaattgacatgctatatttggactgtgtttcagtaccaaaatgactacaaggtgataaacatggatcagtggatgggatttatgcggttctgtaatgagataaacttcccatcacttgacaattatgattcagaccttgcttggcctttgattctagacaattttgttgagtggctaagagaaaataaaagctagatcttctattcatgtggtggtgaagttgtcattcaaaatgtaatattcaagaattttctgcaccctggaggatgccgattcggcttgtttccggttgcttcggtggaggctgctcccagaaaatttaaagccttctcatgtcatcttttgattttgcatatttttaaaactggaaacggtctgcatctgtctgtaaaatttgtatcaggatgctatatttaatggccatgtcatgttaatcagtcttggtagagttttaagatcttgcaagttgcaaatatttccatagattataaataaaaagaaattaactggcgagttcatc

SEQ ID NO: 9517 - DNA, 1623 bp, Zea Mays
aaaaaaataaaatcgaatgcccctccgtcttcctccccttttgttctcccacaacgaactcggggctcgcacccagaagggagagaactcgtcgcgacgaggagagaagaacctgaggtggtcccgaatcagacgcggaagagggtgggttcaggagcaagccagcctgccgccaccatgaggcgcgcctcgaagaaatccttgtcgtctgccgcgaccgctagcgctggccctactaaagcagtttccaaggaagtagaacggattgatcaatttttctatacttatgccgataactcatctgtcatgattgacccagaaggcattgaaacactctgttctcaccttgaagttccccacaccgacgttaggattctaatgttagcatggaaaatgggctgtgagaagcaaggttattttaccttggatgaatggagagctggtttgaaagctcttcgagcagacagcatcagtaaactgaagaaagcatttcctgaactggttcaagaggttacaaggccgtcaaatttccaggatttctacatatatgcatttcgttattgcctcacagaggataagaagaagtgtatagaaataccagttgcttgtgagttgctgaatctagtattaggcttgcagttccgccctcaggttgacaagcttagtaattacctcaaggcaatggattctacttttttatgtggttctactcatcctttcttcatgaagactcggtgctcaattgacatgctatatttggactgtgtttcagtaccaaaatgactacaagataaacttcccatcacttgacaattatgattcagaccttgcttggcctttgattctagacaattttgttgagtggctaagagaaaataaaagctagatcttctattcatgtggtggtgaagttgtcattcaaaatgtaatattcaagaatgtaggtgactatatatatcattgtttacatttgtaagaccattttttgcccacctacttgtatatactgtcagtaatgcaaacttaggctccaataaacctactatttcacctcttattttaatctccactctgtaaatagtgtacagtgcaaaacaatattttgtacaatcatatgcatgatctggtgagcacggtcttactgaattatgtgtttagtagcagttttggcagccaccgagccacgttccattccacttgactgttcaagagttttagcctgatttacaattatgtcaactagtaaaaaacaacttaagtttgcaagcatgcatagtatgaacggggaattctccttttctttctttctatgtagaaattctctatgctcattacgatttgctatgctgtagtttctgcaccctggaggatgccgattcggcttgtttccggttgcttcggtggaggctgctcccagaaaatttaaagccttctcatgtcatcttttgattttgcatatttttaaaactggaaacggtctgcatctgtctgtaaaatttgtatcaggatgctatatttaatggccatgtcatgttaatcagtcttggtagagttttaagatcttgcaagttgcaaatatttccatagattataaataaaaagaaattaactggcgagttcatc

SEQ ID NO: 9518 - DNA, 1752 bp, Zea Mays
aaaaaaataaaatcgaatgcccctccgtcttcctccccttttgttctcccacaacgaactcggggctcgcacccagaagggagagaactcgtcgcgacgaggagagaagaacctgaggtggtcccgaatcagacgcggaagagggtgggttcaggagcaagccagcctgccgccaccatgaggcgcgcctcgaagaaatccttgtcgtctgccgcgaccgctagcgctggtgcggaacaagtaaatgaaaaacaaaacagaaaaagaaaaggagtcagtacaaacctgaccagcaggaaagcacaacgtggccctactaaagcagtttccaaggaagtagaacggattgatcaatttttctatacttatgccgataactcatctgtcatgattgacccagaaggcattgaaacactctgttctcaccttgaagttccccacaccgacgttaggattctaatgttagcatggaaaatgggctgtgagaagcaaggttattttaccttggatgaatggagagctggtttgaaagctcttcgagcagacagcatcagtaaactgaagaaagcatttcctgaactggttcaagaggttacaaggccgtcaaatttccaggatttctacatatatgcatttcgttattgcctcacagaggataagaagaagtgtatagaaataccagttgcttgtgagttgctgaatctagtattaggcttgcagttccgccctcaggttgacaagcttagtaattacctcaaggcaatggattctacttttttatgtggttctactcatcctttcttcatgaagactcggtgctcaattgacatgctatatttggactgtgtttcagtaccaaaatgactacaaggtgataaacatggatcagtggatgggatttatgcggttctgtaatgagataaacttcccatcacttgacaattatgattcagaccttgcttggcctttgattctagacaattttgttgagtggctaagagaaaataaaagctagatcttctattcatgtggtggtgaagttgtcattcaaaatgtaatattcaagaatgtaggtgactatatatatcattgtttacatttgtaagaccattttttgcccacctacttgtatatactgtcagtaatgcaaacttaggctccaataaacctactatttcacctcttattttaatctccactctgtaaatagtgtacagtgcaaaacaatattttgtacaatcatatgcatgatctggtgagcacggtcttactgaattatgtgtttagtagcagttttggcagccaccgagccacgttccattccacttgactgttcaagagttttagcctgatttacaattatgtcaactagtaaaaaacaacttaagtttgcaagcatgcatagtatgaacggggaattctccttttctttctttctatgtagaaattctctatgctcattacgatttgctatgctgtagtttctgcaccctggaggatgccgattcggcttgtttccggttgcttcggtggaggctgctcccagaaaatttaaagccttctcatgtcatcttttgattttgcatatttttaaaactggaaacggtctgcatctgtctgtaaaatttgtatcaggatgctatatttaatggccatgtcatgttaatcagtcttggtagagttttaagatcttgcaagttgcaaatatttccatagattataaataaaaagaaattaactggcgagttcatc

SEQ ID NO: 9519 - DNA, 1229 bp, Zea Mays
gtagagtggcaaaaaaataaaatcgaatgcccctccgtcttcctccccttttgttctcccacaacgaactcggggctcgcacccagaagggagagaactcgtcgcgacgaggagagaagaacctgaggtggtcccgaatcagacgcggaagagggtgggttcaggagcaagccagcctgccgccaccatgaggcgcgcctcgaagaaatccttgtcgtctgccgcgaccgctagcgctggtgcggaacaagtaaatgaaaaacaaaacagaaaaagaaaaggagtcagtacaaacctgaccagcaggaaagcacaacgtggccctactaaagcagtttccaaggaagtagaacggattgatcaatttttctatacttatgccgataactcatctgtcatgattgacccagaaggcattgaaacactctgttctcaccttgaagttccccacaccgacgttaggattctaatgttagcatggaaaatgggctgtgagaagcaaggttattttaccttggatgaatggagagctggtttgaaagctcttcgagcagacagcatcagtaaactgaagaaagcatttcctgaactggttcaagaggttacaaggccgtcaaatttccaggatttctacatatatgcatttcgttattgcctcacagaggataagaagaagtgtatagaaataccagttgcttgtgagttgctgaatctagtattaggcttgcagttccgccctcagtaccaaaatgactacaaggtgataaacatggatcagtggatgggatttatgcggttctgtaatgagataaacttcccatcacttgacaattatgattcagaccttgcttggcctttgattctagacaattttgttgagtggctaagagaaaataaaagctagatcttctattcatgtggtggtgaagttgtcattcaaaatgtaatattcaagaattttctgcaccctggaggatgccgattcggcttgtttccggttgcttcggtggaggctgctcccagaaaatttaaagccttctcatgtcatcttttgattttgcatatttttaaaactggaaacggtctgcatctgtctgtaaaatttgtatcaggatgctatatttaatggccatgtcatgttaatcagtcttggtagagttttaagatcttgcaagttgcaaatatttccatagattataaataaaaagaaattaactggcgagttcatc

SEQ ID NO: 9520 - DNA, 1273 bp, Zea Mays
ggatgacaattttcttctggccccatggctatggtgtgagtgacacaaattaaataggtgctatagtagagtggcaaaaaaataaaatcgaatgcccctccgtcttcctccccttttgttctcccacaacgaactcggggctcgcacccagaagggagagaactcgtcgcgacgaggagagaagaacctgaggtggtcccgaatcagacgcggaagagggtgggttcaggagcaagccagcctgccgccaccatgaggcgcgcctcgaagaaatccttgtcgtctgccgcgaccgctagcgctggtgcggaacaagtaaatgaaaaacaaaacagaaaaagaaaaggagtcagtacaaacctgaccagcaggaaagcacaacgtggccctactaaagcagtttccaaggaagtagaacggattgatcaatttttctatacttatgccgataactcatctgtcatgattgacccagaaggcattgaaacactctgttctcaccttgaagttccccacaccgacgttaggattctaatgttagcatggaaaatgggctgtgagaagcaaggttattttaccttggatgaatggagagctggtttgaaagctcttcgagcagacagcatcagtaaactgaagaaagcatttcctgaactggttcaagaggttacaaggccgtcaaatttccaggatttctacatatatgcatttcgttattgcctcacagaggataagaagaagtgtatagaaataccagttgcttgtgagttgctgaatctagtattaggcttgcagttccgccctcaggttgacaagcttagtaattacctcaagtaccaaaatgactacaagataaacttcccatcacttgacaattatgattcagaccttgcttggcctttgattctagacaattttgttgagtggctaagagaaaataaaagctagatcttctattcatgtggtggtgaagttgtcattcaaaatgtaatattcaagaattttctgcaccctggaggatgccgattcggcttgtttccggttgcttcggtggaggctgctcccagaaaatttaaagccttctcatgtcatcttttgattttgcatatttttaaaactggaaacggtctgcatctgtctgtaaaatttgtatcaggatgctatatttaatggccatgtcatgttaatcagtcttggtagagttttaagatcttgcaagttgcaaatatttccatagattataaataaaaagaaattaactggcgagttcatc

SEQ ID NO: 9521 - DNA, 1054 bp, Zea Mays
accctccaaaagagttgcgctattcctataaggaagctgacaagatgtggtcttttgagatgggttaagaaattagtgaacgaattgcctagctggaaggcttctctcaatcttgctggaaggactgctatggttgttggcggtgatccacttctagagctacttgcggtcgattggttcaaagttaatgaacgctttgattcagttgccttacatcccaaaagccttgtgcaatcagaagctgcaaagaaacttcctttcatattggttataaatttgcaggtgccagcgaaaccaaattataacttggttatgtactacgctgcagagagaccagtgaacaaagattctttgttgggtagattcattgatggaactgatgcataccgagatgccagatttaaacttataccaagcattgttgagggttattggatggttaagcgtgctgtaggaacaaaagcttgccttctgggcaaagcagtaacgtgcaattatcttcgccaggataactttctggagatagatgttgacatcggttcatcatccgttgcccggagcattattggtctagtattgggatatgtcacaagcatagttgttgatcttgctattcttattgaggccaaggaagagaaagagctccccgagtacattctgggcactgttcgtctgaaccgtgtgaatcccgacagtgctgtatcaatctaattacgtttctagccgatctatgcaaatttactcttatcctcttttattctgagagaaacagcgtggcattttgaaaatgtgaaatagcattactatttgctgatccccaatcgagggtaacatatgtaaattggcatgaggcatgactacgtgacgcctttcgtaaatagaataaatcaatggttatgtaatattaatatcccatatacgcgtgtcataatctatgtggcttaaaagtggcatcaagtcatctagtttcctgtgttaacttcttattccttaggtagtcagacattaacagtgtgtttggtttgaggaatgaagtgatccatctttttctcac

SEQ ID NO: 9522 - DNA, 1223 bp, Zea Mays
agtgtataagtggaattggctaccttctcccatcagtttaaacttttgggttgaactggctagaaaagtaaagttgaagaatgtgtcatgggctattgcaggcttggctttaaagacaactaaagctttggttgagacaagtgaattggttacaaattctagtccagttactgttgaccccagccacttccatggcacccttcatagagcgaaaactcaaaatgatcaaaattcttggagtgcacctggtggggagaagtttatgatcagagggaagacttacttaacagattatcacaaggttgttggcggtgatccacttctagagctacttgcggtcgattggttcaaagttaatgaacgctttgattcagttgccttacatcccaaaagccttgtgcaatcagaagctgcaaagaaacttcctttcatattggttataaatttgcaggtgccagcgaaaccaaattataacttggttatgtactacgctgcagagagaccagtgaacaaagattctttgttgggtagattcattgatggaactgatgcataccgagatgccagatttaaacttataccaagcattgttgagggttattggatggttaagcgtgctgtaggaacaaaagcttgccttctgggcaaagcagtaacgtgcaattatcttcgccaggataactttctggagatagatgttgacatcggttcatcatccgttgcccggagcattattggtctagtattgggatatgtcacaagcatagttgttgatcttgctattcttattgaggccaaggaagagaaagagctccccgagtacattctgggcactgttcgtctgaaccgtgtgaatcccgacagtgctgtatcaatctaattacgtttctagccgatctatgcaaatttactcttatcctcttttattctgagagaaacagcgtggcattttgaaaatgtgaaatagcattactatttgctgatccccaatcgagggtaacatatgtaaattggcatgaggcatgactacgtgacgcctttcgtaaatagaataaatcaatggttatgtaatattaatatcccatatacgcgtgtcataatctatgtggcttaaaagtggcatcaagtcatctagtttcctgtgttaacttcttattccttaggtagtcagacattaacagtgtgtttggtttgaggaatgaagtgatccatctttttctcac

SEQ ID NO: 9523 - DNA, 2850 bp, Zea Mays
gtgacgatcgctctgggagatgcaggggaaggagagggaggggttgccggaggactgctccatgacggtggcgatggccgggggtgcgccgacggctagagtgcctggtggttagggaatgtagaggcttgataccatgttggaatagaaaaccctaaccagagttgatagtgcattaatataatagagttaggtgggtctgaggcccattacaatagaggcattacaatagagcatacagttacgctaacagtatcaaatgcctttgaaatctctagcttcaaaaggatgtatggttctttacttttatgtagggtctgagcaagctgctgcacaagtaagaaattgttgtgaatattcctcctaacaaaggcgctctggttgttagaccagcttaggcagcagggtgccaagcgataagcaaaaatcttggttaccaactttgcaaagcttgagttttaggacttgagctttacaagatgagtttacagcttggacttgatcagatcccatctgaggaaaaggatctccagttttggcacttgaattatcaccattgtcgaatagccaccctaaaatcaaagtatttaatttcttctgtgactgctaaaaggttgaaataacttttctaaaagaaaattgcttgtccatgggagacccctgggcattttttagtttataagttagcaaattacatcctgattggtgattggctaggaaaactagctaaatcagtttccagggaggtaaccacaaattgctgagtcctggatttgagcacaggtggccttcctctcaactgggaagtactttctaatttccttttcagatgtagatgtaatatttccaagaagtacaacccttttccttttttccttgcaccaaaccttttgtaactttgttcccagataccgggttctcggtcttgttagaagtatattactaaacaatctatctgcctacactgcattgttcagcagatgctggattagataaaatgtgattttaacaagtactccctatgttccagtttattaggtggtagtgcatttttgagaaagggcagattgttaggcggcatacatagcaaggcattgcattataaattcctgtggaagaaacacagccgttttatccgacccgatccaacaagtgaatgcaatgcaccagatcagtgtggcacctggcgtgaattaaatcttgctcacactctgcatcaacatgggaaataaggactttgtatacatcaggatcatcgagtccaaaatgtgttgttactcttatgttggagattgctccaagtttttggggcagatggaagagaaggcactcaaattttgacaaaagcatcccttttgctttgctcagccaagtagcaggtataagagagtacttcgcagccaatccagccttgacatctgagctgccttcaacagtagtgaagtcaaaagcatctgaaactttgatcatccagagtgaacatgaagattctgaacttggtgatgaattttatgatgcacttactagaggtgaatccttcgaagatggggatagtgatgatgatgatgatgccacaactccaaaggctagaaaagtaaagttgaagaatgtgtcatgggctattgcaggcttggctttaaagacaactaaagctttggttgagacaagtgaattggttacaaattctagtccagttactgttgaccccagccacttccatggcacccttcatagagcgaaaactcaaaatgatcaaaattcttggagtgcacctggtggggagaagtttatgatcagagggaagacttacttaacagattatcacaaggaagctgacaagatgtggtcttttgagatgggttaagaaattagtgaacgaattgcctagctggaaggcttctctcaatcttgctggaaggactgctatggttgttggcggtgatccacttctagagctacttgcggtcgattggttcaaagttaatgaacgctttgattcagttgccttacatcccaaaagccttgtgcaatcagaagctgcaaagaaacttcctttcatattggttataaatttgcaggtgccagcgaaaccaaattataacttggttatgtactacgctgcagagagaccagtgaacaaagattctttgttgggtagattcattgatggaactgatgcataccgagatgccagatttaaacttataccaagcattgttgagggttattggatggttaagcgtgctgtaggaacaaaagcttgccttctgggcaaagcagtaacgtgcaattatcttcgccaggataactttctggagatagatgttgacatcggttcatcatccgttgcccggagcattattggtctagtattgggatatgtcacaagcatagttgttgatcttgctattcttattgaggccaaggaagagaaagagctccccgagtacattctgggcactgttcgtctgaaccgtgtgaatcccgacagtgctgtatcaatctaattacgtttctagccgatctatgcaaatttactcttatcctcttttattctgagagaaacagcgtggcattttgaaaatgtgaaatagcattactatttgctgatccccaatcgagggtaacatatgtaaattggcatgaggcatgactacgtgacgcctttcgtaaatagaataaatcaatggttatgtaatattaatatcccatatacgcgtgtcataatctatgtggcttaaaagtggcatcaagtcatctagtttcctgtgttaacttcttattccttaggtagtcagacattaacagtgtgtttggtttgaggaatgaagtgatccatctttttctcac

SEQ ID NO: 9524 - DNA, 2772 bp, Zea Mays
agaaggtgcgggcggacgcggtgacgatcgctctgggagatgcaggggaaggagagggaggggttgccggaggactgctccatgacggtggcgatggccgggggtgcgccgacggctagagtgcctggtggttagggaatgtagaggcttgataccatgttggaatagaaaaccctaaccagagttgatagtgcattaatataatagagttaggtgggtctgaggcccattacaatagaggcattacaatagagcatacagttacgctaacagtatcaaatgcctttgaaatctctagcttcaaaaggatgtatggttctttacttttatgtagggtctgagcaagctgctgcacaagtaagaaattgttgtgaatattcctcctaacaaaggcgctctggttgttagaccagcttaggcagcagggtgccaagcgataagcaaaaatcttggttaccaactttgcaaagcttgagttttaggacttgagctttacaagatgagtttacagcttggacttgatcagatcccatctgaggaaaaggatctccagttttggcacttgaattatcaccattgtcgaatagccaccctaaaatcaaagtatttaatttcttctgtgactgctaaaaggttgaaataacttttctaaaagaaaattgcttgtccatgggagacccctgggcattttttagtttataagttagcaaattacatcctgattggtgattggctaggaaaactagctaaatcagtttccagggaggtaaccacaaattgctgagtcctggatttgagcacaggtggccttcctctcaactgggaagtactttctaatttccttttcagatgtagatgtaatatttccaagaagtacaacccttttccttttttccttgcaccaaaccttttgtaactttgttcccagataccgggttctcggtcttgttagaagtatattactaaacaatctatctgcctacactgcattgttcagcagatgctggattagataaaatgtgattttaacaagtactccctatgttccagtttattaggtggtagtgcatttttgagaaagggcagattgttaggcggcatacatagcaaggcattgcattataaattcctgtggaagaaacacagccgttttatccgacccgatccaacaagtgaatgcaatgcaccagatcagtgtggcacctggcgtgaattaaatcttgctcacactctggtcatcaacatgggaaataaggactttgtatacatcaggatcatcgagtccaaaatgtgttgttactcttatgttggagattgctccaagtttttggggcagatggaagagaaggcactcaaattttgacaaaagcatcccttttgctttgctcagccaagtagcaggtataagagagtacttcgcagccaatccagccttgacatctgagctgccttcaacagtagtgaagtcaaaagcatctgaaactttgatcatccagagtgaacatgaagattctgaacttggtgatgaattttatgatgcacttactagaggtgaatccttcgaagatggggatagtgatgatgatgatgatgccacaactccaaaggctagaaaagtaaagttgaagaatgtgtcatgggctattgcaggcttggctttaaagacaactaaagctttggttgagacaagtgaattggttacaaattctagtccagttactgttgaccccagccacttccatggcacccttcatagagcgaaaactcaaaatgatcaaaattcttggagtgcacctggtggggagaagtttatgatcagagggaagacttacttaacagattatcacaaggttgttggcggtgatccacttctagagctacttgcggtcgattggttcaaagttaatgaacgctttgattcagttgccttacatcccaaaagccttgtgcaatcagaagctgcaaagaaacttcctttcatattggttataaatttgcaggtgccagcgaaaccaaattataacttggttatgtactacgctgcagagagaccagtgaacaaagattctttgttgggtagattcattgatggaactgatgcataccgagatgccagatttaaacttataccaagcattgttgagggttattggatggttaagcgtgctgtaggaacaaaagcttgccttctgggcaaagcagtaacgtgcaattatcttcgccaggataactttctggagatagatgttgacatcggttcatcatccgttgcccggagcattattggtctagtattgggatatgtcacaagcatagttgttgatcttgctattcttattgaggccaaggaagagaaagagctccccgagtacattctgggcactgttcgtctgaaccgtgtgaatcccgacagtgctgtatcaatctaattacgtttctagccgatctatgcaaatttactcttatcctcttttattctgagagaaacagcgtggcattttgaaaatgtgaaatagcattactatttgctgatccccaatcgagggtaacatatgtaaattggcatgaggcatgactacgtgacgcctttcgtaaatagaataaatcaatggttatgtaatattaatatcccatatacgcgtgtcataatctatgtggcttaaaagtggcatcaagtcatctagtttcctgtgttaacttcttattccttaggtagtcagacattaacagtgtgtttggtttgaggaatgaagtgatccatctttttctcac

SEQ ID NO: 9525 - DNA, 4618 bp, Zea Mays
ttgacagatagaagatggattgctgatatcacaggatcactctcggtgggagtattattggattatcttcatctttggaatttaatttcagattttgagctgctgccagatatagaagataaacatacttttagtattgctgcaaatgggacttattctgctaaggctgcatatgatgggttgttcatcggggctgtgcatttcggtcactatgaaagagtttggaaaacttgggccccctctaaatgccacttcttcctctggttatcggtgctaaataaatgctggacaacagataggttggcaaagagaggacttgatcatccggagaagtgtccgctttgtgaccaagagtctgaatctttggatcatattttggtttcttgtgtttttgcgagagaattctggttccggctgaaggttgatgtgcattttcagactacaaaatctggctcctacacctagtacggtgtcttttacgggttggtgggagatgatagacaatggctccggagatatgattatgaagggtgtcaactcccttattgccttgggagcctggattatttggaatcatcggaatcaaattgtctttgatggaatctcccctagtgtttctgcagctctttgtcaggcaagggaggaacaacagttgtgggaaatggcaggagctaagggtctctcctttcttgccgcaaccatcaggggcacctagctgcctggtttatcgctgatgggctggttttgtttttcaggatctgtttgttctttttttgtttttttctcttcttttttctttggtttttttatcccctccggggaggtcttttgtactttggtctattttggaccctcttttccttctacttaatataatgatgtgcagttctcctgcgctttcgagaaaaaaaaacgtcatccgcggcctcaacgaatgctttgccaacattggtcttcacctttgacgtgggcgcctttccccacctttttcgatgcttgctctgagctccttcttgaagtgctcaggccatcagggcacctccattgacccctactgcccttgcggcctctatcattccgcctgctcccgctagtgcgcccttggtcttcggggcctgacctctggcttcctctcgtagtcttgtgtgctttgtggagcgtcggggggctcaggcctagggcctttaggtcccgtaggtcatgagtgggactcaggcctaggactcgactcgtcggtcgtgggtgggaggcggactggctccttcctacaccgcggctcggtgctgggcgcagttaatgtggcgtgcgtagtattgatggtgagagcagccctagggccagatgtggaatccactcgagtggctctctggcggttcgtctgatctccttgccaggcttcgcctcgtccgacctctggcgcggtgcataggggtcatctgggtgcagattcacataggcgagcttctccctatcttatctctcactcgtggtctcgtgggggcccggggatccgatccccgacactcgggatatggatcgccgacgtggggaaaggaggcgctggggtggcagctacacccgcgggaggctagggaggcgtaggccgagcgccgatggccgggtgtagggggatgccgccgaccgcaaccgagaaggggaggtctgtcaccggaggaggaggtgcggcagcggccgtaatcgcaatcgtccgcgcgatggctgcagcggtggttggtgcagtggacgttcgtgccgcttgcgtggggagggaggcgagcacatgaaaaggagaaagggagggaggcagtcgtggacgccgagaaggtgcgggcggacgcggtgacgatcgctctgggagatgcaggggaaggagagggaggggttgccggaggactgctccatgacggtggcgatggccgggggtgcgccgacggctagagtgcctggtggttagggaatgtagaggcttgataccatgttggaatagaaaaccctaaccagagttgatagtgcattaatataatagagttaggtgggtctgaggcccattacaatagaggcattacaatagagcatacagttacgctaacagtatcaaatgcctttgaaatctctagcttcaaaaggatgtatggttctttacttttatgtagggtctgagcaagctgctgcacaagtaagaaattgttgtgaatattcctcctaacaaaggcgctctggttgttagaccagcttaggcagcagggtgccaagcgataagcaaaaatcttggttaccaactttgcaaagcttgagttttaggacttgagctttacaagatgagtttacagcttggacttgatcagatcccatctgaggaaaaggatctccagttttggcacttgaattatcaccattgtcgaatagccaccctaaaatcaaagtatttaatttcttctgtgactgctaaaaggttgaaataacttttctaaaagaaaattgcttgtccatgggagacccctgggcattttttagtttataagttagcaaattacatcctgattggtgattggctaggaaaactagctaaatcagtttccagggaggtaaccacaaattgctgagtcctggatttgagcacaggtggccttcctctcaactgggaagtactttctaatttccttttcagatgtagatgtaatatttccaagaagtacaacccttttccttttttccttgcaccaaaccttttgtaactttgttcccagataccgggttctcggtcttgttagaagtatattactaaacaatctatctgcctacactgcattgttcagcagatgctggattagataaaatgtgattttaacaagtactccctatgttccagtttattaggtggtagtgcatttttgagaaagggcagattgttaggcggcatacatagcaaggcattgcattataaattcctgtggaagaaacacagccgttttatccgacccgatccaacaagtgaatgcaatgcaccagatcagtgtggcacctggcgtgaattaaatcttgctcacactctgcatcaacatgggaaataaggactttgtatacatcaggatcatcgagtccaaaatgtgttgttactcttatgttggagattgctccaagtttttggggcagatggaagagaaggcactcaaattttgacaaaagcatcccttttgctttgctcagccaagtagcaggtataagagagtacttcgcagccaatccagccttgacatctgagctgccttcaacagtagtgaagtcaaaagcatctgaaactttgatcatccagagtgaacatgaagattctgaacttggtgatgaattttatgatgcacttactagaggtgaatccttcgaagatggggatagtgatgatgatgatgatgccacaactccaaagctttggttgagacaagtgaattggttacaaattctagtccagttactgttgaccccagccacttccatggcacccttcatagagcgaaaactcaaaatgatcaaaattcttggagtgcacctggtggggagaagtttatgatcagagggaagacttacttaacagattatcacaaggaagctgacaagatgtggtcttttgagatgggttaagaaattagtgaacgaattgcctagctggaaggcttctctcaatcttgctggaaggactgctatggttgttggcggtgatccacttctagagctacttgcggtcgattggttcaaagttaatgaacgctttgattcagttgccttacatcccaaaagccttgtgcaatcagaagctgcaaagaaacttcctttcatattggttataaatttgcaggtgccagcgaaaccaaattataacttggttatgtactacgctgcagagagaccagtgaacaaagattctttgttgggtagattcattgatggaactgatgcataccgagatgccagatttaaacttataccaagcattgttgagggttattggatggttaagcgtgctgtaggaacaaaagcttgccttctgggcaaagcagtaacgtgcaattatcttcgccaggataactttctggagatgttgacatcggttcatcatccgttgcccggagcattattggtctagtattgggatatgtcacaagcatagttgttgatcttgctattcttattgaggccaaggaagagaaagagctccccgagtacattctgggcactgttcgtctgaaccgtgtgaatcccgacagtgctgtatcaatctaattacgtttctagccgatctatgcaaatttactcttatcctcttttattctgagagaaacagcgtggcattttgaaaatgtgaaatagcattactatttgctgatccccaatcgagggtaacatatgtaaattggcatgaggcatgactacgtgacgcctttcgtaaatagaataaatcaatggttatgtaatattaatatcccatatacgcgtgtcataatctatgtggcttaaaagtggcatcaagtcatctagtttcctgtgttaacttcttattccttaggtagtcagacattaacagtgtgtttggtttgaggaatgaagtgatccatctttttctcac

SEQ ID NO: 9526 - DNA, 4445 bp, Zea Mays
aaaaaaatcactaacagaaggacggttcaggaagcattgacagatagaagatggattgctgatatcacaggatcactctcggtgggagtattattggattatcttcatctttggaatttaatttcagattttgagctgctgccagatatagaagataaacatacttttagtattgctgcaaatgggacttattctgctaaggctgcatatgatgggttgttcatcggggctgtgcatttcggtcactatgaaagagtttggaaaacttgggccccctctaaatgccacttcttcctctggttatcggtgctaaataaatgctggacaacagataggttggcaaagagaggacttgatcatccggagaagtgtccgctttgtgaccaagagtctgaatctttggatcatattttggtttcttgtgtttttgcgagagaattctggttccggctgaaggttgatgtgcattttcagactacaaaatctggctcctacacctagtacggtgtcttttacgggttggtgggagatgatagacaatggctccggagatatgattatgaagggtgtcaactcccttattgccttgggagcctggattatttggaatcatcggaatcaaattgtctttgatggaatctcccctagtgtttctgcagctctttgtcaggcaagggaggaacaacagttgtgggaaatggcaggagctaagggtctctcctttcttgccgcaaccatcaggggcacctagctgcctggtttatcgctgatgggctggttttgtttttcaggatctgtttgttctttttttgtttttttctcttcttttttctttggtttttttatcccctccggggaggtcttttgtactttggtctattttggaccctcttttccttctacttaatataatgatgtgcagttctcctgcgctttcgagaaaaaaaaacgtcatccgcggcctcaacgaatgctttgccaacattggtcttcacctttgacgtgggcgcctttccccacctttttcgatgcttgctctgagctccttcttgaagtgctcaggccatcagggcacctccattgacccctactgcccttgcggcctctatcattccgcctgctcccgctagtgcgcccttggtcttcggggcctgacctctggcttcctctcgtagtcttgtgtgctttgtggagcgtcggggggctcaggcctagggcctttaggtcccgtaggtcatgagtgggactcaggcctaggactcgactcgtcggtcgtgggtgggaggcggactggctccttcctacaccgcggctcggtgctgggcgcagttaatgtggcgtgcgtagtattgatggtgagagcagccctagggccagatgtggaatccactcgagtggctctctggcggttcgtctgatctccttgccaggcttcgcctcgtccgacctctggcgcggtgcataggggtcatctgggtgcagattcacataggcgagcttctccctatcttatctctcactcgtggtctcgtgggggcccggggatccgatccccgacactcgggatatggatcgccgacgtggggaaaggaggcgctggggtggcagctacacccgcgggaggctagggaggcgtaggccgagcgccgatggccgggtgtagggggatgccgccgaccgcaaccgagaaggggaggtctgtcaccggaggaggaggtgcggcagcggccgtaatcgcaatcgtccgcgcgatggctgcagcggtggttggtgcagtggacgttcgtgccgcttgcgtggggagggaggcgagcacatgaaaaggagaaagggagggaggcagtcgtggacgccgagaaggtgcgggcggacgcggtgacgatcgctctgggagatgcaggggaaggagagggaggggttgccggaggactgctccatgacggtggcgatggccgggggtgcgccgacggctagagtgcctggtggttagggaatgtagaggcttgataccatgttggaatagaaaaccctaaccagagttgatagtgcattaatataatagagttaggtgggtctgaggcccattacaatagaggcattacaatagagcatacagttacgctaacagtatcaaatgcctttgaaatctctagcttcaaaaggatgtatggttctttacttttatgtagggtctgagcaagctgctgcacaagtaagaaattgttgtgaatattcctcctaacaaaggcgctctggttgttagaccagcttaggcagcagggtgccaagcgataagcaaaaatcttggttaccaactttgcaaagcttgagttttaggacttgagctttacaagatgagtttacagcttggacttgatcagatcccatctgaggaaaaggatctccagttttggcacttgaattatcaccattgtcgaatagccaccctaaaatcaaagtatttaatttcttctgtgactgctaaaaggttgaaataacttttctaaaagaaaattgcttgtccatgggagacccctgggcattttttagtttataagttagcaaattacatcctgattggtgattggctaggaaaactagctaaatcagtttccagggaggtaaccacaaattgctgagtcctggatttgagcacaggtggccttcctctcaactgggaagtactttctaatttccttttcagatgtagatgtaatatttccaagaagtacaacccttttccttttttccttgcaccaaaccttttgtaactttgttcccagataccgggttctcggtcttgttagaagtatattactaaacaatctatctgcctacactgcattgttcagcagatgctggattagataaaatgtgattttaacaagtactccctatgttccagtttattaggtggtagtgcatttttgagaaagggcagattgttaggcggcatacatagcaaggcattgcattataaattcctgtggaagaaacacagccgttttatccgacccgatccaacaagtgaatgcaatgcaccagatcagtgtggcacctggcgtgaattaaatcttgctcacactctgcatcaacatgggaaataaggactttgtatacatcaggatcatcgagtccaaaatgtgttgttactcttatgttggagattgctccaagtttttggggcagatggaagagaaggcactcaaattttgacaaaagcatcccttttgctttgctcagccaagtagcaggtataagagagtacttcgcagccaatccagccttgacatctgagctgccttcaacagtagtgaagtcaaaagcatctgaaactttgatcatccagagtgaacatgaagattctgaacttggtgatgaattttatgatgcacttactagaggtgaatccttcgaagatggggatagtgatgatgatgatgatgccacaactccaaaggctagaaaagtaaagttgaagaatgtgtcatgggctattgcaggcttggctttaaagacaactaaaggttgttggcggtgatccacttctagagctacttgcggtcgattggttcaaagttaatgaacgctttgattcagttgccttacatcccaaaagccttgtgcaatcagaagctgcaaagaaacttcctttcatattggttataaatttgcaggtgccagcgaaaccaaattataacttggttatgtactacgctgcagagagaccagtgaacaaagattctttgttgggtagattcattgatggaactgatgcataccgagatgccagatttaaacttataccaagcattgttgagggttattggatggttaagcgtgctgtaggaacaaaagcttgccttctgggcaaagcagtaacgtgcaattatcttcgccaggataactttctggagatgttgacatcggttcatcatccgttgcccggagcattattggtctagtattgggatatgtcacaagcatagttgttgatcttgctattcttattgaggccaaggaagagaaagagctccccgagtacattctgggcactgttcgtctgaaccgtgtgaatcccgacagtgctgtatcaatctaattacgtttctagccgatctatgcaaatttactcttatcctcttttattctgagagaaacagcgtggcattttgaaaatgtgaaatagcattactatttgctgatccccaatcgagggtaacatatgtaaattggcatgaggcatgactacgtgacgcctttcgtaaatagaataaatcaatggttatgtaatattaatatcccatatacgcgtgtcataatctatgtggcttaaaagtggcatcaagtcatctagtttcctgtgttaacttcttattccttaggtagtcagacattaacagtgtgtttggtttgaggaatgaagtgatccatctttttctcac

SEQ ID NO: 9527 - DNA, 4641 bp, Zea Mays
atttgatatcattccgaaaaaaatcactaacagaaggacggttcaggaagcattgacagatagaagatggattgctgatatcacaggatcactctcggtgggagtattattggattatcttcatctttggaatttaatttcagattttgagctgctgccagatatagaagataaacatacttttagtattgctgcaaatgggacttattctgctaaggctgcatatgatgggttgttcatcggggctgtgcatttcggtcactatgaaagagtttggaaaacttgggccccctctaaatgccacttcttcctctggttatcggtgctaaataaatgctggacaacagataggttggcaaagagaggacttgatcatccggagaagtgtccgctttgtgaccaagagtctgaatctttggatcatattttggtttcttgtgtttttgcgagagaattctggttccggctgaaggttgatgtgcattttcagactacaaaatctggctcctacacctagtacggtgtcttttacgggttggtgggagatgatagacaatggctccggagatatgattatgaagggtgtcaactcccttattgccttgggagcctggattatttggaatcatcggaatcaaattgtctttgatggaatctcccctagtgtttctgcagctctttgtcaggcaagggaggaacaacagttgtgggaaatggcaggagctaagggtctctcctttcttgccgcaaccatcaggggcacctagctgcctggtttatcgctgatgggctggttttgtttttcaggatctgtttgttctttttttgtttttttctcttcttttttctttggtttttttatcccctccggggaggtcttttgtactttggtctattttggaccctcttttccttctacttaatataatgatgtgcagttctcctgcgctttcgagaaaaaaaaacgtcatccgcggcctcaacgaatgctttgccaacattggtcttcacctttgacgtgggcgcctttccccacctttttcgatgcttgctctgagctccttcttgaagtgctcaggccatcagggcacctccattgacccctactgcccttgcggcctctatcattccgcctgctcccgctagtgcgcccttggtcttcggggcctgacctctggcttcctctcgtagtcttgtgtgctttgtggagcgtcggggggctcaggcctagggcctttaggtcccgtaggtcatgagtgggactcaggcctaggactcgactcgtcggtcgtgggtgggaggcggactggctccttcctacaccgcggctcggtgctgggcgcagttaatgtggcgtgcgtagtattgatggtgagagcagccctagggccagatgtggaatccactcgagtggctctctggcggttcgtctgatctccttgccaggcttcgcctcgtccgacctctggcgcggtgcataggggtcatctgggtgcagattcacataggcgagcttctccctatcttatctctcactcgtggtctcgtgggggcccggggatccgatccccgacactcgggatatggatcgccgacgtggggaaaggaggcgctggggtggcagctacacccgcgggaggctagggaggcgtaggccgagcgccgatggccgggtgtagggggatgccgccgaccgcaaccgagaaggggaggtctgtcaccggaggaggaggtgcggcagcggccgtaatcgcaatcgtccgcgcgatggctgcagcggtggttggtgcagtggacgttcgtgccgcttgcgtggggagggaggcgagcacatgaaaaggagaaagggagggaggcagtcgtggacgccgagaaggtgcgggcggacgcggtgacgatcgctctgggagatgcaggggaaggagagggaggggttgccggaggactgctccatgacggtggcgatggccgggggtgcgccgacggctagagtgcctggtggttagggaatgtagaggcttgataccatgttggaatagaaaaccctaaccagagttgatagtgcattaatataatagagttaggtgggtctgaggcccattacaatagaggcattacaatagagcatacagttacgctaacagtatcaaatgcctttgaaatctctagcttcaaaaggatgtatggttctttacttttatgtagggtctgagcaagctgctgcacaagtaagaaattgttgtgaatattcctcctaacaaaggcgctctggttgttagaccagcttaggcagcagggtgccaagcgataagcaaaaatcttggttaccaactttgcaaagcttgagttttaggacttgagctttacaagatgagtttacagcttggacttgatcagatcccatctgaggaaaaggatctccagttttggcacttgaattatcaccattgtcgaatagccaccctaaaatcaaagtatttaatttcttctgtgactgctaaaaggttgaaataacttttctaaaagaaaattgcttgtccatgggagacccctgggcattttttagtttataagttagcaaattacatcctgattggtgattggctaggaaaactagctaaatcagtttccagggaggtaaccacaaattgctgagtcctggatttgagcacaggtggccttcctctcaactgggaagtactttctaatttccttttcagatgtagatgtaatatttccaagaagtacaacccttttccttttttccttgcaccaaaccttttgtaactttgttcccagataccgggttctcggtcttgttagaagtatattactaaacaatctatctgcctacactgcattgttcagcagatgctggattagataaaatgtgattttaacaagtactccctatgttccagtttattaggtggtagtgcatttttgagaaagggcagattgttaggcggcatacatagcaaggcattgcattataaattcctgtggaagaaacacagccgttttatccgacccgatccaacaagtgaatgcaatgcaccagatcagtgtggcacctggcgtgaattaaatcttgctcacactctgcatcaacatgggaaataaggactttgtatacatcaggatcatcgagtccaaaatgtgttgttactcttatgttggagattgctccaagtttttggggcagatggaagagaaggcactcaaattttgacaaaagcatcccttttgctttgctcagccaagtagcaggtataagagagtacttcgcagccaatccagccttgacatctgagctgccttcaacagtagtgaagtcaaaagcatctgaaactttgatcatccagagtgaacatgaagattctgaacttggtgatgaattttatgatgcacttactagaggtgaatccttcgaagatggggatagtgatgatgatgatgatgccacaactccaaaggctagaaaagtaaagttgaagaatgtgtcatgggctattgcaggcttggctttaaagacaactaaagctttggttgagacaagtgaattggttacaaattctagtccagttactgttgaccccagccacttccatggcacccttcatagagcgaaaactcaaaatgatcaaaattcttggagtgcacctggtggggagaagtttatgatcagagggaagacttacttaacagattatcacaaggttgttggcggtgatccacttctagagctacttgcggtcgattggttcaaagttaatgaacgctttgattcagttgccttacatcccaaaagccttgtgcaatcagaagctgcaaagaaacttcctttcatattggttataaatttgcaggtgccagcgaaaccaaattataacttggttatgtactacgctgcagagagaccagtgaacaaagattctttgttgggtagattcattgatggaactgatgcataccgagatgccagatttaaacttataccaagcattgttgagggttattggatggttaagcgtgctgtaggaacaaaagcttgccttctgggcaaagcagtaacgtgcaattatcttcgccaggataactttctggagatagatgttgacatcggttcatcatccgttgcccggagcattattggtctagtattgggatatgtcacaagcatagttgttgatcttgctattcttattgaggccaaggaagagaaagagctccccgagtacattctgggcactgttcgtctgaaccgtgtgaatcccgacagtgctgtatcaatctaattacgtttctagccgatctatgcaaatttactcttatcctcttttattctgagagaaacagcgtggcattttgaaaatgtgaaatagcattactatttgctgatccccaatcgagggtaacatatgtaaattggcatgaggcatgactacgtgacgcctttcgtaaatagaataaatcaatggttatgtaatattaatatcccatatacgcgtgtcataatctatgtggcttaaaagtggcatcaagtcatctagtttcctgtgttaacttcttattccttaggtagtcagacattaacagtgtgtttggtttgaggaatgaagtgatccatctttttctcac

SEQ ID NO: 9528 - DNA, 4465 bp, Zea Mays
atttgatatcattccgaaaaaaatcactaacagaaggacggttcaggaagcattgacagatagaagatggattgctgatatcacaggatcactctcggtgggagtattattggattatcttcatctttggaatttaatttcagattttgagctgctgccagatatagaagataaacatacttttagtattgctgcaaatgggacttattctgctaaggctgcatatgatgggttgttcatcggggctgtgcatttcggtcactatgaaagagtttggaaaacttgggccccctctaaatgccacttcttcctctggttatcggtgctaaataaatgctggacaacagataggttggcaaagagaggacttgatcatccggagaagtgtccgctttgtgaccaagagtctgaatctttggatcatattttggtttcttgtgtttttgcgagagaattctggttccggctgaaggttgatgtgcattttcagactacaaaatctggctcctacacctagtacggtgtcttttacgggttggtgggagatgatagacaatggctccggagatatgattatgaagggtgtcaactcccttattgccttgggagcctggattatttggaatcatcggaatcaaattgtctttgatggaatctcccctagtgtttctgcagctctttgtcaggcaagggaggaacaacagttgtgggaaatggcaggagctaagggtctctcctttcttgccgcaaccatcaggggcacctagctgcctggtttatcgctgatgggctggttttgtttttcaggatctgtttgttctttttttgtttttttctcttcttttttctttggtttttttatcccctccggggaggtcttttgtactttggtctattttggaccctcttttccttctacttaatataatgatgtgcagttctcctgcgctttcgagaaaaaaaaacgtcatccgcggcctcaacgaatgctttgccaacattggtcttcacctttgacgtgggcgcctttccccacctttttcgatgcttgctctgagctccttcttgaagtgctcaggccatcagggcacctccattgacccctactgcccttgcggcctctatcattccgcctgctcccgctagtgcgcccttggtcttcggggcctgacctctggcttcctctcgtagtcttgtgtgctttgtggagcgtcggggggctcaggcctagggcctttaggtcccgtaggtcatgagtgggactcaggcctaggactcgactcgtcggtcgtgggtgggaggcggactggctccttcctacaccgcggctcggtgctgggcgcagttaatgtggcgtgcgtagtattgatggtgagagcagccctagggccagatgtggaatccactcgagtggctctctggcggttcgtctgatctccttgccaggcttcgcctcgtccgacctctggcgcggtgcataggggtcatctgggtgcagattcacataggcgagcttctccctatcttatctctcactcgtggtctcgtgggggcccggggatccgatccccgacactcgggatatggatcgccgacgtggggaaaggaggcgctggggtggcagctacacccgcgggaggctagggaggcgtaggccgagcgccgatggccgggtgtagggggatgccgccgaccgcaaccgagaaggggaggtctgtcaccggaggaggaggtgcggcagcggccgtaatcgcaatcgtccgcgcgatggctgcagcggtggttggtgcagtggacgttcgtgccgcttgcgtggggagggaggcgagcacatgaaaaggagaaagggagggaggcagtcgtggacgccgagaaggtgcgggcggacgcggtgacgatcgctctgggagatgcaggggaaggagagggaggggttgccggaggactgctccatgacggtggcgatggccgggggtgcgccgacggctagagtgcctggtggttagggaatgtagaggcttgataccatgttggaatagaaaaccctaaccagagttgatagtgcattaatataatagagttaggtgggtctgaggcccattacaatagaggcattacaatagagcatacagttacgctaacagtatcaaatgcctttgaaatctctagcttcaaaaggatgtatggttctttacttttatgtagggtctgagcaagctgctgcacaagtaagaaattgttgtgaatattcctcctaacaaaggcgctctggttgttagaccagcttaggcagcagggtgccaagcgataagcaaaaatcttggttaccaactttgcaaagcttgagttttaggacttgagctttacaagatgagtttacagcttggacttgatcagatcccatctgaggaaaaggatctccagttttggcacttgaattatcaccattgtcgaatagccaccctaaaatcaaagtatttaatttcttctgtgactgctaaaaggttgaaataacttttctaaaagaaaattgcttgtccatgggagacccctgggcattttttagtttataagttagcaaattacatcctgattggtgattggctaggaaaactagctaaatcagtttccagggaggtaaccacaaattgctgagtcctggatttgagcacaggtggccttcctctcaactgggaagtactttctaatttccttttcagatgtagatgtaatatttccaagaagtacaacccttttccttttttccttgcaccaaaccttttgtaactttgttcccagataccgggttctcggtcttgttagaagtatattactaaacaatctatctgcctacactgcattgttcagcagatgctggattagataaaatgtgattttaacaagtactccctatgttccagtttattaggtggtagtgcatttttgagaaagggcagattgttaggcggcatacatagcaaggcattgcattataaattcctgtggaagaaacacagccgttttatccgacccgatccaacaagtgaatgcaatgcaccagatcagtgtggcacctggcgtgaattaaatcttgctcacactctgcatcaacatgggaaataaggactttgtatacatcaggatcatcgagtccaaaatgtgttgttactcttatgttggagattgctccaagtttttggggcagatggaagagaaggcactcaaattttgacaaaagcatcccttttgctttgctcagccaagtagcaggtataagagagtacttcgcagccaatccagccttgacatctgagctgccttcaacagtagtgaagtcaaaagcatctgaaactttgatcatccagagtgaacatgaagattctgaacttggtgatgaattttatgatgcacttactagaggtgaatccttcgaagatggggatagtgatgatgatgatgatgccacaactccaaaggctagaaaagtaaagttgaagaatgtgtcatgggctattgcaggcttggctttaaagacaactaaaggttgttggcggtgatccacttctagagctacttgcggtcgattggttcaaagttaatgaacgctttgattcagttgccttacatcccaaaagccttgtgcaatcagaagctgcaaagaaacttcctttcatattggttataaatttgcaggtgccagcgaaaccaaattataacttggttatgtactacgctgcagagagaccagtgaacaaagattctttgttgggtagattcattgatggaactgatgcataccgagatgccagatttaaacttataccaagcattgttgagggttattggatggttaagcgtgctgtaggaacaaaagcttgccttctgggcaaagcagtaacgtgcaattatcttcgccaggataactttctggagatagatgttgacatcggttcatcatccgttgcccggagcattattggtctagtattgggatatgtcacaagcatagttgttgatcttgctattcttattgaggccaaggaagagaaagagctccccgagtacattctgggcactgttcgtctgaaccgtgtgaatcccgacagtgctgtatcaatctaattacgtttctagccgatctatgcaaatttactcttatcctcttttattctgagagaaacagcgtggcattttgaaaatgtgaaatagcattactatttgctgatccccaatcgagggtaacatatgtaaattggcatgaggcatgactacgtgacgcctttcgtaaatagaataaatcaatggttatgtaatattaatatcccatatacgcgtgtcataatctatgtggcttaaaagtggcatcaagtcatctagtttcctgtgttaacttcttattccttaggtagtcagacattaacagtgtgtttggtttgaggaatgaagtgatccatctttttctcac

SEQ ID NO: 9529 - DNA, 4784 bp, Zea Mays
tgagcctaaccgaccttggtgcagccttcctatccaggttccggataaagcaagggctttcttctcgatggtgttgacttcaaaggttggtaatggggctaatactttgttctggactgataaatggattcatgggcagaaaattgcagatttggttcctagattatttgatatcattccgaaaaaaatcactaacagaaggacggttcaggaagcattgacagatagaagatggattgctgatatcacaggatcactctcggtgggagtattattggattatcttcatctttggaatttaatttcagattttgagctgctgccagatatagaagataaacatacttttagtattgctgcaaatgggacttattctgctaaggctgcatatgatgggttgttcatcggggctgtgcatttcggtcactatgaaagagtttggaaaacttgggccccctctaaatgccacttcttcctctggttatcggtgctaaataaatgctggacaacagataggttggcaaagagaggacttgatcatccggagaagtgtccgctttgtgaccaagagtctgaatctttggatcatattttggtttcttgtgtttttgcgagagaattctggttccggctgaaggttgatgtgcattttcagactacaaaatctggctcctacacctagtacggtgtcttttacgggttggtgggagatgatagacaatggctccggagatatgattatgaagggtgtcaactcccttattgccttgggagcctggattatttggaatcatcggaatcaaattgtctttgatggaatctcccctagtgtttctgcagctctttgtcaggcaagggaggaacaacagttgtgggaaatggcaggagctaagggtctctcctttcttgccgcaaccatcaggggcacctagctgcctggtttatcgctgatgggctggttttgtttttcaggatctgtttgttctttttttgtttttttctcttcttttttctttggtttttttatcccctccggggaggtcttttgtactttggtctattttggaccctcttttccttctacttaatataatgatgtgcagttctcctgcgctttcgagaaaaaaaaacgtcatccgcggcctcaacgaatgctttgccaacattggtcttcacctttgacgtgggcgcctttccccacctttttcgatgcttgctctgagctccttcttgaagtgctcaggccatcagggcacctccattgacccctactgcccttgcggcctctatcattccgcctgctcccgctagtgcgcccttggtcttcggggcctgacctctggcttcctctcgtagtcttgtgtgctttgtggagcgtcggggggctcaggcctagggcctttaggtcccgtaggtcatgagtgggactcaggcctaggactcgactcgtcggtcgtgggtgggaggcggactggctccttcctacaccgcggctcggtgctgggcgcagttaatgtggcgtgcgtagtattgatggtgagagcagccctagggccagatgtggaatccactcgagtggctctctggcggttcgtctgatctccttgccaggcttcgcctcgtccgacctctggcgcggtgcataggggtcatctgggtgcagattcacataggcgagcttctccctatcttatctctcactcgtggtctcgtgggggcccggggatccgatccccgacactcgggatatggatcgccgacgtggggaaaggaggcgctggggtggcagctacacccgcgggaggctagggaggcgtaggccgagcgccgatggccgggtgtagggggatgccgccgaccgcaaccgagaaggggaggtctgtcaccggaggaggaggtgcggcagcggccgtaatcgcaatcgtccgcgcgatggctgcagcggtggttggtgcagtggacgttcgtgccgcttgcgtggggagggaggcgagcacatgaaaaggagaaagggagggaggcagtcgtggacgccgagaaggtgcgggcggacgcggtgacgatcgctctgggagatgcaggggaaggagagggaggggttgccggaggactgctccatgacggtggcgatggccgggggtgcgccgacggctagagtgcctggtggttagggaatgtagaggcttgataccatgttggaatagaaaaccctaaccagagttgatagtgcattaatataatagagttaggtgggtctgaggcccattacaatagaggcattacaatagagcatacagttacgctaacagtatcaaatgcctttgaaatctctagcttcaaaaggatgtatggttctttacttttatgtagggtctgagcaagctgctgcacaagtaagaaattgttgtgaatattcctcctaacaaaggcgctctggttgttagaccagcttaggcagcagggtgccaagcgataagcaaaaatcttggttaccaactttgcaaagcttgagttttaggacttgagctttacaagatgagtttacagcttggacttgatcagatcccatctgaggaaaaggatctccagttttggcacttgaattatcaccattgtcgaatagccaccctaaaatcaaagtatttaatttcttctgtgactgctaaaaggttgaaataacttttctaaaagaaaattgcttgtccatgggagacccctgggcattttttagtttataagttagcaaattacatcctgattggtgattggctaggaaaactagctaaatcagtttccagggaggtaaccacaaattgctgagtcctggatttgagcacaggtggccttcctctcaactgggaagtactttctaatttccttttcagatgtagatgtaatatttccaagaagtacaacccttttccttttttccttgcaccaaaccttttgtaactttgttcccagataccgggttctcggtcttgttagaagtatattactaaacaatctatctgcctacactgcattgttcagcagatgctggattagataaaatgtgattttaacaagtactccctatgttccagtttattaggtggtagtgcatttttgagaaagggcagattgttaggcggcatacatagcaaggcattgcattataaattcctgtggaagaaacacagccgttttatccgacccgatccaacaagtgaatgcaatgcaccagatcagtgtggcacctggcgtgaattaaatcttgctcacactctggtgtgtgtactcttagcgcctttaaattgggtgtggagggagtgtatatgggtgcaaaaataacatagctttgtacaagtaaacaaacatggttggacatcacttttacctaagatttttattgaggactaactgtctctgcttcttacatcctagactgaaaattttccattagatgtccacattgccttggaatgtattgattgtgctatctctttcagcatcaacatgggaaataaggactttgtatacatcaggatcatcgagtccaaaatgtgttgttactcttatgttggagattgctccaagtttttggggcagatggaagagaaggcactcaaattttgacaaaagcatcccttttgctttgctcagccaagtagcaggtataagagagtacttcgcagccaatccagccttgacatctgagctgccttcaacagtagtgaagtcaaaagcatctgaaactttgatcatccagagtgaacatgaagattctgaacttggtgatgaattttatgatgcacttactagaggtgaatccttcgaagatggggatagtgatgatgatgatgatgccacaactccaaaggttgttggcggtgatccacttctagagctacttgcggtcgattggttcaaagttaatgaacgctttgattcagttgccttacatcccaaaagccttgtgcaatcagaagctgcaaagaaacttcctttcatattggttataaatttgcaggtgccagcgaaaccaaattataacttggttatgtactacgctgcagagagaccagtgaacaaagattctttgttgggtagattcattgatggaactgatgcataccgagatgccagatttaaacttataccaagcattgttgagggttattggatggttaagcgtgctgtaggaacaaaagcttgccttctgggcaaagcagtaacgtgcaattatcttcgccaggataactttctggagatagatgttgacatcggttcatcatccgttgcccggagcattattggtctagtattgggatatgtcacaagcatagttgttgatcttgctattcttattgaggccaaggaagagaaagagctccccgagtacattctgggcactgttcgtctgaaccgtgtgaatcccgacagtgctgtatcaatctaattacgtttctagccgatctatgcaaatttactcttatcctcttttattctgagagaaacagcgtggcattttgaaaatgtgaaatagcattactatttgctgatccccaatcgagggtaacatatgtaaattggcatgaggcatgactacgtgacgcctttcgtaaatagaataaatcaatggttatgtaatattaatatcccatatacgcgtgtcataatctatgtggcttaaaagtggcatcaagtcatctagtttcctgtgttaacttcttattccttaggtagtcagacattaacagtgtgtttggtttgaggaatgaagtgatccatctttttctcac

SEQ ID NO: 9530 - DNA, 5127 bp, Zea Mays
tgagcctaaccgaccttggtgcagccttcctatccaggttccggataaagcaagggctttcttctcgatggtgttgacttcaaaggttggtaatggggctaatactttgttctggactgataaatggattcatgggcagaaaattgcagatttggttcctagattatttgatatcattccgaaaaaaatcactaacagaaggacggttcaggaagcattgacagatagaagatggattgctgatatcacaggatcactctcggtgggagtattattggattatcttcatctttggaatttaatttcagattttgagctgctgccagatatagaagataaacatacttttagtattgctgcaaatgggacttattctgctaaggctgcatatgatgggttgttcatcggggctgtgcatttcggtcactatgaaagagtttggaaaacttgggccccctctaaatgccacttcttcctctggttatcggtgctaaataaatgctggacaacagataggttggcaaagagaggacttgatcatccggagaagtgtccgctttgtgaccaagagtctgaatctttggatcatattttggtttcttgtgtttttgcgagagaattctggttccggctgaaggttgatgtgcattttcagactacaaaatctggctcctacacctagtacggtgtcttttacgggttggtgggagatgatagacaatggctccggagatatgattatgaagggtgtcaactcccttattgccttgggagcctggattatttggaatcatcggaatcaaattgtctttgatggaatctcccctagtgtttctgcagctctttgtcaggcaagggaggaacaacagttgtgggaaatggcaggagctaagggtctctcctttcttgccgcaaccatcaggggcacctagctgcctggtttatcgctgatgggctggttttgtttttcaggatctgtttgttctttttttgtttttttctcttcttttttctttggtttttttatcccctccggggaggtcttttgtactttggtctattttggaccctcttttccttctacttaatataatgatgtgcagttctcctgcgctttcgagaaaaaaaaacgtcatccgcggcctcaacgaatgctttgccaacattggtcttcacctttgacgtgggcgcctttccccacctttttcgatgcttgctctgagctccttcttgaagtgctcaggccatcagggcacctccattgacccctactgcccttgcggcctctatcattccgcctgctcccgctagtgcgcccttggtcttcggggcctgacctctggcttcctctcgtagtcttgtgtgctttgtggagcgtcggggggctcaggcctagggcctttaggtcccgtaggtcatgagtgggactcaggcctaggactcgactcgtcggtcgtgggtgggaggcggactggctccttcctacaccgcggctcggtgctgggcgcagttaatgtggcgtgcgtagtattgatggtgagagcagccctagggccagatgtggaatccactcgagtggctctctggcggttcgtctgatctccttgccaggcttcgcctcgtccgacctctggcgcggtgcataggggtcatctgggtgcagattcacataggcgagcttctccctatcttatctctcactcgtggtctcgtgggggcccggggatccgatccccgacactcgggatatggatcgccgacgtggggaaaggaggcgctggggtggcagctacacccgcgggaggctagggaggcgtaggccgagcgccgatggccgggtgtagggggatgccgccgaccgcaaccgagaaggggaggtctgtcaccggaggaggaggtgcggcagcggccgtaatcgcaatcgtccgcgcgatggctgcagcggtggttggtgcagtggacgttcgtgccgcttgcgtggggagggaggcgagcacatgaaaaggagaaagggagggaggcagtcgtggacgccgagaaggtgcgggcggacgcggtgacgatcgctctgggagatgcaggggaaggagagggaggggttgccggaggactgctccatgacggtggcgatggccgggggtgcgccgacggctagagtgcctggtggttagggaatgtagaggcttgataccatgttggaatagaaaaccctaaccagagttgatagtgcattaatataatagagttaggtgggtctgaggcccattacaatagaggcattacaatagagcatacagttacgctaacagtatcaaatgcctttgaaatctctagcttcaaaaggatgtatggttctttacttttatgtagggtctgagcaagctgctgcacaagtaagaaattgttgtgaatattcctcctaacaaaggcgctctggttgttagaccagcttaggcagcagggtgccaagcgataagcaaaaatcttggttaccaactttgcaaagcttgagttttaggacttgagctttacaagatgagtttacagcttggacttgatcagatcccatctgaggaaaaggatctccagttttggcacttgaattatcaccattgtcgaatagccaccctaaaatcaaagtatttaatttcttctgtgactgctaaaaggttgaaataacttttctaaaagaaaattgcttgtccatgggagacccctgggcattttttagtttataagttagcaaattacatcctgattggtgattggctaggaaaactagctaaatcagtttccagggaggtaaccacaaattgctgagtcctggatttgagcacaggtggccttcctctcaactgggaagtactttctaatttccttttcagatgtagatgtaatatttccaagaagtacaacccttttccttttttccttgcaccaaaccttttgtaactttgttcccagataccgggttctcggtcttgttagaagtatattactaaacaatctatctgcctacactgcattgttcagcagatgctggattagataaaatgtgattttaacaagtactccctatgttccagtttattaggtggtagtgcatttttgagaaagggcagattgttaggcggcatacatagcaaggcattgcattataaattcctgtggaagaaacacagccgttttatccgacccgatccaacaagtgaatgcaatgcaccagatcagtgtggcacctggcgtgaattaaatcttgctcacactctggtgtgtgtactcttagcgcctttaaattgggtgtggagggagtgtatatgggtgcaaaaataacatagctttgtacaagtaaacaaacatggttggacatcacttttacctaagatttttattgaggactaactgtctctgcttcttacatcctagactgaaaattttccattagatgtccacattgccttggaatgtattgattgtgctatctctttcagcatcaacatgggaaataaggactttgtatacatcaggatcatcgagtccaaaatgtgttgttactcttatgttggagattgctccaagtttttggggcagatggaagagaaggcactcaaattttgacaaaagcatcccttttgctttgctcagccaagtagcaggtataagagagtacttcgcagccaatccagccttgacatctgagctgccttcaacagtagtgaagtcaaaagcatctgaaactttgatcatccagagtgaacatgaagattctgaacttggtgatgaattttatgatgcacttactagaggtgaatccttcgaagatggggatagtgatgatgatgatgatgccacaactccaaaggctagaaaagtaaagttgaagaatgtgtcatgggctattgcaggcttggctttaaagacaactaaagctttggttgagacaagtgaattggttacaaattctagtccagttactgttgaccccagccacttccatggcacccttcatagagcgaaaactcaaaatgatcaaaattcttggagtgcacctggtggggagaagtttatgatcagagggaagacttacttaacagattatcacaaggaagctgacaagatgtggtcttttgagatgggttaagaaattagtgaacgaattgcctagctggaaggcttctctcaatcttgctggaaggactgctatggttgttggcggtgatccacttctagagctacttgcggtcgattggttcaaagttaatgaacgctttgattcagttgccttacatcccaaaagccttgtgcaatcagaagctgcaaagaaacttcctttcatattggttataaatttgcaggtgccagcgaaaccaaattataacttggttatgtactacgctgcagagagaccagtgaacaaagattctttgttgggtagattcattgatggaactgatgcataccgagatgccagatttaaacttataccaagcattgttgagggttattggatggttaagcgtgctgtaggaacaaaagcttgccttctgggcaaagcagtaacgtgcaattatcttcgccaggataactttctggagatagatgttgacatcggttcatcatccgttgcccggagcattattggtctagtattgggatatgtcacaagcatagttgttgatcttgctattcttattgaggccaaggaagagaaagagctccccgagtacattctgggcactgttcgtctgaaccgtgtgaatcccgacagtgctgtatcaatctaattacgtttctagccgatctatgcaaatttactcttatcctcttttattctgagagaaacagcgtggcattttgaaaatgtgaaatagcattactatttgctgatccccaatcgagggtaacatatgtaaattggcatgaggcatgactacgtgacgcctttcgtaaatagaataaatcaatggttatgtaatattaatatcccatatacgcgtgtcataatctatgtggcttaaaagtggcatcaagtcatctagtttcctgtgttaacttcttattccttaggtagtcagacattaacagtgtgtttggtttgaggaatgaagtgatccatctttttctcac

SEQ ID NO: 9531 - DNA, 4805 bp, Zea Mays
tgagcctaaccgaccttggtgcagccttcctatccaggttccggataaagcaagggctttcttctcgatggtgttgacttcaaaggttggtaatggggctaatactttgttctggactgataaatggattcatgggcagaaaattgcagatttggttcctagattatttgatatcattccgaaaaaaatcactaacagaaggacggttcaggaagcattgacagatagaagatggattgctgatatcacaggatcactctcggtgggagtattattggattatcttcatctttggaatttaatttcagattttgagctgctgccagatatagaagataaacatacttttagtattgctgcaaatgggacttattctgctaaggctgcatatgatgggttgttcatcggggctgtgcatttcggtcactatgaaagagtttggaaaacttgggccccctctaaatgccacttcttcctctggttatcggtgctaaataaatgctggacaacagataggttggcaaagagaggacttgatcatccggagaagtgtccgctttgtgaccaagagtctgaatctttggatcatattttggtttcttgtgtttttgcgagagaattctggttccggctgaaggttgatgtgcattttcagactacaaaatctggctcctacacctagtacggtgtcttttacgggttggtgggagatgatagacaatggctccggagatatgattatgaagggtgtcaactcccttattgccttgggagcctggattatttggaatcatcggaatcaaattgtctttgatggaatctcccctagtgtttctgcagctctttgtcaggcaagggaggaacaacagttgtgggaaatggcaggagctaagggtctctcctttcttgccgcaaccatcaggggcacctagctgcctggtttatcgctgatgggctggttttgtttttcaggatctgtttgttctttttttgtttttttctcttcttttttctttggtttttttatcccctccggggaggtcttttgtactttggtctattttggaccctcttttccttctacttaatataatgatgtgcagttctcctgcgctttcgagaaaaaaaaacgtcatccgcggcctcaacgaatgctttgccaacattggtcttcacctttgacgtgggcgcctttccccacctttttcgatgcttgctctgagctccttcttgaagtgctcaggccatcagggcacctccattgacccctactgcccttgcggcctctatcattccgcctgctcccgctagtgcgcccttggtcttcggggcctgacctctggcttcctctcgtagtcttgtgtgctttgtggagcgtcggggggctcaggcctagggcctttaggtcccgtaggtcatgagtgggactcaggcctaggactcgactcgtcggtcgtgggtgggaggcggactggctccttcctacaccgcggctcggtgctgggcgcagttaatgtggcgtgcgtagtattgatggtgagagcagccctagggccagatgtggaatccactcgagtggctctctggcggttcgtctgatctccttgccaggcttcgcctcgtccgacctctggcgcggtgcataggggtcatctgggtgcagattcacataggcgagcttctccctatcttatctctcactcgtggtctcgtgggggcccggggatccgatccccgacactcgggatatggatcgccgacgtggggaaaggaggcgctggggtggcagctacacccgcgggaggctagggaggcgtaggccgagcgccgatggccgggtgtagggggatgccgccgaccgcaaccgagaaggggaggtctgtcaccggaggaggaggtgcggcagcggccgtaatcgcaatcgtccgcgcgatggctgcagcggtggttggtgcagtggacgttcgtgccgcttgcgtggggagggaggcgagcacatgaaaaggagaaagggagggaggcagtcgtggacgccgagaaggtgcgggcggacgcggtgacgatcgctctgggagatgcaggggaaggagagggaggggttgccggaggactgctccatgacggtggcgatggccgggggtgcgccgacggctagagtgcctggtggttagggaatgtagaggcttgataccatgttggaatagaaaaccctaaccagagttgatagtgcattaatataatagagttaggtgggtctgaggcccattacaatagaggcattacaatagagcatacagttacgctaacagtatcaaatgcctttgaaatctctagcttcaaaaggatgtatggttctttacttttatgtagggtctgagcaagctgctgcacaagtaagaaattgttgtgaatattcctcctaacaaaggcgctctggttgttagaccagcttaggcagcagggtgccaagcgataagcaaaaatcttggttaccaactttgcaaagcttgagttttaggacttgagctttacaagatgagtttacagcttggacttgatcagatcccatctgaggaaaaggatctccagttttggcacttgaattatcaccattgtcgaatagccaccctaaaatcaaagtatttaatttcttctgtgactgctaaaaggttgaaataacttttctaaaagaaaattgcttgtccatgggagacccctgggcattttttagtttataagttagcaaattacatcctgattggtgattggctaggaaaactagctaaatcagtttccagggaggtaaccacaaattgctgagtcctggatttgagcacaggtggccttcctctcaactgggaagtactttctaatttccttttcagatgtagatgtaatatttccaagaagtacaacccttttccttttttccttgcaccaaaccttttgtaactttgttcccagataccgggttctcggtcttgttagaagtatattactaaacaatctatctgcctacactgcattgttcagcagatgctggattagataaaatgtgattttaacaagtactccctatgttccagtttattaggtggtagtgcatttttgagaaagggcagattgttaggcggcatacatagcaaggcattgcattataaattcctgtggaagaaacacagccgttttatccgacccgatccaacaagtgaatgcaatgcaccagatcagtgtggcacctggcgtgaattaaatcttgctcacactctggtgtgtgtactcttagcgcctttaaattgggtgtggagggagtgtatatgggtgcaaaaataacatagctttgtacaagtaaacaaacatggttggacatcacttttacctaagatttttattgaggactaactgtctctgcttcttacatcctagactgaaaattttccattagatgtccacattgccttggaatgtattgattgtgctatctctttcagcatcaacatgggaaataaggactttgtatacatcaggatcatcgagtccaaaatgtgttgttactcttatgttggagattgctccaagtttttggggcagatggaagagaaggcactcaaattttgacaaaagcatcccttttgctttgctcagccaagtagcaggtataagagagtacttcgcagccaatccagccttgacatctgagctgccttcaacagtagtgaagtcaaaagcatctgaaactttgatcatccagagtgaacatgaagattctgaacttggtgatgaattttatgatgcacttactagaggtgaatccttcgaagatggggatagtgatgatgatgatgatgccacaactccaaaggctagaaaagtaaagttgaagaatgtgtcatgggctattgcaggcttggctttaaagacaactaaaggttgttggcggtgatccacttctagagctacttgcggtcgattggttcaaagttaatgaacgctttgattcagttgccttacatcccaaaagccttgtgcaatcagaagctgcaaagaaacttcctttcatattggttataaatttgcagagagaccagtgaacaaagattctttgttgggtagattcattgatggaactgatgcataccgagatgccagatttaaacttataccaagcattgttgagggttattggatggttaagcgtgctgtaggaacaaaagcttgccttctgggcaaagcagtaacgtgcaattatcttcgccaggataactttctggagatagatgttgacatcggttcatcatccgttgcccggagcattattggtctagtattgggatatgtcacaagcatagttgttgatcttgctattcttattgaggccaaggaagagaaagagctccccgagtacattctgggcactgttcgtctgaaccgtgtgaatcccgacagtgctgtatcaatctaattacgtttctagccgatctatgcaaatttactcttatcctcttttattctgagagaaacagcgtggcattttgaaaatgtgaaatagcattactatttgctgatccccaatcgagggtaacatatgtaaattggcatgaggcatgactacgtgacgcctttcgtaaatagaataaatcaatggttatgtaatattaatatcccatatacgcgtgtcataatctatgtggcttaaaagtggcatcaagtcatctagtttcctgtgttaacttcttattccttaggtagtcagacattaacagtgtgtttggtttgaggaatgaagtgatccatctttttctcac

SEQ ID NO: 9532 - DNA, 4709 bp, Zea Mays
tgagcctaaccgaccttggtgcagccttcctatccaggttccggataaagcaagggctttcttctcgatggtgttgacttcaaaggttggtaatggggctaatactttgttctggactgataaatggattcatgggcagaaaattgcagatttggttcctagattatttgatatcattccgaaaaaaatcactaacagaaggacggttcaggaagcattgacagatagaagatggattgctgatatcacaggatcactctcggtgggagtattattggattatcttcatctttggaatttaatttcagattttgagctgctgccagatatagaagataaacatacttttagtattgctgcaaatgggacttattctgctaaggctgcatatgatgggttgttcatcggggctgtgcatttcggtcactatgaaagagtttggaaaacttgggccccctctaaatgccacttcttcctctggttatcggtgctaaataaatgctggacaacagataggttggcaaagagaggacttgatcatccggagaagtgtccgctttgtgaccaagagtctgaatctttggatcatattttggtttcttgtgtttttgcgagagaattctggttccggctgaaggttgatgtgcattttcagactacaaaatctggctcctacacctagtacggtgtcttttacgggttggtgggagatgatagacaatggctccggagatatgattatgaagggtgtcaactcccttattgccttgggagcctggattatttggaatcatcggaatcaaattgtctttgatggaatctcccctagtgtttctgcagctctttgtcaggcaagggaggaacaacagttgtgggaaatggcaggagctaagggtctctcctttcttgccgcaaccatcaggggcacctagctgcctggtttatcgctgatgggctggttttgtttttcaggatctgtttgttctttttttgtttttttctcttcttttttctttggtttttttatcccctccggggaggtcttttgtactttggtctattttggaccctcttttccttctacttaatataatgatgtgcagttctcctgcgctttcgagaaaaaaaaacgtcatccgcggcctcaacgaatgctttgccaacattggtcttcacctttgacgtgggcgcctttccccacctttttcgatgcttgctctgagctccttcttgaagtgctcaggccatcagggcacctccattgacccctactgcccttgcggcctctatcattccgcctgctcccgctagtgcgcccttggtcttcggggcctgacctctggcttcctctcgtagtcttgtgtgctttgtggagcgtcggggggctcaggcctagggcctttaggtcccgtaggtcatgagtgggactcaggcctaggactcgactcgtcggtcgtgggtgggaggcggactggctccttcctacaccgcggctcggtgctgggcgcagttaatgtggcgtgcgtagtattgatggtgagagcagccctagggccagatgtggaatccactcgagtggctctctggcggttcgtctgatctccttgccaggcttcgcctcgtccgacctctggcgcggtgcataggggtcatctgggtgcagattcacataggcgagcttctccctatcttatctctcactcgtggtctcgtgggggcccggggatccgatccccgacactcgggatatggatcgccgacgtggggaaaggaggcgctggggtggcagctacacccgcgggaggctagggaggcgtaggccgagcgccgatggccgggtgtagggggatgccgccgaccgcaaccgagaaggggaggtctgtcaccggaggaggaggtgcggcagcggccgtaatcgcaatcgtccgcgcgatggctgcagcggtggttggtgcagtggacgttcgtgccgcttgcgtggggagggaggcgagcacatgaaaaggagaaagggagggaggcagtcgtggacgccgagaaggtgcgggcggacgcggtgacgatcgctctgggagatgcaggggaaggagagggaggggttgccggaggactgctccatgacggtggcgatggccgggggtgcgccgacggctagagtgcctggtggttagggaatgtagaggcttgataccatgttggaatagaaaaccctaaccagagttgatagtgcattaatataatagagttaggtgggtctgaggcccattacaatagaggcattacaatagagcatacagttacgctaacagtatcaaatgcctttgaaatctctagcttcaaaaggatgtatggttctttacttttatgtagggtctgagcaagctgctgcacaagtaagaaattgttgtgaatattcctcctaacaaaggcgctctggttgttagaccagcttaggcagcagggtgccaagcgataagcaaaaatcttggttaccaactttgcaaagcttgagttttaggacttgagctttacaagatgagtttacagcttggacttgatcagatcccatctgaggaaaaggatctccagttttggcacttgaattatcaccattgtcgaatagccaccctaaaatcaaagtatttaatttcttctgtgactgctaaaaggttgaaataacttttctaaaagaaaattgcttgtccatgggagacccctgggcattttttagtttataagttagcaaattacatcctgattggtgattggctaggaaaactagctaaatcagtttccagggaggtaaccacaaattgctgagtcctggatttgagcacaggtggccttcctctcaactgggaagtactttctaatttccttttcagatgtagatgtaatatttccaagaagtacaacccttttccttttttccttgcaccaaaccttttgtaactttgttcccagataccgggttctcggtcttgttagaagtatattactaaacaatctatctgcctacactgcattgttcagcagatgctggattagataaaatgtgattttaacaagtactccctatgttccagtttattaggtggtagtgcatttttgagaaagggcagattgttaggcggcatacatagcaaggcattgcattataaattcctgtggaagaaacacagccgttttatccgacccgatccaacaagtgaatgcaatgcaccagatcagtgtggcacctggcgtgaattaaatcttgctcacactctggtgtgtgtactcttagcgcctttaaattgggtgtggagggagtgtatatgggtgcaaaaataacatagctttgtacaagtaaacaaacatggttggacatcacttttacctaagatttttattgaggactaactgtctctgcttcttacatcctagactgaaaattttccattagatgtccacattgccttggaatgtattgattgtgctatctctttcagcatcaacatgggaaataaggactttgtatacatcaggatcatcgagtccaaaatgtgttgttactcttatgttggagattgctccaagtttttggggcagatggaagagaaggcactcaaattttgacaaaagcatcccttttgctttgctcagccaagtagcaggtataagagagtacttcgcagccaatccagccttgacatctgagctgccttcaacagtagtgaagtcaaaagcatctgaaactttgatcatccagagtgaacatgaagattctgaacttggtgatgaattttatgatgcacttactagaggtgaatccttcgaagatggggatagtgatgatgatgatgatgccacaactccaaaggctagaaaagtaaagttgaagaatgtgtcatgggctattgcaggcttggctttaaagacaactaaaggttgttggcggtgatccacttctagagctacttgcggtcgattggttcaaagttaatgaacgctttgattcagttgccttacatcccaaaagccttgtgcaatcagaagctgcaaagaaacttcctttcatattggttataaatttgcagagagaccagtgaacaaagattctttgttgggtagattcattgatggaactgatgcataccgagatgccagatttaaacttataccaagcattgttgagatagatgttgacatcggttcatcatccgttgcccggagcattattggtctagtattgggatatgtcacaagcatagttgttgatcttgctattcttattgaggccaaggaagagaaagagctccccgagtacattctgggcactgttcgtctgaaccgtgtgaatcccgacagtgctgtatcaatctaattacgtttctagccgatctatgcaaatttactcttatcctcttttattctgagagaaacagcgtggcattttgaaaatgtgaaatagcattactatttgctgatccccaatcgagggtaacatatgtaaattggcatgaggcatgactacgtgacgcctttcgtaaatagaataaatcaatggttatgtaatattaatatcccatatacgcgtgtcataatctatgtggcttaaaagtggcatcaagtcatctagtttcctgtgttaacttcttattccttaggtagtcagacattaacagtgtgtttggtttgaggaatgaagtgatccatctttttctcac

SEQ ID NO: 9533 - DNA, 4910 bp, Zea Mays
tgagcctaaccgaccttggtgcagccttcctatccaggttccggataaagcaagggctttcttctcgatggtgttgacttcaaaggttggtaatggggctaatactttgttctggactgataaatggattcatgggcagaaaattgcagatttggttcctagattatttgatatcattccgaaaaaaatcactaacagaaggacggttcaggaagcattgacagatagaagatggattgctgatatcacaggatcactctcggtgggagtattattggattatcttcatctttggaatttaatttcagattttgagctgctgccagatatagaagataaacatacttttagtattgctgcaaatgggacttattctgctaaggctgcatatgatgggttgttcatcggggctgtgcatttcggtcactatgaaagagtttggaaaacttgggccccctctaaatgccacttcttcctctggttatcggtgctaaataaatgctggacaacagataggttggcaaagagaggacttgatcatccggagaagtgtccgctttgtgaccaagagtctgaatctttggatcatattttggtttcttgtgtttttgcgagagaattctggttccggctgaaggttgatgtgcattttcagactacaaaatctggctcctacacctagtacggtgtcttttacgggttggtgggagatgatagacaatggctccggagatatgattatgaagggtgtcaactcccttattgccttgggagcctggattatttggaatcatcggaatcaaattgtctttgatggaatctcccctagtgtttctgcagctctttgtcaggcaagggaggaacaacagttgtgggaaatggcaggagctaagggtctctcctttcttgccgcaaccatcaggggcacctagctgcctggtttatcgctgatgggctggttttgtttttcaggatctgtttgttctttttttgtttttttctcttcttttttctttggtttttttatcccctccggggaggtcttttgtactttggtctattttggaccctcttttccttctacttaatataatgatgtgcagttctcctgcgctttcgagaaaaaaaaacgtcatccgcggcctcaacgaatgctttgccaacattggtcttcacctttgacgtgggcgcctttccccacctttttcgatgcttgctctgagctccttcttgaagtgctcaggccatcagggcacctccattgacccctactgcccttgcggcctctatcattccgcctgctcccgctagtgcgcccttggtcttcggggcctgacctctggcttcctctcgtagtcttgtgtgctttgtggagcgtcggggggctcaggcctagggcctttaggtcccgtaggtcatgagtgggactcaggcctaggactcgactcgtcggtcgtgggtgggaggcggactggctccttcctacaccgcggctcggtgctgggcgcagttaatgtggcgtgcgtagtattgatggtgagagcagccctagggccagatgtggaatccactcgagtggctctctggcggttcgtctgatctccttgccaggcttcgcctcgtccgacctctggcgcggtgcataggggtcatctgggtgcagattcacataggcgagcttctccctatcttatctctcactcgtggtctcgtgggggcccggggatccgatccccgacactcgggatatggatcgccgacgtggggaaaggaggcgctggggtggcagctacacccgcgggaggctagggaggcgtaggccgagcgccgatggccgggtgtagggggatgccgccgaccgcaaccgagaaggggagcacatgaaaaggagaaagggagggaggcagtcgtggacgccgagaaggtgcgggcggacgcggtgacgatcgctctgggagatgcaggggaaggagagggaggggttgccggaggactgctccatgacggtggcgatggccgggggtgcgccgacggctagagtgcctggtggttagggaatgtagaggcttgataccatgttggaatagaaaaccctaaccagagttgatagtgcattaatataatagagttaggtgggtctgaggcccattacaatagaggcattacaatagagcatacagttacgctaacagtatcaaatgcctttgaaatctctagcttcaaaaggatgtatggttctttacttttatgtagggtctgagcaagctgctgcacaagtaagaaattgttgtgaatattcctcctaacaaaggcgctctggttgttagaccagcttaggcagcagggtgccaagcgataagcaaaaatcttggttaccaactttgcaaagcttgagttttaggacttgagctttacaagatgagtttacagcttggacttgatcagatcccatctgaggaaaaggatctccagttttggcacttgaattatcaccattgtcgaatagccaccctaaaatcaaagtatttaatttcttctgtgactgctaaaaggttgaaataacttttctaaaagaaaattgcttgtccatgggagacccctgggcattttttagtttataagttagcaaattacatcctgattggtgattggctaggaaaactagctaaatcagtttccagggaggtaaccacaaattgctgagtcctggatttgagcacaggtggccttcctctcaactgggaagtactttctaatttccttttcagatgtagatgtaatatttccaagaagtacaacccttttccttttttccttgcaccaaaccttttgtaactttgttcccagataccgggttctcggtcttgttagaagtatattactaaacaatctatctgcctacactgcattgttcagcagatgctggattagataaaatgtgattttaacaagtactccctatgttccagtttattaggtggtagtgcatttttgagaaagggcagattgttaggcggcatacatagcaaggcattgcattataaattcctgtggaagaaacacagccgttttatccgacccgatccaacaagtgaatgcaatgcaccagatcagtgtggcacctggcgtgaattaaatcttgctcacactctggtgtgtgtactcttagcgcctttaaattgggtgtggagggagtgtatatgggtgcaaaaataacatagctttgtacaagtaaacaaacatggttggacatcacttttacctaagatttttattgaggactaactgtctctgcttcttacatcctagactgaaaattttccattagatgtccacattgccttggaatgtattgattgtgctatctctttcagcatcaacatgggaaataaggactttgtatacatcaggatcatcgagtccaaaatgtgttgttactcttatgttggagattgctccaagtttttggggcagatggaagagaaggcactcaaattttgacaaaagcatcccttttgctttgctcagccaagtagcaggtataagagagtacttcgcagccaatccagccttgacatctgagctgccttcaacagtagtgaagtcaaaagcatctgaaactttgatcatccagagtgaacatgaagattctgaacttggtgatgaattttatgatgcacttactagaggtgaatccttcgaagatggggatagtgatgatgatgatgatgccacaactccaaaggctagaaaagtaaagttgaagaatgtgtcatgggctattgcaggcttggctttaaagacaactaaagctttggttgagacaagtgaattggttacaaattctagtccagttactgttgaccccagccacttccatggcacccttcatagagcgaaaactcaaaatgatcaaaattcttggagtgcacctggtggggagaagtttatgatcagagggaagacttacttaacagattatcacaaggttgttggcggtgatccacttctagagctacttgcggtcgattggttcaaagttaatgaacgctttgattcagttgccttacatcccaaaagccttgtgcaatcagaagctgcaaagaaacttcctttcatattggttataaatttgcaggtgccagcgaaaccaaattataacttggttatgtactacgctgcagagagaccagtgaacaaagattctttgttgggtagattcattgatggaactgatgcataccgagatgccagatttaaacttataccaagcattgttgagggttattggatggttaagcgtgctgtaggaacaaaagcttgccttctgggcaaagcagtaacgtgcaattatcttcgccaggataactttctggagatagatgttgacatcggttcatcatccgttgcccggagcattattggtctagtattgggatatgtcacaagcatagttgttgatcttgctattcttattgaggccaaggaagagaaagagctccccgagtacattctgggcactgttcgtctgaaccgtgtgaatcccgacagtgctgtatcaatctaattacgtttctagccgatctatgcaaatttactcttatcctcttttattctgagagaaacagcgtggcattttgaaaatgtgaaatagcattactatttgctgatccccaatcgagggtaacatatgtaaattggcatgaggcatgactacgtgacgcctttcgtaaatagaataaatcaatggttatgtaatattaatatcccatatacgcgtgtcataatctatgtggcttaaaagtggcatcaagtcatctagtttcctgtgttaacttcttattccttaggtagtcagacattaacagtgtgtttggtttgaggaatgaagtgatccatctttttctcac

SEQ ID NO: 9534 - DNA, 4960 bp, Zea Mays
tgagcctaaccgaccttggtgcagccttcctatccaggttccggataaagcaagggctttcttctcgatggtgttgacttcaaaggttggtaatggggctaatactttgttctggactgataaatggattcatgggcagaaaattgcagatttggttcctagattatttgatatcattccgaaaaaaatcactaacagaaggacggttcaggaagcattgacagatagaagatggattgctgatatcacaggatcactctcggtgggagtattattggattatcttcatctttggaatttaatttcagattttgagctgctgccagatatagaagataaacatacttttagtattgctgcaaatgggacttattctgctaaggctgcatatgatgggttgttcatcggggctgtgcatttcggtcactatgaaagagtttggaaaacttgggccccctctaaatgccacttcttcctctggttatcggtgctaaataaatgctggacaacagataggttggcaaagagaggacttgatcatccggagaagtgtccgctttgtgaccaagagtctgaatctttggatcatattttggtttcttgtgtttttgcgagagaattctggttccggctgaaggttgatgtgcattttcagactacaaaatctggctcctacacctagtacggtgtcttttacgggttggtgggagatgatagacaatggctccggagatatgattatgaagggtgtcaactcccttattgccttgggagcctggattatttggaatcatcggaatcaaattgtctttgatggaatctcccctagtgtttctgcagctctttgtcaggcaagggaggaacaacagttgtgggaaatggcaggagctaagggtctctcctttcttgccgcaaccatcaggggcacctagctgcctggtttatcgctgatgggctggttttgtttttcaggatctgtttgttctttttttgtttttttctcttcttttttctttggtttttttatcccctccggggaggtcttttgtactttggtctattttggaccctcttttccttctacttaatataatgatgtgcagttctcctgcgctttcgagaaaaaaaaacgtcatccgcggcctcaacgaatgctttgccaacattggtcttcacctttgacgtgggcgcctttccccacctttttcgatgcttgctctgagctccttcttgaagtgctcaggccatcagggcacctccattgacccctactgcccttgcggcctctatcattccgcctgctcccgctagtgcgcccttggtcttcggggcctgacctctggcttcctctcgtagtcttgtgtgctttgtggagcgtcggggggctcaggcctagggcctttaggtcccgtaggtcatgagtgggactcaggcctaggactcgactcgtcggtcgtgggtgggaggcggactggctccttcctacaccgcggctcggtgctgggcgcagttaatgtggcgtgcgtagtattgatggtgagagcagccctagggccagatgtggaatccactcgagtggctctctggcggttcgtctgatctccttgccaggcttcgcctcgtccgacctctggcgcggtgcataggggtcatctgggtgcagattcacataggcgagcttctccctatcttatctctcactcgtggtctcgtgggggcccggggatccgatccccgacactcgggatatggatcgccgacgtggggaaaggaggcgctggggtggcagctacacccgcgggaggctagggaggcgtaggccgagcgccgatggccgggtgtagggggatgccgccgaccgcaaccgagaaggggaggtctgtcaccggaggaggaggtgcggcagcggccgtaatcgcaatcgtccgcgcgatggctgcagcggtggttggtgcagtggacgttcgtgccgcttgcgtggggagggaggcgagcacatgaaaaggagaaagggagggaggcagtcgtggacgccgagaaggtgcgggcggacgcggtgacgatcgctctgggagatgcaggggaaggagagggaggggttgccggaggactgctccatgacggtggcgatggccgggggtgcgccgacggctagagtgcctggtggttagggaatgtagaggcttgataccatgttggaatagaaaaccctaaccagagttgatagtgcattaatataatagagttaggtgggtctgaggcccattacaatagaggcattacaatagagcatacagttacgctaacagtatcaaatgcctttgaaatctctagcttcaaaaggatgtatggttctttacttttatgtagggtctgagcaagctgctgcacaagtaagaaattgttgtgaatattcctcctaacaaaggcgctctggttgttagaccagcttaggcagcagggtgccaagcgataagcaaaaatcttggttaccaactttgcaaagcttgagttttaggacttgagctttacaagatgagtttacagcttggacttgatcagatcccatctgaggaaaaggatctccagttttggcacttgaattatcaccattgtcgaatagccaccctaaaatcaaagtatttaatttcttctgtgactgctaaaaggttgaaataacttttctaaaagaaaattgcttgtccatgggagacccctgggcattttttagtttataagttagcaaattacatcctgattggtgattggctaggaaaactagctaaatcagtttccagggaggtaaccacaaattgctgagtcctggatttgagcacaggtggccttcctctcaactgggaagtactttctaatttccttttcagatgtagatgtaatatttccaagaagtacaacccttttccttttttccttgcaccaaaccttttgtaactttgttcccagataccgggttctcggtcttgttagaagtatattactaaacaatctatctgcctacactgcattgttcagcagatgctggattagataaaatgtgattttaacaagtactccctatgttccagtttattaggtggtagtgcatttttgagaaagggcagattgttaggcggcatacatagcaaggcattgcattataaattcctgtggaagaaacacagccgttttatccgacccgatccaacaagtgaatgcaatgcaccagatcagtgtggcacctggcgtgaattaaatcttgctcacactctggtgtgtgtactcttagcgcctttaaattgggtgtggagggagtgtatatgggtgcaaaaataacatagctttgtacaagtaaacaaacatggttggacatcacttttacctaagatttttattgaggactaactgtctctgcttcttacatcctagactgaaaattttccattagatgtccacattgccttggaatgtattgattgtgctatctctttcagcatcaacatgggaaataaggactttgtatacatcaggatcatcgagtccaaaatgtgttgttactcttatgttggagattgctccaagtttttggggcagatggaagagaaggcactcaaattttgacaaaagcatcccttttgctttgctcagccaagtagcaggtataagagagtacttcgcagccaatccagccttgacatctgagctgccttcaacagtagtgaagtcaaaagcatctgaaactttgatcatccagagtgaacatgaagattctgaacttggtgatgaattttatgatgcacttactagaggtgaatccttcgaagatggggatagtgatgatgatgatgatgccacaactccaaagctttggttgagacaagtgaattggttacaaattctagtccagttactgttgaccccagccacttccatggcacccttcatagagcgaaaactcaaaatgatcaaaattcttggagtgcacctggtggggagaagtttatgatcagagggaagacttacttaacagattatcacaaggttgttggcggtgatccacttctagagctacttgcggtcgattggttcaaagttaatgaacgctttgattcagttgccttacatcccaaaagccttgtgcaatcagaagctgcaaagaaacttcctttcatattggttataaatttgcaggtgccagcgaaaccaaattataacttggttatgtactacgctgcagagagaccagtgaacaaagattctttgttgggtagattcattgatggaactgatgcataccgagatgccagatttaaacttataccaagcattgttgagggttattggatggttaagcgtgctgtaggaacaaaagcttgccttctgggcaaagcagtaacgtgcaattatcttcgccaggataactttctggagatagatgttgacatcggttcatcatccgttgcccggagcattattggtctagtattgggatatgtcacaagcatagttgttgatcttgctattcttattgaggccaaggaagagaaagagctccccgagtacattctgggcactgttcgtctgaaccgtgtgaatcccgacagtgctgtatcaatctaattacgtttctagccgatctatgcaaatttactcttatcctcttttattctgagagaaacagcgtggcattttgaaaatgtgaaatagcattactatttgctgatccccaatcgagggtaacatatgtaaattggcatgaggcatgactacgtgacgcctttcgtaaatagaataaatcaatggttatgtaatattaatatcccatatacgcgtgtcataatctatgtggcttaaaagtggcatcaagtcatctagtttcctgtgttaacttcttattccttaggtagtcagacattaacagtgtgtttggtttgaggaatgaagtgatccatctttttctcac

SEQ ID NO: 9535 - DNA, 4803 bp, Zea Mays
tgagcctaaccgaccttggtgcagccttcctatccaggttccggataaagcaagggctttcttctcgatggtgttgacttcaaaggttggtaatggggctaatactttgttctggactgataaatggattcatgggcagaaaattgcagatttggttcctagattatttgatatcattccgaaaaaaatcactaacagaaggacggttcaggaagcattgacagatagaagatggattgctgatatcacaggatcactctcggtgggagtattattggattatcttcatctttggaatttaatttcagattttgagctgctgccagatatagaagataaacatacttttagtattgctgcaaatgggacttattctgctaaggctgcatatgatgggttgttcatcggggctgtgcatttcggtcactatgaaagagtttggaaaacttgggccccctctaaatgccacttcttcctctggttatcggtgctaaataaatgctggacaacagataggttggcaaagagaggacttgatcatccggagaagtgtccgctttgtgaccaagagtctgaatctttggatcatattttggtttcttgtgtttttgcgagagaattctggttccggctgaaggttgatgtgcattttcagactacaaaatctggctcctacacctagtacggtgtcttttacgggttggtgggagatgatagacaatggctccggagatatgattatgaagggtgtcaactcccttattgccttgggagcctggattatttggaatcatcggaatcaaattgtctttgatggaatctcccctagtgtttctgcagctctttgtcaggcaagggaggaacaacagttgtgggaaatggcaggagctaagggtctctcctttcttgccgcaaccatcaggggcacctagctgcctggtttatcgctgatgggctggttttgtttttcaggatctgtttgttctttttttgtttttttctcttcttttttctttggtttttttatcccctccggggaggtcttttgtactttggtctattttggaccctcttttccttctacttaatataatgatgtgcagttctcctgcgctttcgagaaaaaaaaacgtcatccgcggcctcaacgaatgctttgccaacattggtcttcacctttgacgtgggcgcctttccccacctttttcgatgcttgctctgagctccttcttgaagtgctcaggccatcagggcacctccattgacccctactgcccttgcggcctctatcattccgcctgctcccgctagtgcgcccttggtcttcggggcctgacctctggcttcctctcgtagtcttgtgtgctttgtggagcgtcggggggctcaggcctagggcctttaggtcccgtaggtcatgagtgggactcaggcctaggactcgactcgtcggtcgtgggtgggaggcggactggctccttcctacaccgcggctcggtgctgggcgcagttaatgtggcgtgcgtagtattgatggtgagagcagccctagggccagatgtggaatccactcgagtggctctctggcggttcgtctgatctccttgccaggcttcgcctcgtccgacctctggcgcggtgcataggggtcatctgggtgcagattcacataggcgagcttctccctatcttatctctcactcgtggtctcgtgggggcccggggatccgatccccgacactcgggatatggatcgccgacgtggggaaaggaggcgctggggtggcagctacacccgcgggaggctagggaggcgtaggccgagcgccgatggccgggtgtagggggatgccgccgaccgcaaccgagaaggggaggtctgtcaccggaggaggaggtgcggcagcggccgtaatcgcaatcgtccgcgcgatggctgcagcggtggttggtgcagtggacgttcgtgccgcttgcgtggggagggaggcgagcacatgaaaaggagaaagggagggaggcagtcgtggacgccgagaaggtgcgggcggacgcggtgacgatcgctctgggagatgcaggggaaggagagggaggggttgccggaggactgctccatgacggtggcgatggccgggggtgcgccgacggctagagtgcctggtggttagggaatgtagaggcttgataccatgttggaatagaaaaccctaaccagagttgatagtgcattaatataatagagttaggtgggtctgaggcccattacaatagaggcattacaatagagcatacagttacgctaacagtatcaaatgcctttgaaatctctagcttcaaaaggatgtatggttctttacttttatgtagggtctgagcaagctgctgcacaagtaagaaattgttgtgaatattcctcctaacaaaggcgctctggttgttagaccagcttaggcagcagggtgccaagcgataagcaaaaatcttggttaccaactttgcaaagcttgagttttaggacttgagctttacaagatgagtttacagcttggacttgatcagatcccatctgaggaaaaggatctccagttttggcacttgaattatcaccattgtcgaatagccaccctaaaatcaaagtatttaatttcttctgtgactgctaaaaggttgaaataacttttctaaaagaaaattgcttgtccatgggagacccctgggcattttttagtttataagttagcaaattacatcctgattggtgattggctaggaaaactagctaaatcagtttccagggaggtaaccacaaattgctgagtcctggatttgagcacaggtggccttcctctcaactgggaagtactttctaatttccttttcagatgtagatgtaatatttccaagaagtacaacccttttccttttttccttgcaccaaaccttttgtaactttgttcccagataccgggttctcggtcttgttagaagtatattactaaacaatctatctgcctacactgcattgttcagcagatgctggattagataaaatgtgattttaacaagtactccctatgttccagtttattaggtggtagtgcatttttgagaaagggcagattgttaggcggcatacatagcaaggcattgcattataaattcctgtggaagaaacacagccgttttatccgacccgatccaacaagtgaatgcaatgcaccagatcagtgtggcacctggcgtgaattaaatcttgctcacactctggtgtgtgtactcttagcgcctttaaattgggtgtggagggagtgtatatgggtgcaaaaataacatagctttgtacaagtaaacaaacatggttggacatcacttttacctaagatttttattgaggactaactgtctctgcttcttacatcctagactgaaaattttccattagatgtccacattgccttggaatgtattgattgtgctatctctttcagcatcaacatgggaaataaggactttgtatacatcaggatcatcgagtccaaaatgtgttgttactcttatgttggagattgctccaagtttttggggcagatggaagagaaggcactcaaattttgacaaaagcatcccttttgctttgctcagccaagtagcaggtataagagagtacttcgcagccaatccagccttgacatctgagctgccttcaacagtagtgaagtcaaaagcatctgaaactttgatcatccagagtgaacatgaagattctgaacttggtgatgaattttatgatgcacttactagaggtgaatccttcgaagatggggatagtgatgatgatgatgatgccacaactccaaaggctagaaaagtaaagttgaagaatgtgtcatgggctattgcaggcttggctttaaagacaactaaaggttgttggcggtgatccacttctagagctacttgcggtcgattggttcaaagttaatgaacgctttgattcagttgccttacatcccaaaagccttgtgcaagtgccagcgaaaccaaattataacttggttatgtactacgctgcagagagaccagtgaacaaagattctttgttgggtagattcattgatggaactgatgcataccgagatgccagatttaaacttataccaagcattgttgagggttattggatggttaagcgtgctgtaggaacaaaagcttgccttctgggcaaagcagtaacgtgcaattatcttcgccaggataactttctggagatagatgttgacatcggttcatcatccgttgcccggagcattattggtctagtattgggatatgtcacaagcatagttgttgatcttgctattcttattgaggccaaggaagagaaagagctccccgagtacattctgggcactgttcgtctgaaccgtgtgaatcccgacagtgctgtatcaatctaattacgtttctagccgatctatgcaaatttactcttatcctcttttattctgagagaaacagcgtggcattttgaaaatgtgaaatagcattactatttgctgatccccaatcgagggtaacatatgtaaattggcatgaggcatgactacgtgacgcctttcgtaaatagaataaatcaatggttatgtaatattaatatcccatatacgcgtgtcataatctatgtggcttaaaagtggcatcaagtcatctagtttcctgtgttaacttcttattccttaggtagtcagacattaacagtgtgtttggtttgaggaatgaagtgatccatctttttctcac

SEQ ID NO: 9536 - DNA, 4925 bp, Zea Mays
tgagcctaaccgaccttggtgcagccttcctatccaggttccggataaagcaagggctttcttctcgatggtgttgacttcaaaggttggtaatggggctaatactttgttctggactgataaatggattcatgggcagaaaattgcagatttggttcctagattatttgatatcattccgaaaaaaatcactaacagaaggacggttcaggaagcattgacagatagaagatggattgctgatatcacaggatcactctcggtgggagtattattggattatcttcatctttggaatttaatttcagattttgagctgctgccagatatagaagataaacatacttttagtattgctgcaaatgggacttattctgctaaggctgcatatgatgggttgttcatcggggctgtgcatttcggtcactatgaaagagtttggaaaacttgggccccctctaaatgccacttcttcctctggttatcggtgctaaataaatgctggacaacagataggttggcaaagagaggacttgatcatccggagaagtgtccgctttgtgaccaagagtctgaatctttggatcatattttggtttcttgtgtttttgcgagagaattctggttccggctgaaggttgatgtgcattttcagactacaaaatctggctcctacacctagtacggtgtcttttacgggttggtgggagatgatagacaatggctccggagatatgattatgaagggtgtcaactcccttattgccttgggagcctggattatttggaatcatcggaatcaaattgtctttgatggaatctcccctagtgtttctgcagctctttgtcaggcaagggaggaacaacagttgtgggaaatggcaggagctaagggtctctcctttcttgccgcaaccatcaggggcacctagctgcctggtttatcgctgatgggctggttttgtttttcaggatctgtttgttctttttttgtttttttctcttcttttttctttggtttttttatcccctccggggaggtcttttgtactttggtctattttggaccctcttttccttctacttaatataatgatgtgcagttctcctgcgctttcgagaaaaaaaaacgtcatccgcggcctcaacgaatgctttgccaacattggtcttcacctttgacgtgggcgcctttccccacctttttcgatgcttgctctgagctccttcttgaagtgctcaggccatcagggcacctccattgacccctactgcccttgcggcctctatcattccgcctgctcccgctagtgcgcccttggtcttcggggcctgacctctggcttcctctcgtagtcttgtgtgctttgtggagcgtcggggggctcaggcctagggcctttaggtcccgtaggtcatgagtgggactcaggcctaggactcgactcgtcggtcgtgggtgggaggcggactggctccttcctacaccgcggctcggtgctgggcgcagttaatgtggcgtgcgtagtattgatggtgagagcagccctagggccagatgtggaatccactcgagtggctctctggcggttcgtctgatctccttgccaggcttcgcctcgtccgacctctggcgcggtgcataggggtcatctgggtgcagattcacataggcgagcttctccctatcttatctctcactcgtggtctcgtgggggcccggggatccgatccccgacactcgggatatggatcgccgacgtggggaaaggaggcgctggggtggcagctacacccgcgggaggctagggaggcgtaggccgagcgccgatggccgggtgtagggggatgccgccgaccgcaaccgagaaggggaggtctgtcaccggaggaggaggtgcggcagcggccgtaatcgcaatcgtccgcgcgatggctgcagcggtggttggtgcagtggacgttcgtgccgcttgcgtggggagggaggcgagcacatgaaaaggagaaagggagggaggcagtcgtggacgccgagaaggtgcgggcggacgcggtgacgatcgctctgggagatgcaggggaaggagagggaggggttgccggaggactgctccatgacggtggcgatggccgggggtgcgccgacggctagagtgcctggtggttagggaatgtagaggcttgataccatgttggaatagaaaaccctaaccagagttgatagtgcattaatataatagagttaggtgggtctgaggcccattacaatagaggcattacaatagagcatacagttacgctaacagtatcaaatgcctttgaaatctctagcttcaaaaggatgtatggttctttacttttatgtagggtctgagcaagctgctgcacaagtaagaaattgttgtgaatattcctcctaacaaaggcgctctggttgttagaccagcttaggcagcagggtgccaagcgataagcaaaaatcttggttaccaactttgcaaagcttgagttttaggacttgagctttacaagatgagtttacagcttggacttgatcagatcccatctgaggaaaaggatctccagttttggcacttgaattatcaccattgtcgaatagccaccctaaaatcaaagtatttaatttcttctgtgactgctaaaaggttgaaataacttttctaaaagaaaattgcttgtccatgggagacccctgggcattttttagtttataagttagcaaattacatcctgattggtgattggctaggaaaactagctaaatcagtttccagggaggtaaccacaaattgctgagtcctggatttgagcacaggtggccttcctctcaactgggaagtactttctaatttccttttcagatgtagatgtaatatttccaagaagtacaacccttttccttttttccttgcaccaaaccttttgtaactttgttcccagataccgggttctcggtcttgttagaagtatattactaaacaatctatctgcctacactgcattgttcagcagatgctggattagataaaatgtgattttaacaagtactccctatgttccagtttattaggtggtagtgcatttttgagaaagggcagattgttaggcggcatacatagcaaggcattgcattataaattcctgtggaagaaacacagccgttttatccgacccgatccaacaagtgaatgcaatgcaccagatcagtgtggcacctggcgtgaattaaatcttgctcacactctggtgtgtgtactcttagcgcctttaaattgggtgtggagggagtgtatatgggtgcaaaaataacatagctttgtacaagtaaacaaacatggttggacatcacttttacctaagatttttattgaggactaactgtctctgcttcttacatcctagactgaaaattttccattagatgtccacattgccttggaatgtattgattgtgctatctctttcagcatcaacatgggaaataaggactttgtatacatcaggatcatcgagtccaaaatgtgttgttactcttatgttggagattgctccaagtttttggggcagatggaagagaaggcactcaaattttgacaaaagcatcccttttgctttgctcagccaagtagcaggtataagagagtacttcgcagccaatccagccttgacatctgagctgccttcaacagtagtgaagtcaaaagcatctgaaactttgatcatccagagtgaacatgaagattctgaacttggtgatgaattttatgatgcacttactagaggtgaatccttcgaagatggggatagtgatgatgatgatgatgccacaactccaaaggctagaaaagtaaagttgaagaatgtgtcatgggctattgcaggcttggctttaaagacaactaaagctttggttgagacaagtgaattggttacaaattctagtccagttactgttgaccccagccacttccatggcacccttcatagagcgaaaactcaaaatgatcaaaattcttggagtgcacctggtggggagaagtttatgatcagagggaagacttacttaacagattatcacaagtcagaagctgcaaagaaacttcctttcatattggttataaatttgcaggtgccagcgaaaccaaattataacttggttatgtactacgctgcagagagaccagtgaacaaagattctttgttgggtagattcattgatggaactgatgcataccgagatgccagatttaaacttataccaagcattgttgagggttattggatggttaagcgtgctgtaggaacaaaagcttgccttctgggcaaagcagtaacgtgcaattatcttcgccaggataactttctggagatagatgttgacatcggttcatcatccgttgcccggagcattattggtctagtattgggatatgtcacaagcatagttgttgatcttgctattcttattgaggccaaggaagagaaagagctccccgagtacattctgggcactgttcgtctgaaccgtgtgaatcccgacagtgctgtatcaatctaattacgtttctagccgatctatgcaaatttactcttatcctcttttattctgagagaaacagcgtggcattttgaaaatgtgaaatagcattactatttgctgatccccaatcgagggtaacatatgtaaattggcatgaggcatgactacgtgacgcctttcgtaaatagaataaatcaatggttatgtaatattaatatcccatatacgcgtgtcataatctatgtggcttaaaagtggcatcaagtcatctagtttcctgtgttaacttcttattccttaggtagtcagacattaacagtgtgtttggtttgaggaatgaagtgatccatctttttctcac

SEQ ID NO: 9537 - DNA, 4771 bp, Zea Mays
tgagcctaaccgaccttggtgcagccttcctatccaggttccggataaagcaagggctttcttctcgatggtgttgacttcaaaggttggtaatggggctaatactttgttctggactgataaatggattcatgggcagaaaattgcagatttggttcctagattatttgatatcattccgaaaaaaatcactaacagaaggacggttcaggaagcattgacagatagaagatggattgctgatatcacaggatcactctcggtgggagtattattggattatcttcatctttggaatttaatttcagattttgagctgctgccagatatagaagataaacatacttttagtattgctgcaaatgggacttattctgctaaggctgcatatgatgggttgttcatcggggctgtgcatttcggtcactatgaaagagtttggaaaacttgggccccctctaaatgccacttcttcctctggttatcggtgctaaataaatgctggacaacagataggttggcaaagagaggacttgatcatccggagaagtgtccgctttgtgaccaagagtctgaatctttggatcatattttggtttcttgtgtttttgcgagagaattctggttccggctgaaggttgatgtgcattttcagactacaaaatctggctcctacacctagtacggtgtcttttacgggttggtgggagatgatagacaatggctccggagatatgattatgaagggtgtcaactcccttattgccttgggagcctggattatttggaatcatcggaatcaaattgtctttgatggaatctcccctagtgtttctgcagctctttgtcaggcaagggaggaacaacagttgtgggaaatggcaggagctaagggtctctcctttcttgccgcaaccatcaggggcacctagctgcctggtttatcgctgatgggctggttttgtttttcaggatctgtttgttctttttttgtttttttctcttcttttttctttggtttttttatcccctccggggaggtcttttgtactttggtctattttggaccctcttttccttctacttaatataatgatgtgcagttctcctgcgctttcgagaaaaaaaaacgtcatccgcggcctcaacgaatgctttgccaacattggtcttcacctttgacgtgggcgcctttccccacctttttcgatgcttgctctgagctccttcttgaagtgctcaggccatcagggcacctccattgacccctactgcccttgcggcctctatcattccgcctgctcccgctagtgcgcccttggtcttcggggcctgacctctggcttcctctcgtagtcttgtgtgctttgtggagcgtcggggggctcaggcctagggcctttaggtcccgtaggtcatgagtgggactcaggcctaggactcgactcgtcggtcgtgggtgggaggcggactggctccttcctacaccgcggctcggtgctgggcgcagttaatgtggcgtgcgtagtattgatggtgagagcagccctagggccagatgtggaatccactcgagtggctctctggcggttcgtctgatctccttgccaggcttcgcctcgtccgacctctggcgcggtgcataggggtcatctgggtgcagattcacataggcgagcttctccctatcttatctctcactcgtggtctcgtgggggcccggggatccgatccccgacactcgggatatggatcgccgacgtggggaaaggaggcgctggggtggcagctacacccgcgggaggctagggaggcgtaggccgagcgccgatggccgggtgtagggggatgccgccgaccgcaaccgagaaggggaggtctgtcaccggaggaggaggtgcggcagcggccgtaatcgcaatcgtccgcgcgatggctgcagcggtggttggtgcagtggacgttcgtgccgcttgcgtggggagggaggcgagcacatgaaaaggagaaagggagggaggcagtcgtggacgccgagaaggtgcgggcggacgcggtgacgatcgctctgggagatgcaggggaaggagagggaggggttgccggaggactgctccatgacggtggcgatggccgggggtgcgccgacggctagagtgcctggtggttagggaatgtagaggcttgataccatgttggaatagaaaaccctaaccagagttgatagtgcattaatataatagagttaggtgggtctgaggcccattacaatagaggcattacaatagagcatacagttacgctaacagtatcaaatgcctttgaaatctctagcttcaaaaggatgtatggttctttacttttatgtagggtctgagcaagctgctgcacaagtaagaaattgttgtgaatattcctcctaacaaaggcgctctggttgttagaccagcttaggcagcagggtgccaagcgataagcaaaaatcttggttaccaactttgcaaagcttgagttttaggacttgagctttacaagatgagtttacagcttggacttgatcagatcccatctgaggaaaaggatctccagttttggcacttgaattatcaccattgtcgaatagccaccctaaaatcaaagtatttaatttcttctgtgactgctaaaaggttgaaataacttttctaaaagaaaattgcttgtccatgggagacccctgggcattttttagtttataagttagcaaattacatcctgattggtgattggctaggaaaactagctaaatcagtttccagggaggtaaccacaaattgctgagtcctggatttgagcacaggtggccttcctctcaactgggaagtactttctaatttccttttcagatgtagatgtaatatttccaagaagtacaacccttttccttttttccttgcaccaaaccttttgtaactttgttcccagataccgggttctcggtcttgttagaagtatattactaaacaatctatctgcctacactgcattgttcagcagatgctggattagataaaatgtgattttaacaagtactccctatgttccagtttattaggtggtagtgcatttttgagaaagggcagattgttaggcggcatacatagcaaggcattgcattataaattcctgtggaagaaacacagccgttttatccgacccgatccaacaagtgaatgcaatgcaccagatcagtgtggcacctggcgtgaattaaatcttgctcacactctggtgtgtgtactcttagcgcctttaaattgggtgtggagggagtgtatatgggtgcaaaaataacatagctttgtacaagtaaacaaacatggttggacatcacttttacctaagatttttattgaggactaactgtctctgcttcttacatcctagactgaaaattttccattagatgtccacattgccttggaatgtattgattgtgctatctctttcagcatcaacatgggaaataaggactttgtatacatcaggatcatcgagtccaaaatgtgttgttactcttatgttggagattgctccaagtttttggggcagatggaagagaaggcactcaaattttgacaaaagcatcccttttgctttgctcagccaagtagcaggtataagagagtacttcgcagccaatccagccttgacatctgagctgccttcaacagtagtgaagtcaaaagcatctgaaactttgatcatccagagtgaacatgaagattctgaacttggtgatgaattttatgatgcacttactagaggtgaatccttcgaagatggggatagtgatgatgatgatgatgccacaactccaaaggctagaaaagtaaagttgaagaatgtgtcatgggctattgcaggcttggctttaaagacaactaaaggttgttggcggtgatccacttctagagctacttgcggtcgattggttcaaagttaatgaacgctttgattcagttgccttacatcccaaaagccttgtgcaatcagaagctgcaaagaaacttcctttcatattggttataaatttgcagattcattgatggaactgatgcataccgagatgccagatttaaacttataccaagcattgttgagggttattggatggttaagcgtgctgtaggaacaaaagcttgccttctgggcaaagcagtaacgtgcaattatcttcgccaggataactttctggagatagatgttgacatcggttcatcatccgttgcccggagcattattggtctagtattgggatatgtcacaagcatagttgttgatcttgctattcttattgaggccaaggaagagaaagagctccccgagtacattctgggcactgttcgtctgaaccgtgtgaatcccgacagtgctgtatcaatctaattacgtttctagccgatctatgcaaatttactcttatcctcttttattctgagagaaacagcgtggcattttgaaaatgtgaaatagcattactatttgctgatccccaatcgagggtaacatatgtaaattggcatgaggcatgactacgtgacgcctttcgtaaatagaataaatcaatggttatgtaatattaatatcccatatacgcgtgtcataatctatgtggcttaaaagtggcatcaagtcatctagtttcctgtgttaacttcttattccttaggtagtcagacattaacagtgtgtttggtttgaggaatgaagtgatccatctttttctcac

SEQ ID NO: 9538 - DNA, 4738 bp, Zea Mays
tgagcctaaccgaccttggtgcagccttcctatccaggttccggataaagcaagggctttcttctcgatggtgttgacttcaaaggttggtaatggggctaatactttgttctggactgataaatggattcatgggcagaaaattgcagatttggttcctagattatttgatatcattccgaaaaaaatcactaacagaaggacggttcaggaagcattgacagatagaagatggattgctgatatcacaggatcactctcggtgggagtattattggattatcttcatctttggaatttaatttcagattttgagctgctgccagatatagaagataaacatacttttagtattgctgcaaatgggacttattctgctaaggctgcatatgatgggttgttcatcggggctgtgcatttcggtcactatgaaagagtttggaaaacttgggccccctctaaatgccacttcttcctctggttatcggtgctaaataaatgctggacaacagataggttggcaaagagaggacttgatcatccggagaagtgtccgctttgtgaccaagagtctgaatctttggatcatattttggtttcttgtgtttttgcgagagaattctggttccggctgaaggttgatgtgcattttcagactacaaaatctggctcctacacctagtacggtgtcttttacgggttggtgggagatgatagacaatggctccggagatatgattatgaagggtgtcaactcccttattgccttgggagcctggattatttggaatcatcggaatcaaattgtctttgatggaatctcccctagtgtttctgcagctctttgtcaggcaagggaggaacaacagttgtgggaaatggcaggagctaagggtctctcctttcttgccgcaaccatcaggggcacctagctgcctggtttatcgctgatgggctggttttgtttttcaggatctgtttgttctttttttgtttttttctcttcttttttctttggtttttttatcccctccggggaggtcttttgtactttggtctattttggaccctcttttccttctacttaatataatgatgtgcagttctcctgcgctttcgagaaaaaaaaacgtcatccgcggcctcaacgaatgctttgccaacattggtcttcacctttgacgtgggcgcctttccccacctttttcgatgcttgctctgagctccttcttgaagtgctcaggccatcagggcacctccattgacccctactgcccttgcggcctctatcattccgcctgctcccgctagtgcgcccttggtcttcggggcctgacctctggcttcctctcgtagtcttgtgtgctttgtggagcgtcggggggctcaggcctagggcctttaggtcccgtaggtcatgagtgggactcaggcctaggactcgactcgtcggtcgtgggtgggaggcggactggctccttcctacaccgcggctcggtgctgggcgcagttaatgtggcgtgcgtagtattgatggtgagagcagccctagggccagatgtggaatccactcgagtggctctctggcggttcgtctgatctccttgccaggcttcgcctcgtccgacctctggcgcggtgcataggggtcatctgggtgcagattcacataggcgagcttctccctatcttatctctcactcgtggtctcgtgggggcccggggatccgatccccgacactcgggatatggatcgccgacgtggggaaaggaggcgctggggtggcagctacacccgcgggaggctagggaggcgtaggccgagcgccgatggccgggtgtagggggatgccgccgaccgcaaccgagaaggggaggtctgtcaccggaggaggaggtgcggcagcggccgtaatcgcaatcgtccgcgcgatggctgcagcggtggttggtgcagtggacgttcgtgccgcttgcgtggggagggaggcgagcacatgaaaaggagaaagggagggaggcagtcgtggacgccgagaaggtgcgggcggacgcggtgacgatcgctctgggagatgcaggggaaggagagggaggggttgccggaggactgctccatgacggtggcgatggccgggggtgcgccgacggctagagtgcctggtggttagggaatgtagaggcttgataccatgttggaatagaaaaccctaaccagagttgatagtgcattaatataatagagttaggtgggtctgaggcccattacaatagaggcattacaatagagcatacagttacgctaacagtatcaaatgcctttgaaatctctagcttcaaaaggatgtatggttctttacttttatgtagggtctgagcaagctgctgcacaagtaagaaattgttgtgaatattcctcctaacaaaggcgctctggttgttagaccagcttaggcagcagggtgccaagcgataagcaaaaatcttggttaccaactttgcaaagcttgagttttaggacttgagctttacaagatgagtttacagcttggacttgatcagatcccatctgaggaaaaggatctccagttttggcacttgaattatcaccattgtcgaatagccaccctaaaatcaaagtatttaatttcttctgtgactgctaaaaggttgaaataacttttctaaaagaaaattgcttgtccatgggagacccctgggcattttttagtttataagttagcaaattacatcctgattggtgattggctaggaaaactagctaaatcagtttccagggaggtaaccacaaattgctgagtcctggatttgagcacaggtggccttcctctcaactgggaagtactttctaatttccttttcagatgtagatgtaatatttccaagaagtacaacccttttccttttttccttgcaccaaaccttttgtaactttgttcccagataccgggttctcggtcttgttagaagtatattactaaacaatctatctgcctacactgcattgttcagcagatgctggattagataaaatgtgattttaacaagtactccctatgttccagtttattaggtggtagtgcatttttgagaaagggcagattgttaggcggcatacatagcaaggcattgcattataaattcctgtggaagaaacacagccgttttatccgacccgatccaacaagtgaatgcaatgcaccagatcagtgtggcacctggcgtgaattaaatcttgctcacactctggtgtgtgtactcttagcgcctttaaattgggtgtggagggagtgtatatgggtgcaaaaataacatagctttgtacaagtaaacaaacatggttggacatcacttttacctaagatttttattgaggactaactgtctctgcttcttacatcctagactgaaaattttccattagatgtccacattgccttggaatgtattgattgtgctatctctttcagcatcaacatgggaaataaggactttgtatacatcaggatcatcgagtccaaaatgtgttgttactcttatgttggagattgctccaagtttttggggcagatggaagagaaggcactcaaattttgacaaaagcatcccttttgctttgctcagccaagtagcaggtataagagagtacttcgcagccaatccagccttgacatctgagctgccttcaacagtagtgaagtcaaaagcatctgaaactttgatcatccagagtgaacatgaagattctgaacttggtgatgaattttatgatgcacttactagaggtgaatccttcgaagatggggatagtgatgatgatgatgatgccacaactccaaaggttgttggcggtgatccacttctagagctacttgcggtcgattggttcaaagttaatgaacgctttgattcagttgccttacatcccaaaagccttgtgcaatcagaagctgcaaagaaacttcctttcatattggttataaatttgcagagagaccagtgaacaaagattctttgttgggtagattcattgatggaactgatgcataccgagatgccagatttaaacttataccaagcattgttgagggttattggatggttaagcgtgctgtaggaacaaaagcttgccttctgggcaaagcagtaacgtgcaattatcttcgccaggataactttctggagatagatgttgacatcggttcatcatccgttgcccggagcattattggtctagtattgggatatgtcacaagcatagttgttgatcttgctattcttattgaggccaaggaagagaaagagctccccgagtacattctgggcactgttcgtctgaaccgtgtgaatcccgacagtgctgtatcaatctaattacgtttctagccgatctatgcaaatttactcttatcctcttttattctgagagaaacagcgtggcattttgaaaatgtgaaatagcattactatttgctgatccccaatcgagggtaacatatgtaaattggcatgaggcatgactacgtgacgcctttcgtaaatagaataaatcaatggttatgtaatattaatatcccatatacgcgtgtcataatctatgtggcttaaaagtggcatcaagtcatctagtttcctgtgttaacttcttattccttaggtagtcagacattaacagtgtgtttggtttgaggaatgaagtgatccatctttttctcac

SEQ ID NO: 9539 - DNA, 4756 bp, Zea Mays
gatggctttggctccaaaagactgagcctaaccgaccttggtgcagccttcctatccaggttccggataaagcaagggctttcttctcgatggtgttgacttcaaaggttggtaatggggctaatactttgttctggactgataaatggattcatgggcagaaaattgcagatttggttcctagattatttgatatcattccgaaaaaaatcactaacagaaggacggttcaggaagcattgacagatagaagatggattgctgatatcacaggatcactctcggtgggagtattattggattatcttcatctttggaatttaatttcagattttgagctgctgccagatatagaagataaacatacttttagtattgctgcaaatgggacttattctgctaaggctgcatatgatgggttgttcatcggggctgtgcatttcggtcactatgaaagagtttggaaaacttgggccccctctaaatgccacttcttcctctggttatcggtgctaaataaatgctggacaacagataggttggcaaagagaggacttgatcatccggagaagtgtccgctttgtgaccaagagtctgaatctttggatcatattttggtttcttgtgtttttgcgagagaattctggttccggctgaaggttgatgtgcattttcagactacaaaatctggctcctacacctagtacggtgtcttttacgggttggtgggagatgatagacaatggctccggagatatgattatgaagggtgtcaactcccttattgccttgggagcctggattatttggaatcatcggaatcaaattgtctttgatggaatctcccctagtgtttctgcagctctttgtcaggcaagggaggaacaacagttgtgggaaatggcaggagctaagggtctctcctttcttgccgcaaccatcaggggcacctagctgcctggtttatcgctgatgggctggttttgtttttcaggatctgtttgttctttttttgtttttttctcttcttttttctttggtttttttatcccctccggggaggtcttttgtactttggtctattttggaccctcttttccttctacttaatataatgatgtgcagttctcctgcgctttcgagaaaaaaaaacgtcatccgcggcctcaacgaatgctttgccaacattggtcttcacctttgacgtgggcgcctttccccacctttttcgatgcttgctctgagctccttcttgaagtgctcaggccatcagggcacctccattgacccctactgcccttgcggcctctatcattccgcctgctcccgctagtgcgcccttggtcttcggggcctgacctctggcttcctctcgtagtcttgtgtgctttgtggagcgtcggggggctcaggcctagggcctttaggtcccgtaggtcatgagtgggactcaggcctaggactcgactcgtcggtcgtgggtgggaggcggactggctccttcctacaccgcggctcggtgctgggcgcagttaatgtggcgtgcgtagtattgatggtgagagcagccctagggccagatgtggaatccactcgagtggctctctggcggttcgtctgatctccttgccaggcttcgcctcgtccgacctctggcgcggtgcataggggtcatctgggtgcagattcacataggcgagcttctccctatcttatctctcactcgtggtctcgtgggggcccggggatccgatccccgacactcgggatatggatcgccgacgtggggaaaggaggcgctggggtggcagctacacccgcgggaggctagggaggcgtaggccgagcgccgatggccgggtgtagggggatgccgccgaccgcaaccgagaaggggagcacatgaaaaggagaaagggagggaggcagtcgtggacgccgagaaggtgcgggcggacgcggtgacgatcgctctgggagatgcaggggaaggagagggaggggttgccggaggactgctccatgacggtggcgatggccgggggtgcgccgacggctagagtgcctggtggttagggaatgtagaggcttgataccatgttggaatagaaaaccctaaccagagttgatagtgcattaatataatagagttaggtgggtctgaggcccattacaatagaggcattacaatagagcatacagttacgctaacagtatcaaatgcctttgaaatctctagcttcaaaaggatgtatggttctttacttttatgtagggtctgagcaagctgctgcacaagtaagaaattgttgtgaatattcctcctaacaaaggcgctctggttgttagaccagcttaggcagcagggtgccaagcgataagcaaaaatcttggttaccaactttgcaaagcttgagttttaggacttgagctttacaagatgagtttacagcttggacttgatcagatcccatctgaggaaaaggatctccagttttggcacttgaattatcaccattgtcgaatagccaccctaaaatcaaagtatttaatttcttctgtgactgctaaaaggttgaaataacttttctaaaagaaaattgcttgtccatgggagacccctgggcattttttagtttataagttagcaaattacatcctgattggtgattggctaggaaaactagctaaatcagtttccagggaggtaaccacaaattgctgagtcctggatttgagcacaggtggccttcctctcaactgggaagtactttctaatttccttttcagatgtagatgtaatatttccaagaagtacaacccttttccttttttccttgcaccaaaccttttgtaactttgttcccagataccgggttctcggtcttgttagaagtatattactaaacaatctatctgcctacactgcattgttcagcagatgctggattagataaaatgtgattttaacaagtactccctatgttccagtttattaggtggtagtgcatttttgagaaagggcagattgttaggcggcatacatagcaaggcattgcattataaattcctgtggaagaaacacagccgttttatccgacccgatccaacaagtgaatgcaatgcaccagatcagtgtggcacctggcgtgaattaaatcttgctcacactctggtgtgtgtactcttagcgcctttaaattgggtgtggagggagtgtatatgggtgcaaaaataacatagctttgtacaagtaaacaaacatggttggacatcacttttacctaagatttttattgaggactaactgtctctgcttcttacatcctagactgaaaattttccattagatgtccacattgccttggaatgtattgattgtgctatctctttcagcatcaacatgggaaataaggactttgtatacatcaggatcatcgagtccaaaatgtgttgttactcttatgttggagattgctccaagtttttggggcagatggaagagaaggcactcaaattttgacaaaagcatcccttttgctttgctcagccaagtagcaggtataagagagtacttcgcagccaatccagccttgacatctgagctgccttcaacagtagtgaagtcaaaagcatctgaaactttgatcatccagagtgaacatgaagattctgaacttggtgatgaattttatgatgcacttactagaggtgaatccttcgaagatggggatagtgatgatgatgatgatgccacaactccaaaggctagaaaagtaaagttgaagaatgtgtcatgggctattgcaggcttggctttaaagacaactaaaggttgttggcggtgatccacttctagagctacttgcggtcgattggttcaaagttaatgaacgctttgattcagttgccttacatcccaaaagccttgtgcaatcagaagctgcaaagaaacttcctttcatattggttataaatttgcaggtgccagcgaaaccaaattataacttggttatgtactacgctgcagagagaccagtgaacaaagattctttgttgggtagattcattgatggaactgatgcataccgagatgccagatttaaacttataccaagcattgttgagggttattggatggttaagcgtgctgtaggaacaaaagcttgccttctgggcaaagcagtaacgtgcaattatcttcgccaggataactttctggagatagatgttgacatcggttcatcatccgttgcccggagcattattggtctagtattgggatatgtcacaagcatagttgttgatcttgctattcttattgaggccaaggaagagaaagagctccccgagtacattctgggcactgttcgtctgaaccgtgtgaatcccgacagtgctgtatcaatctaattacgtttctagccgatctatgcaaatttactcttatcctcttttattctgagagaaacagcgtggcattttgaaaatgtgaaatagcattactatttgctgatccccaatcgagggtaacatatgtaaattggcatgaggcatgactacgtgacgcctttcgtaaatagaataaatcaatggttatgtaatattaatatcccatatacgcgtgtcataatctatgtggcttaaaagtggcatcaagtcatctagtttcctgtgttaacttcttattccttaggtagtcagacattaacagtgtgtttggtttgaggaatgaagtgatccatctttttctcac

SEQ ID NO: 9540 - DNA, 4462 bp, Zea Mays
tgagcctaaccgaccttggtgcagccttcctatccaggttccggataaagcaagggctttcttctcgatggtgttgacttcaaaggttggtaatggggctaatactttgttctggactgataaatggattcatgggcagaaaattgcagatttggttcctagattatttgatatcattccgaaaaaaatcactaacagaaggacggttcaggaagcattgacagatagaagatggattgctgatatcacaggatcactctcggtgggagtattattggattatcttcatctttggaatttaatttcagattttgagctgctgccagatatagaagataaacatacttttagtattgctgcaaatgggacttattctgctaaggctgcatatgatgggttgttcatcggggctgtgcatttcggtcactatgaaagagtttggaaaacttgggccccctctaaatgccacttcttcctctggttatcggtgctaaataaatgctggacaacagataggttggcaaagagaggacttgatcatccggagaagtgtccgctttgtgaccaagagtctgaatctttggatcatattttggtttcttgtgtttttgcgagagaattctggttccggctgaaggttgatgtgcattttcagactacaaaatctggctcctacacctagtacggtgtcttttacgggttggtgggagatgatagacaatggctccggagatatgattatgaagggtgtcaactcccttattgccttgggagcctggattatttggaatcatcggaatcaaattgtctttgatggaatctcccctagtgtttctgcagctctttgtcaggcaagggaggaacaacagttgtgggaaatggcaggagctaagggtctctcctttcttgccgcaaccatcaggggcacctagctgcctggtttatcgctgatgggctggttttgtttttcaggatctgtttgttctttttttgtttttttctcttcttttttctttggtttttttatcccctccggggaggtcttttgtactttggtctattttggaccctcttttccttctacttaatataatgatgtgcagttctcctgcgctttcgagaaaaaaaaacgtcatccgcggcctcaacgaatgctttgccaacattggtcttcacctttgacgtgggcgcctttccccacctttttcgatgcttgctctgagctccttcttgaagtgctcaggccatcagggcacctccattgacccctactgcccttgcggcctctatcattccgcctgctcccgctagtgcgcccttggtcttcggggcctgacctctggcttcctctcgtagtcttgtgtgctttgtggagcgtcggggggctcaggcctagggcctttaggtcccgtaggtcatgagtgggactcaggcctaggactcgactcgtcggtcgtgggtgggaggcggactggctccttcctacaccgcggctcggtgctgggcgcagttaatgtggcgtgcgtagtattgatggtgagagcagccctagggccagatgtggaatccactcgagtggctctctggcggttcgtctgatctccttgccaggcttcgcctcgtccgacctctggcgcggtgcataggggtcatctgggtgcagattcacataggcgagcttctccctatcttatctctcactcgtggtctcgtgggggcccggggatccgatccccgacactcgggatatggatcgccgacgtggggaaaggaggcgctggggtggcagctacacccgcgggaggctagggaggcgtaggccgagcgccgatggccgggtgtagggggatgccgccgaccgcaaccgagaaggggaggtctgtcaccggaggaggaggtgcggcagcggccgtaatcgcaatcgtccgcgcgatggctgcagcggtggttggtgcagtggacgttcgtgccgcttgcgtggggagggaggcgagcacatgaaaaggagaaagggagggaggcagtcgtggacgccgagaaggtgcgggcggacgcggtgacgatcgctctgggagatgcaggggaaggagagggaggggttgccggaggactgctccatgacggtggcgatggccgggggtgcgccgacggctagagtgcctggtggttagggaatgtagaggcttgataccatgttggaatagaaaaccctaaccagagttgatagtgcattaatataatagagttaggtgggtctgaggcccattacaatagaggcattacaatagagcatacagttacgctaacagtatcaaatgcctttgaaatctctagcttcaaaaggatgtatggttctttacttttatgtagggtctgagcaagctgctgcacaagtaagaaattgttgtgaatattcctcctaacaaaggcgctctggttgttagaccagcttaggcagcagggtgccaagcgataagcaaaaatcttggttaccaactttgcaaagcttgagttttaggacttgagctttacaagatgagtttacagcttggacttgatcagatcccatctgaggaaaaggatctccagttttggcacttgaattatcaccattgtcgaatagccaccctaaaatcaaagtatttaatttcttctgtgactgctaaaaggttgaaataacttttctaaaagaaaattgcttgtccatgggagacccctgggcattttttagtttataagttagcaaattacatcctgattggtgattggctaggaaaactagctaaatcagtttccagggaggtaaccacaaattgctgagtcctggatttgagcacaggtggccttcctctcaactgggaagtactttctaatttccttttcagatgtagatgtaatatttccaagaagtacaacccttttccttttttccttgcaccaaaccttttgtaactttgttcccagataccgggttctcggtcttgttagaagtatattactaaacaatctatctgcctacactgcattgttcagcagatgctggattagataaaatgtgattttaacaagtactccctatgttccagtttattaggtggtagtgcatttttgagaaagggcagattgttaggcggcatacatagcaaggcattgcattataaattcctgtggaagaaacacagccgttttatccgacccgatccaacaagtgaatgcaatgcaccagatcagtgtggcacctggcgtgaattaaatcttgctcacactctggtgtgtgtactcttagcgcctttaaattgggtgtggagggagtgtatatgggtgcaaaaataacatagctttgtacaagtaaacaaacatggttggacatcacttttacctaagatttttattgaggactaactgtctctgcttcttacatcctagactgaaaattttccattagatgtccacattgccttggaatgtattgattgtgctatctctttcagcatcaacatgggaaataaggactttgtatacatcaggatcatcgagtccaaaatgtgttgttactcttatgttggagattgctccaagtttttggggcagatggaagagaaggcactcaaattttgacaaaagcatcccttttgctttgctcagccaagtagcaggtataagagagtacttcgcagccaatccagccttgacatctgagctgccttcaacagtagtgaagtcaaaagcatctgaaactttgatcatccagagtgaacatgaagattctgaacttggtgatgaattttatgatgcacttactagaggtgaatccttcgaagatggggatagtgatgatgatgatgatgccacaactccaaaggctagaaaagtaaagttgaagaatgtgtcatgggctattgcaggcttggctttaaagacaactaaaggttgttggcggtgatccacttctagagctacttgcggtcgattggttcaaagttaatgaacgctttgattcagttgccttacatcccaaaagccttgtgcaatcagaagctgcaaagaaacttcctttcatattggttataaatttgcaggtgccagcgaaaccaaattataacttggttatgtactacgctgcagagagaccagtgaacaaagattctttgttgggtagattcattgatggaactgatgcataccgagatgccagatttaaacttataccaagcattgttgagggttattggatggttaagcgtgctgtaggaacaaaagcttgccttctgggcaaagcagtaacgtgcaattatcttcgccaggataactttctggagatagatgttgacatcggttcatcatccgttgcccggagcattattggtctagtattgggatatgtcacaagcatagttgttgatcttgctattcttattgagaactgctctgtgaatttagcaaggaaatgacctttatattg

SEQ ID NO: 9541 - DNA, 4738 bp, Zea Mays
tgagcctaaccgaccttggtgcagccttcctatccaggttccggataaagcaagggctttcttctcgatggtgttgacttcaaaggttggtaatggggctaatactttgttctggactgataaatggattcatgggcagaaaattgcagatttggttcctagattatttgatatcattccgaaaaaaatcactaacagaaggacggttcaggaagcattgacagatagaagatggattgctgatatcacaggatcactctcggtgggagtattattggattatcttcatctttggaatttaatttcagattttgagctgctgccagatatagaagataaacatacttttagtattgctgcaaatgggacttattctgctaaggctgcatatgatgggttgttcatcggggctgtgcatttcggtcactatgaaagagtttggaaaacttgggccccctctaaatgccacttcttcctctggttatcggtgctaaataaatgctggacaacagataggttggcaaagagaggacttgatcatccggagaagtgtccgctttgtgaccaagagtctgaatctttggatcatattttggtttcttgtgtttttgcgagagaattctggttccggctgaaggttgatgtgcattttcagactacaaaatctggctcctacacctagtacggtgtcttttacgggttggtgggagatgatagacaatggctccggagatatgattatgaagggtgtcaactcccttattgccttgggagcctggattatttggaatcatcggaatcaaattgtctttgatggaatctcccctagtgtttctgcagctctttgtcaggcaagggaggaacaacagttgtgggaaatggcaggagctaagggtctctcctttcttgccgcaaccatcaggggcacctagctgcctggtttatcgctgatgggctggttttgtttttcaggatctgtttgttctttttttgtttttttctcttcttttttctttggtttttttatcccctccggggaggtcttttgtactttggtctattttggaccctcttttccttctacttaatataatgatgtgcagttctcctgcgctttcgagaaaaaaaaacgtcatccgcggcctcaacgaatgctttgccaacattggtcttcacctttgacgtgggcgcctttccccacctttttcgatgcttgctctgagctccttcttgaagtgctcaggccatcagggcacctccattgacccctactgcccttgcggcctctatcattccgcctgctcccgctagtgcgcccttggtcttcggggcctgacctctggcttcctctcgtagtcttgtgtgctttgtggagcgtcggggggctcaggcctagggcctttaggtcccgtaggtcatgagtgggactcaggcctaggactcgactcgtcggtcgtgggtgggaggcggactggctccttcctacaccgcggctcggtgctgggcgcagttaatgtggcgtgcgtagtattgatggtgagagcagccctagggccagatgtggaatccactcgagtggctctctggcggttcgtctgatctccttgccaggcttcgcctcgtccgacctctggcgcggtgcataggggtcatctgggtgcagattcacataggcgagcttctccctatcttatctctcactcgtggtctcgtgggggcccggggatccgatccccgacactcgggatatggatcgccgacgtggggaaaggaggcgctggggtggcagctacacccgcgggaggctagggaggcgtaggccgagcgccgatggccgggtgtagggggatgccgccgaccgcaaccgagaaggggaggtctgtcaccggaggaggaggtgcggcagcggccgtaatcgcaatcgtccgcgcgatggctgcagcggtggttggtgcagtggacgttcgtgccgcttgcgtggggagggaggcgagcacatgaaaaggagaaagggagggaggcagtcgtggacgccgagaaggtgcgggcggacgcggtgacgatcgctctgggagatgcaggggaaggagagggaggggttgccggaggactgctccatgacggtggcgatggccgggggtgcgccgacggctagagtgcctggtggttagggaatgtagaggcttgataccatgttggaatagaaaaccctaaccagagttgatagtgcattaatataatagagttaggtgggtctgaggcccattacaatagaggcattacaatagagcatacagttacgctaacagtatcaaatgcctttgaaatctctagcttcaaaaggatgtatggttctttacttttatgtagggtctgagcaagctgctgcacaagtaagaaattgttgtgaatattcctcctaacaaaggcgctctggttgttagaccagcttaggcagcagggtgccaagcgataagcaaaaatcttggttaccaactttgcaaagcttgagttttaggacttgagctttacaagatgagtttacagcttggacttgatcagatcccatctgaggaaaaggatctccagttttggcacttgaattatcaccattgtcgaatagccaccctaaaatcaaagtatttaatttcttctgtgactgctaaaaggttgaaataacttttctaaaagaaaattgcttgtccatgggagacccctgggcattttttagtttataagttagcaaattacatcctgattggtgattggctaggaaaactagctaaatcagtttccagggaggtaaccacaaattgctgagtcctggatttgagcacaggtggccttcctctcaactgggaagtactttctaatttccttttcagatgtagatgtaatatttccaagaagtacaacccttttccttttttccttgcaccaaaccttttgtaactttgttcccagataccgggttctcggtcttgttagaagtatattactaaacaatctatctgcctacactgcattgttcagcagatgctggattagataaaatgtgattttaacaagtactccctatgttccagtttattaggtggtagtgcatttttgagaaagggcagattgttaggcggcatacatagcaaggcattgcattataaattcctgtggaagaaacacagccgttttatccgacccgatccaacaagtgaatgcaatgcaccagatcagtgtggcacctggcgtgaattaaatcttgctcacactctggtgtgtgtactcttagcgcctttaaattgggtgtggagggagtgtatatgggtgcaaaaataacatagctttgtacaagtaaacaaacatggttggacatcacttttacctaagatttttattgaggactaactgtctctgcttcttacatcctagactgaaaattttccattagatgtccacattgccttggaatgtattgattgtgctatctctttcagcatcaacatgggaaataaggactttgtatacatcaggatcatcgagtccaaaatgtgttgttactcttatgttggagattgctccaagtttttggggcagatggaagagaaggcactcaaattttgacaaaagcatcccttttgctttgctcagccaagtagcaggtataagagagtacttcgcagccaatccagccttgacatctgagctgccttcaacagtagtgaagtcaaaagcatctgaaactttgatcatccagagtgaacatgaagattctgaacttggtgatgaattttatgatgcacttactagaggtgaatccttcgaagatggggatagtgatgatgatgatgatgccacaactccaaaggctagaaaagtaaagttgaagaatgtgtcatgggctattgcaggcttggctttaaagacaactaaagctttggttgagacaagtgaattggttacaaattctagtccagttactgttgaccccagccacttccatggcacccttcatagagcgaaaactcaaaatgatcaaaattcttggagtgcacctggtggggagaagtttatgatcagagggaagacttacttaacagattatcacaaggaagctgacaagatgtggtcttttgagatgggttaagaaattagtgaacgaattgcctagctggaaggcttctctcaatcttgctggaaggactgctatggttgttggcggtgatccacttctagagctacttgcggtcgattggttcaaagttaatgaacgctttgattcagttgccttacatcccaaaagccttgtgcaatcagaagctgcaaagaaacttcctttcatattggttataaatttgcaggtgccagcgaaaccaaattataacttggttatgtactacgctgcagagagaccagtgaacaaagattctttgttgggtagattcattgatggaactgatgcataccgagatgccagatttaaacttataccaagcattgttgagggttattggatggttaagcgtgctgtaggaacaaaagcttgccttctgggcaaagcagtaacgtgcaattatcttcgccaggataactttctggagatagatgttgacatcggttcatcatccgttgcccggagcattattggtctagtattgggatatgtcacaagcatagttgttgatcttgctattcttattgagaactgctctgtgaatttagcaaggaaatgacctttatattg

SEQ ID NO: 9542 - DNA, 1057 bp, Zea Mays
tccctgatcagggcgccttcctcacctccatgcccagtcggttgcggaccagcacatccgctcgctcataatcgttgtcctctacatcgattccgacaactacacccactgtcgtgagtagatgctgctcactcttggcaagtactccctcaacgaccacatcctctctgcctcaacgccaccctcccctaactagacttgcatggattgcgtggtcaagtcgtggatctacgacactctccaccgacctcgtcgacacagtgatggagcacagttgcaacgccttctcggcctggcttgccattgaatcccatttccttggcaaacgggagcaccgcgcgctccttgacgcgcggttccggacctttgtccagggcgacctttccatcaccgactactgtcgtcgtctcaagggcatggctgatgccctcggtgacctcgttcatccggtcactgatcgcaccctcgtccttaacgtcatccgcggcctagaagaagatcattcatggctaagataacaatggcacctttacagctccttgctgctcctatcctccccaagcggtcaaggggtgccacaaaacatggtactgcgctacgacggagccgacatgttgcaggggcaggggtggaatttaacatgcaggatctggagaacagagccacaaaacaagtaatgcggactctgagagtcatcacagagaatgcaagcatcaaccagcaagctgttaaggattatgagaatctttttcagcatcccttaactcaaagtcatgttgaagcgttagcggctctctttggatgggagactccggggaatctcttcccgtagtgtgtttttctttctgggttgtaatttataattgttgtaatggatcctagcaaaattatatgttggaatgtgagaggtttaaattcagctgatcgtcaaaattcagtccggaatctagttctgtcctctaaagctgatgtggtctgtctccaggaaactaaaatgactgtcatttctacaagaaccattcttgcagccttgggtacggatttctgccagttctcc

SEQ ID NO: 9543 - DNA, 410 bp, Zea Mays
ctgacatctggatgttcatatatttaccttgggccagaaatgctccttcgtcagtcttcagatcttcaaggccaagaaattgttaatacgaactttggaggtgatactggagacgcatttgaagcacatgaatggagatatgttcggacatttaacggtatcagaatttttgaagatattagtattacaaacccaaaggttggaaaggttatacttctgaaatctgttggggtggtcagtgcaaaccctgataccgtgtttgaagtggtcctcgatcttgataaacataagcgatatgagtgggatatgttgacagctgatttggagttggtggaaagaattgatggatactacgatgtggtttatggaacctatgaacccaaatatttaaattggtggaaatgccagaa

SEQ ID NO: 9544 - DNA, 768 bp, Zea Mays
aatgaaaattggaaagttgtttggcaccgacagttgcagtcaataggaacctatccgaaaaggtgctgttagtcacactctgatggtggaggagcttggtcggcggagggtcaatcatggggatgtttatgttctgaggttgtacaatcggttgaatcaaacaaagaaaggagagatagcatgtgctactcctggtgaagcccggaaatggattgaagcatttgaacaagctaaacaacaggcagactatgatctgatgagaggggttaactggaacagattgcagaatgaaaatgagattaatcttgatggtcatcgtcctcgagttcggagatacgcacaaggcttggggaaatttgtaagaattggtaaagggccagaaatgctccttcgtcagtcttcagatcttcaaggccaagaaattgttaatacgaactttggaggtgatactggagacgcatttgaagcacatgaatggagatatgttcggacatttaacggtatcagaatttttgaagatattagtattacaaacccaaaggtgagagatattaaggttggaaaggttatacttctgaaatctgttggggtggtcagtgcaaaccctgataccgtgtttgaagtggtcctcgatcttgataaacataagcgatatgagtgggatatgttgacagctgatttggagttggtggaaagaattgatggatactacgatgtggtttatggaacctatgaacccaaatatttaaattggtggaaatgccagaa

SEQ ID NO: 9545 - DNA, 683 bp, Zea Mays
cttggaatgaaaattggaaagttgtttggcaccgacagttgcagtcaataggatgtttatgttctgaggttgtacaatcggttgaatcaaacaaagaaaggagagatagcatgtgctactcctggtgaagcccggaaatggattgaagcatttgaacaagctaaacaacaggcagactatgatctgatgagaggggttaactggaacagattgcagaatgaaaatgagattaatcttgatggtcatcgtcctcgagttcggagatacgcacaaggcttggggaaatttgtaagaattggtaaagggccagaaatgctccttcgtcagtcttcagatcttcaaggccaagaaattgttaatacgaactttggaggtgatactggagacgcatttgaagcacatgaatggagatatgttcggacatttaacggtatcagaatttttgaagatattagtattacaaacccaaaggttggaaaggttatacttctgaaatctgttggggtggtcagtgcaaaccctgataccgtgtttgaagtggtcctcgatcttgataaacataagcgatatgagtgggatatgttgacagctgatttggagttggtggaaagaattgatggatactacgatgtggtttatggaacctatgaacccaaatatttaaattggtggaaatgccagaa

SEQ ID NO: 9546 - DNA, 878 bp, Zea Mays
cccaattataacttgcatccctatgtttgagggatgaggtggtcgtggatcaatccattccattccacaaaccaaataaaaaggatttgcatcctatgtaactggagataaacaagaagtcttggaatgaaaattggaaagttgtttggcaccgacagttgcagtcaataggaacctatccgaaaaggtgctgttagtcacactctgatggtggaggagcttggtcggcggagggtcaatcatggggatgtttatgttctgaggttgtacaatcggttgaatcaaacaaagaaaggagagatagcatgtgctactcctggtgaagcccggaaatggattgaagcatttgaacaagctaaacaacaggcagactatgatctgatgagaggggttaactggaacagattgcagaatgaaaatgagattaatcttgatggtcatcgtcctcgagttcggagatacgcacaaggcttggggaaatttgtaagaattggtaaagggccagaaatgctccttcgtcagtcttcagatcttcaaggccaagaaattgttaatacgaactttggaggtgatactggagacgcatttgaagcacatgaatggagatatgttcggacatttaacggtatcagaatttttgaagatattagtattacaaacccaaaggttggaaaggttatacttctgaaatctgttggggtggtcagtgcaaaccctgataccgtgtttgaagtggtcctcgatcttgataaacataagcgatatgagtgggatatgttgacagctgatttggagttggtggaaagaattgatggatactacgatgtggtttatggaacctatgaacccaaatatttaaattggtggaaatgccagaa

SEQ ID NO: 9547 - DNA, 1080 bp, Zea Mays
ttacaggtttacagctccaaattctgttggaccctttcccactttacccccgcccttcaccgtcggaatccacccccactcgcgctgtgtcctgcgggagatggccacggccgcgaggctgcctacggttccaccgtcggctgcggcgggagatgtctccgaggtggagctctcggaggcgggatcgccggacctcggcagccggagcagcggtagcggtagcgggggcagcggccggagcacggcggagtactccgggtgggtgtaccacctcggcgtaaactccatcggccacgagtactgccacctccgcttcctcgtcatccgcgccaaattcgtcgccatgtacaagcgggacccgcacgacaacccgggactcgaacctatccgaaaaggtgctgttagtcacactctgatggtggaggagcttggtcggcggagggtcaatcatggggatgtttatgttctgaggttgtacaatcggttgaatcaaacaaagaaaggagagatagcatgtgctactcctggtgaagcccggaaatggattgaagcatttgaacaagctaaacaacaggcagactatgatctgatgagaggggttaactggaacagattgcagaatgaaaatgagattaatcttgatggtcatcgtcctcgagttcggagatacgcacaaggcttggggaaatttgtaagaattggtaaagaaatgctccttcgtcagtcttcagatcttcaaggccaagaaattgttaatacgaactttggaggtgatactggagacgcatttgaagcacatgaatggagatatgttcggacatttaacggtatcagaatttttgaagatattagtattacaaacccaaaggttggaaaggttatacttctgaaatctgttggggtggtcagtgcaaaccctgataccgtgtttgaagtggtcctcgatcttgataaacataagcgatatgagtgggatatgttgacagctgatttggagttggtggaaagaattgatggatactacgatgtggtttatggaacctatgaacccaaatatttaaattggtggaaatgccagaa

SEQ ID NO: 9548 - DNA, 1175 bp, Zea Mays
ttacaggtttacagctccaaattctgttggaccctttcccactttacccccgcccttcaccgtcggaatccacccccactcgcgctgtgtcctgcgggagatggccacggccgcgaggctgcctacggttccaccgtcggctgcggcgggagatgtctccgaggtggagctctcggaggcgggatcgccggacctcggcagccggagcagcggtagcggtagcgggggcagcggccggagcacggcggagtactccgggtgggtgtaccacctcggcgtaaactccatcggccacgagtactgccacctccgcttcctcgtcatccgcgccaaattcgtcgccatgtacaagcgggacccgcacgacaacccgggactcggatttgcatcctatgtaactggagataaacaagaagtcttggaatgaaaattggaaagttgtttggcaccgacagttgcagtcaataggaacctatccgaaaaggtgctgttagtcacactctgatggtggaggagcttggtcggcggagggtcaatcatggggatgtttatgttctgaggttgtacaatcggttgaatcaaacaaagaaaggagagatagcatgtgctactcctggtgaagcccggaaatggattgaagcatttgaacaagctaaacaacaggcagactatgatctgatgagaggggttaactggaacagattgcagaatgaaaatgagattaatcttgatggtcatcgtcctcgagttcggagatacgcacaaggcttggggaaatttgtaagaattggtaaagggccagaaatgctccttcgtcagtcttcagatcttcaaggccaagaaattgttaatacgaactttggaggtgatactggagacgcatttgaagcacatgaatggagatatgttcggacatttaacggtatcagaatttttgaagatattagtattacaaacccaaaggttggaaaggttatacttctgaaatctgttggggtggtcagtgcaaaccctgataccgtgtttgaagtggtcctcgatcttgataaacataagcgatatgagtgggatatgttgacagctgatttggagttggtggaaagaattgatggatactacgatgtggtttatggaacctatgaacccaaatatttaaattggtggaaatgccagaa

SEQ ID NO: 9549 - DNA, 1045 bp, Zea Mays
ttacaggtttacagctccaaattctgttggaccctttcccactttacccccgcccttcaccgtcggaatccacccccactcgcgctgtgtcctgcgggagatggccacggccgcgaggctgcctacggttccaccgtcggctgcggcgggagatgtctccgaggtggagctctcggaggcgggatcgccggacctcggcagccggagcagcggtagcggtagcgggggcagcggccggagcacggcggagtactccgggtgggtgtaccacctcggcgtaaactccatcggccacgagtactgccacctccgcttcctcgtcatccgcgccaaattcgtcgccatgtacaagcgggacccgcacgacaacccgggactcgaacctatccgaaaaggtgctgttagtcacactctgatggtggaggagcttggtcggcggagggtcaatcatggggatgtttatgttctgaggttgtacaatcggttgaatcaaacaaagaaaggagagatagcatgtgctactcctggtgaagcccggaaatggattgaagcatttgaacaagctaaacaacaggcagactatgatctgatgagaggggttaactggaacagattgcagaatgaaaatgagattaatcttgatggtcatcgtcctcgagttcggagatacgcacaaggcttggggaaatttgtaagaattggtaaagggccagaaatgctccttcgtcagtcttcagatcttcaaggccaagaaattgttaatacgaactttggaggtgatactggagacgcatttgaagcacatgaatggagatatgttcggacatttaacggttggaaaggttatacttctgaaatctgttggggtggtcagtgcaaaccctgataccgtgtttgaagtggtcctcgatcttgataaacataagcgatatgagtgggatatgttgacagctgatttggagttggtggaaagaattgatggatactacgatgtggtttatggaacctatgaacccaaatatttaaattggtggaaatgccagaa

SEQ ID NO: 9550 - DNA, 1186 bp, Zea Mays
cgaggacccgtcctaagactactcccatattctgttggaccctttccagcgcagcggctagcggcttcgcataaattgcaaggtcaagaaccaatagtaattacaggtttacagctccaaattctgttggaccctttcccactttacccccgcccttcaccgtcggaatccacccccactcgcgctgtgtcctgcgggagatggccacggccgcgaggctgcctacggttccaccgtcggctgcggcgggagatgtctccgaggtggagctctcggaggcgggatcgccggacctcggcagccggagcagcggtagcggtagcgggggcagcggccggagcacggcggagtactccgggtgggtgtaccacctcggcgtaaactccatcggccacgagtactgccacctccgcttcctcgtcatccgcgccaaattcgtcgccatgtacaagcgggacccgcacgacaacccgggactcgaacctatccgaaaaggtgctgttagtcacactctgatggtggaggagcttggtcggcggagggtcaatcatggggatgtttatgttctgaggttgtacaatcggttgaatcaaacaaagaaaggagagatagcatgtgctactcctggtgaagcccggaaatggattgaagcatttgaacaagctaaacaacaggcagactatgatctgatgagaggggttaactggaacagattgcagaatgaaaatgagattaatcttgatggtcatcgtcctcgagttcggagatacgcacaaggcttggggaaatttgtaagaattggtaaagggccagaaatgctccttcgtcagtcttcagatcttcaaggccaagaaattgttaatacgaactttggaggtgatactggagacgcatttgaagcacatgaatggagatatgttcggacatttaacggtatcagaatttttgaagatattagtattacaaacccaaaggttggaaaggttatacttctgaaatctgttggggtggtcagtgcaaaccctgataccgtgtttgaagtggtcctcgatcttgataaacataagcgatatgagtgggatatgttgacagctgatttggagttggtggaaagaattgatggatactacgatgtggtttatggaacctatgaacccaaatatttaaattggtggaaatgccagaa

SEQ ID NO: 9551 - DNA, 1206 bp, Zea Mays
cgaggacccgtcctaagactactcccatattctgttggaccctttccagcgcagcggctagcggcttcgcataaattgcaaggtcaagaaccaatagtaattacaggtttacagctccaaattctgttggaccctttcccactttacccccgcccttcaccgtcggaatccacccccactcgcgctgtgtcctgcgggagatggccacggccgcgaggctgcctacggttccaccgtcggctgcggcgggagatgtctccgaggtggagctctcggaggcgggatcgccggacctcggcagccggagcagcggtagcggtagcgggggcagcggccggagcacggcggagtactccgggtgggtgtaccacctcggcgtaaactccatcggccacgagtactgccacctccgcttcctcgtcatccgcgccaaattcgtcgccatgtacaagcgggacccgcacgacaacccgggactcgaacctatccgaaaaggtgctgttagtcacactctgatggtggaggagcttggtcggcggagggtcaatcatggggatgtttatgttctgaggttgtacaatcggttgaatcaaacaaagaaaggagagatagcatgtgctactcctggtgaagcccggaaatggattgaagcatttgaacaagctaaacaacaggcagactatgatctgatgagaggggttaactggaacagattgcagaatgaaaatgagattaatcttgatggtcatcgtcctcgagttcggagatacgcacaaggcttggggaaatttgtaagaattggtaaagggccagaaatgctccttcgtcagtcttcagatcttcaaggccaagaaattgttaatacgaactttggaggtgatactggagacgcatttgaagcacatgaatggagatatgttcggacatttaacggtatcagaatttttgaagatattagtattacaaacccaaaggttggaaaggttatacttctgaaatctgttggggtggtcagtgcaaaccctgataccgtgtttgaagtggtcctcgatcttgataaacataagcgatatgagtgggatatgttgacagctgatttggagttggtggaaagaattgatggatactacgatgtggtttatggaacctatgaacccaaatatttaaattggatgcaactcaaagcctgaaagcatctcccaaaga

SEQ ID NO: 9552 - DNA, 759 bp, Zea Mays
cacataggaaacctatgtgtatgcgcacatatttatatgttgcctagatgatctataaagtgatctctcattatatatacatagttatataaacaaatcataaagtacatgaaaagaattatatacacacatatttatatctatacccaaatcagatatgaagtgatatgtctctgtatatgcaaagctatataaacaattcttgaagcacatggaaaacataaagccaattttacaaaaggaggtccatggacgaattagaaatttaatcaatgcataccatgcaacagactaatcacgaaataaacacatgttaatgtaagtgataattacctcgctactgaagtctttaaggcccaggggaattattcgacgtatttgaagagaaggatacaaccacaaagtattcaaaagacaattttattccttttacataccaatgatgcagtattcttgaaaagtacgttggagcttaggctctaacaaaacatacatttgtatcaagcaattggttgcacgctgctttccatatgctttgtctgcatgaagtgatctaaaggaactataaaagaagaagggaaaatgggagaaaatatgggaaaacaaaaaacagaaaccgtcctctaaccagatcaactagagacgaaatggggtaataagattttttttggcaaaattccgaatacaacacaaactcaccaaatcggatgtttggagctgtcgtgatccacaaagggattccagagaggctgaggaaac

SEQ ID NO: 9553 - DNA, 272 bp, Zea Mays
agaacatggtgctgagtagaagtacatcagaggatataagtaatcggaaccatgtgtacaactgacatcagtattaacaggtgataaaaaagcacattaggtacaacatcttgctaccataaatgtatatgagtggatatagatcaccagagtacttgttcatcagatatgatcatgttgacatgacggagaggaccatcatttgctgcgccatggaattctcattctctagtgacgcttattcttatcacaccatgtacatttcaaggatc

SEQ ID NO: 9554 - DNA, 485 bp, Zea Mays
ggagaacaggtgagtgtaaactcatgaatgtctggtcaggtgaccgtatttccacacaaaagaaacaaagtgcagctttgacaggcgttccgttcacccagcagccgaagcggctcccagcgacggggcgcgtgagcagcgcctcttcttttcgtcgccgctgcgacaggatcggccagcgccttcaattcaattcaaggagtgcgacaagagcagaggcgtcgtccgcttgaccccagaccggacccccactgcgctgcctgtgggctgtagccgactgcccaacaaaaagcgcaggacatttcacaatcggattcagcagaggccagcttatcgtcgtattgttgctcatgcctcgtcaattcttgtcaggatgaggttcagcgttgccaaatgtcaacagccatgtcttgtgccctagccctatgaataattagactctctctgtattttttttaaccgatataaattagattttttaaaac

SEQ ID NO: 9555 - DNA, 420 bp, Zea Mays
ggagaacaggtgagtgtaaactcatgaatgtctggtcagccgaagcggctcccagcgacggggcgcgtgagcagcgcctcttcttttcgtcgccgctgcgacaggatcggccagcgccttcaattcaattcaaggagtgcgacaagagcagaggcgtcgtccgcttgaccccagaccggacccccactgcgctgcctgtgggctgtagccgactgcccaacaaaaagcgcaggacatttcacaatcggattcagcagaggccagcttatcgtcgtattgttgctcatgcctcgtcaattcttgtcaggatgaggttcagcgttgccaaatgtcaacagccatgtcttgtgccctagccctatgaataattagactctctctgtattttttttaaccgatataaattagattttttaaaac

SEQ ID NO: 9556 - DNA, 2034 bp, Zea Mays
tgcggagtagtccacccgttacgtcatcttggggtcgacttggctcgtattccgcctcacgtgattaattatcgtacctaaatgaaatgcataatgcacatgtatgaatataagaagaactagcacaatactagacaatgttacacggtcgaggattacacactactaacaagtcattagaaccaattacaggaaacgccagctgtcgatataagacgaactataatattcacgcttcttatttcatcagatctaattctaacagcaaaccatagcgaaccatttataagcaccctatctctcttaactagagcacaacgtctaaactcagactaaaactagaaaccattccattagcttctagaattactattctcagctattatgcataagacccactaaattaaatatttcatttatccttagtctaacgagtagaacattattatacaacataaagttctgtgaaactgctttcctaattattttgggtaaccctaaccaagacaaaaaataaaaataaacatttaatcacgactactaatctaactaatcaatatctgactatgacatttaccgatcagcaaacacagaacataacggctatcgcaacaggtcatcgacttcataccaacaaatgaaatccgtcatacgcaatactaacagcacgtatcggctagtcgttagaaacacaagacttattctgtgtaatattaattcgaccatacttcggatatgaaacaccaatttaatcctcctcgcataacctacgtctttgaacctaaacttagctacatgacattagcaaacatctaatacaatcacaacacatctacatcctgacacgaaaattatcgcaattaatatactaaaccaataaatccatcgaacacatttatacatcaaactagctagcgaattaacaaaccgactcactaatgctaatttgactcagaagtcgtggaaacaacaacaagtcccggttcaaacgattcatcgaacacctggcgtgcaagtgaactaaatggaatcaaacgtgcttaacgcaaactgtgatgccccgtagggaatgaacctacacgcaaacatacaaaggaaacaaacatagcgctaaataacgctgcttgaacttgcgaagatctccagctatacgcagatcatcggcagcgcgtcacgatgaactccaaaaacaacgacggcgatgacacagagcgcggcgcgacagactagggacgccgcgatgggcagcgagtacagaggagaacgacaggctcaacggcgaacgacgcgacgacgggctcaacggcgaacgacacgacgaccagctggaataccagggagccgagcgcgaggaagctggaggttcggcgagcaaatcaccagggaattatggcgagaccgtaacaccacgacgacgctgtggacaagtcgagaacacaggatgcgaaggcacgattggtggcgtcctgtggctaaagccagcgagctgcgaaggacgcagtccggcacgcgcagctaaggcgtacggagcaggggtgccgggcacgtgtgcgcggcaacgcacggcccaacgagcaaagacggcgcgacggccatgggaggcagaaaaggagcgcgcgcagggagcaaggacagccagctcggaccggcgtatcgagctcgaggaagacgacggaaccaccacctgcgcacggcggccatggacgagcgcgccagggagcagcaggagggcggccaagcgccatgggtgagggcagagagaaactcggcgagctggagggcataggtgagctggaggccgagcgccggccagggagttggcgagctggaagatggagcactcggctgtccggcgagcagaaccaggcacacgcggcaggaaaagaatatcagcgagagagggagagcgatgggaattgggaaggatgccgagggagatggaaacgacttgctgtggatgacgctgggagacttcagaaaaatcaacgaccggatagaatccaaggctcgtggcctggtgtccacgtacggtga

SEQ ID NO: 9557 - DNA, 1730 bp, Zea Mays
gggataaccagataaaccgttgaagagagtctgagcgggtctcgccaaactgcgccccctctttcaattccttatccgcacagtcacacggtttaatcgaatggcttcgccgtcgtgtttcctcttccgcccccgtccgccgctgtgcagccgccgccgccgcagcagcagcaggtccctctacctcctctccaagcagagcctgcaccgacttccctcaccaagaacatgccgccgtccagtggcagagcagctcgtcctgcggtcgctgccgcccggtaacggcaggcggatgggggcgacgggcttcgcctgctactgttcctacgacaccgagaacggactgcccacgccttcaccggacaagggaaaaagctcggatgagtggccaatccttcgccggtgggatgttccatgggagtggccaacgatttctctcaccatggtggcatgtgcagtaagacagctttcttttgacagggatagctgagcaatctattttggagcaactaggttttcgagctggggagacaactctagatgagaaagcagagatactcttcttgggacaactgtacagatctaagttcctatctctattagcacgacggtagttgtacttggagttatatttggcatgaccaatacctttcgaccattctcagatgatatatttcgctatggtaaagaattcaatgaaccacttaagctgcaaaacggatggcttctgtggtctgcaatcggcctgtttgttgcaatagttgctattgctttagcaggtgctgcaatgacatttctgaatggtgaaacaccacagagagagacagactcgctggtccttttgttgccgctgattggctcgtcaaacatcagcactgcctgtttgctgggcatcactgggattttggcacccattctggaggaaactgtgtttcgaggatttcttatggtatccctgactatgtggtttcctactccatatgctgtgcttatgactgctgcagtgtttgcctttgctcactttacaccaggagaatttcctcagcttttcgtgcttggtgtggtcttaggattttcatatgctcaaactcgcaaccttctaactcctattgcaatacacgctgtctggaactctggagtaatattgttgctaacttttcttcagatgcaagggtatgatatcagggagattttgcaggcatcttgaagatttaacgcagttagattaatttcatcctgtgttttcttgtgtcagagagggtcttgcaagttacggaactacttgtgctctgctcaaagggacattttcacgaaagtgactattttaagctgaattacggaggcatcggcaaaggtgtagaaactctgttggggttacaacaatggttctcacctacatatagaagatccttgttttcctttgtcttttctatgttagttagatccatttcccttttcccagtggtcatttatctatcagactgggcaaaagcatctcatgactcatgaggctgggcctgggatactatttccatcatcaacataaaagacaaagtttatgtataccagagtcgtcttaatgacggtgtttctgttcacttcgccgtttgtgtatgattgcagagaactgtgactgataggaacatcaagactgtataattaatcagcaaccgtagttggtgtcttacctgtaacgttatttgaaggggtaaaaaattgtttatgttgct

SEQ ID NO: 9558 - DNA, 1625 bp, Zea Mays
gggataaccagataaaccgttgaagagagtctgagcgggtctcgccaaactgcgccccctctttcaattccttatccgcacagtcacacggtttaatcgaatggcttcgccgtcgtgtttcctcttccgcccccgtccgccgctgtgcagccgccgccgccgcagcagcagcaggtccctctacctcctctccaagcagagcctgcaccgacttccctcaccaagaacatgccgccgtccagtggcagagcagctcgtcctgcggtcgctgccgcccggtaacggcaggcggatgggggcgacgggcttcgcctgctactgttcctacgacaccgagaacggactgcccacgccttcaccggacaagggaaaaagctcggatgagtggccaatccttcgccggtgggatgttccatgggagtggccaacgatttctctcaccatggtggcatgtgcagtaagagtgacattacttgccattttctgtttctgcaagtgcagtagcacgacggtagttgtacttggagttatatttggcatgaccaatacctttcgaccattctcagatgatatatttcgctatgaattcaatgaaccacttaagctgcaaaacggatggcttctgtggtctgcaatcggcctgtttgttgcaatagttgctattgctttagcaggtgctgcaatgacatttctgaatggtgaaacaccacagagagagacagactcgctggtccttttgttgccgctgattggctcgtcaaacatcagcactgcctgtttgctgggcatcactgggattttggcacccattctggaggaaactgtgtttcgaggatttcttatggtatccctgactatgtggtttcctactccatatgctgtgcttatgactgctgcagtgtttgcctttgctcactttacaccaggagaatttcctcagcttttcgtgcttggtgtggtcttaggattttcatatgctcaaactcgcaaccttctaactcctattgcaatacacgctgtctggaactctggagtaatattgttgctaacttttcttcagatgcaagggtatgatatcagggagattttgcaggcatcttgaagatttaacgcagttagattaatttcatcctgtgttttcttgtgtcagagagggtcttgcaagttacggaactacttgtgctctgctcaaagggacattttcacgaaagtgactattttaagctgaattacggaggcatcggcaaaggtgtagaaactctgttggggttacaacaatggttctcacctacatatagaagatccttgttttcctttgtcttttctatgttagttagatccatttcccttttcccagtggtcatttatctatcagactgggcaaaagcatctcatgactcatgaggctgggcctgggatactatttccatcatcaacataaaagacaaagtttatgtataccagagtcgtcttaatgacggtgtttctgttcacttcgccgtttgtgtatgattgcagagaactgtgactgataggaacatcaagactgtataattaatcagcaaccgtagttggtgtcttacctgtaacgttatttgaaggggtaaaaaattgtttatgttgct

SEQ ID NO: 9559 - DNA, 2054 bp, Zea Mays
gtaatgtagtatagagtgcaaatatagggagagagattggtgacgtgaagggaatcaagggatagtaagatacagggataaccagataaaccgttgaagagagtctgagcgggtctcgccaaactgcgccccctctttcaattccttatccgcacagtcacacggtttaatcgaatggcttcgccgtcgtgtttcctcttccgcccccgtccgccgctgtgcagccgccgccgccgcagcagcagcaggtccctctacctcctctccaagcagagcctgcaccgacttccctcaccaagaacatgccgccgtccagtggcagagcagctcgtcctgcggtcgctgccgcccggtaacggcaggcggatgggggcgacgggcttcgcctgctactgttcctacgacaccgagaacggactgcccacgccttcaccggacaagggaaaaagctcggatgagtggccaatccttcgccggtgggatgttccatgggagtggccaacgatttctctcaccatggtggcatgtgcagtaagctttcttttgacagggatagctgagcaatctattttggagcaactaggttttcgagctggggagacaactctagatgagaaagcagagatactcttcttgggacaactgtacagatctaagttcctatctctattagcacgacggtagttgtacttggagttatatttggcatgaccaatacctttcgaccattctcagatgatatatttcgctatggtaaaggtttggtcttgctacgtttgtgttcattttcatgttcttttttatacattggccacacgttagttcctttccaaagattacctaatttaataagaggactgtacaagatgttaaagtgtaattaaattacttaatatctaatatggatatctgtgttcaatagtgtctctttccgtttgtactatggttgcattgtggtaattcaggttgttctgaacaatggtctagtgttgtttgtattctttaactttcagaattcaatgaaccacttaagctgcaaaacggatggcttctgtggtctgcaatcggcctgtttgttgcaatagttgctattgctttagcaggtgctgcaatgacatttctgaatggtgaaacaccacagagagagacagactcgctggtccttttgttgccgctgattggctcgtcaaacatcagcactgcctgtttgctgggcatcactgggattttggcacccattctggaggaaactgtgtttcgaggatttcttatggtatccctgactatgtggtttcctactccatatgctgtgcttatgactgctgcagtgtttgcctttgctcactttacaccaggagaatttcctcagcttttcgtgcttggtgtggtcttaggattttcatatgctcaaactcgcaaccttctaactcctattgcaatacacgctgtctggaactctggagtaatattgttgctaacttttcttcagatgcaagggtatgatatcagggagattttgcaggcatcttgaagatttaacgcagttagattaatttcatcctgtgttttcttgtgtcagagagggtcttgcaagttacggaactacttgtgctctgctcaaagggacattttcacgaaagtgactattttaagctgaattacggaggcatcggcaaaggtgtagaaactctgttggggttacaacaatggttctcacctacatatagaagatccttgttttcctttgtcttttctatgttagttagatccatttcccttttcccagtggtcatttatctatcagactgggcaaaagcatctcatgactcatgaggctgggcctgggatactatttccatcatcaacataaaagacaaagtttatgtataccagagtcgtcttaatgacggtgtttctgttcacttcgccgtttgtgtatgattgcagagaactgtgactgataggaacatcaagactgtataattaatcagcaaccgtagttggtgtcttacctgtaacgttatttgaaggggtaaaaaattgtttatgttgct

SEQ ID NO: 9560 - DNA, 2168 bp, Zea Mays
aaaagtttgtttgaacgactcgtcttattcaaaatatttagaggtgtgacaacaagccaccttccatagtgtttattagtagataaaaaaataataatagatgataaatatgtataaaaaataatattttatagaggtaatgtagtatagagtgcaaatatagggagagagattggtgacgtgaagggaatcaagggatagtaagatacagggataaccagataaaccgttgaagagagtctgagcgggtctcgccaaactgcgccccctctttcaattccttatccgcacagtcacacggtttaatcgaatggcttcgccgtcgtgtttcctcttccgcccccgtccgccgctgtgcagccgccgccgccgcagcagcagcaggtccctctacctcctctccaagcagagcctgcaccgacttccctcaccaagaacatgccgccgtccagtggcagagcagctcgtcctgcggtcgctgccgcccggtaacggcaggcggatgggggcgacgggcttcgcctgctactgttcctacgacaccgagaacggactgcccacgccttcaccggacaagggaaaaagctcggatgagtggccaatccttcgccggtgggatgttccatgggagtggccaacgatttctctcaccatggtggcatgtgcagtaagacagctttcttttgacagggatagctgagcaatctattttggagcaactaggttttcgagctggggagacaactctagatgagaaagcagagatactcttcttgggacaacttagcacgacggtagttgtacttggagttatatttggcatgaccaatacctttcgaccattctcagatgatatatttcgctatggtaaaggtttggtcttgctacgtttgtgttcattttcatgttcttttttatacattggccacacgttagttcctttccaaagattacctaatttaataagaggactgtacaagatgttaaagtgtaattaaattacttaatatctaatatggatatctgtgttcaatagtgtctctttccgtttgtactatggttgcattgtggtaattcaggttgttctgaacaatggtctagtgttgtttgtattctttaactttcagaattcaatgaaccacttaagctgcaaaacggatggcttctgtggtctgcaatcggcctgtttgttgcaatagttgctattgctttagcaggtgctgcaatgacatttctgaatggtgaaacaccacagagagagacagactcgctggtccttttgttgccgctgattggctcgtcaaacatcagcactgcctgtttgctgggcatcactgggattttggcacccattctggaggaaactgtgtttcgaggatttcttatggtatccctgactatgtggtttcctactccatatgctgtgcttatgactgctgcagtgtttgcctttgctcactttacaccaggagaatttcctcagcttttcgtgcttggtgtggtcttaggattttcatatgctcaaactcgcaaccttctaactcctattgcaatacacgctgtctggaactctggagtaatattgttgctaacttttcttcagatgcaagggtatgatatcagggagattttgcaggcatcttgaagatttaacgcagttagattaatttcatcctgtgttttcttgtgtcagagagggtcttgcaagttacggaactacttgtgctctgctcaaagggacattttcacgaaagtgactattttaagctgaattacggaggcatcggcaaaggtgtagaaactctgttggggttacaacaatggttctcacctacatatagaagatccttgttttcctttgtcttttctatgttagttagatccatttcccttttcccagtggtcatttatctatcagactgggcaaaagcatctcatgactcatgaggctgggcctgggatactatttccatcatcaacataaaagacaaagtttatgtataccagagtcgtcttaatgacggtgtttctgttcacttcgccgtttgtgtatgattgcagagaactgtgactgataggaacatcaagactgtataattaatcagcaaccgtagttggtgtcttacctgtaacgttatttgaaggggtaaaaaattgtttatgttgct

SEQ ID NO: 9561 - DNA, 1848 bp, Zea Mays
gggataaccagataaaccgttgaagagagtctgagcgggtctcgccaaactgcgccccctctttcaattccttatccgcacagtcacacggtttaatcgaatggcttcgccgtcgtgtttcctcttccgcccccgtccgccgctgtgcagccgccgccgccgcagcagcagcaggtccctctacctcctctccaagcagagcctgcaccgacttccctcaccaagaacatgccgccgtccagtggcagagcagctcgtcctgcggtcgctgccgcccggtaacggcaggcggatgggggcgacgggcttcgcctgctactgttcctacgacaccgagaacggactgcccacgccttcaccggacaagggaaaaagctcggatgagtggccaatccttcgccggtgggatgttccatgggagtggccaacgatttctctcaccatggtggcatgtgcagtaagggatagctgagcaatctattttggagcaactaggttttcgagctggggagacaactctagatgagaaagcagagatactcttcttgggacaactgtacagatctaagttcctatctctatgtaaaaactttatttgtaccatagttttcagtttaatttgtgaatatgctgcatgctctgaatatcttgtgtcagagtgacattacttgccattttctgtttctgcaagtgcagtagcacgacggtagttgtacttggagttatatttggcatgaccaatacctttcgaccattctcagatgatatatttcgctatggtaaaggtttggtcttgctacgtttgtgttcattttcatgttcttttttatacattggccacacgttagttcctttccaaagattacctaatttaataagaggactgtacaagatgttaaagtgtaattaaattacttaatatctaatatggatatctgtgttcaatagtgtctctttccgtttgtactatggttgcattgtggtaattcaggttgttctgaacaatggtctagtgttgtttgtattctttaactttcagaattcaatgaaccacttaagctgcaaaacggatggcttctgtggtctgcaatcggcctgtttgttgcaatagttgctattgctttagcaggtgctgcaatgacatttctgaatggtgaaacaccacagagagagacagactcgctggtccttttgttgccgctgattggctcgtcaaacatcagcactgcctgtttgctgggcatcactgggattttggcacccattctggaggaaactgtgtttcgaggatttcttatggtatccctgactatgtggtttcctactccatatgctgtgcttatgactgctgcagtgtttgcctttgctcactttacaccaggagaatttcctcagcttttcgtgcttggtgtggtcttaggattttcatatgctcaaactcgcaaccttctaactcctattgcaatacacgctgtctggaactctggagtaatattgttgctaacttttcttcagatgcaagggtatgatatcagggagattttgcaggcatcttgaagatttaacgcagttagattaatttcatcctgtgttttcttgtgtcagagtatgttattatcaaacacagtaaatacgcaatgatagaaatacattctttagaaaaccctttgccaaggtgtatttagaattgatgcataacatctaagtaaaaaacttagattttccttgaagtgctttaatatattactgtgctgtgtgaagttgaaatttagagctttagaagaaatcgtgctatgtataatcatttacttcaagacaatcaaataacagaagccagttctgtgataa

SEQ ID NO: 9562 - DNA, 1726 bp, Zea Mays
gggataaccagataaaccgttgaagagagtctgagcgggtctcgccaaactgcgccccctctttcaattccttatccgcacagtcacacggtttaatcgaatggcttcgccgtcgtgtttcctcttccgcccccgtccgccgctgtgcagccgccgccgccgcagcagcagcaggtccctctacctcctctccaagcagagcctgcaccgacttccctcaccaagaacatgccgccgtccagtggcagagcagctcgtcctgcggtcgctgccgcccggtaacggcaggcggatgggggcgacgggcttcgcctgctactgttcctacgacaccgagaacggactgcccacgccttcaccggacaagggaaaaagctcggatgagtggccaatccttcgccggtgggatgttccatgggagtggccaacgatttctctcaccatggtggcatgtgcagtaagacagctttcttttgacagggatagctgagcaatctattttggagcaactaggttttcgagctggggagacaactctagatgagaaagcagagatactcttcttgggacaacttagcacgacggtagttgtacttggagttatatttggcatgaccaatacctttcgaccattctcagatgatatatttcgctatggtaaaggtttggtcttgctacgtttgtgttcattttcatgttcttttttatacattggccacacgttagttcctttccaaagattacctaatttaataagaggactgtacaagatgttaaagtgtaattaaattacttaatatctaatatggatatctgtgttcaatagtgtctctttccgtttgtactatggttgcattgtggtaattcaggttgttctgaacaatggtctagtgttgtttgtattctttaactttcagaattcaatgaaccacttaagctgcaaaacggatggcttctgtggtctgcaatcggcctgtttgttgcaatagttgctattgctttagcaggtgctgcaatgacatttctgaatggtgaaacaccacagagagagacagactcgctggtccttttgttgccgctgattggctcgtcaaacatcagcactgcctgtttgctgggcatcactgggattttggcacccattctggaggaaactgtgtttcgaggatttcttatggtatccctgactatgtggtttcctactccatatgctgtgcttatgactgctgcagtgtttgcctttgctcactttacaccaggagaatttcctcagcttttcgtgcttggtgtggtcttaggattttcatatgctcaaactcgcaaccttctaactcctattgcaatacacgctgtctggaactctggagtaatattgttgctaacttttcttcagatgcaagggtatgatatcagggagattttgcaggcatcttgaagatttaacgcagttagattaatttcatcctgtgttttcttgtgtcagagtatgttattatcaaacacagtaaatacgcaatgatagaaatacattctttagaaaaccctttgccaaggtgtatttagaattgatgcataacatctaagtaaaaaacttagattttccttgaagtgctttaatatattactgtgctgtgtgaagttgaaatttagagctttagaagaaatcgtgctatgtataatcatttacttcaagacaatcaaataacagaagccagttctgtgataa

SEQ ID NO: 9563 - DNA, 1654 bp, Zea Mays
gggataaccagataaaccgttgaagagagtctgagcgggtctcgccaaactgcgccccctctttcaattccttatccgcacagtcacacggtttaatcgaatggcttcgccgtcgtgtttcctcttccgcccccgtccgccgctgtgcagccgccgccgccgcagcagcagcagtggcagagcagctcgtcctgcggtcgctgccgcccggtaacggcaggcggatgggggcgacgggcttcgcctgctactgttcctacgacaccgagaacggactgcccacgccttcaccggacaagggaaaaagctcggatgagtggccaatccttcgccggtgggatgttccatgggagtggccaacgatttctctcaccatggtggcatgtgcagtaagctttcttttgacagggatagctgagcaatctattttggagcaactaggttttcgagctggggagacaactctagatgagaaagcagagatactcttcttgggacaacttagcacgacggtagttgtacttggagttatatttggcatgaccaatacctttcgaccattctcagatgatatatttcgctatggtaaaggtttggtcttgctacgtttgtgttcattttcatgttcttttttatacattggccacacgttagttcctttccaaagattacctaatttaataagaggactgtacaagatgttaaagtgtaattaaattacttaatatctaatatggatatctgtgttcaatagtgtctctttccgtttgtactatggttgcattgtggtaattcaggttgttctgaacaatggtctagtgttgtttgtattctttaactttcagaattcaatgaaccacttaagctgcaaaacggatggcttctgtggtctgcaatcggcctgtttgttgcaatagttgctattgctttagcaggtgctgcaatgacatttctgaatggtgaaacaccacagagagagacagactcgctggtccttttgttgccgctgattggctcgtcaaacatcagcactgcctgtttgctgggcatcactgggattttggcacccattctggaggaaactgtgtttcgaggatttcttatggtatccctgactatgtggtttcctactccatatgctgtgcttatgactgctgcagtgtttgcctttgctcactttacaccaggagaatttcctcagcttttcgtgcttggtgtggtcttaggattttcatatgctcaaactcgcaaccttctaactcctattgcaatacacgctgtctggaactctggagtaatattgttgctaacttttcttcagatgcaagggtatgatatcagggagattttgcaggcatcttgaagatttaacgcagttagattaatttcatcctgtgttttcttgtgtcagagtatgttattatcaaacacagtaaatacgcaatgatagaaatacattctttagaaaaccctttgccaaggtgtatttagaattgatgcataacatctaagtaaaaaacttagattttccttgaagtgctttaatatattactgtgctgtgtgaagttgaaatttagagctttagaagaaatcgtgctatgtataatcatttacttcaagacaatcaaataacagaagccagttctgtgataa

SEQ ID NO: 9564 - DNA, 1954 bp, Zea Mays
cccatgcggaccggaacggtcaattatccctccactgcccgccacaccctatcccccacactcaccctccgcaccggatcccgtcatcacctccgagcggcgcgccgggccggcatccaactcgccgccgacgcgccgcgccccagaacgagccgccggaacgatctccctaacccccgatgcgccgtcctattgcccgcggcgagcccaaggggctgaggaagggatatacgcatgggttgcagcaaattatgctttggggactcttgggggtgatccaaacgacaccactgggattattgaacttggtgacacttgttactggtgaacctgtgccaccgaagttctctcatatgcttaagtttggtgatgtctcatataacctgtacagccacagttttttgcatcttggtctgaatgtagcatatgaatcactccatgacttgctcagctcacctggccttagatcaatggccacacatttgatttctcaagctaagtacaaagatccttgcactccaaggggatttacacgcatagcaggatcagctaaacttcctgttggtgttcttgagccgaaggttgaatacagaccttttgctcattctgcggggaacttctctgagtgtagatctgcagcactaacactactgcaaaaaggaaatgagggatgtacatatcatgaatgccgccttggagcagcatttgtaccagagttggaagggaaatttttggcgacagaaaacttttaccatacttcaaaggtccaattctttctctaccgttgggggctttcagaaaggggattaaatttgaacatactgcatgcataatgataggagtcttctcttcggatcaagattgtccattttcttttatgttcagtattctacaatctttagtacatgttcatttgatatttgattgcttaacagttctttggtctgagttcgaagcccttcctttctgatctgatggtggctggggagaaattttgccatggggattggtcgaagattaaaaataagtacagttcttttgatgacggacaactgcttcttttttgcttttcctcagcatatattattgctctactgcatgatacgcttaaaatgccactggatcataaaaggtgaagccttttctataagttctattctttgttgaaacctggatatttatgagttttttctcaggattgatgttgtaaaccaaatccatggcgtgcctgttgactgggcattgggtgctttcattgtgcagacgacgatgaacagaacagagtactcagattcatcagtttcatatctaaacagctatgactctcctggcttggttccgcttctgttcattattgtggttgtatttacagcattgtccattctaaggtggagaaaacctcgtctgaagacgatctacgatatggagaaaggcaggtacatcataacaagggtcagccaatgagtcgcgcacatcagcgttgggagtgggtggactttctgcagcggagcactattgaccatgtatgtagattttcctaaattgatttcttacttagtggccaactacctccagcatgttgccttgcggagtcaacttgttgagtttgagcagcaacccctgtatatgatagaaggatgcgggttgccgtggcatttgtgcatgttcagtgttgtatgtaatgttgctaaactgttgttgatgtaattagaattttgtgcatgggcatccatccgatgatgtaatcctgagataaccatgtgtctaatgatcgattgaagttctctgccatggatcatggatggcagggcagctgtatctttgtttcatgtcaaatcactgatgttatgtaatcctaagatattatttctaatggtcgtgtatattctcttgcattaaacaccacatgtctgttgataccacaatcacatagcattagtttaggctatgtgat

SEQ ID NO: 9565 - DNA, 2173 bp, Zea Mays
cccatgcggaccggaacggtcaattatccctccactgcccgccacaccctatcccccacactcaccctccgcaccggatcccgtcatcacctccgagcggcgcgccgggccggcatccaactcgccgccgacgcgccgcgccccagaacgagccgccggaacgatctccctaacccccgatgcgccgtcctattgcccgcggcgagcccaaggtacaaaccctagctctagctcctccctccgcagccgccccaaccaagatgggcgcccataggcgacaacccagctcccaccgccgcgttgccggcgccctcacgctcctcgccgcgtccgcgctcgcgcttcttctcctagcatcccgccgggttcccccgacctacggcgtcatcatcgacgccggcagcacggggagccgcgtccacgtcctcgcctaccgctccacggcgggactcccgcagctggactgggcacgcatggcctcgatgaaggctaccccagggctatcgtccttcgcggcggacccacgcggcgcggggctgtctctggcgccgctattggagtttgccaggcgccgtgtgccgcgggagagctggggggaaaccgaggtgcggctcatggccactgccgggctgcggctgctcgattccgcagtggccgagtccatcctgcagtcttgcagggaagtgcttcgggggtcggggttccaatttcaggacgaatgggccaccgtgatctcaggggctgaggaagggatatacgcatgggttgcagcaaattatgctttggggactcttgggggtgatccaaacgacaccactgggattattgaacttggtggggcttctattcaggtgacacttgttactggtgaacctgtgccaccgaagttctctcatatgcttaagtttggtgatgtctcatataacctgtacagccacagttttttgcatcttggtctgaatgtagcatatgaatcactccatgacttgctcagctcacctggccttagatcaatggccacacatttgatttctcaagctaagtacaaagatccttgcactccaaggggatttacacgcatagcaggatcagctaaacttcctgttggtgttcttgagccgaaggttgaatacagaccttttgctcattctgcggggaacttctctgagtgtagatctgcagcactaacactactgcaaaaaggaaatgagggatgtacatatcatgaatgccgccttggagcagcatttgtaccagagttggaagggaaatttttggcgacagaaaacttttaccatacttcaaagttctttggtctgagttcgaagcccttcctttctgatctgatggtggctggggagaaattttgccatggggattggtcgaagattaaaaataagtacagttcttttgatgacggacaactgcttcttttttgcttttcctcagcatatattattgctctactgcatgatacgcttaaaatgccactggatcataaaaggattgatgttgtaaaccaaatccatggcgtgcctgttgactgggcattgggtgctttcattgtgcagacgacgatgaacagaacagacattgtccattctaaggtggagaaaacctcgtctgaagacgatctacgatatggagaaaggcaggtacatcataacaagggtcagccaatgagtcgcgcacatcagcgttgggagtgggtggactttctgcagcggagcactattgaccatgtatgtagattttcctaaattgatttcttacttagtggccaactacctccagcatgttgccttgcggagtcaacttgttgagtttgagcagcaacccctgtatatgatagaaggatgcgggttgccgtggcatttgtgcatgttcagtgttgtatgtaatgttgctaaactgttgttgatgtaattagaattttgtgcatgggcatccatccgatgatgtaatcctgagataaccatgtgtctaatgatcgattgaagttctctgccatggatcatggatggcagggcagctgtatctttgtttcatgtcaaatcactgatgttatgtaatcctaagatattatttctaatggtcgtgtatattctcttgcattaaacaccacatgtctgttgataccacaatcacatagcattagtttaggctatgtgat

SEQ ID NO: 9566 - DNA, 1450 bp, Zea Mays
cccatgcggaccggaacggtcaattatccctccactgcccgccacaccctatcccccacactcaccctccgcaccggatcccgtcatcacctccgagcggcgcgccgggccggcatccaactcgccgccgacgcgccgcgccccagaacgagccgccggaacgatctccctaacccccgatgcgccgtcctattgcccgcggcgagcccaaggggctgaggaagggatatacgcatgggttgcagcaaattatgctttggggactcttgggggtgatccaaacgacaccactgggattattgaacttggtggggcttctattcaggtgacacttgttactggtgaacctgtgccaccgaagttctctcatatgcttaagtttggtgatgtctcatataacctgtacagccacagttttttgcatcttggtctgaatgtagcatatgaatcactccatgacttgctcagctcacctggccttagatcaatggccacacatttgatttctcaagctaagtacaaagatccttgcactccaaggggatttacacgcatagcaggatcagctaaacttcctgttggtgttcttgagccgaaggttgaatacagaccttttgctcattctgcggggaacttctctgagtgtagatctgcagcactaacactactgcaaaaaggaaatgagggatgtacatatcatgaatgccgccttggagcagcatttgtaccagagttggaagggaaatttttggcgacagaaaacttttaccatacttcaaaggattgatgttgtaaaccaaatccatggcgtgcctgttgactgggcattgggtgctttcattgtgcagacgacgatgaacagaacagacattgtccattctaaggtggagaaaacctcgtctgaagacgatctacgatatggagaaaggcaggtacatcataacaagggtcagccaatgagtcgcgcacatcagcgttgggagtgggtggactttctgcagcggagcactattgaccatgtatgtagattttcctaaattgatttcttacttagtggccaactacctccagcatgttgccttgcggagtcaacttgttgagtttgagcagcaacccctgtatatgatagaaggatgcgggttgccgtggcatttgtgcatgttcagtgttgtatgtaatgttgctaaactgttgttgatgtaattagaattttgtgcatgggcatccatccgatgatgtaatcctgagataaccatgtgtctaatgatcgattgaagttctctgccatggatcatggatggcagggcagctgtatctttgtttcatgtcaaatcactgatgttatgtaatcctaagatattatttctaatggtcgtgtatattctcttgcattaaacaccacatgtctgttgataccacaatcacatagcattagtttaggctatgtgat

SEQ ID NO: 9567 - DNA, 2157 bp, Zea Mays
cccatgcggaccggaacggtcaattatccctccactgcccgccacaccctatcccccacactcaccctccgcaccggatcccgtcatcacctccgagcggcgcgccgggccggcatccaactcgccgccgacgcgccgcgccccagaacgagccgccggaacgatctccctaacccccgatgcgccgtcctattgcccgcggcgagcccaaggtacaaaccctagctctagctcctccctccgcagccgccccaaccaagatgggcgcccataggcgacaacccagctcccaccgccgcgttgccggcgccctcacgctcctcgccgcgtccgcgctcgcgcttcttctcctagcatcccgccgggttcccccgacctacggcgtcatcatcgacgccggcagcacggggagccgcgtccacgtcctcgcctaccgctccacggcgggactcccgcagctggactgggcacgcatggcctcgatgaaggctaccccagggctatcgtccttcgcggcggacccacgcggcgcggggctgtctctggcgccgctattggagtttgccaggcgccgtgtgccgcgggagagctggggggaaaccgaggtgcggctcatggccactgccgggctgcggctgctcgattccgcagtggccgagtccatcctgcagtcttgcagggaagtgcttcgggggtcggggttccaatttcaggacgaatgggccaccgtgatctcaggggctgaggaagggatatacgcatgggttgcagcaaattatgctttggggactcttgggggtgatccaaacgacaccactgggattattgaacttggtggggcttctattcaggtgacacttgttactggtgaacctgtgccaccgaagttctctcatatgcttaagtttggtgatgtctcatataacctgtacagccacagttttttgcatcttggtctgaatgtagcatatgaatcactccatgacttgctcagctcacctggccttagatcaatggccacacatttgatttctcaagctaagtacaaagatccttgcactccaaggggatttacacgcatagcaggatcagctaaacttcctgttggtgttcttgagccgaaggttgaatacagaccttttgctcattctgcggggaacttctctgagtgtagatctgcagcactaacactactgcaaaaaggaaatgagggatgtacatatcatgaatgccgccttggagcagcatttgtaccagagttggaagggaaatttttggcgacagaaaacttttaccatacttcaaagttctttggtctgagttcgaagcccttcctttctgatctgatggtggctggggagaaattttgccatggggattggtcgaagattaaaaataagtacagttcttttgatgacggacaactgcttcttttttgcttttcctcagcatatattattgctctactgcatgatacgcttaaaatgccactggatcataaaaggattgatgttgtaaaccaaatccatggcgtgcctgttgactgggcattgggtgctttcattgtgcagacgacgatgaacagaacagagtggagaaaacctcgtctgaagacgatctacgatatggagaaaggcaggtacatcataacaagggtcagccaatgagtcgcgcacatcagcgttgggagtgggtggactttctgcagcggagcactattgaccatgtatgtagattttcctaaattgatttcttacttagtggccaactacctccagcatgttgccttgcggagtcaacttgttgagtttgagcagcaacccctgtatatgatagaaggatgcgggttgccgtggcatttgtgcatgttcagtgttgtatgtaatgttgctaaactgttgttgatgtaattagaattttgtgcatgggcatccatccgatgatgtaatcctgagataaccatgtgtctaatgatcgattgaagttctctgccatggatcatggatggcagggcagctgtatctttgtttcatgtcaaatcactgatgttatgtaatcctaagatattatttctaatggtcgtgtatattctcttgcattaaacaccacatgtctgttgataccacaatcacatagcattagtttaggctatgtgat

SEQ ID NO: 9568 - DNA, 1594 bp, Zea Mays
cccatgcggaccggaacggtcaattatccctccactgcccgccacaccctatcccccacactcaccctccgcaccggatcccgtcatcacctccgagcggcgcgccgggccggcatccaactcgccgccgacgcgccgcgccccagaacgagccgccggaacgatctccctaacccccgatgcgccgtcctattgcccgcggcgagcccaaggggctgaggaagggatatacgcatgggttgcagcaaattatgctttggggactcttgggggtgatccaaacgacaccactgggattattgaacttggtggggcttctattcaggtgacacttgttactggtgaacctgtgccaccgaagttctctcatatgcttaagtttggtgatgtctcatataacctgtacagccacagttttttgcatcttggtctgaatgtagcatatgaatcactccatgacttgctcagctcacctggccttagatcaatggccacacatttgatttctcaagctaagtacaaagatccttgcactccaaggggatttacacgcatagcaggatcagctaaacttcctgttggtgttcttgagccgaaggttgaatacagaccttttgctcattctgcggggaacttctctgagtgtagatctgcagcactaacactactgcaaaaaggaaatgagggatgtacatatcatgaatgccgccttggagcagcatttgtaccagagttggaagggaaatttttggcgacagaaaacttttaccatacttcaaagcatatattattgctctactgcatgatacgcttaaaatgccactggatcataaaaggattgatgttgtaaaccaaatccatggcgtgcctgttgactgggcattgggtgctttcattgtgcagacgacgatgaacagaacagagtactcagattcatcagtttcatatctaaacagctatgactctcctggcttggttccgcttctgttcattattgtggttgtatttacagcattgtccattctaaggtggagaaaacctcgtctgaagacgatctacgatatggagaaaggcaggtacatcataacaagggtcagccaatgagtcgcgcacatcagcgttgggagtgggtggactttctgcagcggagcactattgaccatgtatgtagattttcctaaattgatttcttacttagtggccaactacctccagcatgttgccttgcggagtcaacttgttgagtttgagcagcaacccctgtatatgatagaaggatgcgggttgccgtggcatttgtgcatgttcagtgttgtatgtaatgttgctaaactgttgttgatgtaattagaattttgtgcatgggcatccatccgatgatgtaatcctgagataaccatgtgtctaatgatcgattgaagttctctgccatggatcatggatggcagggcagctgtatctttgtttcatgtcaaatcactgatgttatgtaatcctaagatattatttctaatggtcgtgtatattctcttgcattaaacaccacatgtctgttgataccacaatcacatagcattagtttaggctatgtgat

SEQ ID NO: 9569 - DNA, 2157 bp, Zea Mays
cccatgcggaccggaacggtcaattatccctccactgcccgccacaccctatcccccacactcaccctccgcaccggatcccgtcatcacctccgagcggcgcgccgggccggcatccaactcgccgccgacgcgccgcgccccagaacgagccgccggaacgatctccctaacccccgatgcgccgtcctattgcccgcggcgagcccaaggtacaaaccctagctctagctcctccctccgcagccgccccaaccaagatgggcgcccataggcgacaacccagctcccaccgccgcgttgccggcgccctcacgctcctcgccgcgtccgcgctcgcgcttcttctcctagcatcccgccgggttcccccgacctacggcgtcatcatcgacgccggcagcacggggagccgcgtccacgtcctcgcctaccgctccacggcgggactcccgcagctggactgggcacgcatggcctcgatgaaggctaccccagggctatcgtccttcgcggcggacccacgcggcgcggggctgtctctggcgccgctattggagtttgccaggcgccgtgtgccgcgggagagctggggggaaaccgaggtgcggctcatggccactgccgggctgcggctgctcgattccgcagtggccgagtccatcctgcagtcttgcagggaagtgcttcgggggtcggggttccaatttcaggacgaatgggccaccgtgatctcaggggctgaggaagggatatacgcatgggttgcagcaaattatgctttggggactcttgggggtgatccaaacgacaccactgggattattgaacttggtggggcttctattcaggtgacacttgttactggtgaacctgtgccaccgaagttctctcatatgcttaagtttggtgatgtctcatataacctgtacagccacagttttttgcatcttggtctgaatgtagcatatgaatcactccatgacttgctcagctcacctggccttagatcaatggccacacatttgatttctcaagctaagtacaaagatccttgcactccaaggggatttacacgcatagcaggatcagctaaacttcctgttggtgttcttgagccgaaggttgaatacagaccttttgctcattctgcggggaacttctctgagtgtagatctgcagcactaacactactgcaaaaaggaaatgagggatgtacatatcatgaatgccgccttggagcagcatttgtaccagagttggaagggaaatttttggcgacagaaaacttttaccatacttcaaagttctttggtctgagttcgaagcccttcctttctgatctgatggtggctggggagaaattttgccatggggattggtcgaagattaaaaataagattgatgttgtaaaccaaatccatggcgtgcctgttgactgggcattgggtgctttcattgtgcagacgacgatgaacagaacagagtactcagattcatcagtttcatatctaaacagctatgactctcctggcttggttccgcttctgttcattattgtggttgtatttacagcattgtccattctaaggtggagaaaacctcgtctgaagacgatctacgatatggagaaaggcaggtacatcataacaagggtcagccaatgagtcgcgcacatcagcgttgggagtgggtggactttctgcagcggagcactattgaccatgtatgtagattttcctaaattgatttcttacttagtggccaactacctccagcatgttgccttgcggagtcaacttgttgagtttgagcagcaacccctgtatatgatagaaggatgcgggttgccgtggcatttgtgcatgttcagtgttgtatgtaatgttgctaaactgttgttgatgtaattagaattttgtgcatgggcatccatccgatgatgtaatcctgagataaccatgtgtctaatgatcgattgaagttctctgccatggatcatggatggcagggcagctgtatctttgtttcatgtcaaatcactgatgttatgtaatcctaagatattatttctaatggtcgtgtatattctcttgcattaaacaccacatgtctgttgataccacaatcacatagcattagtttaggctatgtgat

SEQ ID NO: 9570 - DNA, 2120 bp, Zea Mays
cccatgcggaccggaacggtcaattatccctccactgcccgccacaccctatcccccacactcaccctccgcaccggatcccgtcatcacctccgagcggcgcgccgggccggcatccaactcgccgccgacgcgccgcgccccagaacgagccgccggaacgatctccctaacccccgatgcgccgtcctattgcccgcggcgagcccaaggtacaaaccctagctctagctcctccctccgcagccgccccaaccaagatgggcgcccataggcgacaacccagctcccaccgccgcgttgccggcgccctcacgctcctcgccgcgtccgcgctcgcgcttcttctcctagcatcccgccgggttcccccgacctacggcgtcatcatcgacgccggcagcacggggagccgcgtccacgtcctcgcctaccgctccacggcgggactcccgcagctggactgggcacgcatggcctcgatgaaggctaccccagggctatcgtccttcgcggcggacccacgcggcgcggggctgtctctggcgccgctattggagtttgccaggcgccgtgtgccgcgggagagctggggggaaaccgaggtgcggctcatggccactgccgggctgcggctgctcgattccgcagtggccgagtccatcctgcagtcttgcagggaagtgcttcgggggtcggggttccaatttcaggacgaatgggccaccgtgatctcaggggctgaggaagggatatacgcatgggttgcagcaaattatgctttggggactcttgggggtgatccaaacgacaccactgggattattgaacttggtggggcttctattcaggtgacacttgttactggtgaacctgtgccaccgaagttctctcatatgcttaagtttggtgatgtctcatataacctgtacagccacagttttttgcatcttggtctgaatgtagcatatgaatcactccatgacttgctcagctcacctggccttagatcaatggccacacatttgatttctcaagctaagtacaaagatccttgcactccaaggggatttacacgcatagcaggatcagctaaacttcctgttggtgttcttgagccgaaggttgaatacagaccttttgctcattctgcggggaacttctctgagtgtagatctgcagcactaacactactgcaaaaaggaaatgagggatgtacatatcatgaatgccgccttggagcagcatttgtaccagagttggaagggaaatttttggcgacagaaaacttttaccatacttcaaagcatatattattgctctactgcatgatacgcttaaaatgccactggatcataaaaggattgatgttgtaaaccaaatccatggcgtgcctgttgactgggcattgggtgctttcattgtgcagacgacgatgaacagaacagagtactcagattcatcagtttcatatctaaacagctatgactctcctggcttggttccgcttctgttcattattgtggttgtatttacagcattgtccattctaaggtggagaaaacctcgtctgaagacgatctacgatatggagaaaggcaggtacatcataacaagggtcagccaatgagtcgcgcacatcagcgttgggagtgggtggactttctgcagcggagcactattgaccatgtatgtagattttcctaaattgatttcttacttagtggccaactacctccagcatgttgccttgcggagtcaacttgttgagtttgagcagcaacccctgtatatgatagaaggatgcgggttgccgtggcatttgtgcatgttcagtgttgtatgtaatgttgctaaactgttgttgatgtaattagaattttgtgcatgggcatccatccgatgatgtaatcctgagataaccatgtgtctaatgatcgattgaagttctctgccatggatcatggatggcagggcagctgtatctttgtttcatgtcaaatcactgatgttatgtaatcctaagatattatttctaatggtcgtgtatattctcttgcattaaacaccacatgtctgttgataccacaatcacatagcattagtttaggctatgtgat

SEQ ID NO: 9571 - DNA, 2016 bp, Zea Mays
gaatttgccccgtcaggatgccctccgattcgtccgtaggttaaattctcaaaaaatcttaattttatcaatgcgatgggccgtcggggtaactcttgtgcactctgcatgccgttttagtatggcgttattattctgaaatacccttggacaagcgacctgtgtgtccagtgtccaccacccgtgaggacaatgcaatccagagacctgaatctgtctctgtccgccctccccaccgtttccaggacctggtggagacggagtgccagaggtggaagagcaaaggcgtgaacataaagtacgaggactatcccgttcctcgtgcacaacccggagatcgccctcgtccaggctcgctggaagtttgttaattctgacgagtgtctgctgacaagattccaagagatgtcgttggactaccatttcaagtatgagcaagaggccggctcctcggtgtattcattctttggcttcaatgggacagctggtgtctggaggatctcagcgatcgatgatgctgggggctggaaggaccggacgacagtggaagatatggacctggctgtccgtgcgatgctgcagggatggaagttcctttacgtcggcgacattaaggtcaagagcgaactgcctagcacattcaaggcgtaccggtttcagcagcacaggtggtcatgtgggccggcgaacctgttcaagaaaatgatggtagagattttagaaaacaagagagtgtcgctgtggagtaaaatccacctatggtacgatttcttcttcgtcgggaaagtcgctgctcatacggtgacattcatctactactgcttcgcgatccctgtgtctgttctgttccctgagatccagatccctctctggggagttgtctatgtcccgacagtcataaccctcttgaaggctcttggcacaccgagttcctttcacctggtgatcctctgggtcctgtttgagaatgtcatgtcgttgcaccggattaaggctgcagtaagtggtcttctggatgctggtgggcgagtcaatgagtgggttgtcactgagaagttgggcgacaccagcaaggcaaagcctggcaccaatggatcagacactgctgtaaaggtgatagatgtgaagctaacagaaccgcttgttccgaagctagtgaagaggcgagcaagattttgggagaggtaccactgctcagaacttttcgttggaacctgcataatcctgtgtggtttctatgacctgctttttgcaaataagggatactacatttttctcttccttcaaggcacggcgttccttgttgttggttttgggtatgtcggcacactacctccttgcactgcataagctgtcatggacaactgatattacctgctcaccagaaactgagcaagcaaagctcctctctcctgcacatatcaaactcttgaattcaatgatagttgagcaatgttcccccatcagtcttggcctgacatgatccaccgccgagaaggttgttcagatatcgccgtcgttctcctgtcagtgttggtcagatttgagccaaaccattctttattgtcagaaggccattcaaatagtgtcaccattgcaaattttataataacggtgtttaccgaagcatcatgaaaagaaaaatgattggtgcagcagcatttcgttcgcattccatagagatgcagttcacatccagtatttttttttggaaatctagtgttattactcagagttcagatccataatggaagattgttggcttcctcagttcataacctgtgtaggcttaaaacttgtagatgtaaattgttattaacactaatattttttattgaatccgggtattattgaaatgcaagtgtagcatgcatttcttttcctgtaagaagccaaagatgacttctgagtaacacgtctaatcagacattttacttgatgtggcacatggaatagtggatctattttaactatgtagcagcaaccatttggtcatactggtcacgcatgattgaa

SEQ ID NO: 9572 - DNA, 1941 bp, Zea Mays
gaatttgccccgtcaggatgccctccgattcgtccgtaggacctggtggagacggagtgccagaggtggaagagcaaaggcgtgaacataaagtacgaggtgagggggaaccggaaggggtacaaggccggcgcgctcaaggaaggactgaagcacgactacgtcgcagactgcgaatacatcgccatgttcgacgccgacttccagcctgactctgacttcctcctcaggactatcccgttcctcgtgcacaacccggagatcgccctcgtccaggctcgctggaagtttgttaattctgacgagtgtctgctgacaagattccaagagatgtcgttggactaccatttcaagtatgagcaagaggccggctcctcggtgtattcattctttggcttcaatgggacagctggtgtctggaggatctcagcgatcgatgatgctgggggctggaaggaccggacgacagtggaagatatggacctggctgtccgtgcgatgctgcagggatggaagttcctttacgtcggcgacattaaggtcaagagcgaactgcctagcacattcaaggcgtaccggtttcagcagcacaggtggtcatgtgggccggcgaacctgttcaagaaaatgatggtagagattttagaaaacaagagagtgtcgctgtggagtaaaatccacctatggtacgatttcttcttcgtcgggaaagtcgctgctcatacggtgacattcatctactactgcttcgcgatccctgtgtctgttctgttccctgagatccagatccctctctggggagttgtctatgtcccgacagtcataaccctcttgaaggctcttggcacaccgagttcctttcacctggtgatcctctgggtcctgtttgagaatgtcatgtcgttgcaccggattaaggctgcagtaagtggtcttctggatgctggtgggcgagtcaatgagtgggttgtcactgagaagttgggcgacaccagcaaggcaaagcctggcaccaatggatcagacactgctgtaaaggtgatagatgtgaagctaacagaaccgcttgttccgaagctagtgaagaggcgagcaagattttgggagaggtaccactgctcagaacttttcgttggaacctgcataatcctgtgtggtttctatgacctgctttttgcaaataagggatactacatttttctcttccttcaaggcacggcgttccttgttgttggttttgggtatgtcggcacactacctccttgcactgcataagctgtcatggacaactgatattacctgctcaccagaaactgagcaagcaaagctcctctctcctgcacatatcaaactcttgaattcaatgatagttgagcaatgttcccccatcagtcttggcctgacatgatccaccgccgagaaggttgttcagatatcgccgtcgttctcctgtcagtgttggtcagatttgagccaaaccattctttattgtcagaaggccattcaaatagtgtcaccattgcaaattttataataacggtgtttaccgaagcatcatgaaaagaaaaatgattggtgcagcagcatttcgttcgcattccatagagatgcagttcacatccagtatttttttttggaaatctagtgttattactcagagttcagatccataatggaagattgttggcttcctcagttcataacctgtgtaggcttaaaacttgtagatgtaaattgttattaacactaatattttttattgaatccgggtattattgaaatgcaagtgtagcatgcatttcttttcctgtaagaagccaaagatgacttctgagtaacacgtctaatcagacattttacttgatgtggcacatggaatagtggatctattttaactatgtagcagcaaccatttggtcatactggtcacgcatgattgaa

SEQ ID NO: 9573 - DNA, 1896 bp, Zea Mays
cgcgcctcataagggcgcgggcgtctgctgccttgctgtcggaggacctggtggagacggagtgccagaggtggaagagcaaaggcgtgaacataaagtacgaggtgagggggaaccggaaggggtacaaggccggcgcgctcaaggaaggactgaagcacgactacgtcgcagactgcgaatacatcgccatgttcgacgccgacttccagcctgactctgacttcctcctcaggactatcccgttcctcgtgcacaacccggagatcgccctcgtccaggctcgctggaagtttgttaattctgacgagtgtctgctgacaagattccaagagatgtcgttggactaccatttcaaggacagctggtgtctggaggatctcagcgatcgatgatgctgggggctggaaggaccggacgacagtggaagatatggacctggctgtccgtgcgatgctgcagggatggaagttcctttacgtcggcgacattaaggtcaagagcgaactgcctagcacattcaaggcgtaccggtttcagcagcacaggtggtcatgtgggccggcgaacctgttcaagaaaatgatggtagagattttagaaaacaagagagtgtcgctgtggagtaaaatccacctatggtacgatttcttcttcgtcgggaaagtcgctgctcatacggtgacattcatctactactgcttcgcgatccctgtgtctgttctgttccctgagatccagatccctctctggggagttgtctatgtcccgacagtcataaccctcttgaaggctcttggcacaccgagttcctttcacctggtgatcctctgggtcctgtttgagaatgtcatgtcgttgcaccggattaaggctgcagtaagtggtcttctggatgctggtgggcgagtcaatgagtgggttgtcactgagaagttgggcgacaccagcaaggcaaagcctggcaccaatggatcagacactgctgtaaaggtgatagatgtgaagctaacagaaccgcttgttccgaagctagtgaagaggcgagcaagattttgggagaggtaccactgctcagaacttttcgttggaacctgcataatcctgtgtggtttctatgacctgctttttgcaaataagggatactacatttttctcttccttcaaggcacggcgttccttgttgttggttttgggtatgtcggcacactacctccttgcactgcataagctgtcatggacaactgatattacctgctcaccagaaactgagcaagcaaagctcctctctcctgcacatatcaaactcttgaattcaatgatagttgagcaatgttcccccatcagtcttggcctgacatgatccaccgccgagaaggttgttcagatatcgccgtcgttctcctgtcagtgttggtcagatttgagccaaaccattctttattgtcagaaggccattcaaatagtgtcaccattgcaaattttataataacggtgtttaccgaagcatcatgaaaagaaaaatgattggtgcagcagcatttcgttcgcattccatagagatgcagttcacatccagtatttttttttggaaatctagtgttattactcagagttcagatccataatggaagattgttggcttcctcagttcataacctgtgtaggcttaaaacttgtagatgtaaattgttattaacactaatattttttattgaatccgggtattattgaaatgcaagtgtagcatgcatttcttttcctgtaagaagccaaagatgacttctgagtaacacgtctaatcagacattttacttgatgtggcacatggaatagtggatctattttaactatgtagcagcaaccatttggtcatactggtcacgcatgattgaa

SEQ ID NO: 9574 - DNA, 2135 bp, Zea Mays
attgggtcccctcccgccccagacgtattactgggctggatgtgggctgtactgcaagcttagcgtgtactcatgggctcgctcgccctagacgaactccggcgaggccccgccgccaacgccggccatggcacgacgcgcgagcgccgggatcccgagggcgtcacggccaggcggcggggtgtcacgcgcgcctcataagggcgcgggcgtctgctgccttgctgtcggaggacctggtggagacggagtgccagaggtggaagagcaaaggcgtgaacataaagtacgaggtgagggggaaccggaaggggtacaaggccggcgcgctcaaggaaggactgaagcacgactacgtcgcagactgcgaatacatcgccatgttcgacgccgacttccagcctgactctgacttcctcctcaggactatcccgttcctcgtgcacaacccggagatcgccctcgtccaggctcgctggaagtttgttaattctgacgagtgtctgctgacaagattccaagagatgtcgttggactaccatttcaagtatgagcaagaggccggctcctcggtgtattcattctttggcttcaatgggacagctggtgtctggaggatctcagcgatcgatgatgctgggggctggaaggaccggacgacagtggaagatatggacctggctgtccgtgcgatgctgcagggatggaagttcctttacgtcggcgacattaaggtcaagagcgaactgcctagcacattcaaggcgtaccggtttcagcagcacaggtggtcatgtgggccggcgaacctgttcaagaaaatgatggtagagattttagaaaacaagagagtgtcgctgtggagtaaaatccacctatggtacgatttcttcttcgtcgggaaagtcgctgctcatacggtgacattcatctactactgcttcgcgatccctgtgtctgttctgttccctgagatccagatccctctctggggagttgtctatgtcccgacagtcataaccctcttgaaggctcttggcacaccgagttcctttcacctggtgatcctctgggtcctgtttgagaatgtcatgtcgttgcaccggattaaggctgcagtaagtggtcttctggatgctggtgggcgagtcaatgagtgggttgtcactgagaagttgggcgacaccagcaaggcaaagcctggcaccaatggatcagacactgctgtaaaggtgatagatgtgaagctaacagaaccgcttgttccgaagctagtgaagaggcgagcaagattttgggagaggtaccactgctcagaacttttcgttggaacctgcataatcctgtgtggtttctatgacctgctttttgcaaataagggatactacatttttctcttccttcaaggcacggcgttccttgttgttggttttgggtatgtcggcacactacctccttgcactgcataagctgtcatggacaactgatattacctgctcaccagaaactgagcaagcaaagctcctctctcctgcacatatcaaactcttgaattcaatgatagttgagcaatgttcccccatcagtcttggcctgacatgatccaccgccgagaaggttgttcagatatcgccgtcgttctcctgtcagtgttggtcagatttgagccaaaccattctttattgtcagaaggccattcaaatagtgtcaccattgcaaattttataataacggtgtttaccgaagcatcatgaaaagaaaaatgattggtgcagcagcatttcgttcgcattccatagagatgcagttcacatccagtatttttttttggaaatctagtgttattactcagagttcagatccataatggaagattgttggcttcctcagttcataacctgtgtaggcttaaaacttgtagatgtaaattgttattaacactaatattttttattgaatccgggtattattgaaatgcaagtgtagcatgcatttcttttcctgtaagaagccaaagatgacttctgagtaacacgtctaatcagacattttacttgatgtggcacatggaatagtggatctattttaactatgtagcagcaaccatttggtcatactggtcacgcatgattgaa

SEQ ID NO: 9575 - DNA, 3003 bp, Zea Mays
cgccatgtatctatcttcacttgaaagcaaactttcgtgtgccgacaaagccttgatgctgcagaggagaggcagcgtttgctcgtgagagtgtgagacggtggtggtggggctccgagggaggacagaatccaatccaaggcgcaagcaggcgagaagggtcaaagaagtgaaagcaaaagcagcaaacaattggggtggtgagtggtgacatggaggatgcaaaagaagatgctgccatggtgccatggccaggcctggccctggcccccagctgcctcacgcgccatattcccttgccttgcccgccgattcgaccccgggcgtatccatccatccatacatatgccgctgcccgctgcaggtggagacggaatatctccgagcggtgctctggtggagtcacacgaaaggaaccgaccggccgcctatctataagagcccccgcgcagctcgcagtggcatctggcattcgatcgatcaccttgctgctgctgctgctgctgtcgctggttggccaggagcacaccagctgcttgctgtgtcgccgtcgtagaagcagccgcgcgctgtcgtcgtcgtctcgtccgcgacgcgaccactccggcggctgctgctgcctctcatgctggccacgccaccgacgcttttgtgataccatacgaagcgccgcggcgggcacgttggagatgtcgtcgctgggtgggcaacagcagcacgggcgcggcgacgaggccagggcgcggctcaggtggacgcgccagctgcacggccgcttcgtgctcgccgtggcccagctcggcggcgcggacagtgagttcctctcatctaagtcgtccgcccacgaactcgcagccagagcctgtccagtcctttctttgaccgcttgcttgaatgctactactaccgacgtcggctttcgttaccaaaacattgcagaggcgacgcccaagtccgtgatgagggcgatggccgtgtcggggctcacgctgtaccacctcaagagccacctccaggtaccgtacatcccgcctcggcctccggcgaattgttcgtctcttgattgatgatccgtgcgccgctcaactctgcctcctgatcgacccttcgatcatgtggtccacaccacaccacactgtcactgctgctgcagaggtaccggctggcggtgagccaaggcaccgcgtccccggtgggcgagggcgacaacggaggtggcgccaacgagcggtcgtcctcctcggagagccagctggacgagtacgacgacggttccgtggccgacctgcatggtgattcttccgggagcatggcggcgcgggtgcagagagaggcgaaaaggaagcggcatgagcagatgcagatcgaggtaaacgatgggtcggtgtcggtcgatcaccattccgagctcgtggtttctgatcaagctgctgagctcggttcattcatgcatgccaggtgcagcggcacctccagctgaggatcgaggcgcaggggaggtacatgcagtccgtgctgcgccgggcgcaggaggccctcgccgaccacatactgggctcgccggccaccggcgcggaggcagagctctcggagctggcctccgcggtggagaccgggaccgggtgcctgtcctccacttcctgctgctccacctcgccttccccgatgcgccaccgctccgccgacagctgcgtgacgtcctcctcctcctcctcctcctcggaggccgagagccaggcccccgccggcgccaacacgtgcgctggtacgcgcgactgctccgtcgagcggccggtgcagggcgaggagagtacattcctgcagaggcacgaggacgaggacgaggcagaggaagccgacgttggagctgcagctgcagctgaggacgaggacggcacttcgtcagagattgatctcaacaggtaggcgacgaagatcctgatcagaagcatctgtgctgcatgtgcccagcatcggatgattggcggggtggccttcaaggttgggacttgcttgggagggggcaggcttttgagcaacgtctgctgctgaaacagctggctacatacactgcaagtctgcagcgaccacactgctcttcattccataatatatgatatacataatattccaatttatgcaaatggttcttctgcttcatgtatgtacccctgtgaaaaatcatggcttgaactagaggcaggcccagctgcagatgatgcatgccgtatgcttgaggtgcaatgcaatgcaaggatgtatgcatagtacagaactgtagtagcagaggcggatctacgaccggggctgcctgggctgcagccccggtcgcggcccaatacaagcaaataggcccagtacaagtcgcgtctccgcctccagcttccagccgccagccgcgtacctgtgtcagcgcgtcgtgtaatcgcatccagccgccagcccgccagcggagcagctcagcaacgccgaggagatgagcaggaagcgcccaagctgaacagcacggagacaagcggagcagcgctgcgtccagtggcagatctggatttcgcttcgtcctggtctccaggaagccaagcaccggccaccagcccagggttttggatctggccgaccgacagactcaagatgttcctgttcgctctataaagtatagaaacggtggtcgacgtcgaatgcgaagatcatgtgagttcgtgccgatgggccaggagcgtcgaaggacgagcactgggtcttgatcgaggaattgaagaagctagaagactaaccgtggtgactgacacttgggacacgcaccagcccaaggaccactacgtaaaaaaggctcaaactcaaaggggacgtggccatctgtgacactggttaaaaacacgtcactattttttcgcagtgacatcttttttaaaaatgggtcactaataactatgttcatgtgacatctattacaaaaatgtgtccctatcaaaatatggtaataacttagtgacatattttatt

SEQ ID NO: 9576 - DNA, 5589 bp, Zea Mays
cgccatgtatctatcttcacttgaaagcaaactttcgtgtgccgacaaagccttgatgctgcagaggagaggcagcgtttgctcgtgagagtgtgagacggtggtggtggggctccgagggaggacagaatccaatccaaggcgcaagcaggcgagaagggtcaaagaagtgaaagcaaaagcagcaaacaattggggtggtgagtggtgacatggaggatgcaaaagaagatgctgccatggtgccatggccaggcctggccctggcccccagctgcctcacgcgccatattcccttgccttgcccgccgattcgaccccgggcgtatccatccatccatacatatgccgctgcccgctgcaggtggagacggaatatctccgagcggtgctctggtggagtcacacgaaaggaaccgaccggccgcctatctataagagcccccgcgcagctcgcagtggcatctggcattcgatcgatcaccttgctgctgctgctgctgctgtcgctggttggccaggagcacaccagctgcttgctgtgtcgccgtcgtagaagcagccgcgcgctgtcgtcgtcgtctcgtccgcgacgcgaccactccggcggctgctgctgcctctcatgctggccacgccaccgacgcttttgtgataccatacgaagcgccgcggcgggcacgttggagatgtcgtcgctgggtgggcaacagcagcacgggcgcggcgacgaggccagggcgcggctcaggtggacgcgccagctgcacggccgcttcgtgctcgccgtggcccagctcggcggcgcggacaaggcgacgcccaagtccgtgatgagggcgatggccgtgtcggggctcacgctgtaccacctcaagagccacctccagaggtaccggctggcggtgagccaaggcaccgcgtccccggtgggcgagggcgacaacggaggtggcgccaacgagcggtcgtcctcctcggagagccagctggacgagtacgacgacggttccgtggccgacctgcatggtgattcttccgggagcatggcggcgcgggtgcagagagaggcgaaaaggaagcggcatgagcagatgcagatcgaggtgcagcggcacctccagctgaggatcgaggcgcaggggaggtacatgcagtccgtgctgcgccgggcgcaggaggccctcgccgaccacatactgggctcgccggccaccggcgcggaggcagagctctcggagctggcctccgcggtggagaccgggaccgggtgcctgtcctccacttcctgctgctccacctcgccttccccgatgcgccaccgctccgccgacagctgcgtgacgtcctcctcctcctcctcctcctcggaggccgagagccaggcccccgccggcgccaacacgtgcgctggtacgcgcgactgctccgtcgagcggccggtgcagggcgaggagagtacattcctgcagaggcacgaggacgaggacgaggcagaggaagccgacgttggagctgcagctgcagctgaggacgaggacggcacttcgtcagagattgatctcaacaggtaggcgacgaagatcctgatcagaagcatctgtgctgcatgtgcccagcatcggatgattggcggggtggccttcaaggttgggacttgcttgggagggggcaggcttttgagcaacgtctgctgctgaaacagctggctacatacactgcaagtctgcagcgaccacactgctcttcattccataatatatgatatacataatattccaatttatgcaaatggttcttctgcttcatgtatgtacccctgtgaaaaatcatggcttgaactagaggcaggcccagctgcagatgatgcatgccgtatgcttgaggtgcaatgcaatgcaaggatgtatgcatagtacagaactgtagtagcagaggcggatctacgaccggggctgcctgggctgcagccccggtcgcggcccaatacaagcaaataggcccagtacaagtcgcgtctccgcctccagcttccagccgccagccgcgtacctgtgtcagcgcgtcgtgtaatcgcatccagccgccagcccgccagcggagcagctcagcaacgccgaggagatgagcaggaagcgcccaagctgaacagcacggagacaagcggagcagcgctgcgtccagtggcagatctggatttcgcttcgtcctggtctccaggaagccaagcaccggccaccagcccagggttttggatctggccgaccgacagactcaagatgttcctgttcgctctataaaggtaggaatatattatatttcactcgagatcagtcactgtaataatacaattcactagctaaaaatatgtttgtagatatttaagatgaaaatattttgaagcatttttaaggcttaagaactcggaaaataaatttatctcgcaacatcaactcatgaatagtatgtattgattattgtatttctaaaattcgtatcgacttatttttaggctatatatttcttaaatatttaaattatatcttgtttctggtgtcatattaaatattaattatatttttttgtttgatttaaaaaattttatagccttagcttattagcccccgtcttggatcaatcctggatccgccactgtgtagtagctattgttagtgagattatatgccatcagcgaggcaatgccgtgagaactggaaaaaaggtttagaatgtaacttaagatcattataattacaaacctggtatgggcactgagcagcaagttctgttacagcatttcggggataaaccagggttaaacttccccggcgaaatccggtaaaattttcgttatctcagtacgggaaaaaaatcaggaaaactcggtaaaattcgttggtaattttaaaaaatgaaaaaacagtggaaaatatgataaaaactacgtttttccgagcattctgaagttggcgtcgttaaaaatttaaacatatttcataggtaaaaaaattaaaaacacttgacccgttaagaaaccgcgcattccgagtggatttcgccgcatcccgaacgcctgaggtgagatttgttactgatttgatgtttttttttgttgatttcgcaagcggatgtaatgtgtagagaatttatagcgtctattcatgtactgatgaatttcttttaactgttcctgcatatggtttagggtttgtgttagtgcatagatgtgtcatttgcataattattcatcagcacgccagccacgataagacagcgcggacaaccaatcaagcggttagtttcaaaaccccatcccggttgaaaaatacaaaatttggtgaaattcgccaaaaaatcctgttttcgatgacctccaaaaaaaaggaaaggttaaccctgggataaaccaagctatcacatcgggagcaacagccaaaagaaaaagaaaaaaggcatcagtgcagtttttcttatagtgaaaaaaaggtgtgaaaatttggcatgatatgcatacgcgatgaagactaaaaattgaaatggtacgcaaggaatatttgtgttgaaaaatggcaactgggagatttgatggtatttcatttacctaacaacaaaagaaaaccgacaaaccaaagaatcttgcacagctagcaagacaaatgacagaaccctaatccatgcatggttttttctctacaactccgcatcctaaatttttcagagaatatttctgtcttgttgcaacttcacctgcccgcattctctagccaaataatcctacaagatcggacactggattccagaaccatctatagcattcaatgcacattgttcatatttgcgtgccgctgatgggaaaaggaatgagaatatgaacggatcatgtagagacggcctaggctggattccctggctagttgctatggatggttgtgcctatcctcagtgaccaaatatccacactaattaaagaaatctgaccacacaaaataatcgcagcccactatcttgatcggctcggctcatcttgtttcaaaaaatttcaacagctgagacctgagagtttcaactcatttttattgtcaatacctaaagtacatctttgattttttagcaagacgacaaagataaaaaaatattgccatgtaaaaaattatctccgttccaaattataattcatttgactttttcctgtcacgtttggccggctcgttctattcgatttttttgcgaaaaaatgaaaaattcgaagccacatttaaagtatattatatgctaaacaatatcactgcaaaaaatataaataattatgaaatttttgaataagacgagccagtcaaacttaaggtaaaaaggttaaacgaattataaattggaacagagtgttgagcatattttatatcatcctgatgactaggggtggatagcgagccagctcggctcggctcgttaaggtaacgagccacagagtcagcttggctcggctcgtttacgagctcgagctggctcgtttagctcgcgagccagagcagaaaaaaataaaatatacataataattatttttagttaattttaaactaatttaacaatagaaaatagtaattatactcagtttcacaaaccacgtcaaaacaacgccaaattagcataattcatcactcgttaatccacaattcgcatacatgttaatcagtttaatccataattatatttgcatagaccaaattaacacatagacatagttcattaatcattagtttaattcataaaccatagacacctcacatatatataacatgttaatcaattattctgtaaatgatctatatagtttcgttttgctggaatatggtagctcgtttagctcgcgagctggctcgttaacgaacctagctaggatgttagctcagctcgtgaaaaaattcaaacgagtcgatccgagccgagccgagctggccatgaaccgagcgagccagcgagccacgagcatttcgtccagccctactgatgaccaaggaggactttgtccgccattccattccatgtcagtctacggcaccagaggcaagcgcgggaacgccaacaaaatcattgttacgaacacaaggttaatttgacctttgtggttcgggttgatgataagtaattgttaacatgagtattgctttgatgtaagtcatggactaaccatagtacgagattatgtgtatatgtatccatgtctctcggcttgtggtgtgcagtatagaaacggtggtcgacgtcgaatgcgaagatcatgtgagttcgtgccgatgggccaggagcgtcgaaggacgagcactgggtcttgatcgaggaattgaagaagctagaagactaaccgtggtgactgacacttgggacacgcaccagcccaaggaccactacgtaaaaaaggctcaaactcaaaggggacgtggccatctgtgacactggttaaaaacacgtcactattttttcgcagtgacatcttttttaaaaatgggtcactaataactatgttcatgtgacatctattacaaaaatgtgtccctatcaaaatatggtaataacttagtgacatattttatt

SEQ ID NO: 9577 - DNA, 1406 bp, Zea Mays
agcatcccgtccgtccgatccgtccgcacggcgtatctccgccgtcggccgcagccggcgtctcctggccacacccgccgccccggcccggcaggcggcagtttaatacaaaccaggcttgctcgtggcggcaaaaaaccaacgtgcttgatctccctccgccactccatccatctcctcgctcccagtccccgggaagcatggcgtccgtcaccgcccgcgccccggtagcggcccttcgcccgtcgtcggcatcgctcaagtcgtcgtcggccttccttggccactctagccgcctcggccgcaccgcgtctcccacgaggcgcagcctcaaggcggaggccaagggcgagtggctccccggccttccctccccctcctacctcgacggcagcctggcgggtgacaatggcttcgacccgttgggcctggcggaggaccccgagaacctgcggtggttcgtgcaggcggagctggtgaacggccggtgggccatgcttggcgtggccgggatgctcatcccggaggtgctgaccaaagccgggctgatcaacgcgccgcagtggacatcaagaaccccggcagcgtcaaccaggaccccatcttcaagagctacagcctgccgccgcacgagtgcggctacccgggcagcgtcttcaacccgctcaacttcgcgcccacgctcgaggccaaggagaaggagctcgccaacgggaggctggcgatgctggcgttcctgggcttcctgatccagcacaacgtcaccggcaaggggcccttcgacaacctgctgcagcacctgtctgacccatggcacaacaccatcatccagaccttctccggttgagtcgaggtcgaggagggatacgatccatcgctggtgagctgatatggactggaaggcaaacattgaaaccttaagttcctttctggatcagtttgtgtgtgttgttaatctatctggagggtacagattcgggccgtgttgcaatgcatgcatggtctgaagggagcgagggctgaggagtgactggtatgtacattagctgaaggggatattaagggtagagatcgtttgatcagtatcatctgtatatccccatgcatggggtttcgttttgtgcgcttacttctggcttgccagcgtatggttcaatgtggaaacacatgtattagtacgagaactagtagacttataattaatataaatcaagcacgtacgacttctagctaaaaacaactcaacctactcggaagccctgagaatggtaagcaaccacattagggcttgttcggttattcctatcccatgtggattggatgggattgaaaaaaattgtgaaagattttgacttgtttggaattgaaacccatccaatcccacccaatccacatggattgagagc

SEQ ID NO: 9578 - DNA, 2497 bp, Zea Mays
ctctctccccaccattcagctgccgctgcccccgattgagccgccgccgcctcagattcgccgtcgccacctcagattcgccgccgccgccgccgatttggacgctgtcgccggcgattcagcctccgccgccctggatttggcctccgccgctcccgattcggcgctgccaccctgaaacagcgccgcccctttcccttcccctatgccctatgccctcttgctgcttctcacctaggcgacggggacgccttggatccttcgggcgcctggacgcctaggcgacgcctttaaaacaagggtcttctctgtattaaatattttctgatgttttttcggcatttgggtttgttcacaagatagctacttttgagaaagcagctggtttccaggcacttatccagtatactgatgccccaactgctcttgaagctaaaaactcattggatggaagaagcatcccaaaatatttacttccagaacatatcggtgcctgccacatgcgcataaccttttctgcgcataaggatttgaatatcaaatttcagtcgcatcgcagcagggattacaccaatccttaccttcctgtgaaccaaacagcaattgaggggattgtgcagcccacggtgggccctgatgggaaggtaaaggagcctgagagcaatgtacttttagcatcaattgagaacatgcaatatgctgtgacagtggatgttctgcacactgtgttttctgcttttggagctgttcaaaaaattgcaatgtttgagaagaatggtggaatgcaggctctaatccaatatccaggtatgtgctcaccaatgcacccaacaggatatgctcttgaccttggtgcactgtgatacatcgacaatttattgcattggcatgtcaccgtaacttgcctacacagttgagcacactttatgtcttgctcccactgtttgaaagtattgaagtctgtagttcttcttttaagacttggttcagaatgtaccatgtttatgctctatgttcttgatttatatcctccagctctcaccctcttcctcccatcctccctccctctcaccatttatgagtgaacctgccacactgttattctctccctttttgcatcataagtttctaagtttgggaacttcagcagagaggtgtcggagttcgtgaaggcttaaaatggacatctgcaactttccacagctataaagttgtttttagtaatactctctttcttactagaggcttgctttaaactttcattttgtcatcattgaacttcccttgtgacatgcgagtcctaatttaggtacctttacctgtttaatgtgttgggcattagaatatagtcagcacctctatatcattggttcttctgttgaaaaaacattttgacatctaatttgtgggccttatctagcttattgaaataaatatctttgaaaagtatggcaattcaaatgacatcaatcttgttggtgctcaatactgtttgtactggttagtggtagttgtaattgaactgctttgatgaaacaagaatctctaaatacctttgcacccacacttatcacattatgaccctggaatccagagtatcttaaaatttattctttatggtcaagtggaattgctagttctgtttcccccttagccatggaaatatatcattaatatttgatgtacaaatacataggttcatctgactaacaaaatctttttttagatataactaccgcagccgttgctaaacaagctttggagggacactgcatatatgatggtggttactgcacatgatgagagaagcagggactacactctttcagaccctaacgtgcagctgcaagctgctgcacaaacgccagttctaaggtctccgggagtggcatggcagaacactgcatcagtaccagctgctcctttttatgcaagcacagcgacttcaactcctattggagttggacaggtggctgcttggaatcctaacatgcaggcagggagttttgcatctgcatcgactgcataccccaaccaaccattaatggccaactccatgcctcactatcctgctattggatcgagttccggtgccccaccagtagcatttcaggcttcgcagcagatgacacagtatagcatgccccctggtgctccgccgcacgcaccaccagctggccaatcgatttactacccgaagtaagcggttttggttcaatattatcagagagcaatcaggcattgttacctgcgacaattgtggtccgcaaatgcaatcttgcgaattttgcaagtgcgctgtagcacttgtaacttgcgagcgcccttcgcaagaatgcatcagcgtctgctgtgtctgtaaaactgtcaaagatagtgtttacctattagcttgcatggtatattggtggtgagatatgttggagtagttttgatgcctcaagaatctcttacgcatcttttttttttaaaaaaaactgcgctttgcttttggtct

SEQ ID NO: 9579 - DNA, 1947 bp, Zea Mays
caacaggccacctagtccaacgagccccattccaattcggcaattcccatttccccttcccaacaggccaaccccctctacctatctttttcctcagcaaccgtgctcggttcctcctccctcgaaacggctcccacccccgcgccgcgataagaaaacccaccaaaccctaaccctagcagcggtgccacaaccgcccgcgttcccggccggagaggaagccgagccagcaaggatgccgcccgggtcggcgacgcaatttcggtacacgcagacgccgtccaaggtgctgcatcttcggaacatgccatgggagtgcaccgaggaggagctcgtcgacctctgcaaacccttcggccgggtcgtaaacaccatgtgcaacgtcggcgctaaccgcaaccaggcattcgtcgagtttgcagatcaaaaccaggcaatttcaatggtgtcctattatgcttcatcttcagaacctgctcaagttcgtggtaaaactgtatatatccaatattcaaacaggcaagaaattactaacaataaaggcactggggattcttctggcaatgttctacttgtcacttttgaaggtgttcagcctaatgatgttaccatagaagttattcatttggttttttcggcatttgggtttgttcacaagatagctacttttgagaaagcagctggtttccaggcacttatccagtatactgatgccccaactgctcttgaagctaaaaactcattggatggaagaagcatcccaaaatatttacttccagaacatatcggtgcctgccacatgcgcataaccttttctgcgcataaggatttgaatatcaaatttcagtcgcatcgcagcagggattacaccaatccttaccttcctgtgaaccaaacagcaattgaggggattgtgcagcccacggtgggccctgatgggaaggtaaaggagcctgagagcaatgtacttttagcatcaattgagaacatgcaatatgctgtgacagtggatgttctgcacactgtgttttctgcttttggagctgttcaaaaaattgcaatgtttgagaagaatggtggaatgcaggctctaatccaatatccagagaggtgtcggagttcgtgaaggcttaaaatggacatctgcaactttccacagctataaagttgtttttaatataactaccgcagccgttgctaaacaagctttggagggacactgcatatatgatggtggttactgcacatgatgagagaagcagggactacactctttcagaccctaacgtgcagctgcaagctgctgcacaaacgccagttctaaggtctccgggagtggcatggcagaacactgcatcagtaccagctgctcctttttatgcaagcacagcgacttcaactcctattggagttggacaggtggctgcttggaatcctaacatgcaggcagggagttttgcatctgcatcgactgcataccccaaccaaccattaatggccaactccatgcctcactatcctgctattggatcgagttccggtgccccaccagtagcatttcaggcttcgcagcagatgacacagtatagcatgccccctggtgctccgccgcacgcaccaccagctggccaatcgatttactacccgaagtaagcggttttggttcaatattatcagagagcaatcaggcattgttacctgcgacaattgtggtccgcaaatgcaatcttgcgaattttgcaagtgcgctgtagcacttgtaacttgcgagcgcccttcgcaagaatgcatcagcgtctgctgtgtctgtaaaactgtcaaagatagtgtttacctattagcttgcatggtatattggtggtgagatatgttggagtagttttgatgcctcaagaatctcttacgcatcttttttttttaaaaaaaactgcgctttgcttttggtct

SEQ ID NO: 9580 - DNA, 982 bp, Zea Mays
ctctctccccaccattcagctgccgctgcccccgattgagccgccgccgcctcagattcgccgtcgccacctcagattcgccgccgccgccgccgatttggacgctgtcgccggcgattcagcctccgccgccctggatttggcctccgccgctcccgattcggcgctgccaccctgaaacagcgccgcccctttcccttcccctatgccctatgccctcttgctgcttctcacctaggcgacggggacgccttggatccttcgggcgcctggacgcctaggcgacgcctttaaaacaagggtcttctctgtattaaatattttctgatgttttttcggcatttgggtttgttcacaagatagctacttttgagaaagcagctggtttccaggcacttatccagtatactgatgccccaactgctcttgaagctaaaaactcattggatggaagaagcatcccaaaatatttacttccagaacatatcggtgcctgccacatgcgcataaccttttctgcgcataaggatttgaatatcaaatttcagtcgcatcgcagcagggattacaccaatccttaccttcctgtgaaccaaacagcaattgaggggattgtgcagcccacggtgggccctgatgggaaggtaaaggagcctgagagcaatgtacttttagcatcaattgagaacatgcaatatgctgtgacagtggatgttctgcacactgtgttttctgcttttggagctgttcaaaaaattgcaatgtttgagaagaatggtggaatgcaggctctaatccaatatccagagaggtgtcggagttcgtgaaggcttaaaatggacatctgcaactttccacagctataaagttgtttttaatataactaccgcagccgttgctaaacaagctttggagggacactgcatatatgatggtggttactgactaatgaataacgaattctgctcaattagtaaaaaaa

SEQ ID NO: 9581 - DNA, 1271 bp, Zea Mays
caacaggccacctagtccaacgagccccattccaattcggcaattcccatttccccttcccaacaggccaaccccctctacctatctttttcctcagcaaccgtgctcggttcctcctccctcgaaacggctcccacccccgcgccgcgataagaaaacccaccaaaccctaaccctagcagcggtgccacaaccgcccgcgttcccggccggagaggaagccgagccagcaaggatgccgcccgggtcggcgacgcaatttcggtacacgcagacgccgtccaaggtgctgcatcttcggaacatgccatgggagtgcaccgaggaggagctcgtcgacctctgcaaacccttcggccgggtcgtaaacaccatgtgcaacgtcggcgctaaccgcaaccaggcattcgtcgagtttgcagatcaaaaccaggcaatttcaatggtgtcctattatgcttcatcttcagaacctgctcaagttcgtggtaaaactgtatatatccaatattcaaacaggcaagaaattactaacaataaaggcactggggattcttctggcaatgttctacttgtcacttttgaaggtgttcagcctaatgatgttaccatagaagttattcatttggttttttcggcatttgggtttgttcacaagatagctacttttgagaaagcagctggtttccaggcacttatccagtatactgatgccccaactgctcttgaagctaaaaactcattggatggaagaagcatcccaaaatatttacttccagaacatatcggtgcctgccacatgcgcataaccttttctgcgcataaggatttgaatatcaaatttcagtcgcatcgcagcagggattacaccaatccttaccttcctgtgaaccaaacagcaattgaggggattgtgcagcccacggtgggccctgatgggaaggtaaaggagcctgagagcaatgtacttttagcatcaattgagaacatgcaatatgctgtgacagtggatgttctgcacactgtgttttctgcttttggagctgttcaaaaaattgcaatgtttgagaagaatggtggaatgcaggctctaatccaatatccagagaggtgtcggagttcgtgaaggcttaaaatggacatctgcaactttccacagctataaaatataactaccgcagccgttgctaaacaagctttggagggacactgcatatatgatggtggttactgactaatgaataacgaattctgctcaattagtaaaaaaa

SEQ ID NO: 9582 - DNA, 1490 bp, Zea Mays
tgaactcagctgtcagctcgagttcagaaaaaaaaattaacaaatcacactgctttaatggggcgatcgccatgctgtgagaagattggactgaagaaaggcccgtggacaccggaggaggatcagaagctgcttgcctacattcaggagcacggacatgggagttggcgagcattgcctgtgaaggcgggcttgcagaggtgtgggaagagctgcagactgaggtggacaaactacctgagaccggacatcaagaggggcaagttcagcttgcaagaagagcagaccatcatccagcttcatgctcttttaggcaacaggtggtcggccattgcaacccatctaccaaatcgcacggacaatgagatcaagaactactggaacacacacctcaagaaaaggctggccaagatggggatcgatcctgtcacccacaaatctatcagtggcactcgcattggcaccacaaacgacaaatcaaccaaggccgccgcaagcctcagccacatggcacaatgggagagcgcccgcctcgaggctgaggcacggctggctcgagaatcgaagatacggacagcaacgccaacaccaactgctctccatgcgcagccaacgatactacctgcctctgctgcttctccatgccttgacgtgcttcatgcatggcagggtgcaaagatagacctggagtctccaacctccacgctgacgtttacagggagtaatagtggaacgctgccaacccccaggaccaatagactagacgtatcagaaagcaactgtgcagtgtggcatcagaggagtgatgacttggaggatgaagaaaacgattggcagatcttcagcaagcaccaattgctggaactcgacagcaaggagagggaagaggacttcattggttgtgaggagccgtggttctcagagatggctggggttggagctggcttcactggcatgctgcttggtgtatccaatgagcatgatgcatcagaatgctggggtgagtccaataatggccaaactgagcgcagcaaccaagcatcagatgaggaggacaagaattattggaatggtgtccttgacatggtaaactcagagctgacacccaagtcgcctccatttgtctagactctagaatacagtcccctccgttttatttcaagtactcctgagcaaaatctattggatcatctcaagtcaaaagagaaacagaacaagcactacaaataaatgctgcatgtgctacaacaatatgttttttttgtccatgcatgtgaaagtgaaataattaactattgtgtggatggagtaaataattttttcccgccaatttcttttctgttggcctagccctagaaataactgtatgttaagccaccaggaccacagcagggacactacattaatgacccaaggacttttagagttgttagttcaacacacattgtcttgtctccctctcttttgaatctaacccagaatgattaagc

SEQ ID NO: 9583 - DNA, 2217 bp, Zea Mays
ctcggacttacgaaagtggaggtcacatttccattccaccaatgcatgtagattttggttcagacttccatcagtgaatgaaaaaaaaggaaaagcaagagagaatagcaagtacttatatcagtataaaaatataccaatgggtagtgagcctgcaacgttgtgtacgtatacatggggaaaatatttggtttgtggcttgtgtgaaaggacaatttaggtttgtattctatatctgagaaccattcatagctttaagattttgttataattgtcatcccatggttttgctcggaatagctgaccttctctttgtgttttttggttgatattagtgtaagatgatgagtccacattagtttgatgtgcacctaacaattaggttcttccttcttaatactacatgcattgttttagattctagcctatatgtttagttgcaggtcaagtctcttaacaaatttggttttgctggttgtttaaactattccagtttgttgtggcaattcaagtgacaggtccagaaaaaaacatatctctagctattcgttatttcatattgaattttcctcatattgtagagaaatctcagctaatctgttcacatcttgaaaatacaatcacaatttctctttacacatgaaatgtccctgaagtgttcgcatatacataatggtgattgtgacagaagagtcatgctatctggagtcctttattcagtatttcggacaaatgactatcacattttatttagcaaggaaatataaggtgcaaaatattatattagtgaacctatgagcagttgagcatactcaatctcatgcctcatatctgatctttgtggaccaagtgcggtttgaaattccctcgcctatcttgggctgacttaaagacaatcagatttagcatttagtcagatgaaaagatggataatagggatgatcccacttggatcctaggcacaagattgagtgtgcaattgtgcatttttcattataatcgtatgcacctgttacttcctattattcacattatcaaatattgttcatgtagtgtcttgcactcttgcccgttcctgaatagacagttagggaacagggtaaagatggtgtttgtagactttttggctgggaatacaaatgttaagatgtaaccgcataaggatatgtcatgtgcccaagattctcgaacagaagttacctcaataatcgatagttcaataaatagattagtttgtatgattaatttactatgttgttcttacacaactggtacataaattcagctacatctaaacttagtcaatgacatatgctaacttttgttgtttttcacagtggcacagaacacttctttgcatgaattccttgatagttatctacaattcaggcacaggtggtatgattctccaggatttttttgggactggtcattgcgggcatgttgagggtatttagttaagcaattttgttattattttagattgagtacatcagctcgctggttgcttacattttcttggtccctagagctactcacctcgctggttgtttacatttccttgttcctgggatccactttcctaaaatgaatctgttttaatcttgtaactggaactggtggatattttgatagggaaattacgatgattgatttctagatttgagtttcagattttttttgcttgtactggcctcttgagattggaagactggcgttgttgtgggcttgtggcataggcttcctttgtgggtctttttctcatctgatgtaaacaatattttttagtctggtaacggtgcaaaggcaaatggggcatcatcacatatctaggtcgtattttcgacagacagatataaaacggagtgggaatgcctcgattgatatcatgtccaagttcttcaagctgatggtggaagaggcctttgcccaagtgtattgtctatggcaagcccaagcaccagggtatcacccaactcaagttccagaggtacaagaggtgtgtcgctgagagagctatacgcaagcttggtggactgagggttcttatgttatgaaataaagtatgtcatgaactttttgcaatttgactgtattatcggactacgaatggagagtgataaaatgttgcatgctgttgtggactacatgattggttagtgatcaaaaaagggagtttgcatattaatgtattttatcatattaatcattattcat

SEQ ID NO: 9584 - DNA, 1824 bp, Zea Mays
ctcggacttacgaaagtggaggtcacatttccattccaccaatgcatgtagattttggttcagacttccatcagtgaatgaaaaaaaaggaaaagcaagagagaatagcaagtacttatatcagtataaaaatataccaatgggtagtgagcctgcaacgttgtgtacgtatacatggggaaaatatttggtttgtggcttgtgtgaaaggacaatttaggtttgtattctatatctgagaaccattcatagctttaagattttgttataattgtcatcccatggttttgctcggaatagctgaccttctctttgtgttttttggttgatattagtgtaagatgatgagtccacattagtttgatgtgcacctaacaattaggttcttccttcttaatactacatgcattgttttagattctagcctatatgtttagttgcaggtcaagtctcttaacaaatttggttttgctggttgtttaaactattccagtttgttgtggcaattcaagtgacaggtccagaaaaaaacatatctctagctattcgttatttcatattgaattttcctcatattgtagagaaatctcagctaatctgttcacatcttgaaaatacaatcacaatttctctttacacatgaaatgtccctgaagtgttcgcatatacataatggtgattgtgacagaagagtcatgctatctggagtcctttattcagtatttcggacaaatgactatcacattttatttagcaaggaaatataaggtgcaaaatattatattagtgaacctatgagcagttgagcatactcaatctcatgcctcatatctgatctttgtggaccaagtgcggtttgaaattccctcgcctatcttgggctgacttaaagacaatcagatttagcatttagtcagatgaaaagatggataatagggatgatcccacttggatcctaggcacaagattgagtgtgcaattgtgcatttttcattataatcgtatgcacctgttacttcctattattcacattatcaaatattgttcatgtagtgtcttgcactcttgcccgttcctgaatagacagttagggaacagggtaaagatggtgtttgtagactttttggctgggaatacaaatgttaagatgtaaccgcataaggatatgtcatgtgcccaagattctcgaacagaagttacctcaataatcgatagttcaataaatagattagtttgtatgattaatttactatgttgttcttacacaactggtacataaattcagctacatctaaacttagtcaatgacatatgctaacttttgttgtttttcacagtggcacagaacacttctttgcatgaattccttgatagttatctacaattcaggcacagtctggtaacggtgcaaaggcaaatggggcatcatcacatatctaggtcgtattttcgacagacagatataaaacggagtgggaatgcctcgattgatatcatgtccaagttcttcaagctgatggtggaagaggcctttgcccaagtgtattgtctatggcaagcccaagcaccagggtatcacccaactcaagttccagaggtacaagaggtgtgtcgctgagagagctatacgcaagcttggtggactgagggttcttatgttatgaaataaagtatgtcatgaactttttgcaatttgactgtattatcggactacgaatggagagtgataaaatgttgcatgctgttgtggactacatgattggttagtgatcaaaaaagggagtttgcatattaatgtattttatcatattaatcattattcat

SEQ ID NO: 9585 - DNA, 2272 bp, Zea Mays
gtacatgcgtgctgggagtcccatctgctttttgtggcccagacctaggcccactatcggagcaaccgctctccccacgaaatcctcccccgggtcagcggactccccctcccccaaccccgcgctccacttacgtgactcgcgcgcgacacgcgagcaggaggttgagacgaagacccgccgccaccggggatggcccaagcgccgccgcgacctagggagcgaggatgaggagctcgaggaggtgcgccgcatgcagaggattcctgcaaggaggagaacatggaggtggtgcccgtagtagtaggggaaccgatcaagagcactggcgaggggaagaaatagaagaagcactatgcttccttggagtaccacgtcaacagcttggagctggtgagcccatggcttgttcctcctgcccttccctcccctcccctccctgctcccccgactctgcgcggatctggtactatctagcccatagagccgtgttggacaacacaaccacgaccacaaggcatcgctgtggagcagtcggagccatttgtgatgcccccctcccgcttgcattgaccacagaggcacaccggagcatccggcgaggacctgcacgcttgaaaccgacgacgaggccatgctggggaattgcatattgtgtcaagggtggtccagaaaaagagctaaaagcaatgcagtacttggagagaagagagtgtgagtatgaccagaagatatccattgatttctacaaggaaggagatcccttgaaaccagctgtgatgggcgtcttagtgttcgtttccactccagatccaattggcaacaagtactatcttggccctgctcctttgcagaatatggcaaggccacgaagatgattcgatcatagagcttgcaaacaaggtgaggaaggtgctcaacagaacaaaggagaccaaaatcactgggcgcgtgaactcttctactacctcaagggtaagcaggtggactatggcgaggagcacagcaaggcttgcggccacaacaggtttgggagaatatatcacacaggtcactatcctgtttgttatgagcacaacccagtgcattttgtggggcactctgctggcgcgcaggttgtgagggtgctgcatcagatgcttgccgacaaggagaccgtggaggtggttctggagggagcatctttataagggctgcatcgataagctagatgtgatgatgagaaatcacttcgtatgtctcaaatgagcttggcgaagagatttggctaatccagatcttttgttgcctccactctgatggaatatggttttggatcctgaaggagaaagcgggtcctaagggaggaagcagagcaattggagctcgaactggagatgcatagagagttaagggagtagatgctgcaactcttgtggcctacgctcgagctgaagccagattagtgatgaggggggcagttgtccttgctgctaagcatgcaaaaacaatggtcgggaagccattgttgtatggaataggtaccctgttggtcatgtcgctgaggacactgtatggagtgggttgtgtttttggcgcacggtggttcctctacatgacaagcgtatctccatcgctgcaaattgagtttgtatatcgcaagttcttcggcgggtactgcaactgctcataccatgtggcacagaacacttctttgcatgaattccttgatagttatctacaattcaggcacaggtggtatgattctccaggatttttttgggactggtcattgcgggcatgttgagggtatttagttaagcaattttgttattattttagattgagtacatcagctcgctggttgcttacattttcttggtccctagagctactcacctcgctggttgtttacatttccttgttcctgggatccactttcctaaaatgaatctgttttaatcttgtaactggaactggtggatattttgatagggaaattacgatgattgatttctagatttgagtttcagattttttttgcttgtactggcctcttgagattggaagactggcgttgttgtgggcttgtggcataggcttcctttgtgggtctttttctcatctgatgtaaacaatattttttagtctggtaacggtgcaaaggcaaatggggcatcatcacatatctaggtcgtattttcgacagacagatataaaacggagtgggaatgcctcgattgatatcatgtccaagttcttcaagctgatggtggggtgacaaaaatatgat

SEQ ID NO: 9586 - DNA, 2048 bp, Zea Mays
gtacatgcgtgctgggagtcccatctgctttttgtggcccagacctaggcccactatcggagcaaccgctctccccacgaaatcctcccccgggtcagcggactccccctcccccaaccccgcgctccacttacgtgactcgcgcgcgacacgcgagcaggaggttgagacgaagacccgccgccaccggggatggcccaagcgccgccgcgacctagggagcgaggatgaggagctcgaggaggtgcgccgcatgcagaggattcctgcaaggaggagaacatggaggtggtgcccgtagtagtaggggaaccgatcaagagcactggcgaggggaagaaatagaagaagcactatgcttccttggagtaccacgtcaacagcttggagctgcttgcattgaccacagaggcacaccggagcatccggcgaggacctgcacgcttgaaaccgacgacgaggccatgctggggaattgcatattgtgtcaagggtggtccagaaaaagagctaaaagcaatgcagtacttggagagaagagagtgtgagtatgaccagaagatatccattgatttctacaaggaaggagatcccttgaaaccagctgtgatgggcgtcttagtgttcgtttccactccagatccaattggcaacaagtactatcttggccctgctcctttgcagaatatggcaaggccacgaagatgattcgatcatagagcttgcaaacaaggtgaggaaggtgctcaacagaacaaaggagaccaaaatcactgcgatgcagggcgcgtgaactcttctactacctcaagggtaagcaggtggactatggcgaggagcacagcaaggcttgcggccacaacaggtttgggagaatatatcacacaggtcactatcctgtttgttatgagcacaacccagtgcattttgtggggcactctgctggcgcgcaggttgtgagggtgctgcatcagatgcttgccgacaaggagaccgtggaggtggttctggagggagcatctttataagggctgcatcgataagctagatgtgatgatgagaaatcacttcgtatgtctcaaatgagcttggcgaagagatttggctaatccagatcttttgttgcctccactctgatggaatatggttttggatcctgaaggagaaagcgggtcctaagggaggaagcagagcaattggagctcgaactggagatgcatagagagttaagggagtagatgctgcaactcttgtggcctacgctcgagctgaagccagattagtgatgaggggggcagttgtccttgctgctaagcatgcaaaaacaatggtcgggaagccattgttgtatggaataggtaccctgttggtcatgtcgctgaggacactgtatggagtgggttgtgtttttggcgcacggtggttcctctacatgacaagcgtatctccatcgctgcaaattgagttttctggtaacggtgcaaaggcaaatggggcatcatcacatatctaggtcgtattttcgacagacagatataaaacggagtgggaatgcctcgattgatatcatgtccaagttcttcaagctgatggtggtaggtgttttgctttgctactttctcattgttgaagttgtctccatgttgtattcactaaagaacccctatattatttattttggaacaaacctttttaatggtggattagactgattcggtgaggtagctgtgcttttatggattgaggttggtttggtttggatctaagcccattagcagctctcattttgtgctgacaggttgccaaattacaatttaaagtacctgattagctgatttgctatgtactatgacatttaagtatttaacgtatcgataagaaattggttgttttattagttagtagtacttggattgattcacatgcaacattaataccatcatgtttaatgttctgtaacttcctgccatcatgtctgaaatagaaaataatctccatggggcttttagatcgtcaaaccaagtttggaaacaagaactccagtttgg

SEQ ID NO: 9587 - DNA, 2931 bp, Zea Mays
gtacatgcgtgctgggagtcccatctgctttttgtggcccagacctaggcccactatcggagcaaccgctctccccacgaaatcctcccccgggtcagcggactccccctcccccaaccccgcgctccacttacgtgactcgcgcgcgacacgcgagcaggaggttgagacgaagacccgccgccaccggggatggcccaagcgccgccgcgacctagggagcgaggatgaggagctcgaggaggtgcgccgcatgcagaggattcctgcaaggaggagaacatggaggtggtgcccgtagtagtaggggaaccgatcaagagcactggcgaggggaagaaatagaagaagcactatgcttccttggagtaccacgtcaacagcttggagctggtgagcccatggcttgttcctcctgcccttccctcccctcccctccctgctcccccgactctgcgcggatctggtactatctagcccatagagccgtgttggacaacacaaccacgaccacaaggcatcgctgtggagcagtcggagccatttgtgatgcccccctcccgcttgcattgaccacagaggcacaccggagcatccggcgaggacctgcacgcttgaaaccgacgacgaggccatgctggggaattgcatattgtgtcaagggtggtccagaaaaagagctaaaagcaatgcagtacttggagagaagagagtgtgagtatgaccagaagatatccattgatttctacaaggaaggagatcccttgaaaccagctgtgatgggcgtcttagtgttcgtttccactccagatccaattggcaacaagtactatcttggccctgctcctttgcagaatatggcaaggcaaattgctacaaccaatggctctactggctataatagggattacctgttctcaatggagaaggcattagccagcattagccacgaagatgattcgatcatagagcttgcaaacaaggtgaggaaggtgctcaacagaacaaaggagaccaaaatcactgggcgcgtgaactcttctactacctcaagggtaagcaggtggactatggcgaggagcacagcaaggcttgcggccacaacaggtttgggagaatatatcacacaggtcactatcctgtttgttatgagcacaacccagtgcattttgtggggcactctgctggcgcgcaggttgtgagggtgctgcatcagatgcttgccgacaaggagaccgtggaggtggttctggagggagcatctttataagggctgcatcgataagctagatgtgatgatgagaaatcacttcgtatgtctcaaatgagcttggcgaagagatttggctaatccagatcttttgttgcctccactctgatggaatatggttttggatcctgaaggagaaagcgggtcctaagggaggaagcagagcaattggagctcgaactggagatgcatagagagttaagggagtagatgctgcaactcttgtggcctacgctcgagctgaagccagattagtgatgaggggggcagttgtccttgctgctaagcatgcaaaaacaatggtcgggaagccattgttgtatggaataggtaccctgttggtcatgtcgctgaggacactgtatggagtgggttgtgtttttggcgcacggtggttcctctacatgacaagcgtatctccatcgctgcaaattgagtttgtaagtggtccgaaacaactaggtagctactagctattgagtatttaggagtcaatgcttaatgatatttacttaatgcttaattgcttatcgaagtaagaaccctgttttttgtattgacatggtggtgctctttaggagagaagccaggggtaaaaaacaattagttctgcagattttattttatttcgatcagttgtgagagtttcttacaattggatgacattgctttgtagaaagaaaatacaaggtattttttagtaggaaagagttgcattttctgtgctcatatacagctttgccgttcgttttctaaaatgttgaaaaggatcatgtcattggtgtaacactcctgtttgtcttaattgaagaagtggtaccaacgagatgtcatttcctatcataattttatctgatgcatatgttgtagtagagctctcagcaattgattcctctcataaattggtggctagagctcgtgtggccctctcatcggatttggtgtctgagccctcgctagatctcgcaccctcatcgaagccctcattggattcgacaccctcactggaggttgcaccgcaatgggatctaggaaccgtagacagcctcgaccacccacgtggattgttgcctctgtggatgagacgcagcgccaaggggccagaggaaactacgtgatgaacctcacatcacagctcatgtcatggttctgagacaacccgtggccgccggcgcgccaccgccgggacgtgagttcgtcggagcgtcagcgagtcgctacaacccaggtatatcgcaagttcttcggcgggtactgcaactgctcataccatggttagtcttagtgaacctctcttggtgttcttaggtttacctatagctattatttatctgtagctattatctactgggtttctttcttggtgttgatagtttgttggagattaggcgtttgatttcctttacaaaataggttcagtttgaaattgcggccaaagcaatgttttcatgtggtttcatcaattttagtttctatatttacatgtgtttgattgtcccttgctctcgtttagatagagatttctatcaagagtatagaaagttggtgcctgacaactagctgcttgcattcatccaccccctactcttatcttgcaaaagcccacttcttgtgttttgcttgtatatatattaggctggaccaaagtgcggttaagtaac

SEQ ID NO: 9588 - DNA, 4836 bp, Zea Mays
gaatgcaagcttagttaatcaagcagaatttggaaaacagttaccaattgggaagaccagcagtataaattgaagctagatgtgatgatgagaaatcacttcgtatgtctcaaatgagcttggcgaagagatttggctaatccagatcttttgttgcctccactctgatggaatatggttttggatcctgaaggagaaagcgggtcctaagggaggaagcagagcaattggagctcgaactggagatgcatagagagttaagggagtagatgctgcaactcttgtggcctacgctcgagctgaagccagattagtgatgaggggggcagttgtccttgctgctaagcatgcaaaaacaatggtcgggaagccattgttgtatggaataggtaccctgttggtcatgtcgctgaggacactgtatggagtgggttgtgtttttggcgcacggtggttcctctacatgacaagcgtatctccatcgctgcaaattgagtttgtaagtggtccgaaacaactaggtagctactagctattgagtatttaggagtcaatgcttaatgatatttacttaatgcttaattgcttatcgaagtaagaaccctgttttttgtattgacatggtggtgctctttaggagagaagccaggggtaaaaaacaattagttctgcagattttattttatttcgatcagttgtgagagtttcttacaattggatgacattgctttgtagaaagaaaatacaaggtattttttagtaggaaagagttgcattttctgtgctcatatacagctttgccgttcgttttctaaaatgttgaaaaggatcatgtcattggtgtaacactcctgtttgtcttaattgaagaagtggtaccaacgagatgtcatttcctatcataattttatctgatgcatatgttgtagtagagctctcagcaattgattcctctcataaattggtggctagagctcgtgtggccctctcatcggatttggtgtctgagccctcgctagatctcgcaccctcatcgaagccctcattggattcgacaccctcactggaggttgcaccgcaatgggatctaggaaccgtagacagcctcgaccacccacgtggattgttgcctctgtggatgagacgcagcgccaaggggccagaggaaactacgtgatgaacctcacatcacagctcatgtcatggttctgagacaacccgtggccgccggcgcgccaccgccgggacgtgagttcgtcggagcgtcagcgagtcgctacaacccaggtgagtttgttacggatatgattctctggattattctgatcgtagttttgccaactggccaagtacagagtatatatccggtctcttaacaggccattacagactccaaataaacccataacaccagattaggacactaaacccggcccacggcccaaccctagagagtacttactgctcagacatgacaattccccgggcctcagaatccgcttgtccccaagcgatggcgtctggaaaacggttcttcaacacatagtaatcttcccaagttgctgattccactggcacaccagaccagcggataagaacctgtggaacagcttgatggcctttgcgcacaagacgtcgatccaggatttcttcaggaacaatgccagttcttgagaggtccaccaatggaggcaaagaagtaaaaactggagtatatgatggataataaggtttcagctgggaaacgtgaaacaccggatgaacttgagcatcggctggaagatccaatttgtaagctgccgcaccaatcttagccaacactctgaaaggaccaaaaaacttgaaagccaactttgggcaaggacggttcaccacagtcttttgagcatatggctgaagcttgagcagcaccatctccccaacctgaaactctcttgctgtccttccccgatcagccatttgtttcatccgattttgagctcgagcgagttgttctttgagatgagttgagaaagcaaccctgtcagccagccaatctgttactgacccctcctccaggacaccagactgaggtaacgccaacatcggggcatcatatccatatagtgctttgaaaggcgtacaacccagactagtatggtaagtagtattgtaccaaaattctgccaatgctaaccacaacttccacttagccggctgagcattcactgcacatcttagatatgtctccaaacattgattcacccgttcactttgaccgtcagtctgtggatgataggcagtggaaaacagcaacttaacatccataagttgaaacaggtgcttccagaaagagctaatgaaaatcttgtctctgtctgacacaatggacttgggaggtccatgtaacttcaccacctgatccaaaaatatttgagccactccctgggcagtgaaagggtgcctgagtggaagaaaatgcccatatttggtgaatctgtccactactaccatgatggtgtcataaccctcagactttggtaacccttcgataaagtccattgtgacatctgcccaaatgccatgtggaatcggaagaggctgtaacagtccggctggatgagtcctttctggtttcgcctgttgacaggtcaagcactgttgtacaaattgagtcacatccaccttaagtcccttccaccagaaaagtttcttgactctctgataagtggcatgtatgccagaatgcccccccatggcactgtcatgtaaagctgctatcagtttggttctaagggcagagttggaccctatccagatttggtcacctttcctgacaataccttgctgcaagctaaacccttgttcatttggactatgcaccaacaactgagtaattaactcctgggcttcagcatctgtctcataggaattcaaaatctcttgaatccacactggttgcacttcagaaagaacagccaactccatcatagcccccaccctggataaagcatcagctactcgattctctaccccttttttgtaaacgatctgaaactgaaggcccattaatcttgccatagctttcctttgtagctcagactgaagttgctgctctcctaaaaatgtaagtgacttatgatcagtcttgataacaaaaggactccgctgcagatatggcctccatttctccacagcaagaattaaggctaaaaactctttatcatagatagataggtgtctattcctttctcctaaagccttgctgatataagctatgggctttccttgtttgcatgagcacagcccccattccggtgtcacatgcatctgtctctaccacaaaaggaagatcaaatcgtggtagagccaagacaggagtagtcgtcatagctttctttagggcctcaaatgctgcttgagcttcatcattccacttgaaaccatgctgtttttgcaacagctgagtgaggggtcgtgccaaaactccatacccacacacaaacttcctgtagtaccctgtaagccccaaaaatcccctcaactcagtgatattctgtggtctaggccatgccagcatagcagctgtctttgcagggtccgtcgcgaccccttcactggatataatatgtccaagatatctcagctctttcttcgcaaacacacacttcttatgcttcaagaaaaacttctgttctctgagcttggacaataccctcctaatatgtttgtagtgctcctccagactcggactgtagatcaatatatcatctaagaataccataacaaatttccgtagaaatggttctagcactgtgttcatggcacactggaatgttgctggtgcatttgtcaagccaaaaggcataactcggaattggtaatggccatgatgagttttgaacgcagttttaccctcatcctcctctgccatccgaatctgatgataccccgcagtcatgtctagacttgtgaaaaactgagttcctgccaactcatccagaatctcatccaccaagggcatgggaaaacggttcttgatggtcatggagttcaaccttctataatcaatacaaaacctccagctgccatctttcttctgaaccagtaatacgggagatgcaaatggactggcactgggtactatcaatcctgcagttaataactctgtcacttgcctttcaatttctgtcttgtggaaaggtgaatacctataaggcctggaattcaccggaatagaccctgggagcaatggtatatgatggtcatacattctaaccggaggtagtccagtgggcacagcaaacacatcttcaaactccttaagtatctgcctcagcggttcctgttccttttcagcaccttcctcctgtattgcttcgagcatcacaaaagcccacacttcatttcccttcatccacctgctcagctgaacagctgacacttgcaatacctctgtacttcctacgccatcccccttcagctgcactctgacccctttatcccagaatgtcagcaccttgttgtcccaatcacactccataggactatggctctttagccaatcataccccaatatagcatcataggcttctaaatccagtaccctcatgttactggcataagtgtgcccttctgcccaccactccagcgctgccaccctttttgaactcaacatgaactctccatttgccaccttgactcttaccggtgaaacaacttcagttgataaagccaactgatctaccatcctctggctgacaaagcttgaggaactgcccgagtctaccaacatcaccaacacttgattctggatcagtgcccgaactctcatacaattctcacggtcagttccac

SEQ ID NO: 9589 - DNA, 4463 bp, Zea Mays
gaatgcaagcttagttaatcaagcagaatttggaaaacagttaccaattgggaagaccagcagtataaattgaagctagatgtgatgatgagaaatcacttcgtatgtctcaaatgagcttggcgaagagatttggctaatccagatcttttgttgcctccactctgatggaatatggtggtgctcctcagtctacaactccagaatctattctttcagttttatatttattgttgttattgctcagttttggttacacaagtttgtgttcctgcaggttttggatcctgaaggagaaagcgggtcctaagggaggaagcagagcaattggagctcgaactggagatgcatagagagttaagggagtagatgctgcaactcttgtggcctacgctcgagctgaagccagattagtgatgaggggggcagttgtccttgctgctaagcatgcaaaaacaatggtcgggaagccattgttgtatggaataggtaccctgttggtcatgtcgctgaggacactgtatggagtgggttgtgtttttggcgcacggtggttcctctacatgacaagcgtatctccatcgctgcaaattgagtttagctcgtgtggccctctcatcggatttggtgtctgagccctcgctagatctcgcaccctcatcgaagccctcattggattcgacaccctcactggaggttgcaccgcaatgggatctaggaaccgtagacagcctcgaccacccacgtggattgttgcctctgtggatgagacgcagcgccaaggggccagaggaaactacgtgatgaacctcacatcacagctcatgtcatggttctgagacaacccgtggccgccggcgcgccaccgccgggacgtgagttcgtcggagcgtcagcgagtcgctacaacccaggtgagtttgttacggatatgattctctggattattctgatcgtagttttgccaactggccaagtacagagtatatatccggtctcttaacaggccattacagactccaaataaacccataacaccagattaggacactaaacccggcccacggcccaaccctagagagtacttactgctcagacatgacaattccccgggcctcagaatccgcttgtccccaagcgatggcgtctggaaaacggttcttcaacacatagtaatcttcccaagttgctgattccactggcacaccagaccagcggataagaacctgtggaacagcttgatggcctttgcgcacaagacgtcgatccaggatttcttcaggaacaatgccagttcttgagaggtccaccaatggaggcaaagaagtaaaaactggagtatatgatggataataaggtttcagctgggaaacgtgaaacaccggatgaacttgagcatcggctggaagatccaatttgtaagctgccgcaccaatcttagccaacactctgaaaggaccaaaaaacttgaaagccaactttgggcaaggacggttcaccacagtcttttgagcatatggctgaagcttgagcagcaccatctccccaacctgaaactctcttgctgtccttccccgatcagccatttgtttcatccgattttgagctcgagcgagttgttctttgagatgagttgagaaagcaaccctgtcagccagccaatctgttactgacccctcctccaggacaccagactgaggtaacgccaacatcggggcatcatatccatatagtgctttgaaaggcgtacaacccagactagtatggtaagtagtattgtaccaaaattctgccaatgctaaccacaacttccacttagccggctgagcattcactgcacatcttagatatgtctccaaacattgattcacccgttcactttgaccgtcagtctgtggatgataggcagtggaaaacagcaacttaacatccataagttgaaacaggtgcttccagaaagagctaatgaaaatcttgtctctgtctgacacaatggacttgggaggtccatgtaacttcaccacctgatccaaaaatatttgagccactccctgggcagtgaaagggtgcctgagtggaagaaaatgcccatatttggtgaatctgtccactactaccatgatggtgtcataaccctcagactttggtaacccttcgataaagtccattgtgacatctgcccaaatgccatgtggaatcggaagaggctgtaacagtccggctggatgagtcctttctggtttcgcctgttgacaggtcaagcactgttgtacaaattgagtcacatccaccttaagtcccttccaccagaaaagtttcttgactctctgataagtggcatgtatgccagaatgcccccccatggcactgtcatgtaaagctgctatcagtttggttctaagggcagagttggaccctatccagatttggtcacctttcctgacaataccttgctgcaagctaaacccttgttcatttggactatgcaccaacaactgagtaattaactcctgggcttcagcatctgtctcataggaattcaaaatctcttgaatccacactggttgcacttcagaaagaacagccaactccatcatagcccccaccctggataaagcatcagctactcgattctctaccccttttttgtaaacgatctgaaactgaaggcccattaatcttgccatagctttcctttgtagctcagactgaagttgctgctctcctaaaaatgtaagtgacttatgatcagtcttgataacaaaaggactccgctgcagatatggcctccatttctccacagcaagaattaaggctaaaaactctttatcatagatagataggtgtctattcctttctcctaaagccttgctgatataagctatgggctttccttgtttgcatgagcacagcccccattccggtgtcacatgcatctgtctctaccacaaaaggaagatcaaatcgtggtagagccaagacaggagtagtcgtcatagctttctttagggcctcaaatgctgcttgagcttcatcattccacttgaaaccatgctgtttttgcaacagctgagtgaggggtcgtgccaaaactccatacccacacacaaacttcctgtagtaccctgtaagccccaaaaatcccctcaactcagtgatattctgtggtctaggccatgccagcatagcagctgtctttgcagggtccgtcgcgaccccttcactggatataatatgtccaagatatctcagctctttcttcgcaaacacacacttcttatgcttcaagaaaaacttctgttctctgagcttggacaataccctcctaatatgtttgtagtgctcctccagactcggactgtagatcaatatatcatctaagaataccataacaaatttccgtagaaatggttctagcactgtgttcatggcacactggaatgttgctggtgcatttgtcaagccaaaaggcataactcggaattggtaatggccatgatgagttttgaacgcagttttaccctcatcctcctctgccatccgaatctgatgataccccgcagtcatgtctagacttgtgaaaaactgagttcctgccaactcatccagaatctcatccaccaagggcatgggaaaacggttcttgatggtcatggagttcaaccttctataatcaatacaaaacctccagctgccatctttcttctgaaccagtaatacgggagatgcaaatggactggcactgggtactatcaatcctgcagttaataactctgtcacttgcctttcaatttctgtcttgtggaaaggtgaatacctataaggcctggaattcaccggaatagaccctgggagcaatggtatatgatggtcatacattctaaccggaggtagtccagtgggcacagcaaacacatcttcaaactccttaagtatctgcctcagcggttcctgttccttttcagcaccttcctcctgtattgcttcgagcatcacaaaagcccacacttcatttcccttcatccacctgctcagctgaacagctgacacttgcaatacctctgtacttcctacgccatcccccttcagctgcactctgacccctttatcccagaatgtcagcaccttgttgtcccaatcacactccataggactatggctctttagccaatcataccccaatatagcatcataggcttctaaatccagtaccctcatgttactggcataagtgtgcccttctgcccaccactccagcgctgccaccctttttgaactcaacatgaactctccatttgccaccttgactcttaccggtgaaacaacttcagttgataaagccaactgatctaccatcctctggctgacaaagcttgaggaactgcccgagtctaccaacatcaccaacacttgattctggatcagtgcccgaactctcatacaattctcacggtcagttccac

SEQ ID NO: 9590 - DNA, 5858 bp, Zea Mays
gtacatgcgtgctgggagtcccatctgctttttgtggcccagacctaggcccactatcggagcaaccgctctccccacgaaatcctcccccgggtcagcggactccccctcccccaaccccgcgctccacttacgtgactcgcgcgcgacacgcgagcaggaggttgagacgaagacccgccgccaccggggatggcccaagcgccgccgcgacctagggagcgaggatgaggagctcgaggaggtgcgccgcatgcagaggattcctgcaaggaggagaacatggaggtggtgcccgtagtagtaggggaaccgatcaagagcactggcgaggggaagaaatagaagaagcactatgcttccttggagtaccacgtcaacagcttggagctgcttgcattgaccacagaggcacaccggagcatccggcgaggacctgcacgcttgaaaccgacgacgaggccatgccatctttgcatgccccgcctttttacacggtgacacagtgttacatgggcaagtggggaattgcatattgtgtcaagggtggtccagaaaaagagctaaaagcaatgcagtacttggagagaagagagtgtgagtatgaccagaagatatccattgatttctacaaggaaggagatcccttgaaaccagctgtgatgggcgtcttagtgttcgtttccactccagatccaattggcaacaagtactatcttggccctgctcctttgcagaatatggcaaggccacgaagatgattcgatcatagagcttgcaaacaaggtgaggaaggtgctcaacagaacaaaggagaccaaaatcactgcgatgcagggcgcgtgaactcttctactacctcaagggtaagcaggtggactatggcgaggagcacagcaaggcttgcggccacaacaggtttgggagaatatatcacacaggtcactatcctgtttgttatgagcacaacccagtgcattttgtggggcactctgctggcgcgcaggttgtgagggtgctgcatcagatgcttgccgacaaggagaccgtggaggtggttctggagggagcatctttataagggctgcatcgataagctagatgtgatgatgagaaatcacttcgtatgtctcaaatgagcttggcgaagagatttggctaatccagatcttttgttgcctccactctgatggaatatggttttggatcctgaaggagaaagcgggtcctaagggaggaagcagagcaattggagctcgaactggagatgcatagagagttaagggagtagatgctgcaactcttgtggcctacgctcgagctgaagccagattagtgatgaggggggcagttgtccttgctgctaagcatgcaaaaacaatggtcgggaagccattgttgtatggaataggtaccctgttggtcatgtcgctgaggacactgtatggagtgggttgtgtttttggcgcacggtggttcctctacatgacaagcgtatctccatcgctgcaaattgagtttgtaagtggtccgaaacaactaggtagctactagctattgagtatttaggagtcaatgcttaatgatatttacttaatgcttaattgcttatcgaagtaagaaccctgttttttgtattgacatggtggtgctctttaggagagaagccaggggtaaaaaacaattagttctgcagattttattttatttcgatcagttgtgagagtttcttacaattggatgacattgctttgtagaaagaaaatacaaggtattttttagtaggaaagagttgcattttctgtgctcatatacagctttgccgttcgttttctaaaatgttgaaaaggatcatgtcattggtgtaacactcctgtttgtcttaattgaagaagtggtaccaacgagatgtcatttcctatcataattttatctgatgcatatgttgtagtagagctctcagcaattgattcctctcataaattggtggctagagctcgtgtggccctctcatcggatttggtgtctgagccctcgctagatctcgcaccctcatcgaagccctcattggattcgacaccctcactggaggttgcaccgcaatgggatctaggaaccgtagacagcctcgaccacccacgtggattgttgcctctgtggatgagacgcagcgccaaggggccagaggaaactacgtgatgaacctcacatcacagctcatgtcatggttctgagacaacccgtggccgccggcgcgccaccgccgggacgtgagttcgtcggagcgtcagcgagtcgctacaacccaggtgagtttgttacggatatgattctctggattattctgatcgtagttttgccaactggccaagtacagagtatatatccggtctcttaacaggccattacagactccaaataaacccataacaccagattaggacactaaacccggcccacggcccaaccctagagagtacttactgctcagacatgacaattccccgggcctcagaatccgcttgtccccaagcgatggcgtctggaaaacggttcttcaacacatagtaatcttcccaagttgctgattccactggcacaccagaccagcggataagaacctgtggaacagcttgatggcctttgcgcacaagacgtcgatccaggatttcttcaggaacaatgccagttcttgagaggtccaccaatggaggcaaagaagtaaaaactggagtatatgatggataataaggtttcagctgggaaacgtgaaacaccggatgaacttgagcatcggctggaagatccaatttgtaagctgccgcaccaatcttagccaacactctgaaaggaccaaaaaacttgaaagccaactttgggcaaggacggttcaccacagtcttttgagcatatggctgaagcttgagcagcaccatctccccaacctgaaactctcttgctgtccttccccgatcagccatttgtttcatccgattttgagctcgagcgagttgttctttgagatgagttgagaaagcaaccctgtcagccagccaatctgttactgacccctcctccaggacaccagactgaggtaacgccaacatcggggcatcatatccatatagtgctttgaaaggcgtacaacccagactagtatggtaagtagtattgtaccaaaattctgccaatgctaaccacaacttccacttagccggctgagcattcactgcacatcttagatatgtctccaaacattgattcacccgttcactttgaccgtcagtctgtggatgataggcagtggaaaacagcaacttaacatccataagttgaaacaggtgcttccagaaagagctaatgaaaatcttgtctctgtctgacacaatggacttgggaggtccatgtaacttcaccacctgatccaaaaatatttgagccactccctgggcagtgaaagggtgcctgagtggaagaaaatgcccatatttggtgaatctgtccactactaccatgatggtgtcataaccctcagactttggtaacccttcgataaagtccattgtgacatctgcccaaatgccatgtggaatcggaagaggctgtaacagtccggctggatgagtcctttctggtttcgcctgttgacaggtcaagcactgttgtacaaattgagtcacatccaccttaagtcccttccaccagaaaagtttcttgactctctgataagtggcatgtatgccagaatgcccccccatggcactgtcatgtaaagctgctatcagtttggttctaagggcagagttggaccctatccagatttggtcacctttcctgacaataccttgctgcaagctaaacccttgttcatttggactatgcaccaacaactgagtaattaactcctgggcttcagcatctgtctcataggaattcaaaatctcttgaatccacactggttgcacttcagaaagaacagccaactccatcatagcccccaccctggataaagcatcagctactcgattctctaccccttttttgtaaacgatctgaaactgaaggcccattaatcttgccatagctttcctttgtagctcagactgaagttgctgctctcctaaaaatgtaagtgacttatgatcagtcttgataacaaaaggactccgctgcagatatggcctccatttctccacagcaagaattaaggctaaaaactctttatcatagatagataggtgtctattcctttctcctaaagccttgctgatataagctatgggctttccttgtttgcatgagcacagcccccattccggtgtcacatgcatctgtctctaccacaaaaggaagatcaaatcgtggtagagccaagacaggagtagtcgtcatagctttctttagggcctcaaatgctgcttgagcttcatcattccacttgaaaccatgctgtttttgcaacagctgagtgaggggtcgtgccaaaactccatacccacacacaaacttcctgtagtaccctgtaagccccaaaaatcccctcaactcagtgatattctgtggtctaggccatgccagcatagcagctgtctttgcagggtccgtcgcgaccccttcactggatataatatgtccaagatatctcagctctttcttcgcaaacacacacttcttatgcttcaagaaaaacttctgttctctgagcttggacaataccctcctaatatgtttgtagtgctcctccagactcggactgtagatcaatatatcatctaagaataccataacaaatttccgtagaaatggttctagcactgtgttcatggcacactggaatgttgctggtgcatttgtcaagccaaaaggcataactcggaattggtaatggccatgatgagttttgaacgcagttttaccctcatcctcctctgccatccgaatctgatgataccccgcagtcatgtctagacttgtgaaaaactgagttcctgccaactcatccagaatctcatccaccaagggcatgggaaaacggttcttgatggtcatggagttcaaccttctataatcaatacaaaacctccagctgccatctttcttctgaaccagtaatacgggagatgcaaatggactggcactgggtactatcaatcctgcagttaataactctgtcacttgcctttcaatttctgtcttgtggaaaggtgaatacctataaggcctggaattcaccggaatagaccctgggagcaatggtatatgatggtcatacattctaaccggaggtagtccagtgggcacagcaaacacatcttcaaactccttaagtatctgcctcagcggttcctgttccttttcagcaccttcctcctgtattgcttcgagcatcacaaaagcccacacttcatttcccttcatccacctgctcagctgaacagctgacacttgcaatacctctgtacttcctacgccatcccccttcagctgcactctgacccctttatcccagaatgtcagcaccttgttgtcccaatcacactccataggactatggctctttagccaatcataccccaatatagcatcataggcttctaaatccagtaccctcatgttactggcataagtgtgcccttctgcccaccactccagcgctgccaccctttttgaactcaacatgaactctccatttgccaccttgactcttaccggtgaaacaacttcagttgataaagccaactgatctaccatcctctggctgacaaagcttgaggaactgcccgagtctaccaacatcaccaacacttgattctggatcagtgcccgaactctcatacaattctcacggtcagttccac

SEQ ID NO: 9591 - DNA, 5850 bp, Zea Mays
gtacatgcgtgctgggagtcccatctgctttttgtggcccagacctaggcccactatcggagcaaccgctctccccacgaaatcctcccccgggtcagcggactccccctcccccaaccccgcgctccacttacgtgactcgcgcgcgacacgcgagcaggaggttgagacgaagacccgccgccaccggggatggcccaagcgccgccgcgacctagggagcgaggatgaggagctcgaggaggtgcgccgcatgcagaggattcctgcaaggaggagaacatggaggtggtgcccgtagtagtaggggaaccgatcaagagcactggcgaggggaagaaatagaagaagcactatgcttccttggagtaccacgtcaacagcttggagctgcttgcattgaccacagaggcacaccggagcatccggcgaggacctgcacgcttgaaaccgacgacgaggccatgccatctttgcatgccccgcctttttacacggtgacacagtgttacatgggcaagtggggaattgcatattgtgtcaagggtggtccagaaaaagagctaaaagcaatgcagtacttggagagaagagagtgtgagtatgaccagaagatatccattgatttctacaaggaaggagatcccttgaaaccagctgtgatgggcgtcttagtgttcgtttccactccagatccaattggcaacaagtactatcttggccctgctcctttgcagaatatggcaaggccacgaagatgattcgatcatagagcttgcaaacaaggtgaggaaggtgctcaacagaacaaaggagaccaaaatcactgggcgcgtgaactcttctactacctcaagggtaagcaggtggactatggcgaggagcacagcaaggcttgcggccacaacaggtttgggagaatatatcacacaggtcactatcctgtttgttatgagcacaacccagtgcattttgtggggcactctgctggcgcgcaggttgtgagggtgctgcatcagatgcttgccgacaaggagaccgtggaggtggttctggagggagcatctttataagggctgcatcgataagctagatgtgatgatgagaaatcacttcgtatgtctcaaatgagcttggcgaagagatttggctaatccagatcttttgttgcctccactctgatggaatatggttttggatcctgaaggagaaagcgggtcctaagggaggaagcagagcaattggagctcgaactggagatgcatagagagttaagggagtagatgctgcaactcttgtggcctacgctcgagctgaagccagattagtgatgaggggggcagttgtccttgctgctaagcatgcaaaaacaatggtcgggaagccattgttgtatggaataggtaccctgttggtcatgtcgctgaggacactgtatggagtgggttgtgtttttggcgcacggtggttcctctacatgacaagcgtatctccatcgctgcaaattgagtttgtaagtggtccgaaacaactaggtagctactagctattgagtatttaggagtcaatgcttaatgatatttacttaatgcttaattgcttatcgaagtaagaaccctgttttttgtattgacatggtggtgctctttaggagagaagccaggggtaaaaaacaattagttctgcagattttattttatttcgatcagttgtgagagtttcttacaattggatgacattgctttgtagaaagaaaatacaaggtattttttagtaggaaagagttgcattttctgtgctcatatacagctttgccgttcgttttctaaaatgttgaaaaggatcatgtcattggtgtaacactcctgtttgtcttaattgaagaagtggtaccaacgagatgtcatttcctatcataattttatctgatgcatatgttgtagtagagctctcagcaattgattcctctcataaattggtggctagagctcgtgtggccctctcatcggatttggtgtctgagccctcgctagatctcgcaccctcatcgaagccctcattggattcgacaccctcactggaggttgcaccgcaatgggatctaggaaccgtagacagcctcgaccacccacgtggattgttgcctctgtggatgagacgcagcgccaaggggccagaggaaactacgtgatgaacctcacatcacagctcatgtcatggttctgagacaacccgtggccgccggcgcgccaccgccgggacgtgagttcgtcggagcgtcagcgagtcgctacaacccaggtgagtttgttacggatatgattctctggattattctgatcgtagttttgccaactggccaagtacagagtatatatccggtctcttaacaggccattacagactccaaataaacccataacaccagattaggacactaaacccggcccacggcccaaccctagagagtacttactgctcagacatgacaattccccgggcctcagaatccgcttgtccccaagcgatggcgtctggaaaacggttcttcaacacatagtaatcttcccaagttgctgattccactggcacaccagaccagcggataagaacctgtggaacagcttgatggcctttgcgcacaagacgtcgatccaggatttcttcaggaacaatgccagttcttgagaggtccaccaatggaggcaaagaagtaaaaactggagtatatgatggataataaggtttcagctgggaaacgtgaaacaccggatgaacttgagcatcggctggaagatccaatttgtaagctgccgcaccaatcttagccaacactctgaaaggaccaaaaaacttgaaagccaactttgggcaaggacggttcaccacagtcttttgagcatatggctgaagcttgagcagcaccatctccccaacctgaaactctcttgctgtccttccccgatcagccatttgtttcatccgattttgagctcgagcgagttgttctttgagatgagttgagaaagcaaccctgtcagccagccaatctgttactgacccctcctccaggacaccagactgaggtaacgccaacatcggggcatcatatccatatagtgctttgaaaggcgtacaacccagactagtatggtaagtagtattgtaccaaaattctgccaatgctaaccacaacttccacttagccggctgagcattcactgcacatcttagatatgtctccaaacattgattcacccgttcactttgaccgtcagtctgtggatgataggcagtggaaaacagcaacttaacatccataagttgaaacaggtgcttccagaaagagctaatgaaaatcttgtctctgtctgacacaatggacttgggaggtccatgtaacttcaccacctgatccaaaaatatttgagccactccctgggcagtgaaagggtgcctgagtggaagaaaatgcccatatttggtgaatctgtccactactaccatgatggtgtcataaccctcagactttggtaacccttcgataaagtccattgtgacatctgcccaaatgccatgtggaatcggaagaggctgtaacagtccggctggatgagtcctttctggtttcgcctgttgacaggtcaagcactgttgtacaaattgagtcacatccaccttaagtcccttccaccagaaaagtttcttgactctctgataagtggcatgtatgccagaatgcccccccatggcactgtcatgtaaagctgctatcagtttggttctaagggcagagttggaccctatccagatttggtcacctttcctgacaataccttgctgcaagctaaacccttgttcatttggactatgcaccaacaactgagtaattaactcctgggcttcagcatctgtctcataggaattcaaaatctcttgaatccacactggttgcacttcagaaagaacagccaactccatcatagcccccaccctggataaagcatcagctactcgattctctaccccttttttgtaaacgatctgaaactgaaggcccattaatcttgccatagctttcctttgtagctcagactgaagttgctgctctcctaaaaatgtaagtgacttatgatcagtcttgataacaaaaggactccgctgcagatatggcctccatttctccacagcaagaattaaggctaaaaactctttatcatagatagataggtgtctattcctttctcctaaagccttgctgatataagctatgggctttccttgtttgcatgagcacagcccccattccggtgtcacatgcatctgtctctaccacaaaaggaagatcaaatcgtggtagagccaagacaggagtagtcgtcatagctttctttagggcctcaaatgctgcttgagcttcatcattccacttgaaaccatgctgtttttgcaacagctgagtgaggggtcgtgccaaaactccatacccacacacaaacttcctgtagtaccctgtaagccccaaaaatcccctcaactcagtgatattctgtggtctaggccatgccagcatagcagctgtctttgcagggtccgtcgcgaccccttcactggatataatatgtccaagatatctcagctctttcttcgcaaacacacacttcttatgcttcaagaaaaacttctgttctctgagcttggacaataccctcctaatatgtttgtagtgctcctccagactcggactgtagatcaatatatcatctaagaataccataacaaatttccgtagaaatggttctagcactgtgttcatggcacactggaatgttgctggtgcatttgtcaagccaaaaggcataactcggaattggtaatggccatgatgagttttgaacgcagttttaccctcatcctcctctgccatccgaatctgatgataccccgcagtcatgtctagacttgtgaaaaactgagttcctgccaactcatccagaatctcatccaccaagggcatgggaaaacggttcttgatggtcatggagttcaaccttctataatcaatacaaaacctccagctgccatctttcttctgaaccagtaatacgggagatgcaaatggactggcactgggtactatcaatcctgcagttaataactctgtcacttgcctttcaatttctgtcttgtggaaaggtgaatacctataaggcctggaattcaccggaatagaccctgggagcaatggtatatgatggtcatacattctaaccggaggtagtccagtgggcacagcaaacacatcttcaaactccttaagtatctgcctcagcggttcctgttccttttcagcaccttcctcctgtattgcttcgagcatcacaaaagcccacacttcatttcccttcatccacctgctcagctgaacagctgacacttgcaatacctctgtacttcctacgccatcccccttcagctgcactctgacccctttatcccagaatgtcagcaccttgttgtcccaatcacactccataggactatggctctttagccaatcataccccaatatagcatcataggcttctaaatccagtaccctcatgttactggcataagtgtgcccttctgcccaccactccagcgctgccaccctttttgaactcaacatgaactctccatttgccaccttgactcttaccggtgaaacaacttcagttgataaagccaactgatctaccatcctctggctgacaaagcttgaggaactgcccgagtctaccaacatcaccaacacttgattctggatcagtgcccgaactctcatacaattctcacggtcagttccac

SEQ ID NO: 9592 - DNA, 5929 bp, Zea Mays
gtacatgcgtgctgggagtcccatctgctttttgtggcccagacctaggcccactatcggagcaaccgctctccccacgaaatcctcccccgggtcagcggactccccctcccccaaccccgcgctccacttacgtgactcgcgcgcgacacgcgagcaggaggttgagacgaagacccgccgccaccggggatggcccaagcgccgccgcgacctagggagcgaggatgaggagctcgaggaggtgcgccgcatgcagaggattcctgcaaggaggagaacatggaggtggtgcccgtagtagtaggggaaccgatcaagagcactggcgaggggaagaaatagaagaagcactatgcttccttggagtaccacgtcaacagcttggagctggtgagcccatggcttgttcctcctgcccttccctcccctcccctccctgctcccccgactctgcgcggatctggtactatctagcccatagagccgtgttggacaacacaaccacgaccacaaggcatcgctgtggagcagtcggagccatttgtgatgcccccctcccgcttgcattgaccacagaggcacaccggagcatccggcgaggacctgcacgcttgaaaccgacgacgaggccatgctggggaattgcatattgtgtcaagggtggtccagaaaaagagctaaaagcaatgcagtacttggagagaagagagtgaaggagatcccttgaaaccagctgtgatgggcgtcttagtgttcgtttccactccagatccaattggcaacaagtactatcttggccctgctcctttgcagaatatggcaaggccacgaagatgattcgatcatagagcttgcaaacaaggtgaggaaggtgctcaacagaacaaaggagaccaaaatcactgggcgcgtgaactcttctactacctcaagggtaagcaggtggactatggcgaggagcacagcaaggcttgcggccacaacaggtttgggagaatatatcacacaggtcactatcctgtttgttatgagcacaacccagtgcattttgtggggcactctgctggcgcgcaggttgtgagggtgctgcatcagatgcttgccgacaaggagaccgtggaggtggttctggagggagcatctttataagggctgcatcgataagctagatgtgatgatgagaaatcacttcgtatgtctcaaatgagcttggcgaagagatttggctaatccagatcttttgttgcctccactctgatggaatatggttttggatcctgaaggagaaagcgggtcctaagggaggaagcagagcaattggagctcgaactggagatgcatagagagttaagggagtagatgctgcaactcttgtggcctacgctcgagctgaagccagattagtgatgaggggggcagttgtccttgctgctaagcatgcaaaaacaatggtcgggaagccattgttgtatggaataggtaccctgttggtcatgtcgctgaggacactgtatggagtgggttgtgtttttggcgcacggtggttcctctacatgacaagcgtatctccatcgctgcaaattgagtttgtaagtggtccgaaacaactaggtagctactagctattgagtatttaggagtcaatgcttaatgatatttacttaatgcttaattgcttatcgaagtaagaaccctgttttttgtattgacatggtggtgctctttaggagagaagccaggggtaaaaaacaattagttctgcagattttattttatttcgatcagttgtgagagtttcttacaattggatgacattgctttgtagaaagaaaatacaaggtattttttagtaggaaagagttgcattttctgtgctcatatacagctttgccgttcgttttctaaaatgttgaaaaggatcatgtcattggtgtaacactcctgtttgtcttaattgaagaagtggtaccaacgagatgtcatttcctatcataattttatctgatgcatatgttgtagtagagctctcagcaattgattcctctcataaattggtggctagagctcgtgtggccctctcatcggatttggtgtctgagccctcgctagatctcgcaccctcatcgaagccctcattggattcgacaccctcactggaggttgcaccgcaatgggatctaggaaccgtagacagcctcgaccacccacgtggattgttgcctctgtggatgagacgcagcgccaaggggccagaggaaactacgtgatgaacctcacatcacagctcatgtcatggttctgagacaacccgtggccgccggcgcgccaccgccgggacgtgagttcgtcggagcgtcagcgagtcgctacaacccaggtgagtttgttacggatatgattctctggattattctgatcgtagttttgccaactggccaagtacagagtatatatccggtctcttaacaggccattacagactccaaataaacccataacaccagattaggacactaaacccggcccacggcccaaccctagagagtacttactgctcagacatgacaattccccgggcctcagaatccgcttgtccccaagcgatggcgtctggaaaacggttcttcaacacatagtaatcttcccaagttgctgattccactggcacaccagaccagcggataagaacctgtggaacagcttgatggcctttgcgcacaagacgtcgatccaggatttcttcaggaacaatgccagttcttgagaggtccaccaatggaggcaaagaagtaaaaactggagtatatgatggataataaggtttcagctgggaaacgtgaaacaccggatgaacttgagcatcggctggaagatccaatttgtaagctgccgcaccaatcttagccaacactctgaaaggaccaaaaaacttgaaagccaactttgggcaaggacggttcaccacagtcttttgagcatatggctgaagcttgagcagcaccatctccccaacctgaaactctcttgctgtccttccccgatcagccatttgtttcatccgattttgagctcgagcgagttgttctttgagatgagttgagaaagcaaccctgtcagccagccaatctgttactgacccctcctccaggacaccagactgaggtaacgccaacatcggggcatcatatccatatagtgctttgaaaggcgtacaacccagactagtatggtaagtagtattgtaccaaaattctgccaatgctaaccacaacttccacttagccggctgagcattcactgcacatcttagatatgtctccaaacattgattcacccgttcactttgaccgtcagtctgtggatgataggcagtggaaaacagcaacttaacatccataagttgaaacaggtgcttccagaaagagctaatgaaaatcttgtctctgtctgacacaatggacttgggaggtccatgtaacttcaccacctgatccaaaaatatttgagccactccctgggcagtgaaagggtgcctgagtggaagaaaatgcccatatttggtgaatctgtccactactaccatgatggtgtcataaccctcagactttggtaacccttcgataaagtccattgtgacatctgcccaaatgccatgtggaatcggaagaggctgtaacagtccggctggatgagtcctttctggtttcgcctgttgacaggtcaagcactgttgtacaaattgagtcacatccaccttaagtcccttccaccagaaaagtttcttgactctctgataagtggcatgtatgccagaatgcccccccatggcactgtcatgtaaagctgctatcagtttggttctaagggcagagttggaccctatccagatttggtcacctttcctgacaataccttgctgcaagctaaacccttgttcatttggactatgcaccaacaactgagtaattaactcctgggcttcagcatctgtctcataggaattcaaaatctcttgaatccacactggttgcacttcagaaagaacagccaactccatcatagcccccaccctggataaagcatcagctactcgattctctaccccttttttgtaaacgatctgaaactgaaggcccattaatcttgccatagctttcctttgtagctcagactgaagttgctgctctcctaaaaatgtaagtgacttatgatcagtcttgataacaaaaggactccgctgcagatatggcctccatttctccacagcaagaattaaggctaaaaactctttatcatagatagataggtgtctattcctttctcctaaagccttgctgatataagctatgggctttccttgtttgcatgagcacagcccccattccggtgtcacatgcatctgtctctaccacaaaaggaagatcaaatcgtggtagagccaagacaggagtagtcgtcatagctttctttagggcctcaaatgctgcttgagcttcatcattccacttgaaaccatgctgtttttgcaacagctgagtgaggggtcgtgccaaaactccatacccacacacaaacttcctgtagtaccctgtaagccccaaaaatcccctcaactcagtgatattctgtggtctaggccatgccagcatagcagctgtctttgcagggtccgtcgcgaccccttcactggatataatatgtccaagatatctcagctctttcttcgcaaacacacacttcttatgcttcaagaaaaacttctgttctctgagcttggacaataccctcctaatatgtttgtagtgctcctccagactcggactgtagatcaatatatcatctaagaataccataacaaatttccgtagaaatggttctagcactgtgttcatggcacactggaatgttgctggtgcatttgtcaagccaaaaggcataactcggaattggtaatggccatgatgagttttgaacgcagttttaccctcatcctcctctgccatccgaatctgatgataccccgcagtcatgtctagacttgtgaaaaactgagttcctgccaactcatccagaatctcatccaccaagggcatgggaaaacggttcttgatggtcatggagttcaaccttctataatcaatacaaaacctccagctgccatctttcttctgaaccagtaatacgggagatgcaaatggactggcactgggtactatcaatcctgcagttaataactctgtcacttgcctttcaatttctgtcttgtggaaaggtgaatacctataaggcctggaattcaccggaatagaccctgggagcaatggtatatgatggtcatacattctaaccggaggtagtccagtgggcacagcaaacacatcttcaaactccttaagtatctgcctcagcggttcctgttccttttcagcaccttcctcctgtattgcttcgagcatcacaaaagcccacacttcatttcccttcatccacctgctcagctgaacagctgacacttgcaatacctctgtacttcctacgccatcccccttcagctgcactctgacccctttatcccagaatgtcagcaccttgttgtcccaatcacactccataggactatggctctttagccaatcataccccaatatagcatcataggcttctaaatccagtaccctcatgttactggcataagtgtgcccttctgcccaccactccagcgctgccaccctttttgaactcaacatgaactctccatttgccaccttgactcttaccggtgaaacaacttcagttgataaagccaactgatctaccatcctctggctgacaaagcttgaggaactgcccgagtctaccaacatcaccaacacttgattctggatcagtgcccgaactctcatacaattctcacggtcagttccac

SEQ ID NO: 9593 - DNA, 5967 bp, Zea Mays
gtacatgcgtgctgggagtcccatctgctttttgtggcccagacctaggcccactatcggagcaaccgctctccccacgaaatcctcccccgggtcagcggactccccctcccccaaccccgcgctccacttacgtgactcgcgcgcgacacgcgagcaggaggttgagacgaagacccgccgccaccggggatggcccaagcgccgccgcgacctagggagcgaggatgaggagctcgaggaggtgcgccgcatgcagaggattcctgcaaggaggagaacatggaggtggtgcccgtagtagtaggggaaccgatcaagagcactggcgaggggaagaaatagaagaagcactatgcttccttggagtaccacgtcaacagcttggagctggtgagcccatggcttgttcctcctgcccttccctcccctcccctccctgctcccccgactctgcgcggatctggtactatctagcccatagagccgtgttggacaacacaaccacgaccacaaggcatcgctgtggagcagtcggagccatttgtgatgcccccctcccgcttgcattgaccacagaggcacaccggagcatccggcgaggacctgcacgcttgaaaccgacgacgaggccatgctggggaattgcatattgtgtcaagggtggtccagaaaaagagctaaaagcaatgcagtacttggagagaagagagtgtgagtatgaccagaagatatccattgatttctacaaggaaggagatcccttgaaaccagctgtgatgggcgtcttagtgttcgtttccactccagatccaattggcaacaagtactatcttggccctgctcctttgcagaatatggcaaggccacgaagatgattcgatcatagagcttgcaaacaaggtgaggaaggtgctcaacagaacaaaggagaccaaaatcactgggcgcgtgaactcttctactacctcaagggtaagcaggtggactatggcgaggagcacagcaaggcttgcggccacaacaggtttgggagaatatatcacacaggtcactatcctgtttgttatgagcacaacccagtgcattttgtggggcactctgctggcgcgcaggttgtgagggtgctgcatcagatgcttgccgacaaggagaccgtggaggtggttctggagggagcatctttataagggctgcatcgataagctagatgtgatgatgagaaatcacttcgtatgtctcaaatgagcttggcgaagagatttggctaatccagatcttttgttgcctccactctgatggaatatggttttggatcctgaaggagaaagcgggtcctaagggaggaagcagagcaattggagctcgaactggagatgcatagagagttaagggagtagatgctgcaactcttgtggcctacgctcgagctgaagccagattagtgatgaggggggcagttgtccttgctgctaagcatgcaaaaacaatggtcgggaagccattgttgtatggaataggtaccctgttggtcatgtcgctgaggacactgtatggagtgggttgtgtttttggcgcacggtggttcctctacatgacaagcgtatctccatcgctgcaaattgagtttgtaagtggtccgaaacaactaggtagctactagctattgagtatttaggagtcaatgcttaatgatatttacttaatgcttaattgcttatcgaagtaagaaccctgttttttgtattgacatggtggtgctctttaggagagaagccaggggtaaaaaacaattagttctgcagattttattttatttcgatcagttgtgagagtttcttacaattggatgacattgctttgtagaaagaaaatacaaggtattttttagtaggaaagagttgcattttctgtgctcatatacagctttgccgttcgttttctaaaatgttgaaaaggatcatgtcattggtgtaacactcctgtttgtcttaattgaagaagtggtaccaacgagatgtcatttcctatcataattttatctgatgcatatgttgtagtagagctctcagcaattgattcctctcataaattggtggctagagctcgtgtggccctctcatcggatttggtgtctgagccctcgctagatctcgcaccctcatcgaagccctcattggattcgacaccctcactggaggttgcaccgcaatgggatctaggaaccgtagacagcctcgaccacccacgtggattgttgcctctgtggatgagacgcagcgccaaggggccagaggaaactacgtgatgaacctcacatcacagctcatgtcatggttctgagacaacccgtggccgccggcgcgccaccgccgggacgtgagttcgtcggagcgtcagcgagtcgctacaacccaggtgagtttgttacggatatgattctctggattattctgatcgtagttttgccaactggccaagtacagagtatatatccggtctcttaacaggccattacagactccaaataaacccataacaccagattaggacactaaacccggcccacggcccaaccctagagagtacttactgctcagacatgacaattccccgggcctcagaatccgcttgtccccaagcgatggcgtctggaaaacggttcttcaacacatagtaatcttcccaagttgctgattccactggcacaccagaccagcggataagaacctgtggaacagcttgatggcctttgcgcacaagacgtcgatccaggatttcttcaggaacaatgccagttcttgagaggtccaccaatggaggcaaagaagtaaaaactggagtatatgatggataataaggtttcagctgggaaacgtgaaacaccggatgaacttgagcatcggctggaagatccaatttgtaagctgccgcaccaatcttagccaacactctgaaaggaccaaaaaacttgaaagccaactttgggcaaggacggttcaccacagtcttttgagcatatggctgaagcttgagcagcaccatctccccaacctgaaactctcttgctgtccttccccgatcagccatttgtttcatccgattttgagctcgagcgagttgttctttgagatgagttgagaaagcaaccctgtcagccagccaatctgttactgacccctcctccaggacaccagactgaggtaacgccaacatcggggcatcatatccatatagtgctttgaaaggcgtacaacccagactagtatggtaagtagtattgtaccaaaattctgccaatgctaaccacaacttccacttagccggctgagcattcactgcacatcttagatatgtctccaaacattgattcacccgttcactttgaccgtcagtctgtggatgataggcagtggaaaacagcaacttaacatccataagttgaaacaggtgcttccagaaagagctaatgaaaatcttgtctctgtctgacacaatggacttgggaggtccatgtaacttcaccacctgatccaaaaatatttgagccactccctgggcagtgaaagggtgcctgagtggaagaaaatgcccatatttggtgaatctgtccactactaccatgatggtgtcataaccctcagactttggtaacccttcgataaagtccattgtgacatctgcccaaatgccatgtggaatcggaagaggctgtaacagtccggctggatgagtcctttctggtttcgcctgttgacaggtcaagcactgttgtacaaattgagtcacatccaccttaagtcccttccaccagaaaagtttcttgactctctgataagtggcatgtatgccagaatgcccccccatggcactgtcatgtaaagctgctatcagtttggttctaagggcagagttggaccctatccagatttggtcacctttcctgacaataccttgctgcaagctaaacccttgttcatttggactatgcaccaacaactgagtaattaactcctgggcttcagcatctgtctcataggaattcaaaatctcttgaatccacactggttgcacttcagaaagaacagccaactccatcatagcccccaccctggataaagcatcagctactcgattctctaccccttttttgtaaacgatctgaaactgaaggcccattaatcttgccatagctttcctttgtagctcagactgaagttgctgctctcctaaaaatgtaagtgacttatgatcagtcttgataacaaaaggactccgctgcagatatggcctccatttctccacagcaagaattaaggctaaaaactctttatcatagatagataggtgtctattcctttctcctaaagccttgctgatataagctatgggctttccttgtttgcatgagcacagcccccattccggtgtcacatgcatctgtctctaccacaaaaggaagatcaaatcgtggtagagccaagacaggagtagtcgtcatagctttctttagggcctcaaatgctgcttgagcttcatcattccacttgaaaccatgctgtttttgcaacagctgagtgaggggtcgtgccaaaactccatacccacacacaaacttcctgtagtaccctgtaagccccaaaaatcccctcaactcagtgatattctgtggtctaggccatgccagcatagcagctgtctttgcagggtccgtcgcgaccccttcactggatataatatgtccaagatatctcagctctttcttcgcaaacacacacttcttatgcttcaagaaaaacttctgttctctgagcttggacaataccctcctaatatgtttgtagtgctcctccagactcggactgtagatcaatatatcatctaagaataccataacaaatttccgtagaaatggttctagcactgtgttcatggcacactggaatgttgctggtgcatttgtcaagccaaaaggcataactcggaattggtaatggccatgatgagttttgaacgcagttttaccctcatcctcctctgccatccgaatctgatgataccccgcagtcatgtctagacttgtgaaaaactgagttcctgccaactcatccagaatctcatccaccaagggcatgggaaaacggttcttgatggtcatggagttcaaccttctataatcaatacaaaacctccagctgccatctttcttctgaaccagtaatacgggagatgcaaatggactggcactgggtactatcaatcctgcagttaataactctgtcacttgcctttcaatttctgtcttgtggaaaggtgaatacctataaggcctggaattcaccggaatagaccctgggagcaatggtatatgatggtcatacattctaaccggaggtagtccagtgggcacagcaaacacatcttcaaactccttaagtatctgcctcagcggttcctgttccttttcagcaccttcctcctgtattgcttcgagcatcacaaaagcccacacttcatttcccttcatccacctgctcagctgaacagctgacacttgcaatacctctgtacttcctacgccatcccccttcagctgcactctgacccctttatcccagaatgtcagcaccttgttgtcccaatcacactccataggactatggctctttagccaatcataccccaatatagcatcataggcttctaaatccagtaccctcatgttactggcataagtgtgcccttctgcccaccactccagcgctgccaccctttttgaactcaacatgaactctccatttgccaccttgactcttaccggtgaaacaacttcagttgataaagccaactgatctaccatcctctggctgacaaagcttgaggaactgcccgagtctaccaacatcaccaacacttgattctggatcagtgcccgaactctcatacaattctcacggtcagttccac

SEQ ID NO: 9594 - DNA, 1285 bp, Zea Mays
gtacatgcgtgctgggagtcccatctgctttttgtggcccagacctaggcccactatcggagcaaccgctctccccacgaaatcctcccccgggtcagcggactccccctcccccaaccccgcgctccacttacgtgactcgcgcgcgacacgcgagcaggaggttgagacgaagacccgccgccaccggggatggcccaagcgccgccgcgacctagggagcgaggatgaggagctcgaggaggtgcgccgcatgcagaggattcctgcaaggaggagaacatggaggtggtgcccgtagtagtaggggaaccgatcaagagcactggcgaggggaagaaatagaagaagcactatgcttccttggagtaccacgtcaacagcttggagctgcttgcattgaccacagaggcacaccggagcatccggcgaggacctgcacgcttgaaaccgacgacgaggccatgctggggaattgcatattgtgtcaagggtggtccagaaaaagagctaaaagcaatgcagtacttggagagaagagagtgtgagtatgaccagaagatatccattgatttctacaaggaaggagatcccttgaaaccagctgtgatgggcgtcttagtgttcgtttccactccagatccaattggcaacaagtactatcttggccctgctcctttgcagaatatggcaaggccacgaagatgattcgatcatagagcttgcaaacaaggtgaggaaggtgctcaacagaacaaaggagaccaaaatcactgggcgcgtgaactcttctactacctcaagggtaagcaggtggactatggcgaggagcacagcaaggcttgcggccacaacaggtttgggagaatatatcacacaggtcactatcctgtttgttatgagcacaacccagtgcattttgtggggcactctgctggcgcgcaggttgtgagggtgctgcatcagatgcttgccgacaagagggatggttcatgtgagctggagtacaggattagagcacccaaattaggaattagtcatgcctatcatcccgcttgagacgaaggatgagcttgggctgcttcatccagcattcaaggctgtgaagacttccacatgataattagaaatctggtgacaacagaagtttgggttggggtcatgggatggatatctttgttgtaatgtgaggtgttaggagaattatgttatgcttatttattggcataagttatgtcttacacgtacaaatgagttaatggatgaactcaagttattggttcaa

SEQ ID NO: 9595 - DNA, 549 bp, Zea Mays
gtacatgcgtgctgggagtcccatctgctttttgtggcccagacctaggcccactatcggagcaaccgctctccccacgaaatcctcccccgggtcagcggactccccctcccccaaccccgcgctccacttacgtgactcgcgcgcgacacgcgagcaggaggttgagacgaagacccgccgccaccggggatggcccaagcgccgccgcgacctagggagcgaggatgaggagctcgaggaggtgcgccgcatgcagaggattcctgcaaggaggagaacatggaggtggtgcccgtagtagtaggggaaccgatcaagagcactggcgaggggaagaaatagaagaagcactatgcttccttggagtaccacgtcaacagcttggagctgcttgcattgaccacagaggcacaccggagcatccggcgaggacctgcacgcttgaaaccgacgacgaggccatgctggggaattgcatattgtgtcaagggtggtccagaaaaagagctaaaagcaatgcagtacttggagagaagagagtgtgag

SEQ ID NO: 9596 - DNA, 1621 bp, Zea Mays
ggatgattttcgcctcggctgtgttaacagaactctgcccaagaatcgtcgaccaccgcgcacatcacctgttcgacgaaacgctccctcggacagcatatgtgttcgaccggtctacaagggcgacgggtcagccgccagccgccgcgaggttcgtgctgatccgagagctgcacccgctgggcacggagatgacacgggctctgtcgactgccaactgccatgccgccatggagatgacacacggacggacgagtggtctgtgtgccgacggatcaacgtatgctgatccatggaccaagatcaagacacacatgtttgaaaccacagcataggatggtgagcccaattgaagggctgctggataggcagaatccaagatgcaaaagcactcatggcctggtgtcccttgcacgcagcttcagcgaagctgcctatctgacatagatgaaattgttattgtctgctaaccatgttcaaagtgttattaccaattaagaatcagtggcagctagatgtcttgagacaactactttataccatacgcaacaatcaggagtccatcccaaaactgagaagatattcagtagcactggattttttttattatatgcgctcatggtagatgacacatgagaggtgtccgtctgtctgtcagttcttgattgtgataattttgaaaggcaatctcagggattttttttgttcaatcatggccagtgtgaattaaaataatgtactcattttactaatagagaggcgtccaatcaacgttaggttgctccacgcaagttggaatctttcttgtctgtacatgtgaagtgacttaactaatttatacaatcaacgttaggttgccaaattgtcactaaaccaaacggtacggtataattgtttttctgacttgttgccttgtctgtgcccccacacgcctctccacacacacacacacacacacacacacacactgctgcataactcttcttgtggcctggtctctgcccctttggctataaaagtagacttggcctcccgcccctctttgcacgagcacaactctgttttcctaatccgccttctggcgttataaggggtcgggctatgctgtaaaaaaagtgatcttagtgctatggcatggaattgaagatctgatctagctagccaggtaactaactaaacttgtttaacataagtttcatcttcaaccttttttctcatttagttatgcatgagcatatatagctagtactatgatcttgtcaccttcacttgtgaatctttcagcttttttttttgaagcatgtgtagttgtgttgatgatctcatagatcccatgtcacagcaaggacagtatggataaagccctcttagtttttttatcattttatcttttctgtttggtttcaattttttaatccttgtggaacataaaatacaagtcattataggtcttttttctgtcctgattgctgtgtgcttgatgagctattctagcttgatgaatatctgtatgtctttagtcttcttgcttccaaatgcacccaacctgtgtctgttgaagatcccaacataatttttttacaagatgccactagaacatgaacacttcgccagtgataac

SEQ ID NO: 9597 - DNA, 1616 bp, Zea Mays
ggatgattttcgcctcggctgtgttaacagaactctgcccaagaatcgtcgaccaccgcgcacatcacctgttcgacgaaacgctccctcggacagcatatgtgttcgaccggtctacaagggcgacgggtcagccgccagccgccgcgaggttcgtgctgatccgagagctgcacccgctgggcacggagatgacacgggctctgtcgactgccaactgccatgccgccatggagatgacacacggacggacgagtggtctgtgtgccgacggatcaacctgatccatggaccaagatcaagacacacatgtttgaaaccacagcataggatggtgagcccaattgaagggctgctggataggcagaatccaagatgcaaaagcactcatggcctggtgtcccttgcacgcagcttcagcgaagctgcctatctgacatagatgaaattgttattgtctgctaaccatgttcaaagtgttattaccaattaagaatcagtggcagctagatgtcttgagacaactactttataccatacgcaacaatcaggagtccatcccaaaactgagaagatattcagtagcactggattttttttattatatgcgctcatggtagatgacacatgagaggtgtccgtctgtctgtcagttcttgattgtgataattttgaaaggcaatctcagggattttttttgttcaatcatggccagtgtgaattaaaataatgtactcattttactaatagagaggcgtccaatcaacgttaggttgctccacgcaagttggaatctttcttgtctgtacatgtgaagtgacttaactaatttatacaatcaacgttaggttgccaaattgtcactaaaccaaacggtacggtataattgtttttctgacttgttgccttgtctgtgcccccacacgcctctccacacacacacacacacacacacacacacactgctgcataactcttcttgtggcctggtctctgcccctttggctataaaagtagacttggcctcccgcccctctttgcacgagcacaactctgttttcctaatccgccttctggcgttataaggggtcgggctatgctgtaaaaaaagtgatcttagtgctatggcatggaattgaagatctgatctagctagccaggtaactaactaaacttgtttaacataagtttcatcttcaaccttttttctcatttagttatgcatgagcatatatagctagtactatgatcttgtcaccttcacttgtgaatctttcagcttttttttttgaagcatgtgtagttgtgttgatgatctcatagatcccatgtcacagcaaggacagtatggataaagccctcttagtttttttatcattttatcttttctgtttggtttcaattttttaatccttgtggaacataaaatacaagtcattataggtcttttttctgtcctgattgctgtgtgcttgatgagctattctagcttgatgaatatctgtatgtctttagtcttcttgcttccaaatgcacccaacctgtgtctgttgaagatcccaacataatttttttacaagatgccactagaacatgaacacttcgccagtgataac

SEQ ID NO: 9598 - DNA, 1798 bp, Zea Mays
tctgcctagctacggcgtgtcggttgcttgtctcaccaaagcagcgacatggaagcctgacagctcgtcgcgtcgcgccatttccacccaacaaagcggcggcgccagcacgcactgcttctgcttgtgcgtgctcctccgttccgggcacgcctctaaagtctatacagcctcgaatccatcccggccgccgctcctgggggatactacagcgagccgaagcggggatggcggagatccctgtgatcgacctgcgcgccgccgtgcgcgcgctcttcgacctccccgacgacgccaagcgccgcaacgccgacgtcatcaccggcagcggctacgtcgcccccagcccgaccaacccgctctacgaggccttcgggctcctcgacgccgccgtgcccaccgacgtcgacgccttttgcgcgctcctcgacgcgccgcccaacatcagggagaccgtcaaggcctacgcggagaagatgcacgatgtgatcgttggcgtcgcccgcgagctggcgtctagcctggggctagtcgaggagcactcgttccaggactggccgtgccagttccgcatcaacaggtacaactacacgcgggagacggtgggctcctccggcgtgcagacccacacggactcgggcttcctcaccgtgctccatgaggacgagtgtgtcggcggcctcgaggtcctggacccgggcaccggcgagttcgtgcccgtggaccccgtcgcgggctcctttctcgtaaacatcggcgacgtcggcacggcgtggagcaacgggaggctgcacaacgtgaagcaccgggtgcggtgcgtcgcacccgtgccgcgcatctccatcgccatgttcctgctcgcacccaaggacgacagcgtgagcgcaccggcggcgttcgtggacgcggaccacccgcgcaggtacaaggtgttcaactacaacgactatcggaggctcagactgtccaccggcgagcacgcaggcgaggcgctcgcacggatggcggcgtgacgtggctggagctgcaaattggattggaagccgagacaagccgttagttatttaccatgcccgtgcgttcaccgcacacaatcatattcaaaagccataaaataaaaaataattttaatatcagtcaacatatggtttaaatatcatatggagtacaatattccgaatttttttttgtaatttagtctgtcttttgaaaaaaatgcacatctagacctccggatgacttaatgtcgtttttggactcttttctcggcgccatagtatacggcgccgaggtacctagtacactggactctttttgctgagctggcatctacgtggctgagttggcatctacgtggccgagctcaaacaattgctacacacgctgtctcgctctgactttgactctgcgcgcggcgcgtccttgtgaagagttgaagacaaaagcttggcacatgcactgcacgtataaaacaaaaagatacaggatgggggttgagtgaaagacgtaacttttttcctccttcgaaggccacacaggaagtgtccgtgagaccgtgacgtgctctcttgtagagagtgtactgccacagtggacgaggtgacatgaggcgatgtactgcacagtggacgaggtgacatgaggcgctgttgttgtactatatagctagccgcgcaatcccaattccaattccatagctgcgctccgcgtctggctcagatgcacggaccctcgaccaaaactcaaagctgagctccggccacgtagatgccagctcagcaaaatgagtccagcgtac

SEQ ID NO: 9599 - DNA, 1845 bp, Zea Mays
ctttttgaacgtaactgacagaagctatctgcctagctacggcgtgtcggttgcttgtctcaccaaagcagcgacatggaagcctgacagctcgtcgcgtcgcgccatttccacccaacaaagcggcggcgccagcacgcactgcttctgcttgtgcgtgctcctccgttccgggcacgcctctaaagtctatacagcctcgaatccatcccggccgccgctcctgggggatactacagcgagccgaagcggggatggcggagatccctgtgatcgacctgcgcgccgccgtgcgcgcgctcttcgacctccccgacgacgccaagcgccgcaacgccgacgtcatcaccggcagcggctacgtcgcccccagcccgaccaacccgctctacgaggccttcgggctcctcgacgccgccgtgcccaccgacgtcgacgccttttgcgcgctcctcgacgcgccgcccaacatcagggagaccgtcaaggcctacgcggagaagatgcacgatgtgatcgttggcgtcgcccgcgagctggcgtctagcctggggctagtcgaggagcactcgttccaggactggccgtgccagttccgcatcaacaggtacaactacacgcgggagacggtgggctcctccggcgtgcagacccacacggactcgggcttcctcaccgtgctccatgaggacgagtgtgtcggcggcctcgaggtcctggacccgggcaccggcgagttcgtgcccgtggaccccgtcgcgggctcctttctcgtaaacatcggcgacgtcggcacggcgtggagcaacgggaggctgcacaacgtgaagcaccgggtgcggtgcgtcgcacccgtgccgcgcatctccatcgccatgttcctgctcgcacccaaggacgacagcgtgagcgcaccggcggcgttcgtggacgcggaccacccgcgcaggtacaaggtgttcaactacaacgactatcggaggctcagactgtccaccggcgagcacgcaggcgaggcgctcgcacggatggcggcgtgacgtggctggagctgcaaattggattggaagccgagacaagccgttagttatttaccatgcccgtgcgttcaccgcacacaatcatattcaaaagccataaaataaaaaataattttaatatcagtcaacatatggtttaaatatcatatggagtacaatattccgaatttttttttgtaatttagtctgtcttttgaaaaaaatgcacatctagacctccggatgacttaatgtcgtttttggactcttttctcggcgccatagtatacggcgccgaggtacctagtacactggactctttttgctgagctggcatctacgtggctgagttggcatctacgtggccgagctcaaacaattgctacacacgctgtctcgctctgactttgactctgcgcgcggcgcgtccttgtgaagagttgaagacaaaagcttggcacatgcactgcacgtataaaacaaaaagatacaggatgggggttgagtgaaagacgtaacttttttcctccttcgaaggccacacagggtatacactagagattttcaaagtgtccgtgagaccgtgacgtgctctcttgtagagagtgtactgccacagtggacgaggtgacatgaggcgatgtactgcacagtggacgaggtgacatgaggcgctgttgttgtactatatagctagccgcgcaatcccaattccaattccatagctgcgctccgcgtctggctcagatgcacggaccctcgaccaaaactcaaagctgagctccggccacgtagatgccagctcagcaaaatgagtccagcgtac

SEQ ID NO: 9600 - DNA, 1854 bp, Zea Mays
cctgaatattatttggacattttcatgagatagaagtgtgcatagttttgtatacattatgggtgaagagatgaagagacttattgcttatgtggaagatctctatgaggatacaaattcctgcaacatggtcaaggtacaatggtttggcaaagctgatgaggttggtgttctgttgcccatggattttgatgacagggagattttcttttctctgggtcgtcaagatctcaatgtagtatgtattgatggattggctgcagtcctgagtgcccagcactacgagaagttcaagagtgatactagatacagcttgtggcaaccttatttttgctatcggcagattgataatggtgaagccaagccttttgatgtcacacagctacaaggctactggagccaggaagtacttaggaccatgttcaatgcaacttcctgtctgaaggttttatggtgagaacatcgaacacttgtgtcctggttgccatgtggaagtactatctcaagacagtggtataaggggatgctggtttagatgtttgattctgaacaggcataaagataaaatcaagggtgcgctacctagaacttcaggatgctgatgagactggaaacttggaggagtgggttttgctaacacgaattgcgaaacctgatcaactgggtgtacgtttccttggaaggccaatggttcgtccacagcatgtggaagaaagcaaggcctcgtgctttgatgttggagccattgttgatgcgtggtggcatggtggctggtgggagggaattgtgttgtgccagggaggcagggggcgcctacaagtttattttccaggagaaaagcgaatcactgaatttggtgaagatgaattgaggtattcccttgagtgggttggtaacaaatggaatcctttgaagggaagaaaagatatcgcacacaagctgacctccactgcagatcgtggaagtgaatatttgattgggaaacaagatcatctgaattttgatgtgcttctaaaaccagaacctcaactagagggacttcaatatgacaaacggggtattgagaaatcttcagtcaccaccatctcacgagatcagaaacgtgtcctggccgacctgactaatgatttgaagttagatagcttgaggtggaggccaagaaagaggagtagaagatctggctcaagaaagcagtcggatacaagcagtggaagcagcagcggggacatggacttgtccagccctggccctagtgggttttgtcaacttaatttagtgcccgacgatgagacatgcaagagcagtggagagcagccttttatgggcgtgcctgtgcaggcccctaaatccgactgcctccctcttcatgcccctaaattccgggcgtacgctatccagccgacggatcagccatccatgcgcggtgaaacctctgcgttctctgttgtccgagcgttagcgactgcgtctctcgtggcggagccctcgagccgccgtgcttcgtcgtcgttggcgaccaagttgggagagaagaggtcgtgggtgggcgggtcaggcggtggcccgcttcgagcacttcgaagcgaggaggagggtcgcgtcaagagggcgaccgaggttgccgcagtcgaggcggttcctcggaggagaatcgccattgcgaaatgcctacgttgtccaccgccgtcgttcaaggttgttggcgacaaaaggaagcggagctcgtcgccaccgtcttcatcatcctcgattcgctcctccgcactagatctgagcagagaaaggtacgatcttcgatttcgtttgcggatctgttcgattcaatttgcactctattttgtgcgctttttctag

SEQ ID NO: 9601 - DNA, 2027 bp, Zea Mays
ctgggccaattgtgtaactttggcatttgggaatagagataagcgaagcagcagcatgaatgtatgctcaatcaggtgcaatggggattcatatgatgacagtgttattaactgcagtcaagttaccgtttcgaaggatgtttcttctagggaagcttcgaatgacttcacatggttgggagcttcatggaaatgccaacgaagtttgaagcactacaaatctttctgccgtagaggaattactatctcggtgcatagttttgtatacattatgggtgaagagatgaagagacttattgcttatgtggaagatctctatgaggatacaaattcctgcaacatggtcaaggtacaatggtttggcaaagctgatgaggttggtgttctgttgcccatggattttgatgacagggagattttcttttctctgggtcgtcaagatctcaatgtagtatgtattgatggattggctgcagtcctgagtgcccagcactacgagaagttcaagagtgatactagatacagcttgtggcaaccttatttttgctatcggcagattgataatggtgaagccaagccttttgatgtcacacagctacaaggctactggagccaggaagtacttaggaccatgttcaatgcaacttcctgtctgaaggttttatggtgagaacatcgaacacttgtgtcctggttgccatgtggaagtactatctcaagacagtggcataaagataaaatcaagggtgcgctacctagaacttcaggatgctgatgagactggaaacttggaggagtgggttttgctaacacgaattgcgaaacctgatcaactgggtgtacgtttccttggaaggccaatggttcgtccacagcatgtggaagaaagcaaggcctcgtgctttgatgttggagccattgttgatgcgtggtggcatggtggctggtgggagggaattgtgttgtgccagggaggcagggggcgcctacaagtttattttccaggagaaaagcgaatcactgaatttggtgaagatgaattgaggtattcccttgagtgggttggtaacaaatggaatcctttgaagggaagaaaagatatcgcacacaagctgacctccactgcagatcgtggaagtgaatatttgattgggaaacaagatcatctgaattttgatgtgcttctaaaaccagaacctcaactagagggacttcaatatgacaaacggggtattgagaaatcttcagtcaccaccatctcacgagatcagaaacgtgtcctggccgacctgactaatgatttgaagttagatagcttgaggtggaggccaagaaagaggagtagaagatctggctcaagaaagcagtcggatacaagcagtggaagcagcagcggggacatggacttgtccagccctggccctagtgggttttgtcaacttaatttagtgcccgacgatgagacatgcaagagcagtggagagcagccttttatgggcgtgcctgtgcaggcccctaaatccgactgcctccctcttcatgcccctaaattccgggcgtacgctatccagccgacggatcagccatccatgcgcggtgaaacctctgcgttctctgttgtccgagcgttagcgactgcgtctctcgtggcggagccctcgagccgccgtgcttcgtcgtcgttggcgaccaagttgggagagaagaggtcgtgggtgggcgggtcaggcggtggcccgcttcgagcacttcgaagcgaggaggagggtcgcgtcaagagggcgaccgaggttgccgcagtcgaggcggttcctcggaggagaatcgccattgcgaaatgcctacgttgtccaccgccgtcgttcaaggttgttggcgacaaaaggaagcggagctcgtcgccaccgtcttcatcatcctcgattcgctcctccgcactagatctgagcagagaaaggtacgatcttcgatttcgtttgcggatctgttcgattcaatttgcactctattttgtgcgctttttctag

SEQ ID NO: 9602 - DNA, 2928 bp, Zea Mays
atggacgaggtagcgacagcggccctggcggcggcgaggggacggtggacgcagtgggaggaggtggtggtgtccaacgaccgcggcagtcgtcttgtgcactactacctccgcggcaacggcgaagcgaaggagctagctgtggtggggcgggagcggagcccacgtcacatgtcgtacgctgtgcaggggcggttcctccgcgcgctcgcagctgccgcgggagcggtcgccgtcgcgtcgtcgccgtcacggtcgcccctggcggctgctgtggcggacggcggcgctccgaggaggtggcggtccaggcgggaggtcgtggagtggctgtcctccctcgtttccgattttgatgattttgagcggggattggcgcgtttggtcctgtttttggctcgatttggtgttaccttttgcgtcgaaatcgcgcttgttcttggtccgattgaaggcggttcatgttctggctcacttctcttcgtgtttggtgcgttttatgccgtggaacatgtgagcttttaggttttacaaggatttcttcggctgatttgcgtgctctatgtctgggattcctcggcggaccgtcggttgatttggatggtttttgtttatgcaatcttgacgcgctcagcgaatctgctgttctatgaacgcgatatatgtacggaactatatgttttctcatctgtaggcgctttcagcttctaggaagcctaggattaggattaggtttcggtttgatgctttacttccatgtcctgctgtgtctagcactctagccttatttggccagaagagccaccatgtctagccatatttggttatagttatggttcctcaatggctaacaggtgcaatggggattcatatgatgacagtgttattaactgcagtcaagttaccgtttcgaaggatgtttcttctagggaagcttcgaatgacttcacatggttgggagcttcatggaaatgccaacgaagtttgaagcactacaaatctttctgccgtagaggaattactatctcggtgcatagttttgtatacattatgggtgaagagatgaagagacttattgcttatgtggaagatctctatgaggatacaaattcctgcaacatggtcaaggtacaatggtttggcaaagctgatgaggttggtgttctgttgcccatggattttgatgacagggagattttcttttctctgggtcgtcaagatctcaatgtagtatgtattgatggattggctgcagtcctgagtgcccagcactacgagaagttcaagagtgatactagatacagcttgtggcaaccttatttttgctatcggcagattgataatggtgaagccaagccttttgatgtcacacagctacaaggctactggagccaggaagtacttaggaccatgttcaatgcaacttcctgtctgaaggtgcgtttcaaggtccctaaatctggacccaattcagatggagggctgaagaggaagcgtgatgcattcaacaatgatgctaatcgacagaagttcatttgttctggtgcttttacttctaggttttatggtgagaacatcgaacacttgtgtcctggttgccatgtggaagtactatctcaagacagtggcataaagataaaatcaagggtgcgctacctagaacttcaggatgctgatgagactggaaacttggaggagtgggttttgctaacacgaattgcgaaacctgatcaactgggtgtacgtttccttggaaggccaatggttcgtccacagcatgtggaagaaagcaaggcctcgtgctttgatgttggagccattgttgatgcgtggtggcatggtggctggtgggagggaattgtgttgtgccagggaggcagggggcgcctacaagtttattttccaggagaaaagcgaatcactgaatttggtgaagatgaattgaggtattcccttgagtgggttggtaacaaatggaatcctttgaagggaagaaaagatatcgcacacaagctgacctccactgcagatcgtggaagtgaatatttgattgggaaacaagatcatctgaattttgatgtgcttctaaaaccagaacctcaactagagggacttcaatatgacaaacggggtattgagaaatcttcagtcaccaccatctcacgagatcagaaacgtgtcctggccgacctgactaatgatttgaagttagatagcttgaggtggaggccaagaaagaggagtagaagatctggctcaagaaagcagtcggatacaagcagtggaagcagcagcggggacatggacttgtccagccctggccctagtgggttttgtcaacttaatttagtgcccgacgatgagacatgcaagagcagtggagagcagccttttatgggcgtgcctgtgcaggcccctaaatccgactgcctccctcttcatgcccctaaattccgggcgtacgctatccagccgacggatcagccatccatgcgcggtgaaacctctgcgttctctgttgtccgagcgttagcgactgcgtctctcgtggcggagccctcgagccgccgtgcttcgtcgtcgttggcgaccaagttgggagagaagaggtcgtgggtgggcgggtcaggcggtggcccgcttcgagcacttcgaagcgaggaggagggtcgcgtcaagagggcgaccgaggttgccgcagtcgaggcggttcctcggaggagaatcgccattgcgaaatgcctacgttgtccaccgccgtcgttcaaggttgttggcgacaaaaggaagcggagctcgtcgccaccgtcttcatcatcctcgattcgctcctccgcactagatctgagcagagaaaggtacgatcttcgatttcgtttgcggatctgttcgattcaatttgcactctattttgtgcgctttttctag

SEQ ID NO: 9603 - DNA, 2748 bp, Zea Mays
cgttactctccccaaatctgatcctcccgcacgaggtctcacctcttccgacgccacgcgagacgcaccacacgcgagcccaagccggaccccgtctagggttagcgatccacggcggcggccatggacgaggtagcgacagcggccctggcggcggcgaggggacggtggacgcagtgggaggaggtggtggtgtccaacgaccgcggcagtcgtcttgtgcactactacctccgcggcaacggcgaagcgaaggagctagctgtggtggggcgggagcggagcccacgtcacatgtcgtacgctgtgcaggggcggttcctccgcgcgctcgcagctgccgcgggagcggtcgccgtcgcgtcgtcgccgtcacggtcgcccctggcggctgctgtggcggacggcggcgctccgaggaggtggcggtccaggcgggaggtcgtggagtggctgtcctccctcgtttccgattttgatgattttgagcggggattggcgcgtttggtcctgtttttggctcgatttggtgttaccttttgcgtcgaaatcgcgcttgttcttggtccgattgaaggcggttcatgttctggctcacttctcttcgtgtttggtgcgttttatgccgtggaacatcactctagccttatttggccagaagagccaccatgtctagccatatttggttatagttatggttcctcaatggctaacaggtgcaatggggattcatatgatgacagtgttattaactgcagtcaagttaccgtttcgaaggatgtttcttctagggaagcttcgaatgacttcacatggttgggagcttcatggaaatgccaacgaagtttgaagcactacaaatctttctgccgtagaggaattactatctcggtgcatagttttgtatacattatgggtgaagagatgaagagacttattgcttatgtggaagatctctatgaggatacaaattcctgcaacatggtcaaggtacaatggtttggcaaagctgatgaggttggtgttctgttgcccatggattttgatgacagggagattttcttttctctgggtcgtcaagatctcaatgtagtatgtattgatggattggctgcagtcctgagtgcccagcactacgagaagttcaagagtgatactagatacagcttgtggcaaccttatttttgctatcggcagattgataatggtgaagccaagccttttgatgtcacacagctacaaggctactggagccaggaagtacttaggaccatgttcaatgcaacttcctgtctgaaggtgcgtttcaaggtccctaaatctggacccaattcagatggagggctgaagaggaagcgtgatgcattcaacaatgatgctaatcgacagaagttcatttgttctggtgcttttacttctaggttttatgatgtttgattctgaacaggcataaagataaaatcaagggtgcgctacctagaacttcaggatgctgatgagactggaaacttggaggagtgggttttgctaacacgaattgcgaaacctgatcaactgggtgtacgtttccttggaaggccaatggttcgtccacagcatgtggaagaaagcaaggcctcgtgctttgatgttggagccattgttgatgcgtggtggcatggtggctggtgggagggaattgtgttgtgccagggaggcagggggcgcctacaagtttattttccaggagaaaagcgaatcactgaatttggtgaagatgaattgaggtattcccttgagtgggttggtaacaaatggaatcctttgaagggaagaaaagatatcgcacacaagctgacctccactgcagatcgtggaagtgaatatttgattgggaaacaagatcatctgaattttgatgtgcttctaaaaccagaacctcaactagagggacttcaatatgacaaacggggtattgagaaatcttcagtcaccaccatctcacgagatcagaaacgtgtcctggccgacctgactaatgatttgaagttagatagcttgaggtggaggccaagaaagaggagtagaagatctggctcaagaaagcagtcggatacaagcagtggaagcagcagcggggacatggacttgtccagccctggccctagtgggttttgtcaacttaatttagtgcccgacgatgagacatgcaagagcagtggagagcagccttttatgggcgtgcctgtgcaggcccctaaatccgactgcctccctcttcatgcccctaaattccgggcgtacgctatccagccgacggatcagccatccatgcgcggtgaaacctctgcgttctctgttgtccgagcgttagcgactgcgtctctcgtggcggagccctcgagccgccgtgcttcgtcgtcgttggcgaccaagttgggagagaagaggtcgtgggtgggcgggtcaggcggtggcccgcttcgagcacttcgaagcgaggaggagggtcgcgtcaagagggcgaccgaggttgccgcagtcgaggcggttcctcggaggagaatcgccattgcgaaatgcctacgttgtccaccgccgtcgttcaaggttgttggcgacaaaaggaagcggagctcgtcgccaccgtcttcatcatcctcgattcgctcctccgcactagatctgagcagagaaaggtacgatcttcgatttcgtttgcggatctgttcgattcaatttgcactctattttgtgcgctttttctag

SEQ ID NO: 9604 - DNA, 2690 bp, Zea Mays
cgttactctccccaaatctgatcctcccgcacgaggtctcacctcttccgacgccacgcgagacgcaccacacgcgagcccaagccggaccccgtctagggttagcgatccacggcggcggccatggacgaggtagcgacagcggccctggcggcggcgaggggacggtggacgcagtgggaggaggtggtggtgtccaacgaccgcggcagtcgtcttgtgcactactacctccgcggcaacggcgaagcgaaggagctagctgtggtggggcgggagcggagcccacgtcacatgtcgtacgctgtgcaggggcggttcctccgcgcgctcgcagctgccgcgggagcggtcgccgtcgcgtcgtcgccgtcacggtcgcccctggcggctgctgtggcggacggcggcgctccgaggaggtggcggtccaggcgggaggtcgtggagtggctgtcctccctcgtttccgattttgatgattttgagcggggattggcgcgtttggtcctgtttttggctcgatttggtgttaccttttgcgtcgaaatcgcgcttgttcttggtccgattgaaggcggttcatgttctggctcacttctcttcgtgtttggtgcgttttatgccgtggaacatcactctagccttatttggccagaagagccaccatgtctagccatatttggttatagttatggttcctcaatggctaacaggtgcaatggggattcatatgatgacagtgttattaactgcagtcaagttaccgtttcgaaggatgtttcttctagggaagcttcgaatgacttcacatggttgggagcttcatggaaatgccaacgaagtttgaagcactacaaatctttctgccgtagaggaattactatctcggtgcatagttttgtatacattatgggtgaagagatgaagagacttattgcttatgtggaagatctctatgaggatacaaattcctgcaacatggtcaaggtacaatggtttggcaaagctgatgagtcctgagtgcccagcactacgagaagttcaagagtgatactagatacagcttgtggcaaccttatttttgctatcggcagattgataatggtgaagccaagccttttgatgtcacacagctacaaggctactggagccaggaagtacttaggaccatgttcaatgcaacttcctgtctgaaggtgcgtttcaaggtccctaaatctggacccaattcagatggagggctgaagaggaagcgtgatgcattcaacaatgatgctaatcgacagaagttcatttgttctggtgcttttacttctaggttttatggtgagaacatcgaacacttgtgtcctggttgccatgtggaagtactatctcaagacagtggcataaagataaaatcaagggtgcgctacctagaacttcaggatgctgatgagactggaaacttggaggagtgggttttgctaacacgaattgcgaaacctgatcaactgggtgtacgtttccttggaaggccaatggttcgtccacagcatgtggaagaaagcaaggcctcgtgctttgatgttggagccattgttgatgcgtggtggcatggtggctggtgggagggaattgtgttgtgccagggaggcagggggcgcctacaagtttattttccaggagaaaagcgaatcactgaatttggtgaagatgaattgaggtattcccttgagtgggttggtaacaaatggaatcctttgaagggaagaaaagatatcgcacacaagctgacctccactgcagatcgtggaagtgaatatttgattgggaaacaagatcatctgaattttgatgtgcttctaaaaccagaacctcaactagagggacttcaatatgacaaacggggtattgagaaatcttcagtcaccaccatctcacgagatcagaaacgtgtcctggccgacctgactaatgatttgaagttagatagcttgaggtggaggccaagaaagaggagtagaagatctggctcaagaaagcagtcggatacaagcagtggaagcagcagcggggacatggacttgtccagccctggccctagtgggttttgtcaacttaatttagtgcccgacgatgagacatgcaagagcagtggagagcagccttttatgggcgtgcctgtgcaggcccctaaatccgactgcctccctcttcatgcccctaaattccgggcgtacgctatccagccgacggatcagccatccatgcgcggtgaaacctctgcgttctctgttgtccgagcgttagcgactgcgtctctcgtggcggagccctcgagccgccgtgcttcgtcgtcgttggcgaccaagttgggagagaagaggtcgtgggtgggcgggtcaggcggtggcccgcttcgagcacttcgaagcgaggaggagggtcgcgtcaagagggcgaccgaggttgccgcagtcgaggcggttcctcggaggagaatcgccattgcgaaatgcctacgttgtccaccgccgtcgttcaaggttgttggcgacaaaaggaagcggagctcgtcgccaccgtcttcatcatcctcgattcgctcctccgcactagatctgagcagagaaaggtacgatcttcgatttcgtttgcggatctgttcgattcaatttgcactctattttgtgcgctttttctag

SEQ ID NO: 9605 - DNA, 2509 bp, Zea Mays
ccttgccgtcgtccacacggcccaccccacgttactctccccaaatctgatcctcccgcacgaggtctcacctcttccgacgccacgcgagacgcaccacacgcgagcccaagccggaccccgtctagggttagcgatccacggcggcggccatggacgaggtagcgacagcggccctggcggcggcgaggggacggtggacgcagtgggaggaggtggtggtgtccaacgaccgcggcagtcgtcttgtgcactactacctccgcggcaacggcgaagcgaaggagctagctgtggtggggcgggagcggagcccacgtcacatgtcgtacgctgtgcaggggcggttcctccgcgcgctcgcagctgccgcgggagcggtcgccgtcgcgtcgtcgccgtcacggtcgcccctggcggctgctgtggcggacggcggcgctccgaggaggtggcggtccaggcgggaggtcgtggagtggctgtcctccctcgtttccggaatatggagaatacaggtgtgtttcagtggaagcagctgctggcttcctctgggccaattgtgtaactttggcatttgggaatagagataagcgaagcagcagcatgaatgtatgctcaatcaggttatagttatggttcctcaatggctaacaggtgcaatggggattcatatgatgacagtgttattaactgcagtcaagttaccgtttcgaaggatgtttcttctagggaagcttcgaatgacttcacatggttgggagcttcatggaaatgccaacgaagtttgaagcactacaaatctttctgccgtagaggaattactatctcggtgcatagttttgtatacattatgggtgaagagatgaagagacttattgcttatgtggaagatctctatgaggatacaaattcctgcaacatggtcaaggtacaatggtttggcaaagctgatgagtcctgagtgcccagcactacgagaagttcaagagtgatactagatacagcttgtggcaaccttatttttgctatcggcagattgataatggtgaagccaagccttttgatgtcacacagctacaaggctactggagccaggaagtacttaggaccatgttcaatgcaacttcctgtctgaaggttttatggtgagaacatcgaacacttgtgtcctggttgccatgtggaagtactatctcaagacagtggcataaagataaaatcaagggtgcgctacctagaacttcaggatgctgatgagactggaaacttggaggagtgggttttgctaacacgaattgcgaaacctgatcaactgggtgtacgtttccttggaaggccaatggttcgtccacagcatgtggaagaaagcaaggcctcgtgctttgatgttggagccattgttgatgcgtggtggcatggtggctggtgggagggaattgtgttgtgccagggaggcagggggcgcctacaagtttattttccaggagaaaagcgaatcactgaatttggtgaagatgaattgaggtattcccttgagtgggttggtaacaaatggaatcctttgaagggaagaaaagatatcgcacacaagctgacctccactgcagatcgtggaagtgaatatttgattgggaaacaagatcatctgaattttgatgtgcttctaaaaccagaacctcaactagagggacttcaatatgacaaacggggtattgagaaatcttcagtcaccaccatctcacgagatcagaaacgtgtcctggccgacctgactaatgatttgaagttagatagcttgaggtggaggccaagaaagaggagtagaagatctggctcaagaaagcagtcggatacaagcagtggaagcagcagcggggacatggacttgtccagccctggccctagtgggttttgtcaacttaatttagtgcccgacgatgagacatgcaagagcagtggagagcagccttttatgggcgtgcctgtgcaggcccctaaatccgactgcctccctcttcatgcccctaaattccgggcgtacgctatccagccgacggatcagccatccatgcgcggtgaaacctctgcgttctctgttgtccgagcgttagcgactgcgtctctcgtggcggagccctcgagccgccgtgcttcgtcgtcgttggcgaccaagttgggagagaagaggtcgtgggtgggcgggtcaggcggtggcccgcttcgagcacttcgaagcgaggaggagggtcgcgtcaagagggcgaccgaggttgccgcagtcgaggcggttcctcggaggagaatcgccattgcgaaatgcctacgttgtccaccgccgtcgttcaaggttgttggcgacaaaaggaagcggagctcgtcgccaccgtcttcatcatcctcgattcgctcctccgcactagatctgagcagagaaaggtacgatcttcgatttcgtttgcggatctgttcgattcaatttgcactctattttgtgcgctttttctag

SEQ ID NO: 9606 - DNA, 2487 bp, Zea Mays
ttcccttgccgtcgtccacacggcccaccccacgttactctccccaaatctgatcctcccgcacgaggtctcacctcttccgacgccacgcgagacgcaccacacgcgagcccaagccggaccccgtctagggttagcgatccacggcggcggccatggacgaggtagcgacagcggccctggcggcggcgaggggacggtggacgcagtgggaggaggtggtggtgtccaacgaccgcggcagtcgtcttgtgcactactacctccgcggcaacggcgaagcgaaggagctagctgtggtggggcgggagcggagcccacgtcacatgtcgtacgctgtgcaggggcggttcctccgcgcgctcgcagctgccgcgggagcggtcgccgtcgcgtcgtcgccgtcacggtcgcccctggcggctgctgtggcggacggcggcgctccgaggaggtggcggtccaggcgggaggtcgtggagtggctgtcctccctcgtttccggttatagttatggttcctcaatggctaacaggtgcaatggggattcatatgatgacagtgttattaactgcagtcaagttaccgtttcgaaggatgtttcttctagggaagcttcgaatgacttcacatggttgggagcttcatggaaatgccaacgaagtttgaagcactacaaatctttctgccgtagaggaattactatctcggtgcatagttttgtatacattatgggtgaagagatgaagagacttattgcttatgtggaagatctctatgaggatacaaattcctgcaacatggtcaaggtacaatggtttggcaaagctgatgaggttggtgttctgttgcccatggattttgatgacagggagattttcttttctctgggtcgtcaagatctcaatgtagtatgtattgatggattggctgcagtcctgagtgcccagcactacgagaagttcaagagtgatactagatacagcttgtggcaaccttatttttgctatcggcagattgataatggtgaagccaagccttttgatgtcacacagctacaaggctactggagccaggaagtacttaggaccatgttcaatgcaacttcctgtctgaaggttttatggtgagaacatcgaacacttgtgtcctggttgccatgtggaagtactatctcaagacagtggcataaagataaaatcaagggtgcgctacctagaacttcaggatgctgatgagactggaaacttggaggagtgggttttgctaacacgaattgcgaaacctgatcaactgggtgtacgtttccttggaaggccaatggttcgtccacagcatgtggaagaaagcaaggcctcgtgctttgatgttggagccattgttgatgcgtggtggcatggtggctggtgggagggaattgtgttgtgccagggaggcagggggcgcctacaagtttattttccaggagaaaagcgaatcactgaatttggtgaagatgaattgaggtattcccttgagtgggttggtaacaaatggaatcctttgaagggaagaaaagatatcgcacacaagctgacctccactgcagatcgtggaagtgaatatttgattgggaaacaagatcatctgaattttgatgtgcttctaaaaccagaacctcaactagagggacttcaatatgacaaacggggtattgagaaatcttcagtcaccaccatctcacgagatcagaaacgtgtcctggccgacctgactaatgatttgaagttagatagcttgaggtggaggccaagaaagaggagtagaagatctggctcaagaaagcagtcggatacaagcagtggaagcagcagcggggacatggacttgtccagccctggccctagtgggttttgtcaacttaatttagtgcccgacgatgagacatgcaagagcagtggagagcagccttttatgggcgtgcctgtgcaggcccctaaatccgactgcctccctcttcatgcccctaaattccgggcgtacgctatccagccgacggatcagccatccatgcgcggtgaaacctctgcgttctctgttgtccgagcgttagcgactgcgtctctcgtggcggagccctcgagccgccgtgcttcgtcgtcgttggcgaccaagttgggagagaagaggtcgtgggtgggcgggtcaggcggtggcccgcttcgagcacttcgaagcgaggaggagggtcgcgtcaagagggcgaccgaggttgccgcagtcgaggcggttcctcggaggagaatcgccattgcgaaatgcctacgttgtccaccgccgtcgttcaaggttgttggcgacaaaaggaagcggagctcgtcgccaccgtcttcatcatcctcgattcgctcctccgcactagatctgagcagagaaaggtacgatcttcgatttcgtttgcggatctgttcgattcaatttgcactctattttgtgcgctttttctag

SEQ ID NO: 9607 - DNA, 572 bp, Zea Mays
tgacatgtcagcgttcaaggaacaaaatggatgtcgccagttctgtggagtgctacatcaaggagcacaatgtccctagcgaggtcgccctggcaaggataaattccttggttgaagatgcatggaagaccataaatcaagcaccatttaagtaccctgctctattcccggttgtgcaacgagttaccagcctagcaaagagcatgacactgctgttcctcgataagagggatgcgtacacatacagcaaggactttcaaacgacactggagacccatttcgtaagacatattccgctatagtactaggttgtggcgagtagatcatgtacgtggcgtggctgtttatagagtggagtttgaaataaaatatgagctgccagagataaccttagaaagcaaaatctatggtgtgtgtggctgacatctaataatctttttgttttcgtctaccatatgtattattttttcataaggtatccggaatctgtattatgtctgatgttagaaacatatttatataacgcttttcagagcctaatctcctagttactaattttcacaaaaaaatac

SEQ ID NO: 9608 - DNA, 884 bp, Zea Mays
tgcactgcaatataacgatgtatcttgcggaatttaagactggtcctgagaggaaggaatctgctgagagcacgatgatggcctacaaggctgctcaggacattgcgctggctgagctggcacctacccatccgataaggcttgggcttgctcttaacttctcagtgttctattatgagattctgaactccccagacaaagcttgcaaccttgcaaagcaggcgtttgatgaagctatctcccagttagacacccttggggaggagtcatacaaagatagcactctgatcatgcagctccttagggacaacttgaccctttggacctctgacctcacggaggatggtgctgatgagggcaaagaagccccgaaaggtgaggctggtgacggacagtaatcttgggagagcgcatattgttcgagcccattgttttagatgctctatgctgtcgaagctgaagctgtgccgtgctattattgtagctgatttcctgttccctcacttctttttttatattagtaggctggtagtgttcgaattagttccccattgctttgtgttgccgctagttggcattaagtccgtgtggactggtattattcactggatttgagaagcatgtcagtggttgctctagcgttttattgagttttgaagtcatctccctcatttcggtttcaatcatttagcagattgtgcatatggttgtgtaaaacacagttttgcacaattgcacaatttacgtagtgtggtttgaaataagagtgagatttgggctggatgtgcggttggctgtttgaatctgctctttagggcctgtttggtagggaggttttgaatactacagtttttagaataccacagttttcaactggaagtgac

SEQ ID NO: 9609 - DNA, 1302 bp, Zea Mays
aagtgccttcacggctagtatattaaagtttgttcttttatcgatatggcgagggaggagaatgtctacatggccaagctggctgagcaggccgaaaggtatgaagagatggttgagtatatggagaaggtggctaagactgtagatgtggaagagctcactgttgaggagcgtaacctcttgtcggtcgcatacaagaatgtgattggggctcgccgtgcttcatggcgcattgtctcttctattgaacagaaggaggagtcccgtaagaacgaagagcatgtgaaccttatcaaggaataccgtgcgaagatcgaggctgaactgagcaatatctgtgatggcatcctgaagctgcttgactcccacctagtgccttcttctactgctgctgaatcaaaggtcttctacctcaagatgaagggtgactatcacaggtatcttgcggaatttaagactggtcctgagaggaaggaatctgctgagagcacgatgatggcctacaaggctgctcaggacattgcgctggctgagctggcacctacccatccgataaggcttgggcttgctcttaacttctcagtgttctattatgagattctgaactccccagacaaagcttgcaaccttgcaaagcaggcgtttgatgaagctatctcccagttagacacccttggggaggagtcatacaaagatagcactctgatcatgcagctccttagggacaacttgaccctttggacctctgacctcacggaggatggtgctgatgagggcaaagaagccccgaaaggtgaggctggtgacggacagtaatcttgggagagcgcatattgttcgagcccattgttttagatgctctatgctgtcgaagctgaagctgtgccgtgctattattgtagctgatttcctgttccctcacttctttttttatattagtaggctggtagtgttcgaattagttccccattgctttgtgttgccgctagttggcattaagtccgtgtggactggtattattcactggatttgagaagcatgtcagtggttgctctagcgttttattgagttttgaagtcatctccctcatttcggtttcaatcatttagcagattgtgcatatggttgtgtaaaacacagttttgcacaattgcacaatttacgtagtgtggtttgaaataagagtgagatttgggctggatgtgcggttggctgtttgaatctgctctttagggcctgtttggtagggaggttttgaatactacagtttttagaataccacagttttcaactggaagtgac

SEQ ID NO: 9610 - DNA, 1079 bp, Zea Mays
cgctgcttcgccatgccccaggcccaccgctagcatccgcagttcccccgcgcccgagacgcaaccccgcgccaggagtaagtttgttcttttatcgatatggcgagggaggagaatgtctacatggccaagctggctgagcaggccgaaagaaggaggagtcccgtaagaacgaagagcatgtgaaccttatcaaggaataccgtgcgaagatcgaggctgaactgagcaatatctgtgatggcatcctgaagctgcttgactcccacctagtgccttcttctactgctgctgaatcaaaggtcttctacctcaagatgaagggtgactatcacaggtatcttgcggaatttaagactggtcctgagaggaaggaatctgctgagagcacgatgatggcctacaaggctgctcaggcgtttgatgaagctatctcccagttagacacccttggggaggagtcatacaaagatagcactctgatcatgcagctccttagggacaacttgaccctttggacctctgacctcacggaggatggtgctgatgagggcaaagaagccccgaaaggtgaggctggtgacggacagtaatcttgggagagcgcatattgttcgagcccattgttttagatgctctatgctgtcgaagctgaagctgtgccgtgctattattgtagctgatttcctgttccctcacttctttttttatattagtaggctggtagtgttcgaattagttccccattgctttgtgttgccgctagttggcattaagtccgtgtggactggtattattcactggatttgagaagcatgtcagtggttgctctagcgttttattgagttttgaagtcatctccctcatttcggtttcaatcatttagcagattgtgcatatggttgtgtaaaacacagttttgcacaattgcacaatttacgtagtgtggtttgaaataagagtgagatttgggctggatgtgcggttggctgtttgaatctgctctttagggcctgtttggtagggaggttttgaatactacagtttttagaataccacagttttcaactggaagtgac

SEQ ID NO: 9611 - DNA, 1217 bp, Zea Mays
ccgctataaaagctccccacgctgcttcgccatgccccaggcccaccgctagcatccgcagttcccccgcgcccgagacgcaaccccgcgccaggagtttgttcttttatcgatatggcgagggaggagaatgtctacatggccaagctggctgagcaggccgaaagaaggaggagtcccgtaagaacgaagagcatgtgaaccttatcaaggaataccgtgcgaagatcgaggctgaactgagcaatatctgtgatggcatcctgaagctgcttgactcccacctagtgccttcttctactgctgctgaatcaaaggtcttctacctcaagatgaagggtgactatcacaggtatcttgcggaatttaagactggtcctgagaggaaggaatctgctgagagcacgatgatggcctacaaggctgctcaggacattgcgctggctgagctggcacctacccatccgataaggcttgggcttgctcttaacttctcagtgttctattatgagattctgaactccccagacaaagcttgcaaccttgcaaagcaggcgtttgatgaagctatctcccagttagacacccttggggaggagtcatacaaagatagcactctgatcatgcagctccttagggacaacttgaccctttggacctctgacctcacggaggatggtgctgatgagggcaaagaagccccgaaaggtgaggctggtgacggacagtaatcttgggagagcgcatattgttcgagcccattgttttagatgctctatgctgtcgaagctgaagctgtgccgtgctattattgtagctgatttcctgttccctcacttctttttttatattagtaggctggtagtgttcgaattagttccccattgctttgtgttgccgctagttggcattaagtccgtgtggactggtattattcactggatttgagaagcatgtcagtggttgctctagcgttttattgagttttgaagtcatctccctcatttcggtttcaatcatttagcagattgtgcatatggttgtgtaaaacacagttttgcacaattgcacaatttacgtagtgtggtttgaaataagagtgagatttgggctggatgtgcggttggctgtttgaatctgctctttagggcctgtttggtagggaggttttgaatactacagtttttagaataccacagttttcaactggaagtgac

SEQ ID NO: 9612 - DNA, 1356 bp, Zea Mays
ctacgacaaatgggtcccactagtgtgccgcacccgcaggccaccacggcctgcgcgaggggtgtcggtgtgggctcttggagtcgccgtggcgccgtgacattggctcgctgaccgtagcctgccgctcgcatcccgctataaaagctccccacgctgcttcgccatgccccaggcccaccgctagcatccgcagttcccccgcgcccgagacgcaaccccgcgccaggagtaagtttgttcttttatcgatatggcgagggaggagaatgtctacatggccaagctggctgagcaggccgaaagaaggaggagtcccgtaagaacgaagagcatgtgaaccttatcaaggaataccgtgcgaagatcgaggctgaactgagcaatatctgtgatggcatcctgaagctgcttgactcccacctagtgccttcttctactgctgctgaatcaaaggtcttctacctcaagatgaagggtgactatcacaggtatcttgcggaatttaagactggtcctgagaggaaggaatctgctgagagcacgatgatggcctacaaggctgctcaggacattgcgctggctgagctggcacctacccatccgataaggcttgggcttgctcttaacttctcagtgttctattatgagattctgaactccccagacaaagcttgcaaccttgcaaagcaggcgtttgatgaagctatctcccagttagacacccttggggaggagtcatacaaagatagcactctgatcatgcagctccttagggacaacttgaccctttggacctctgacctcacggaggatggtgctgatgagggcaaagaagccccgaaaggtgaggctggtgacggacagtaatcttgggagagcgcatattgttcgagcccattgttttagatgctctatgctgtcgaagctgaagctgtgccgtgctattattgtagctgatttcctgttccctcacttctttttttatattagtaggctggtagtgttcgaattagttccccattgctttgtgttgccgctagttggcattaagtccgtgtggactggtattattcactggatttgagaagcatgtcagtggttgctctagcgttttattgagttttgaagtcatctccctcatttcggtttcaatcatttagcagattgtgcatatggttgtgtaaaacacagttttgcacaattgcacaatttacgtagtgtggtttgaaataagagtgagatttgggctggatgtgcggttggctgtttgaatctgctctttagggcctgtttggtagggaggttttgaatactacagtttttagaataccacagttttcaactggaagtgac

SEQ ID NO: 9613 - DNA, 1060 bp, Zea Mays
accggatgattggaactaggaacatgacacaatgagtagtggtggtgtgtggtaggatgtggccttggacctcgctggtgcggttgagtcgccgtggtcggcaaccatactgtcaaggcagggatataaacacaaggagctgcagattccatgaagatttgtcaactccaattaacagctacacgattttcaaaacagaataattctggcgaggatgacgagctcctttctgaactaaaagataagtgggatgcaatggagaacaagtcctctcttgccttgtatggtgctggagcaatcctcgctgtctggatatccttggtcgtagtgagatctctcgactctgtcccattgctcccaggcatattggagctagtcgggctcagctactctggatggtttgtgtaccgatacctgctttttcaggaaaaccggaaagaattggcgggtgttatcgatgatataaagagaaggattgttggcgatgatgaatagctgtttcctggtttgtaattctatttatctcgccctgtttggttctgaggaattgaaaaataatccaatggtgaagtgagaaagcactttctagctattggttttaattcatggggtccaaacaggctcttgatagaatcttgtaggtttctgttcttaattaatgccagtcagagctacgaggtattggcctttccacatctcttgtgccgtctgcagttgaacatgttatttgcagaatctttttatttagcatggtctagaaaaattcttgtatcatccgtatattccgctgaggtatggccttccacaccaagatgtacctccagtttagcatggtctacaaaaaaaaatattttattctctgcatatgccgctccagttcctctcaaattccctgtgctgccctagccagaagttagccgtcagagcatataattgtaataagatataaaatcatctgaaacataaccggtagcacttttgtcctcacctgctcaaccgagcacctgagtttcggcttttttttaagtaagaaaaaagggaaaatctaaatcgattaaac

SEQ ID NO: 9614 - DNA, 1185 bp, Zea Mays
ccactgatttggaaacaacttccagagattttgacatggtctgtaccatgtcctgcagcgaagagattcgggagtccatgctgatcaaatcagagctgactgataccaggttgtcaccggttgggggaaccggatgattggaactaggaacatgacacaatgagtagtggtggtgtgtggtaggatgtggccttggacctcgctggtgcggttgagtcgccgtggtcggcaaccatactgtcaaggcagggatataaacacaaggagctgattccatgaagatttgtcaactccaattaacagctacacgattttcaaaacagaataattctggcgaggatgacgagctcctttctgaactaaaagataagtgggatgcaatggagaacaagtcctctcttgccttgtatggtgctggagcaatcctcgctgtctggatatccttggtcgtagtgagatctctcgactctgtcccattgctcccaggcatattggagctagtcgggctcagctactctggatggtttgtgtaccgatacctgctttttcaggaaaaccggaaagaattggcgggtgttatcgatgatataaagagaaggattgttggcgatgatgaatagctgtttcctggtttgtaattctatttatctcgccctgtttggttctgaggaattgaaaaataatccaatggtgaagtgagaaagcactttctagctattggttttaattcatggggtccaaacaggctcttgatagaatcttgtaggtttctgttcttaattaatgccagtcagagctacgaggtattggcctttccacatctcttgtgccgtctgcagttgaacatgttatttgcagaatctttttatttagcatggtctagaaaaattcttgtatcatccgtatattccgctgaggtatggccttccacaccaagatgtacctccagtttagcatggtctacaaaaaaaaatattttattctctgcatatgccgctccagttcctctcaaattccctgtgctgccctagccagaagttagccgtcagagcatataattgtaataagatataaaatcatctgaaacataaccggtagcacttttgtcctcacctgctcaaccgagcacctgagtttcggcttttttttaagtaagaaaaaagggaaaatctaaatcgattaaac

SEQ ID NO: 9615 - DNA, 1676 bp, Zea Mays
gttcatggtgtccactgatttggaaacaacttccagagattttgacatggtctgtaccatgtcctgcagcgaagagattcgggagtccatgctgatcaaatcagagctgactgataccaggttgtcaccggttgggggaaccggatgattggaactaggaacatgacacaatgagtagtggtggtgtgtggtaggatgtggccttggacctcgctggtgcggttgagtcgccgtggtcggcaaccatactgtcaaggcagggatataaacacaaggagctgattccatgaagatttgtcaactccaattaacagctacacgattttcaaaacagaataattctggcgaggatgacgagctcctttctgaactaaaagataaggttgcatacaaagttatattcctctatgctaataatcttggcacaaaaaattacgatgatgtttactacagtgggatgcaatggagaacaagtcctctcttgccttgtatggtgctggagcaatcctcgctgtctggatatccttggtcgtagtgagatctctcgactctgtcccattgctcccaggcatattggagctagtcgggctcagctactctggatggtttgtgtaccgatacctgctttttcaggtaacaatctgaaaagttaaaaccatgtaggttggctgtgagacttctttctactattcaacacgagtttctcaagttcaagttgtccctttgctttgcacacctaaaaggctgttggtagaaccgtggaagatgcacaacttgatattaatagcttgcacagatcaagttgtcctttgtccatgcctgacatgcctaccagatactcaaacagctgactagtgtgctttgtcaaagttagatgcaatgtcctttgcattttgtttaatctgaagaaaattcacatagcttttaaaatgcaaataatttatgttgaatatgccctggcgtgatgatctgtaaaagcagataaatactgatctcgtacatttggtgtatccagattttggttctgacttttttctggcaggaaaaccggaaagaattggcgggtgttatcgatgatataaagagaaggattgttggcgatgatgaatagctgtttcctggtttgtaattctatttatctcgccctgtttggttctgaggaattgaaaaataatccaatggtgaagtgagaaagcactttctagctattggttttaattcatggggtccaaacaggctcttgatagaatcttgtaggtttctgttcttaattaatgccagtcagagctacgaggtattggcctttccacatctcttgtgccgtctgcagttgaacatgttatttgcagaatctttttatttagcatggtctagaaaaattcttgtatcatccgtatattccgctgaggtatggccttccacaccaagatgtacctccagtttagcatggtctacaaaaaaaaatattttattctctgcatatgccgctccagttcctctcaaattccctgtgctgccctagccagaagttagccgtcagagcatataattgtaataagatataaaatcatctgaaacataaccggtagcacttttgtcctcacctgctcaaccgagcacctgagtttcggcttttttttaagtaagaaaaaagggaaaatctaaatcgattaaac

SEQ ID NO: 9616 - DNA, 1297 bp, Zea Mays
aacaatgtttttttcccaaccacttgccacttgtgatacgctgacctctgagcagcctcgatctggctcgttcaaacttgaccgaacggcagccattacctggtggcgcctcctccttgccggtcggagccggctcgccggcgggtggcgacgctcccgccgctgtcacagggctgctcgcaccacgtgcactcctctccaggttagcaagcttgatcccgtgcgcctgcttgggtgtctgaccgcaccggcgccgagatggtagccgctgcggcggcggtgcggccggtgtccttccgccgcctcggtgttctcctccgcgctcctttgccctgcggcctgacaacctcccgcgtcgccgcacctttcccccgccgcacagattccatgaagatttgtcaactccaattaacagctacacgattttcaaaacagaataattctggcgaggatgacgagctcctttctgaactaaaagataagtgggatgcaatggagaacaagtcctctcttgccttgtatggtgctggagcaatcctcgctgtctggatatccttggtcgtagtgagatctctcgactctgtcccattgctcccaggcatattggagctagtcgggctcagctactctggatggtttgtgtaccgatacctgctttttcaggaaaaccggaaagaattggcgggtgttatcgatgatataaagagaaggattgttggcgatgatgaatagctgtttcctggtttgtaattctatttatctcgccctgtttggttctgaggaattgaaaaataatccaatggtgaagtgagaaagcactttctagctattggttttaattcatggggtccaaacaggctcttgatagaatcttgtaggtttctgttcttaattaatgccagtcagagctacgaggtattggcctttccacatctcttgtgccgtctgcagttgaacatgttatttgcagaatctttttatttagcatggtctagaaaaattcttgtatcatccgtatattccgctgaggtatggccttccacaccaagatgtacctccagtttagcatggtctacaaaaaaaaatattttattctctgcatatgccgctccagttcctctcaaattccctgtgctgccctagccagaagttagccgtcagagcatataattgtaataagatataaaatcatctgaaacataaccggtagcacttttgtcctcacctgctcaaccgagcacctgagtttcggcttttttttaagtaagaaaaaagggaaaatctaaatcgattaaac

SEQ ID NO: 9617 - DNA, 1284 bp, Zea Mays
acaacaatgtttttttcccaaccacttgccacttgtgatacgctgacctctgagcagcctcgatctggctcgttcaaacttgaccgaacggcagccattacctggtggcgcctcctccttgccggtcggagccggctcgccggcgggtggcgacgctcccgccgctgtcacagggctgctcgcaccacggttagcaagcttgatcccgtgcgcctgcttgggtgtctgaccgcaccggcgccgagatggtagccgctgcggcggcggtgcggccggtgtccttccgccgcctcggtgttctcctccgcgctcctttgccctgcggcctgacaacctcccgcgtcgccgcacctttcccccgccgcacagattccatgaagatttgtcaactccaattaacagctacacgattttcaaaacagaataattctggcgaggatgacgagctcctttctgaactaaaagataagtgggatgcaatggagaacaagtcctctcttgccttgtatggtgctggagcaatcctcgctgtctggatatccttggtcgtagtgagatctctcgactctgtcccattgctcccaggcatattggagctagtcgggctcagctactctggatggtttgtgtaccgatacctgctttttcaggaaaaccggaaagaattggcgggtgttatcgatgatataaagagaaggattgttggcgatgatgaatagctgtttcctggtttgtaattctatttatctcgccctgtttggttctgaggaattgaaaaataatccaatggtgaagtgagaaagcactttctagctattggttttaattcatggggtccaaacaggctcttgatagaatcttgtaggtttctgttcttaattaatgccagtcagagctacgaggtattggcctttccacatctcttgtgccgtctgcagttgaacatgttatttgcagaatctttttatttagcatggtctagaaaaattcttgtatcatccgtatattccgctgaggtatggccttccacaccaagatgtacctccagtttagcatggtctacaaaaaaaaatattttattctctgcatatgccgctccagttcctctcaaattccctgtgctgccctagccagaagttagccgtcagagcatataattgtaataagatataaaatcatctgaaacataaccggtagcacttttgtcctcacctgctcaaccgagcacctgagtttcggcttttttttaagtaagaaaaaagggaaaatctaaatcgattaaac

SEQ ID NO: 9618 - DNA, 1544 bp, Zea Mays
tccctatttatttttatttatcgtgttttaattcgaaacttataaatattcgaaaacggagattagaataatcgggctgtcaggattgacttgctcagctcatatatccgtccagtcgtcacatattcacatgcatgcggtctttatatctctctccgcgctgcctcctcgcctcacagagacgttcgccaacgccaaaccaatctcgctcgatcgctacgtctacgtgcagtgcagtgcggggaccgacaacaatcaccatatgggcaactccatgggcgggaagcggcggagggcgagggtgatgacggtggacggcaccacgtacaagtaccgcgcccccgcggcggccggggacgcgctgcgcgagcacccgggcaagggcaaccacctgctggagtcggaggaggtgcggcgactgggcctgcgcgcgcggccgctggacccggacgcgccgctcaagcccgggaagctctacttcctggtggagctgcctccgccgtcgtcggccgcccaccaccatcgccgggcccgggcgccgcagcgcacgtggtccggcgcgctccactacggcgccgtggccggggccggggagcggctggagagcctgatgctggcgcggcggtcggcgtccgacgtggcggcgtcgtcgtccgtcggcgacggcggcgccctgcgcctgcgcgtgcgcctccccaaggccgacgtccagcgcctcgtcgacgacagccgcgacgccgccgacgccgccgagaggatcatgcagctctgcgtcgcccgcgaccagcagcgccgccaccggtccgcgcccgccacgcccctcgccgtgcccgtgcccccggcggtcgtcagcgtcacctcgacgtccagctcgcgcaaagatgatggctccggcggtagcaacaagcccgcggcggcaacaaccggcaagaaagagaaacgggcgaggttcgtgacggtgccggacgagatcatcggcttctgaatccggttcgccggccgatatatatgctagctgcagcatgatgcgtgcgtgcgcgcaaaagagatggccagatgggtgtgagtaaattaagcgtcaggccggccggggaacatgagaagaagctgttgagtttgtgatccaaattctgaagaaggcggccaagttggcgagcgaagcggaggcccgtcgccgggaggcttgggccggagcgcagcgaggccaactggccttcccgaggcccagggacgcctggggggtgcggggggcggagccccccgcggtacggatcgttttagggtttcacctctataaatatctttgtaagccgcaggagatatccatctctctattgtaaatctcctgcgatctgtaaccacccaaaaatagtgagaagttgccggccggcgcccgtggttttttccccttcactttggaggggttttccacgttaaatccgtgtcttctctgtgattgatcctatttgtgtcgcatttatttataacagaagctgcatgtgaatgccttcctgtctcccgggctccatttgttctgtctgtac

SEQ ID NO: 9619 - DNA, 2169 bp, Zea Mays
caggagttggctgaacttgttcacaaggtccatttgctttgcctaatagcaaggggtagagtagttgacaaggcttgctatgatacactcattcaggcctcagttctttctcttgtaccatgccacttactatggagtcttgttgatgttccaaacctgaaagctgttaacctacgtagtcttgtgagctgggggatcttttgaatcaaatttggctttcactattcaagatcatgtagggactgctgaagagatttgtgcactctctgtggcattattcagggcactcaacttaccagctaggtttgttacaaatctggatgttgctggactcaagaccgatactaaagtgaagggaacattcagtcaagatgcatctaggctttgtacaagggcactaccatgtggttctccattatctggtgataatgtgattagttctcctgctctactgaaagataattctcaaggtagtgccagcatgaatcaacaaacaggtattgcttgcagtggcacagaattgcacaaggcagagtgaattcagagtggtgggataatgttttggcgccactaaaacagatggaactggcagcaacaaacaactatgaagacatggaacttcaaaccagagccctaacagagcctcttcctaccagtcaacaggcctataaggaccatcacctttatgctctcgagaagtggcttcacaagaaccaaatttttcatcccaaaggtccagttctcggtttctgtaaaggacatcctgtttatccaagatcctgtgttcaaacactgcagtcaagacatggatggttgcgggagggcctgcaagtccgagaaaacgagttgcctgcaaaggtggttacacgtccaaagaggactttcaatgcccagtcagttcaatcaagtggcaacgaagatggtctaaaaccaaccttggaactatatggtgaatggcaactggaaccactgcaacttcctcatgctgtgaatggcgttgtgccaaagaatgaacgaggccaagttgatttatggtcagataagtgccttccgcctggtactgtacacttgaggttaccaagattattccaggttgcaaagagacttggcatcgactacgctcctgctatggtcggatttgattatcgcagtggtcggtgccttccagtctttgatgggattgttgtctgtaccgagttcagaagtgctatcctggaggtatgtttttatgggagaatgttttttttttcaatatttgaaacctttcatcatgctgttatcattatctatacctgatctattgtgtgatttagtaacgtgtcttattaaaagatgaagttatttaaacaattgaaaacaaaatccgagaagttactgttattttgaatatgaatcctagtaatttaggggttctctgatactgatgggaattgcataaatgctttgcattggtgtccaaaacaagctaagtgtcccttttcctcacccccgtcatatttcacaccatataccgtcagccaattcagttctaaaactgacaagatagatactcatgctttcatacccactaggcatatgcagaagaagaggagcagagacgagctgtggagaagaagcaggaggaggctcaagcactctccagatggtatcagctgctctgctccattgtaacaaggcagaggttgaaggactcctacaaaacaccttcacacgggattggtaacgaaggcctgcccgaaaatgataatgtccatagaagcactctcagcagccgatcctcagaaagggaacctagttcaagcaaactgcagacagatcatgaccatgaccatgaatttccaaaggaagaccagagctttgatgaggagaccttcgtgaggacgaaacgctgcccgtgtggtttttctatccaagtagaggagttgtaactttgataccaggaatgcacaagtgcacatgtttaactgtgttaacatatggcccctttcgtccatttgaaagtcggaatccaaaacgtagttttgaatctacttacccatttggatccttgcaattgaattccagtctaataatcataatttaggcacaaattaattaagctaaatgtagttttatgtggaatatatttgtatactactattagtcgcatgaagatgtttgtgttataat

SEQ ID NO: 9620 - DNA, 1830 bp, Zea Mays
caggagttggctgaacttgttcacaaggtccatttgctttgcctaatagcaaggggtagagtagttgacaaggcttgctatgatacactcattcaggcctcagttctttctcttgtaccatgccacttactatggagtcttgttgatgttccaaacctgaaagctgttaacctacgtagtcttgtgagctggttccatcgtactttttgtgtaactgcacaatccactgacaggggatcttttgaatcaaatttggctttcactattcaagatcatgtagggactgctgaagagatttgtgcactctctgtggcattattcagggcactcaacttaccagctaggtttgttacaaatctggatgttgctggactcaagaccgatactaaagtgaagggaacattcagtcaagatgcatctaggctttgtacaagggcactaccatgtggttctccattatctggtgataatgtgattagttctcctgctctactgaaagataattctcaaggtattgcttgcagtggcacagaattgcacaaggcagagtgaattcagagtggtgggataatgttttggcgccactaaaacagatggaactggcagcaacaaacaactatgaagacatggaacttcaaaccagagccctaacagagcctcttcctaccagtcaacaggcctataaggaccatcacctttatgctctcgagaagtggcttcacaagaaccaaatttttcatcccaaaggtccagttctcggtttctgtaaaggacatcctgtttatccaagatcctgtgttcaaacactgcagtcaagacatggatggttgcgggagggcctgcaagtccgagaaaacgagttgcctgcaaaggtggttacacgtccaaagaggactttcaatgcccagtcagttcaatcaagtggcaacgaagatggtctaaaaccaaccttggaactatatggtgaatggcaactggaaccactgcaacttcctcatgctgtgaatggcgttgtgccaaagaatgaacgaggccaagttgatttatggtcagataagtgccttccgcctggtactgtacacttgaggttaccaagattattccaggttgcaaagagacttggcatcgactacgctcctgctatggtcggatttgattatcgcagtggtcggtgccttccagtctttgatgggattgttgtctgtaccgagttcagaagtgctatcctggaggcatatgcagaagaagaggagcagagacgagctgtggagaagaagcaggaggaggctcaagcactctccagatggtatcagctgctctgctccattgtaacaaggcagaggttgaaggactcctacaaaacaccttcacacgggattggtaacgaaggcctgcccgaaaatgataatgtccatagaagcactctcagcagccgatcctcagaaagggaacctagttcaagcaaactgcagacagatcatgaccatgaccatgaatttccaaaggaagaccagagctttgatgaggagaccttcgtgaggacgaaacgctgcccgtgtggtttttctatccaagtagaggagttgtaactttgataccaggaatgcacaagtgcacatgtttaactgtgttaacatatggcccctttcgtccatttgaaagtcggaatccaaaacgtagttttgaatctacttacccatttggatccttgcaattgaattccagtctaataatcataatttaggcacaaattaattaagctaaatgtagttttatgtggaatatatttgtatactactattagtcgcatgaagatgtttgtgttataat

SEQ ID NO: 9621 - DNA, 1857 bp, Zea Mays
caggagttggctgaacttgttcacaaggtccatttgctttgcctaatagcaaggggtagagtagttgacaaggcttgctatgatacactcattcaggcctcagttctttctcttgtaccatgccacttactatggagtcttgttgatgttccaaacctgaaagctgttaacctacgtagtcttgtgagctggttccatcgtactttttgtgtaactgcacaatccactgacaggggatcttttgaatcaaatttggctttcactattcaagatcatgtagggactgctgaagagatttgtgcactctctgtggcattattcagggcactcaacttaccagctaggtttgttacaaatctggatgttgctggactcaagaccgatactaaagtgaagggaacattcagtcaagatgcatctaggctttgtacaagggcactaccatgtggttctccattatctggtgataatgtgattagttctcctgctctactgaaagataattctcaaggtagtgccagcatgaatcaacaaacaggtattgcttgcagtggcacagaattgcacaaggcagagtgaattcagagtggtgggataatgttttggcgccactaaaacagatggaactggcagcaacaaacaactatgaagacatggaacttcaaaccagagccctaacagagcctcttcctaccagtcaacaggcctataaggaccatcacctttatgctctcgagaagtggcttcacaagaaccaaatttttcatcccaaaggtccagttctcggtttctgtaaaggacatcctgtttatccaagatcctgtgttcaaacactgcagtcaagacatggatggttgcgggagggcctgcaagtccgagaaaacgagttgcctgcaaaggtggttacacgtccaaagaggactttcaatgcccagtcagttcaatcaagtggcaacgaagatggtctaaaaccaaccttggaactatatggtgaatggcaactggaaccactgcaacttcctcatgctgtgaatggcgttgtgccaaagaatgaacgaggccaagttgatttatggtcagataagtgccttccgcctggtactgtacacttgaggttaccaagattattccaggttgcaaagagacttggcatcgactacgctcctgctatggtcggatttgattatcgcagtggtcggtgccttccagtctttgatgggattgttgtctgtaccgagttcagaagtgctatcctggaggcatatgcagaagaagaggagcagagacgagctgtggagaagaagcaggaggaggctcaagcactctccagatggtatcagctgctctgctccattgtaacaaggcagaggttgaaggactcctacaaaacaccttcacacgggattggtaacgaaggcctgcccgaaaatgataatgtccatagaagcactctcagcagccgatcctcagaaagggaacctagttcaagcaaactgcagacagatcatgaccatgaccatgaatttccaaaggaagaccagagctttgatgaggagaccttcgtgaggacgaaacgctgcccgtgtggtttttctatccaagtagaggagttgtaactttgataccaggaatgcacaagtgcacatgtttaactgtgttaacatatggcccctttcgtccatttgaaagtcggaatccaaaacgtagttttgaatctacttacccatttggatccttgcaattgaattccagtctaataatcataatttaggcacaaattaattaagctaaatgtagttttatgtggaatatatttgtatactactattagtcgcatgaagatgtttgtgttataat

SEQ ID NO: 9622 - DNA, 2767 bp, Zea Mays
acaggagttggctgaacttgttcacaaggtccatttgctttgcctaatagcaaggggtagagtagttgacaaggcttgctatgatacactcattcaggcctcagttctttctcttgtaccatgccacttactatggagtcttgttgatgttccaaacctgaaagctgttaacctacgtagtcttgtgagctggttccatcgtactttttgtgtaactgcacaatccactgacaggggatcttttgaatcaaatttggctttcactattcaagatcatgtagggactgctgaagagatttgtgcactctctgtggcattattcagggcactcaacttaccagctaggtttgttacaaatctggatgttgctggactcaagaccgatactaaagtgaagggaacattcagtcaagatgcatctaggctttgtacaagggcactaccatgtggttctccattatctggtgataatgtgattagttctcctgctctactgaaagataattctcaaggtagtgccagcatgaatcaacaaacaggtgatcttggaaaattgaaacagacctcagcatgcaagaggagtttatataaaactttgtcaagcataaaatcagatcatgaaagtagctgtgcttctacatcaaaagataaatcatccagcaaccaatttccttccacttccagtaataatgctgaagtactaaaaagaaaaggggatgtggaatttgagttgcaactggaaatggctctttcagctactgctgctgaaactcaaaataataaactagctactcacatgaatcaattgactgttagcttacaagattctagttcaccattgaagaaattgcgtcaaaatgtggaagctttatccagctcaagtgcagtttggtcaagaagtgctggagctccattatattgggctgaggtatactgtggtgggcaagcatcaacaggaagatgggtacatgttgatgttgtgaataatctcattgatgctgaacagaatgtagaagcttcttctgccgtttgcaagaagcctttaagatatgttattgcttttgctggaaatggagccaaggatgtaaccagaaggtattgcttgcagtggcacagaattgcacaaggcagagtgaattcagagtggtgggataatgttttggcgccactaaaacagatggaactggcagcaacaaacaactatgaagacatggaacttcaaaccagagccctaacagagcctcttcctaccagtcaacaggcctataaggaccatcacctttatgctctcgagaagtggcttcacaagaaccaaatttttcatcccaaaggtccagttctcggtttctgtaaaggacatcctgtttatccaagatcctgtgttcaaacactgcagtcaagacatggatggttgcgggagggcctgcaagtccgagaaaacgagttgcctgcaaaggtggttacacgtccaaagaggactttcaatgcccagtcagttcaatcaagtggcaacgaagatggtctaaaaccaaccttggaactatatggtgaatggcaactggaaccactgcaacttcctcatgctgtgaatggcgttgtgccaaagaatgaacgaggccaagttgatttatggtcagataagtgccttccgcctggtactgtacacttgaggttaccaagattattccaggttgcaaagagacttggcatcgactacgctcctgctatggtcggatttgattatcgcagtggtcggtgccttccagtctttgatgggattgttgtctgtaccgagttcagaagtgctatcctggaggtatgtttttatgggagaatgttttttttttcaatatttgaaacctttcatcatgctgttatcattatctatacctgatctattgtgtgatttagtaacgtgtcttattaaaagatgaagttatttaaacaattgaaaacaaaatccgagaagttactgttattttgaatatgaatcctagtaatttaggggttctctgatactgatgggaattgcataaatgctttgcattggtgtccaaaacaagctaagtgtcccttttcctcacccccgtcatatttcacaccatataccgtcagccaattcagttctaaaactgacaagatagatactcatgctttcatacccactaggcatatgcagaagaagaggagcagagacgagctgtggagaagaagcaggaggaggctcaagcactctccagatggtatcagctgctctgctccattgtaacaaggcagaggttgaaggactcctacaaaacaccttcacacgggattggtaacgaaggcctgcccgaaaatgataatgtccatagaagcactctcagcagccgatcctcagaaagggaacctagttcaagcaaactgcagacagatcatgaccatgaccatgaatttccaaaggaagaccagagctttgatgaggagaccttcgtgaggacgaaacgctgcccgtgtggtttttctatccaagtagaggagttgtaactttgataccaggaatgcacaagtgcacatgtttaactgtgttaacatatggcccctttcgtccatttgaaagtcggaatccaaaacgtagttttgaatctacttacccatttggatccttgcaattgaattccagtctaataatcataatttaggcacaaattaattaagctaaatgtagttttatgtggaatatatttgtatactactattagtcgcatgaagatgtttgtgttataat

SEQ ID NO: 9623 - DNA, 866 bp, Zea Mays
cctccaccaaatccgcccatctccattgatttatgagggaaaaactacggagaaatcggatctgctcccatccttcactctcttgcgtggattggatttgagcttctctccaagatggtgcgtcctcgaaagccctatgctgtggagagtgatttggaggactcttccgccgagatcgaagaagaagttcccatcaacatgaccaggaaatccttcgagagaaccggcaacaagctttggtctgctatctcgggacagcggcagcgccatgctgtagatgttgctgtccatgatgagtatttcgctgccctgggtaacctccatggagtagggctcgatccccagcttactgtagtcaaggatcttctccacagtgtacccgcactcatatttcaccatcgactttcccccgctcgctgctatagcgttgttgatgatgatgcaaggacgtacaaaagcatctttgcccttcaaaaggcataaagcattgttaaaaacctcgccaaagagcatcttatcgcccatttcatctctataccacccagtaagcttggtcatggctgcattccactcggtcaacctcccaaattggtcatcaccaaatattggaggaattagtgggttctggttgtagatgattgtcttgtaatctccctcaaccccagtaaatttgtccatgagtaacctgtgaacggtcatatcctgggctacaaagcacaccccaacaacatggtcatgaagatcacgactggcacaagcattcacaaccaagataacagggtcatcatccctcttggaaccatgtgttttcaactcaaatcaaacttccttctcttctctgcctatagcgctcatagacttttgag

SEQ ID NO: 9624 - DNA, 2872 bp, Zea Mays
caagaaaccaatcgaattctttcggctgccctaatatctcatctcctttgacatctcaagagaaagaggaacgaacaagagagagagaaagcactggctctgtagctagctagctacagcgatagcaactcacaaaaaaagcggcaccacacacccacacacaccagaaaacacaagcacaagcaaataagcagcaccgccagcccggccaccaagaactccaagaataaccttcactgccgtcttcgttcgatcccttacgctaacactagctgcttcaggctgcagccaccagccaaaggtagggcgcgcgcgcggcatccatggaggcgcgggcagcgtcggtcccggacctttcgctgcacatcagccttccgagcagcgccgcgtctccgtctcccgccccggggctgggcgctggaggagtagggcgtggtgcgcagccgtccggaggggacccgtggcgccgtctgaacggatccacggcgtcgaccgagctgtcgctctcgccgccgccgccgcggcaggaggcggctgccggggacgtccttccatggcggctccggccgccagcggcgaattactcctcgtccaccgcggaggcaacgttcttgccggtgaccgtgccgcggctttcgttcgacgccgcggcggaggcggcgccggcaaggccaatcaacggagtgcccgtctacagcagcccgcggaccggcgccgcccatccttttcttggcgccggcggcgaataccggcagtgccaccaccacaaggccgccgtggggctatacaatccctaccactcctcgtcgtcgtggccctcgtccctgcggtcgacgacgacggcgccccttggcgccgtggcgccgccggcgtccgaccccacggcgtcgtcgtacctctcgccgtccgcgtaccaccggatgctgtcgagcaccggccggctccacctccagggcgtgctcgccgacacgctccgcggctacggcagcgggcaccaccaccgccagcacttgggcagcctggccgcggcccgctacatgccgaggctcccggcttcccggcgcggcatgcgcgcgccgcggatgcggtggacgagcagcctgcacgcgcgtttcgtccacgccgtcgagctcctcggcggccacgagcgggcgacgcccaagtcggtgctggagctgatggacgtgaaggatctgacgctagcgcatgtgaagagtcatttgcaggttgagttccggccgatgaggtcttggttctttaattctgtctacccgtgcgattctttaattattctgtgttcttcctgcatttcttgttcccgttcggggctcatgtacaaggaaggaggtcaaatcttgacgaggtgccagccagggcacagactccgagggacgatgtgttcagtgagagagaaagtcgtcagatgtgcttgtgcagactctcagccaagaaactgccatccctagctagcacctagcagagaggaaagggggagctactagtatagctagagagagagcctagagagatggggagagatcatctagtactagagagggaggttggatgtgtgggtgagtgtgcaagaaaaggtgccatcattgcacaataatgcaacgtctgtcgtctgctcctgcaagccgcccaatccccaaagcagtgaagtgagcggtccagccaggcaacacggggacggacgagagagagagagagagaggaggcagcccatagcagtttcctttggacatttctgggcgggtgctctgttttgctgcgatctcctgcgcaacgacgacgaccctttatgatccgctgtgctttacgccttttccctcctcgatctcttctccctccttcccaatgcaagcaaacagtcgtgtgtctgcagctttactttcttggtcattcttttcttgctgctccttttccagatgtataggaccgtgaagagcactgataagccgcctgcagcaacctcatcaggagggggagggccgcctgtggacggtggtggcgggtccggcgacgacgaccacccgagcgattggcggcgggctccatcctcatcagctggtcgggacgtcagcccgcaggcgttcactggacaccggtcagcctcctcggacggcgcggcaagccatgcgggcggcgacgttgaatgctcctccgccgacgattccgacggtggcaggccgcgcagtgcttctccgccaaggctgccgccaccaagtgcgtgcaatgcagcagacacccttcattcagttggcgtaccatattccactactgaggatatggagcctgcttgtcgatcagctggcttacaacattcactcaaccatgaaatgagctgccctcctagcctggagttcacgctagggcggccaaactggaatggtgcagaatagcatcaccagcagctagctactagacacatgcatggatatatggcacattattagttcgacacttcatctagactgcttacaacacctgattggtttttgcatctattagaaatttagatagttccatgtttaatccaaaaatatcatatatatagtagatttatgacaacatgtacgtgcacgtgtgaaatattactactcacaacaataacagacacctacatgaaaaatatactgcaggaactatatttaacttaacaaatttagagaaaaaaattctgcattgtcgaggtacctatatatgctcaagacaccagtgactacattcacacgaatcaacactatgtgttgctaaaagtagcaggaacaaaacgattcttcatgcagcaccaccaccaagatgatcaataggctgtcaagacaatgctcctcaaaaatctaattgttcacaaattcaagcaagtgtc

SEQ ID NO: 9625 - DNA, 468 bp, Zea Mays
ctataggcatgattgtcccgacctgccagatcagaaaagggtaaaatgaggaaaatttatttactgagaaatttcaataattgctaaaatggatgccataccaaaccaaggtatcatgtaagagttttatgggatcaaaactgcatgcgaaagcaatcaaccatgctctgttgctaccgaaagtaatccaccatgtttttgtttccgcttacaagatgcactctccagtctccaccttgaaatgcaagttttgagctgtccgaagtcgtcaaactaagctcagtttaataagtttttagaaaaaaccgataatatttacgatactaaatgagcagtattaaaaaccctgataccgtactaaatctatttttattgtttacctatttgaggttgtagatgttaaagattgatttagggcaaacatagaggccacggggacgggatgtgcaggatatcttaggtctttag

SEQ ID NO: 9626 - DNA, 1236 bp, Zea Mays
atgaatcggcatgtacatactgcatacctgcacaatgtacaatcatctgatcactataccatacagaacagcattggccgccgtgacaaacgtacacgctgccgaagttcagagctagtatttatgcacctagtgtccgtgaaaaacagaactgccaaaacaagcatgtcgtctaccgtaattcacccagatcgacccgagggcttcttcatacaggacgcaagacgcaaccaactagcctcagtcgacatgcttctgcttcacttggcgggacgcggaataggattggactgccgagctcgtcatgctgatggaatgcttcgtcaggtccatgctcttccttgcggtgaaccagatcatccagaagaacccaacccaacctgcaatatagggtgcgttttctcaacattagcacaaaatgcacacgagatagaagcagatcctcagactcacaaggcaaagatatgcttttcccttaacaaatctcaaagagcattcatgctgcaaggaaaatgcttcgtccgaacagatttttctatgctcacgtcctatatattgggcatcacaatctccatgaaatttctaaagagaatcgaaactgaagctatttttgctaaaggtataccactttattccccattaggtcttattcgattacatggggatcggtgaggattgagagagattaaatccctttctattctattttgactagtacaggatttaatcccctccaatccatttcaatccactctttttttataatggaaacaaaaaatgttccaccctttagtagtttcctacatatgtcattacagtttgaaaattaataaaacatgcatcattaaaaaagaacattcttggaaagaacttgtcaagtccttattcaggcgagttcggttaagagttggtgactattgacaatttactgttaagcatataaaaatgggaaactaacatttggttctcctaaattgttgaaaaacaatctagtgcatgactcgtttctgatgctaacgcgagaacgcaggcaccttgtgggaactaggcattgctaattttctgatctaactttattacacaggcaagtgtacagattgagatgattcagttggaaaaaaagaaacatttcttatagtttcaccatattaacgttgaccaaattaacttcagatacagaagtacagaacatcttctataatggttggagattcaggtaaagtatttaagatttat

SEQ ID NO: 9627 - DNA, 374 bp, Zea Mays
cgcaatcacaagattgttaaaatcggatcgtatatgcttctatagtatcaaaataatttaattatatcaacatataaaagtcatatgttaatagaacagtaatcgatcatgccgcaccgccatagcaacaaagtaatcaacgaagggggtattgagttaagctgaccaagtcaacacaatgactgatctaccaacaactgcatgacatgccacactggctagttacatcgaacaaaccacagcaaacactggtttctagtgcactgtacacctctgctctcgccagtgcaagggctgattcgccacagaagcagcacatctcccctggatgttggcactcagttttcacctcgtctgccttattgattcatcct

SEQ ID NO: 9628 - DNA, 924 bp, Zea Mays
gccagtccgcggatccacacgaaactgcacacgacgcaggcactcggcctgccgtgtgtccctttcggccttcataggcgcacttctccctcccgctctcgcgccgccgccctcgtgcgtttgagcgagatccatacatccccatcccattttgcacccggattggcttcttcttctactactggagctctctttgtgatcccaaagtcacaaaataaaggtaaatcaaagagaaacgacttaggagctggaacgacatctaggagctttacgacagaagagatctctaaacattccacaaggaaggactgttggatcattatcaaggacaaggtctatgatgtcactccttatgtagaggaacatccaggcggagatgccattctaaataatgctgggggtgattccacggagggcttttttgggccacagcatggcactagggtcttcgatatcatcgaggatttctgcatcggtcagttgaaggcttcatgatgatgacaggatagtttgtattgaatttattacgggacataaatttgtgagaagctacattttatctatgtttgagcattgcgaccatcgagcatatgaatgccagtataattgttccacaactgttattaggcctgccctgagctgtgatgtaggagatcgttttttttcccctctgatggggcaatgtgagctgttcgaccactggttgttgtgcttgcacatttctgttgttggacaagactgaaacgtttttttcccaattgttttgtttaaatcaggactcgtttctcatgatcacttctgaagggatgttatggttaagatgttgcaagtttgattttaacttggtcgttgaatgcgttttacgatttgttgctctctaaggttaggtggtgtgcaaacatgaaagtgaaacaatttcaagag

SEQ ID NO: 9629 - DNA, 987 bp, Zea Mays
gccagtccgcggatccacacgaaactgcacacgacgcaggcactcggcctgccgtgtgtccctttcggccttcataggcgcacttctccctcccgctctcgcgccgccgccctcgtgcgtttgagcgagatccatacatccccatcccattttgcacccggattggcttcttcttctactactgtacagcacttcttttgtgtggctgcaaagttctgtaattctagaggagcaagatggatattattatcatcatctcacttgtcattcttttggcactaggagctctctttgtgatcccaaagtcacaaaataaagacatctaggagctttacgacagaagagatctctaaacattccacaaggaaggactgttggatcattatcaaggacaaggtctatgatgtcactccttatgtagaggaacatccaggcggagatgccattctaaataatgctgggggtgattccacggagggcttttttgggccacagcatggcactagggtcttcgatatcatcgaggatttctgcatcggtcagttgaaggcttcatgatgatgacaggatagtttgtattgaatttattacgggacataaatttgtgagaagctacattttatctatgtttgagcattgcgaccatcgagcatatgaatgccagtataattgttccacaactgttattaggcctgccctgagctgtgatgtaggagatcgttttttttcccctctgatggggcaatgtgagctgttcgaccactggttgttgtgcttgcacatttctgttgttggacaagactgaaacgtttttttcccaattgttttgtttaaatcaggactcgtttctcatgatcacttctgaagggatgttatggttaagatgttgcaagtttgattttaacttggtcgttgaatgcgttttacgatttgttgctctctaaggttaggtggtgtgcaaacatgaaagtgaaacaatttcaagag

SEQ ID NO: 9630 - DNA, 1028 bp, Zea Mays
gttcgcgtagagccagtccgcggatccacacgaaactgcacacgacgcaggcactcggcctgccgtgtgtccctttcggccttcataggcgcacttctccctcccgctctcgcgccgccgccctcgtgcgtttgagcgagatccatacatccccatcccattttgcacccggattggcttcttcttctactactgcacttcttttgtgtggctgcaaagttctgtaattctagaggagcaagatggatattattatcatcatctcacttgtcattcttttggcactaggagctctctttgtgatcccaaagtcacaaaataaaggtaaatcaaagagaaacgacttaggagctggaacgacatctaggagctttacgacagaagagatctctaaacattccacaaggaaggactgttggatcattatcaaggacaaggtctatgatgtcactccttatgtagaggaacatccaggcggagatgccattctaaataatgctgggggtgattccacggagggcttttttgggccacagcatggcactagggtcttcgatatcatcgaggatttctgcatcggtcagttgaaggcttcatgatgatgacaggatagtttgtattgaatttattacgggacataaatttgtgagaagctacattttatctatgtttgagcattgcgaccatcgagcatatgaatgccagtataattgttccacaactgttattaggcctgccctgagctgtgatgtaggagatcgttttttttcccctctgatggggcaatgtgagctgttcgaccactggttgttgtgcttgcacatttctgttgttggacaagactgaaacgtttttttcccaattgttttgtttaaatcaggactcgtttctcatgatcacttctgaagggatgttatggttaagatgttgcaagtttgattttaacttggtcgttgaatgcgttttacgatttgttgctctctaaggttaggtggtgtgcaaacatgaaagtgaaacaatttcaagag

SEQ ID NO: 9631 - DNA, 542 bp, Zea Mays
gccagtccgcggatccacacgaaactgcacacgacgcaggcactcggcctgccgtgtgtccctttcggccttcataggcgcacttctccctcccgctctcgcgccgccgccctcgtgcgtttgagcgagatccatacatccccatcccattttgcacccggattggcttcttcttctactactgtacagcacttcttttgtgtggctgcaaagttctgtaattctagaggagcaagatggatattattatcatcatctcacttgtcattcttttggcactaggagctctctttgtgatcccaaagtcacaaaataaaggtaaatcaaagagaaacgacttaggagctggaacgacatctaggagctttacgacagaagagatctctaaacattccacaaggaaggactgttggatcattatcaaggacaaggtctatgatgtcactccttatgtagaggaacatccaggcggagatgccattctaaataatgctgggggtgattccacggagggcttttttgggagatatgcgtatctttcc

SEQ ID NO: 9632 - DNA, 1793 bp, Zea Mays
gtgggcctacgtctcggttatcttcctggacggagagacaggggattaggggaaggccgaggcgaggcagcatccagcaatccgccacgctcgtcgctcgcccggtcgccccctccacccactgccgcttcaactctctcgctccctgtcttctccaaaaccctaaccgccgacggcgatgctctcgacggcttcggtgccctccacctcgttcgccgccgctttcctctcctcccgcgctcgccgccggcgccgcgccccctggctgcggtccgtcgccgcagccgccacgtccggggtgggggacggagaggtggagaggttcgctaccagcagctccatcaccgactacctccgctaccgccgccccgagcttggctgtgccggaggggcaggcggaggcgggctgccaggcggggagctgcagacggcggtggtgcgcttcaagaagcggttcccgtggtcgcttctccaccccttcctccacgttgatttggtttctacagtccacattgcagacaaagatttttttcttcagatactttgatagactgcagcgagagcttgaagattacgattgtgtcctgtatgaaatggttacaactcgggagaatttgagcaatccgaaaggtccaatggctgctaagaagatgaaatcttcacgcagaggatttagtattattggtttcatacagaaacaaatggctcgggtcctttcgttggattatcagttagactgtcttgattatggcaatgagaaatggcaacatgctgaccttgactatgaaacattcaaacagcttcagagtgaaagaggtgaaagtattctcacgtttgccatagacatgacactgaaatcaaccaaagccttggtgcagccaagtaacatgccagatggccttaacttttggaggtcgaagttactatgggcctcgcgtgtgctaccaatgccacttgttgggctactcgtcatcactgggctgtgtctgccagtggaaaagcaagatgggtttccagagctggaggcattgtccaggctagattttggagctgcactgaagattttcttggcaaagcaactgacatctgagtgagtaatctgaaaccaatcaggcaattgaggttcttagtattcgctgatttacttctcttttttttattaaagattcacagctgtgcctacacccgttgaggagaaatcagttatcattggggagaggaacagagttgctgccgagaagatccaggaagcaataaacggtgggtacaagagaatagcggtcctctacggcggcggacacatgccagacctgggaagacgccttcgagaagagctggacatggtcccggccgatgtgcagtgggtcaccgcgtggtcaataagaagccgggagatagacagcgaatccctccccttgttgaagacgctggctgaggcttcaggctggcctttgaatagatacgagacgctcgccctgctcatcttctcttcggttctcgcggtggatctttggttctgggaactcttctttggcaccgcggttaattgtgcatctctggctggttcctggattggccagctagcttagcggcacactactatatatagaaatggcagtataaagaaaaatagaacccccccagtttagttttgatttgtccagctgttgctggagtactgcagcaaaccattgtagataagacacttcatttcgatcaaagttgaaacgagattgactgctttctctagtcatgtgattgggttttgctgaatgatgcatgtttgactcggc

SEQ ID NO: 9633 - DNA, 1742 bp, Zea Mays
gtgggcctacgtctcggttatcttcctggacggagagacaggggattaggggaaggccgaggcgaggcagcatccagcaatccgccacgctcgtcgctcgcccggtcgccccctccacccactgccgcttcaactctctcgctccctgtcttctccaaaaccctaaccgccgacggcgatgctctcgacggcttcggtgccctccacctcgttcgccgccgctttcctctcctcccgcgctcgccgccggcgccgcgccccctggctgcggtccgtcgccgcagccgccacgtccggggtgggggacggagaggtggagaggttcgctaccagcagctccatcaccgactacctccgctaccgccgccccgagcttggctgtgccggaggggcaggcggaggcgggctgccaggcggggagctgcagacggcggtggtgcgcttcaagaagcggttcccgtggtcgcttctccaccccttcctccacatactttgatagactgcagcgagagcttgaagattacgattgtgtcctgtatgaaatggttacaactcgggagaatttgagcaatccgaaaggtccaatggctgctaagaagatgaaatcttcacgcagaggatttagtattattggtttcatacagaaacaaatggctcgggtcctttcgttggattatcagttagactgtcttgattatggcaatgagaaatggcaacatgctgaccttgactatgaaacattcaaacagcttcagagtgaaagaggtgaaagtattctcacgtttgccatagacatgacactgaaatcaaccaaagccttggtgcagccaagtaacatgccagatggccttaacttttggaggtcgaagttactatgggcctcgcgtgtgctaccaatgccacttgttgggctactcgtcatcactgggctgtgtctgccagtggaaaagcaagatgggtttccagagctggaggcattgtccaggctagattttggagctgcactgaagattttcttggcaaagcaactgacatctgagtgagtaatctgaaaccaatcaggcaattgaggttcttagtattcgctgatttacttctcttttttttattaaagattcacagctgtgcctacacccgttgaggagaaatcagttatcattggggagaggaacagagttgctgccgagaagatccaggaagcaataaacggtgggtacaagagaatagcggtcctctacggcggcggacacatgccagacctgggaagacgccttcgagaagagctggacatggtcccggccgatgtgcagtgggtcaccgcgtggtcaataagaagccgggagatagacagcgaatccctccccttgttgaagacgctggctgaggcttcaggctggcctttgaatagatacgagacgctcgccctgctcatcttctcttcggttctcgcggtggatctttggttctgggaactcttctttggcaccgcggttaattgtgcatctctggctggttcctggattggccagctagcttagcggcacactactatatatagaaatggcagtataaagaaaaatagaacccccccagtttagttttgatttgtccagctgttgctggagtactgcagcaaaccattgtagataagacacttcatttcgatcaaagttgaaacgagattgactgctttctctagtcatgtgattgggttttgctgaatgatgcatgtttgactcggc

SEQ ID NO: 9634 - DNA, 1706 bp, Zea Mays
gtggcctcgcgccagccaaccaaacaacctcggtgggcctacgtctcggttatcttcctggacggagagacaggggattaggggaaggccgaggcgaggcagcatccagcaatccgccacgctcgtcgctcgcccggtcgccccctccacccactgccgcttcaactctctcgctccctgtcttctccaaaaccctaaccgccgacggcgatgctctcgacggcttcggtgccctccacctcgttcgccgccgctttcctctcctcccgcgctcgccgccggcgccgcgccccctggctgcggtccgtcgccgcagccgccacgtccggggtgggggacggagaggtggagaggttcgctaccagcagctccatcaccgactacctccgctaccgccgccccgagcttggctgtgccggaggggcaggcggaggcgggctgccaggcggggagctgcagacggcggtggtgcgcttcaagaagcggttcccgtggtcgcttctccaccccttcctccacgttgatttggtttctacagtccacattgcagacaaagaatactttgatagactgcagcgagagcttgaagattacgattgtgtcctgtatgaaatggttacaactcgggagaatttgagcaatccgaaaggtccaatggctgctaagaagatgaaatcttcacgcagaggatttagtattattggtttcatacagaaacaaatggctcgggtcctttcgttggattatcagttagactgtcttgattatggcaatgagaaatggcaacatgctgaccttgactatgaaacattcaaacagcttcagagtgaaagaggtgaaagtattctcacgtttgccatagacatgacactgaaatcaaccaaagccttggtgcagccaagtaacatgccagatggccttaacttttggaggtcgaagttactatgggcctcgcgtgtgctaccaatgccacttgttgggctactcgtcatcactgggctgtgtctgccagtggaaaagcaagatgggtttccagagctggaggcattgtccaggctagattttggagctgcactgaagattttcttggcaaagcaactgacatctgaaaatcagttatcattggggagaggaacagagttgctgccgagaagatccaggaagcaataaacggtgggtacaagagaatagcggtcctctacggcggcggacacatgccagacctgggaagacgccttcgagaagagctggacatggtcccggccgatgtgcagtgggtcaccgcgtggtcaataagaagccgggagatagacagcgaatccctccccttgttgaagacgctggctgaggcttcaggctggcctttgaatagatacgagacgctcgccctgctcatcttctcttcggttctcgcggtggatctttggttctgggaactcttctttggcaccgcggttaattgtgcatctctggctggttcctggattggccagctagcttagcggcacactactatatatagaaatggcagtataaagaaaaatagaacccccccagtttagttttgatttgtccagctgttgctggagtactgcagcaaaccattgtagataagacacttcatttcgatcaaagttgaaacgagattgactgctttctctagtcatgtgattgggttttgctgaatgatgcatgtttgactcggc

SEQ ID NO: 9635 - DNA, 1442 bp, Zea Mays
attatttcgtccagacctattaacagacctattaacaacgaggcaagtgggcaaaatcacaaaaaaatcgtgtttcctgtctcggagatagcctctaatttgaaatcagcaaaggagtttcgtggtggcacgacgcacatgcgacggtctcctttagccacatctcgccgtcggcgacgagggacagggaggcaggatactcctgtcaggccgcgacgtagccctcctcctcttgctctccccgccatcctctgcttctcgtccacctgggattagatctatttcttggtacctgagcgatcgagtgaaatcgatctagccaaggtgcggcgggcgcggcttattcacgaattttctgtgttctttggaaagccgccatggacgagtggattcgccaagccgaggtgtgggtgcgccaatccgagagctggatccgccagcagcccccggagcagatctatgtcgcggccacggtggtcgccgtcacaatcctgctgcttatcgtagcatcttatctgaaatcctctaaaccaagcaccatagtgctatccgggctcagtggcagtggcaaaaccactattttctaccagcttcgggacggatcatcacatcaaggaactgtgacttcaatggaagaaaacagtgatacttttgtgctgcattcggagcaagaaaggaaaggcaaagtaaaacctgtgcatattgttgatgttcctggtcatgctaggctcaagcccaagcttgatgaagtcctgcctaaagctgctggggttgtctttattgttgatgctcaggatttcttgtctagcatgcaagctgctgcagagtacctttatgacattctgacaaaagcatctgtagttaagaaaaggatccctgtgcttatattctgcaacaagacggataaagttaccgcccactcgaaggaattcatcaagaaacagttggagaaagaattgaacaagcttcgggaatcaaggaacgccatatcttcagctgacatctctgatgaagtccagctcggggtccctggagaggcattcaacttcagccagtgccagaacaaggtggctgttgcggagggtgccggttcaactggtatgacacgttgaaatgtcgaaggacacctttgtatgaagtagcgtgtagttgttgcggacacgaagacgaagctacgagcttcggcttggtggcttgcatgtatggtaaaagtgacagtaggagcgaggtgagatcttcaagacttgttcaacaagaccacaaaaggaaaagacaacgatgccctaagtcaactttgtagctcatatgtataggttaaggtcacgattgtaattttatcgaagctacaccctacgactataaataggagcacattgccatgcatacacaacttttttttgccggagaaaattgacattctccacctacaaagctattgaaag

SEQ ID NO: 9636 - DNA, 1743 bp, Zea Mays
attatttcgtccagacctattaacagacctattaacaacgaggcaagtgggcaaaatcacaaaaaaatcgtgtttcctgtctcggagatagcctctaatttgaaatcagcaaaggagtttcgtggtggcacgacgcacatgcgacggtctcctgtcctgctctgtcccctctggcctccctagcagcttatactttcttattgtactttcttatagtcttccacggccgcagttagccacatctcgccgtcggcgacgagggacagggaggcaggatactcctgtcaggccgcgacgtagccctcctcctcttgctctccccgccatcctctgcttctcgtccacctgggattagatctatttcttggtacctgagccgccatggacgagtggattcgccaagccgaggtgtgggtgcgccaatccgagagctggatccgccagcagcccccggagcagatctatgtcgcggccacggtggtcgccgtcacaatcctgctgcttatcgtagcatcttatctgaaatcctctaaaccaagcaccatagtgctatccgggctcagtggcagtggcaaaaccactattttctaccagcttcgggacggatcatcacatcaaggaactgtgacttcaatggaagaaaacagtgatacttttgtgctgcattcggagcaagaaaggaaaggcaaagtaaaacctgtgcatattgttgatgttcctggtcatgctaggctcaagcccaagcttgatgaagtcctgcctaaagctgctggggttgtctttattgttgatgctcaggatttcttgtctagcatgcaagctgctgcagagtacctttatgacattctgacaaaagcatctgtagttaagaaaaggatccctgtgcttatattctgcaacaagacggataaagttaccgcccactcgaaggaattcatcaagaaacagttggagaaagaattgaacaagcttcgggaatcaaggaacgccatatcttcagctgacatctctgatgaagtccagctcggggtccctggagaggcattcaacttcagccagtgccagaacaaggtggctgttgcggagggtgccggttcaactggtaatgttttggccgtggagcaattcatccgtgaacatgtgagggcgtaggtcgttcttattgttctcagggctccaaatggctctcttgatctaatgaggcaagatgtacattgcgtcaatggggttgcctttcaatgtgactcttcatccggtcctctgaagttgcttaagaagcagtgaggcgcaatcatattctgcactggttcagctgacccatgtttacatgttgcaatgtgtatgcctgacagtcatcggatatgaatagagcatggtataactgtctggctatggttgttttgcacttttgctccgtaagtttttatattttcctgattttcacgtcgtctcggttttaaagtttaaactctttccgttatatagtccggatccctggtgaggtgagactcggtccaagaagggctttggggcacttgtctagaccgctatgatcagatcagatgaaattgttggccaccgtcttgtcccaaggactcgttctaacaattcccataacgctgtcccatctataatactgggaccagtaaactttgcaagacagtttagagtcaatagttatttggtacaaaatttgtctccccttatttagagccaatagtatcagaaaaaaataaaataaaa

SEQ ID NO: 9637 - DNA, 1732 bp, Zea Mays
attatttcgtccagacctattaacagacctattaacaacgaggcaagtgggcaaaatcacaaaaaaatcgtgtttcctgtctcggagatagcctctaatttgaaatcagcaaaggagtttcgtggtggcacgacgcacatgcgacgttagccacatctcgccgtcggcgacgagggacagggaggcaggatactcctgtcaggccgcgacgtagccctcctcctcttgctctccccgccatcctctgcttctcgtccacctgggattagatctatttcttggtacctgagcgatcgagtgaaatcgatctagccaaggtgcggcgggcgcggcttattcacgaattttctgtgttctttggaaagccgccatggacgagtggattcgccaagccgaggtgtgggtgcgccaatccgagagctggatccgccagcagcccccggagcagatctatgtcgcggccacggtggtcgccgtcacaatcctgctgcttatcgtagcatcttatctgaaatcctctaaaccaagcaccatagtgctatccgggctcagtggcagtggcaaaaccactattttctaccagcttcgggacggatcatcacatcaaggaactgtgacttcaatggaagaaaacagtgatacttttgtgctgcattcggagcaagaaaggaaaggcaaagtaaaacctgtgcatattgttgatgttcctggtcatgctaggctcaagcccaagcttgatgaagtcctgcctaaagctgctggggttgtctttattgttgatgctcaggatttcttgtctagcatgcaagctgctgcagagtacctttatgacattctgacaaaagcatctgtagttaagaaaaggatccctgtgcttatattctgcaacaagacggataaagttaccgcccactcgaaggaattcatcaagaaacagttggagaaagaattgaacaagcttcgggaatcaaggaacgccatatcttcagctgacatctctgatgaagtccagctcggggtccctggagaggcattcaacttcagccagtgccagaacaaggtggctgttgcggagggtgccggttcaactggtaatgttttggccgtggagcaattcatccgtgaacatgtgagggcgtaggtcgttcttattgttctcagggctccaaatggctctcttgatctaatgaggcaagatgtacattgcgtcaatggggttgcctttcaatgtgactcttcatccggtcctctgaagttgcttaagaagcagtgaggcgcaatcatattctgcactggttcagctgacccatgtttacatgttgcaatgtgtatgcctgacagtcatcggatatgaatagagcatggtataactgtctggctatggttgttttgcacttttgctccgtaagtttttatattttcctgattttcacgtcgtctcggttttaaagtttaaactctttccgttatatagtccggatccctggtgaggtgagactcggtccaagaagggctttggggcacttgtctagaccgctatgatcagatcagatgaaattgttggccaccgtcttgtcccaaggactcgttctaacaattcccataacgctgtcccatctataatactgggaccagtaaactttgcaagacagtttagagtcaatagttatttggtacaaaatttgtctccccttatttagagccaatagtatcagaaaaaaataaaataaaa

SEQ ID NO: 9638 - DNA, 2266 bp, Zea Mays
cattgggatgcagcagactgatggttgtgcggcggacgaagtcgcagggaaaccaggaggaaggctagtgcagagaatcagagctgtctgggtgaaagggcaaaggcaagcagcagagggaggccattacgtgtctccttcctccaggttcctctcggggctgccatggatttgctcagcagaggggcggtgttcaaggccctggtgttcctctgcttcatcagatcgtctcaaggaggagatctgaatctccctcccttggtgaaggcaagcaggttccaaagcgaggcatacgactacatcattgtcggcggcggcacggccgggtgcccgctggcggccacgctgtcccacaagtacaaggttctcctgctggagcgaggtgggtctccatatggcaaccgcaacatcacgttgctggagaacttccacatttgcctggccgacgtttcaccgcagtcaccgtcacaagctttcatctccacggatggcgtgataaatgcccgcgcaaatgtcctgggtggcggaacatgtatcaacgccggcttctacagccgggcgaaaccaagcttcgtccagcaagcaggctgggacgcagagctggtgaaccagtcctacccttgggtcgaagagaggattgtccactggcccaaagtggcgccatggcaggctgcgctccgggacgggcttctggaagcaggggtctcaccatacaacgggtattcctatgaccatctctacgggactaaagtcgggggcaccatattcgacgacaccgggcgccggcacacggctgccgacctccttgctgctggaaacgctagcaacctccgggtgctgctccatgctaccgtcgacaagattgtcctcgcaaggaagcacggcggggggaggaagcagccgagggctactggagttcggttcagagacgagaacggagcgcaccaccaggccttcctcacaaggaagaggggtagcgacgtcattgtttccgccggcgcaattggcagcccacagctactgctgctcagcgggatcgggccgaggggtcaactcagcaggcacaacgtttctctagtgcacgccaacgaacacgtcggggaagggatgtcggacaatccgatgaactccatcttcgtgcctatgaagagccccacgaagcagtccttgattgaaactgtcgggataacggacgctggggtgtttattgaagccagcagtggtttcagccagtccgacgatagcatccattgccaccatggaatcatgtctgctgagattggacagatatctacaattccaccaaagcaaagaagtcttgatcaaatccaagagtacgtgcgtaacaaacatagcctgcccaaagaagtgtttgacggaggattcattcttgagaagatcgatggcccactgtcgactggcagtctggtgctcgccgacaccgacgtcgatagcaaccccagcgtgagcttcaactacttccagcatccacaggacctcaggcgctgcgtctacgggattcagacgatcgagagaatactcaagacaaaccacttcgctaaccttaccgccaacggtgccgggtacccgatggaaacgctgctcaatctgagcgtctcggctaacataaacctgatacccaagcacacagacgacaccacgtccttggagcagttctgcagggacacggtcacaaccatctggcactaccatgggggatgccatgttggcaaggtggtggatcgacactaccgggtgattggcatctccggcctccgtgtgatagatggatcaaccttgttcagttcaccaggaacgaatccacaggccacggtcctaatgatgggcagatacatgggggtgaagattctaagggaaagattaggacgagcagctggagtataatggactttatccagctcatcaagtatgaatgtgacttaggaggagacaagtatatagtgatttttgaaagcgattcattaaatcgccaaacaaacaaaacaaaattaagccaggggttccatttgtattcttgctgctctcatatatatatgcatggtctatcacaaattcacaaatgtgtattattagttccacgttcatagaggattttctacattttgggcaacattattgcacactgtaataacataatctgacaaacttggactcagaagacaatggggcagagatcgatggcggcaggtccaaatcaggaccaaagctcaacatttatttgtattttcattgtgcaaccgtttga

SEQ ID NO: 9639 - DNA, 2305 bp, Zea Mays
cttgaatgcgtggcacaagtggcagcagcagcaccccaattctgctgtgctgcctacaaaaaaaagtcattgggatgcagcagactgatggttgtgcggcggacgaagtcgcagggaaaccaggaggaaggctagtgcagagaatcagagctgtctgggtgaaagggcaaaggcaagcagcagagggaggccattacgtgtctccttcctccaggttcctctcggggctgccatggatttgctcagcagaggggcggtgttcaaggccctggtgttcctctgcttcatcagatcgtctcaaggaaggcaagcaggttccaaagcgaggcatacgactacatcattgtcggcggcggcacggccgggtgcccgctggcggccacgctgtcccacaagtacaaggttctcctgctggagcgaggtgggtctccatatggcaaccgcaacatcacgttgctggagaacttccacatttgcctggccgacgtttcaccgcagtcaccgtcacaagctttcatctccacggatggcgtgataaatgcccgcgcaaatgtcctgggtggcggaacatgtatcaacgccggcttctacagccgggcgaaaccaagcttcgtccagcaagcaggctgggacgcagagctggtgaaccagtcctacccttgggtcgaagagaggattgtccactggcccaaagtggcgccatggcaggctgcgctccgggacgggcttctggaagcaggggtctcaccatacaacgggtattcctatgaccatctctacgggactaaagtcgggggcaccatattcgacgacaccgggcgccggcacacggctgccgacctccttgctgctggaaacgctagcaacctccgggtgctgctccatgctaccgtcgacaagattgtcctcgcaaggaagcacggcggggggaggaagcagccgagggctactggagttcggttcagagacgagaacggagcgcaccaccaggccttcctcacaaggaagaggggtagcgacgtcattgtttccgccggcgcaattggcagcccacagctactgctgctcagcgggatcgggccgaggggtcaactcagcaggcacaacgtttctctagtgcacgccaacgaacacgtcggggaagggatgtcggacaatccgatgaactccatcttcgtgcctatgaagagccccacgaagcagtccttgattgaaactgtcgggataacggacgctggggtgtttattgaagccagcagtggtttcagccagtccgacgatagcatccattgccaccatggaatcatgtctgctgagattggacagatatctacaattccaccaaagcaaagaagtcttgatcaaatccaagagtacgtgcgtaacaaacatagcctgcccaaagaagtgtttgacggaggattcattcttgagaagatcgatggcccactgtcgactggcagtctggtgctcgccgacaccgacgtcgatagcaaccccagcgtgagcttcaactacttccagcatccacaggacctcaggcgctgcgtctacgggattcagacgatcgagagaatactcaagacaaaccacttcgctaaccttaccgccaacggtgccgggtacccgatggaaacgctgctcaatctgagcgtctcggctaacataaacctgatacccaagcacacagacgacaccacgtccttggagcagttctgcagggacacggtcacaaccatctggcactaccatgggggatgccatgttggcaaggtggtggatcgacactaccgggtgattggcatctccggcctccgtgtgatagatggatcaaccttgttcagttcaccaggaacgaatccacaggccacggtcctaatgatgggcagatacatgggggtgaagattctaagggaaagattaggacgagcagctggagtataatggactttatccagctcatcaagtatgaatgtgacttaggaggagacaagtatatagtgatttttgaaagcgattcattaaatcgccaaacaaacaaaacaaaattaagccaggggttccatttgtattcttgctgctctcatatatatatgcatggtctatcacaaattcacaaatgtgtattattagttccacgttcatagaggattttctacattttgggcaacattattgcacactgtaataacataatctgacaaacttggactcagaagacaatggggcagagatcgatggcggcaggtccaaatcaggaccaaagctcaacatttatttgtattttcattgtgcaaccgtttga

SEQ ID NO: 9640 - DNA, 1042 bp, Zea Mays
caccgtcaccacacgcacacggcacacacaccttcttcgtccccttcaccccctgccgctagcctctccctcccctcggtcgtagccatggagaccacttcccctgcctcttcacctgggcacacctccctcccagctgctgcaggtaggactaagtagtaaatagccatatacataggttgagtggatcgttaagagacggtagccatatacataggagtactggatagtatacaagaacggtagatacagggcaggggacatgatgctgggaaagagatctgggcgcccgtcgccggcggcgcggcagcacatgcggcggaccacgagcatgacggagttcgcggcaccgcacgtgctggtagacgtcgcggaggaggaggaggacgaggagctgcagctgctgccggcgcacgccgaggccacaggggaggcggccgagcaggaggacccctacgggtgggccatcggcggcgccgcggcggccgggcgcgcggactggctggcggcgtaccgcgcccgcgcggcgccggcactggcggggctacgccggaactcggccgacttctcggctgccgagaccgccgcgttcctccgcgcctgcgggctctgcaaccgccgcctcggacccggccgcgacaccttcatgtacaggggcgacacggcgttctgcagcctcgagtgccggcagcagcacatcacgatcgaggagtggaaggagaagtgcgcgctcgccacgccgccgacggcgccggcgtccgacccggtggtgccgctgccgcccagcggcgcgggctccgacaaaccagctcagcaaaggtacgccgagttttaatttcccccggtttctatgaaattcggcgttgcaaagatatatagatggttaccaggattggtatgtatttatatgatgttcgtcaccgatgacaacccccccggcccggccacatgatggcatgaataatattttatttatgagaaaatgttctgatgattctcacgggctcgtgcgctcacgaatcttccacagatcgtgtacgtt

SEQ ID NO: 9641 - DNA, 764 bp, Zea Mays
cccaatcatccgacgatgatcccctcgattcgcggcgccctcgcctccaccactccccaaccacccgacgccgacccccctcaattcacgcccccacctgctgcatcggctccctctggcgccccgcctcctggcccagatccgtgcaccccttgccctctccggactcgatgattcacagatctgcccagctgcccaggcacagactaccggcatccggatctcctgctccactgctcgccgccttggggctctccggcgttggctcagcgcgacgagccccccaatagcctagttccggatcccccaaccgcccacgccccacagttcaagcaccggccaccgatgtctgacgaacgagcgaactccccgcggatgcaggaggaggaggtgcaggagcgaccgccgaccgtccgcgtttcaccatccccttctccgatctcaaggaatcataaaagcatatggaggaactatgtataggctacaaagaagcataagaagcatttttatagcagaagccaagtgttctgatgattttgttttttcaattgtgttttctgttattagttcagcatgcacatatattgacatgatttatggcatggcatctgccatctttgttatatttatgacatcgttcttgattgatgtgtgcgacatgaatgatggatttttttaacatcctgaccatcattgtgtcgctcattatcgtattttgtatatcatttatgggttcacggatatgaaatgacaggtttcttatt

SEQ ID NO: 9642 - DNA, 1506 bp, Zea Mays
cagccagccaagggtttaacgcccttgacagaaattgccaaggacagcaggcctctgtgctcggctgaagagtggttgagaaaacaactaaaattattatgtcttcattttcttccttggaaagaaccattgctagactgaggtctagagtgaactttgtcaaaacagaggatgccagtactgctttctttcatgcgcaagccaggttcaggacaaagaagaacttcattcataaactgatggtcgacgagcatctaatcacttcccaagaggctaagcagcaggctatgtttctgttttataaggatctgattggtaaagaggttgagcaaaattttagtctaaaccttgctgattttcacaaaggcaatttggagctctcgcattttgataatcccatatccttggcggaaatcaaatctgctgttttaagtcttcctaaggataaagcccctggacctgacggtttcacaaggcgtttttataaatgttgttgggatataatcaaatgggacctcctggctgtgtcttagtcttacagcaaggctcccctgaaggcttgaattgctgaattcagcctatattactctcattcccaaacatgttgaggctgttcttccgggggactttacaccaatcagcctagttcacagttttgctaaacttaccactaaaatcctggccaacagattagctcctgaactggataaaatggttagcacaaatcagagtgccttcatccggggcagatgtattcatgataactttattatggtcagtcaaaccgtcaagatgctacataataatagaatccctgctcttttcttgaagctggacattaaaaaggcctttgactctgtgcattgggcatttcttctagaaattcttcaacacttgggttttggacaggtttggtgcaacctgattctgaacctgctattgacatcctctactcaagttcttgtgaatggagtgcctggccagcctataagtctcaagagagggttgaggcaaggagattagtattggtgagggctgacatatctagactcccttttgtgagtggttcaattgacgctctgcatgcaggtgctgcaattcattgttggccatccccagcttgtgctgttgcagatatcagtagagtccttcgcccagggggaatttttgttgcttcgacattcgtggcagatgttattccaccagctattccagtattgaagatcgtacgcccgtacattagccaaataactggcaacaataccttcttatctgaagtggagcttgaagatctttgcaaagcatgtgggctggttgatttcaaatttgtcagaagtggattctatataatgttttctgccactaaagcatgctaactaagtagcagcaatcgtccagtcgtttatgtcaagactcctcggttttatactgcaaatggtttccttctgtgcattgtgcggttgtgccatttgctctaaagacccatggcatctcctaggcgtaggc

SEQ ID NO: 9643 - DNA, 2544 bp, Zea Mays
acaaattgtgtgtgccttggcgtgtcgtggaggccccgggcacgcacgccgcacagtggcatcagctctcagtgcgcgcacgtcaccacaaattgtgtgccttgtcgtggaggccccgggcacgtacgccgcacagggcacacctgctccctccggcctgctctgctcactgctttgattccgcttcggcgcttcgccgcctccggttttctctccgcgcctccagtctccagggacgcaccacctctcccaagtcccaatctcccatggcggcgctgggcacggcgatcacccccgcagcagctaccacggcgccgtgctgctataatcggcatccgcggagccacatcacggcgcgccgtaaccgggttgcctccgcgaggaggcttgacctgtgcgccagctcctcacctgccgtcaccgctcccgacataccagacgaggcgctggtggaacccttggtggcgccggcgccggagacgaagctcaggaagctggcgtgtccaatctgctactaccccctggcgagctcgagcgatcagttggatgatgctaccagtctcgaatgtccaacgtgcaagaaatgctaccccaacaagcaagattactgggatcttacagtgtcagttggttcgacagagtactccgagtccatgccagtggcaacagagttgtttaggactccactggtatcttttctttacgaaagaggatggcgccaaaatttcatatggggtggtttcccaggcctagaaagagaggtcatgctgcttaactatgttgtattcatgaggatgttcagtttgaaatggcaaaaacttatttgaagccaacaattggagggactattgttgatgcaagttgtggaagtggcctgttctcaagattatttattaagagtgggctatattctcttgttgtggcactggatttctcagagaatatgttgaagcagtgcaaccaatacatcaagcaggaaaacatttcagatgagtatgcctttggtcattatgtttagttttgtaccttattcattaggtttagttttgtaccctacttgtcatgtttgacttattaagggctcggagtttggggattttgtttacttaccatccattggtactagaggtggtattctggatcattctgtgtcagtctgttttatgaaggaaaacagcaccaccttgtggttctcgggggtctacggcccccatagagatgaggagaaattggcttttctagaagaactttctcaggtcagaaccagttgccctggtcctgggtgattgcaggggacttcaatatgatccgttgtgctgaggacaagaataattcgaatcttaatagagctctcatgggtagcttaaatatttggattaataatcactctctcaaggagttgcctctaactggaagaagattcacctggtccaaagagatgtccctaccttagtcaagcttgacagggtgttctgcacttctgattgggaggccttattcctagattgttctctgcagagtaatgcctctagtatgtttgatcactgtcccctggttctgaggcttaatgtgggctttaagggaaagaagcgtttccactttgagagtttttggccaaagatgcaaggttttcaggaggtggtgtctgattcctggaactctagtatttcggttttttttgtcccatggagagattatctattaaattcaaaagacttgcgaaggccctgcagtcctggagtcaaaaatatgtgggtaattagtattggtgagggctgacatatctagactcccttttgtgagtggttcaattgacgctctgcatgcaggtgctgcaattcattgttggccatccccagcttgtgctgttgcagatatcagtagagtccttcgcccagggggaatttttgttgcttcgacattcgtggcagatgttattccaccagctattccagtattgaagatcgtacgcccgtacattagccaaataactggcaacaataccttcttatctgaagtggagcttgaagatctttgcaaagcatgtgggctggttgatttcaaatttgtcagaagtggattctatataatgttttctgccactaaagcatgctaactaagtagcagcaatcgtccagtcgtttatgtcaagactcctcggttttatactgcaaatggtttccttctgtgcattgtgcggttgtgccatttgctctaaaggttgccaactttcctcaagggggtgtggtgtaaatagtgaacacatatattttacttctacttgaccgacctcattatagcatgaaaatatcatattttttgtgtacagcttcatagatctttgcaattatgtaatttaaggcttgtttggaacagctctaccaacctaaaaactgaatctggatatagaatttagttagatccatggtgaagcagctccaatagttaatggagctgatgatggtgtttgttacagctccatctgaccatctcacatctctatcttatttccatctagacccatggcatctcctaggcgtaggc

SEQ ID NO: 9644 - DNA, 2511 bp, Zea Mays
acaaattgtgtgtgccttggcgtgtcgtggaggccccgggcacgcacgccgcacagtggcatcagctctcagtgcgcgcacgtcaccacaaattgtgtgccttgtcgtggaggccccgggcacgtacgccgcacagggcacacctgctccctccggcctgctctgctcactgctttgattccgcttcggcgcttcgccgcctccggttttctctccgcgcctccagtctccagggacgcaccacctctcccaagtcccaatctcccatggcggcgctgggcacggcgatcacccccgcagcagctaccacggcgccgtgctgctataatcggcatccgcggagccacatcacggcgcgccgtaaccgggttgcctccgcgaggaggcttgacctgtgcgccagctcctcacctgccgtcaccgctcccgacataccagacgaggcgctggtggaacccttggtggcgccggcgccggagacgaagctcaggaagctggcgtgtccaatctgctactaccccctggcgagctcgagcgatcagttggatgatgctaccagtctcgaatgtccaacgtgcaagaaatgctaccccaacaagcaagattactgggatcttacagtgtcagttggttcgacagagtactccgagtccatgccagtggcaacagagttgtttaggtaaagaggactccactggtatcttttctttacgaaagaggatggcgccaaaatttcatatggggtggtttcccaggcctagaaagagagtttgaaatggcaaaaacttatttgaagccaacaattggagggactattgttgatgcaagttgtggaagtggcctgttctcaagattatttattaagagtgggctatattctcttgttgtggcactggatttctcagagaatatgttgaagcagtgcaaccaatacatcaagcaggaaaacatttcagatgagtatgcctttggtcattatgtttagttttgtaccttattcattaggtttagttttgtaccctacttgtcatgtttgacttattaagggctcggagtttggggattttgtttacttaccatccattggtactagaggtggtattctggatcattctgtgtcagtctgttttatgaaggaaaacagcaccaccttgtggttctcgggggtctacggcccccatagagatgaggagaaattggcttttctagaagaactttctcaggtcagaaccagttgccctggtcctgggtgattgcaggggacttcaatatgatccgttgtgctgaggacaagaataattcgaatcttaatagagctctcatgggtagcttaaatatttggattaataatcactctctcaaggagttgcctctaactggaagaagattcacctggtccaaagagatgtccctaccttagtcaagcttgacagggtgttctgcacttctgattgggaggccttattcctagattgttctctgcagagtaatgcctctagtatgtttgatcactgtcccctggttctgaggcttaatgtgggctttaagggaaagaagcgtttccactttgagagtttttggccaaagatgcaaggttttcaggaggtggtgtctgattcctggaactctagtatttcggttttttttgtcccatggagagattatctattaaattcaaaagacttgcgaaggccctgcagtcctggagtcaaaaatatgtgggagattagtattggtgagggctgacatatctagactcccttttgtgagtggttcaattgacgctctgcatgcaggtgctgcaattcattgttggccatccccagcttgtgctgttgcagatatcagtagagtccttcgcccagggggaatttttgttgcttcgacattcgtggcagatgttattccaccagctattccagtattgaagatcgtacgcccgtacattagccaaataactggcaacaataccttcttatctgaagtggagcttgaagatctttgcaaagcatgtgggctggttgatttcaaatttgtcagaagtggattctatataatgttttctgccactaaagcatgctaactaagtagcagcaatcgtccagtcgtttatgtcaagactcctcggttttatactgcaaatggtttccttctgtgcattgtgcggttgtgccatttgctctaaaggttgccaactttcctcaagggggtgtggtgtaaatagtgaacacatatattttacttctacttgaccgacctcattatagcatgaaaatatcatattttttgtgtacagcttcatagatctttgcaattatgtaatttaaggcttgtttggaacagctctaccaacctaaaaactgaatctggatatagaatttagttagatccatggtgaagcagctccaatagttaatggagctgatgatggtgtttgttacagctccatctgaccatctcacatctctatcttatttccatctagacccatggcatctcctaggcgtaggc

SEQ ID NO: 9645 - DNA, 2499 bp, Zea Mays
acaaattgtgtgtgccttggcgtgtcgtggaggccccgggcacgcacgccgcacagtggcatcagctctcagtgcgcgcacgtcaccacaaattgtgtgccttgtcgtggaggccccgggcacgtacgccgcacagggcacacctgctccctccggcctgctctgctcactgctttgattccgcttcggcgcttcgccgcctccggttttctctccgcgcctccagtctccagggacgcaccacctctcccaagtcccaatctcccatggcggcgctgggcacggcgatcacccccgcagcagctaccacggcgccgtgctgctataatcggcatccgcggagccacatcacggcgcgccgtaaccgggttgcctccgcgaggaggcttgacctgtgcgccagctcctcacctgccgtcaccgctcccgacataccagacgaggcgctggtggaacccttggtggcgccggcgccggagacgaagctcaggaagctggcgtgtccaatctgctactaccccctggcgagctcgagcgatcagttggatgatgctaccagtctcgaatgtccaacgtgcaagaaatgctaccccaacaagcaagattactgggatcttacagtgtcagttggttcgacagagtactccgagtccatgccagtggcaacagagttgtttaggactccactggtatcttttctttacgaaagaggatggcgccaaaatttcatatggggtggtttcccaggcctagaaagagagtttgaaatggcaaaaacttatttgaagccaacaattggagggactattgttgatgcaagttgtggaagtggcctgttctcaagattatttattaagagtgggctatattctcttgttgtggcactggatttctcagagaatatgttgaagcagtgcaaccaatacatcaagcaggaaaacatttcagatgagtatgcctttggtcattatgtttagttttgtaccttattcattaggtttagttttgtaccctacttgtcatgtttgacttattaagggctcggagtttggggattttgtttacttaccatccattggtactagaggtggtattctggatcattctgtgtcagtctgttttatgaaggaaaacagcaccaccttgtggttctcgggggtctacggcccccatagagatgaggagaaattggcttttctagaagaactttctcaggtcagaaccagttgccctggtcctgggtgattgcaggggacttcaatatgatccgttgtgctgaggacaagaataattcgaatcttaatagagctctcatgggtagcttaaatatttggattaataatcactctctcaaggagttgcctctaactggaagaagattcacctggtccaaagagatgtccctaccttagtcaagcttgacagggtgttctgcacttctgattgggaggccttattcctagattgttctctgcagagtaatgcctctagtatgtttgatcactgtcccctggttctgaggcttaatgtgggctttaagggaaagaagcgtttccactttgagagtttttggccaaagatgcaaggttttcaggaggtggtgtctgattcctggaactctagtatttcggttttttttgtcccatggagagattatctattaaattcaaaagacttgcgaaggccctgcagtcctggagtcaaaaatatgagattagtattggtgagggctgacatatctagactcccttttgtgagtggttcaattgacgctctgcatgcaggtgctgcaattcattgttggccatccccagcttgtgctgttgcagatatcagtagagtccttcgcccagggggaatttttgttgcttcgacattcgtggcagatgttattccaccagctattccagtattgaagatcgtacgcccgtacattagccaaataactggcaacaataccttcttatctgaagtggagcttgaagatctttgcaaagcatgtgggctggttgatttcaaatttgtcagaagtggattctatataatgttttctgccactaaagcatgctaactaagtagcagcaatcgtccagtcgtttatgtcaagactcctcggttttatactgcaaatggtttccttctgtgcattgtgcggttgtgccatttgctctaaaggttgccaactttcctcaagggggtgtggtgtaaatagtgaacacatatattttacttctacttgaccgacctcattatagcatgaaaatatcatattttttgtgtacagcttcatagatctttgcaattatgtaatttaaggcttgtttggaacagctctaccaacctaaaaactgaatctggatatagaatttagttagatccatggtgaagcagctccaatagttaatggagctgatgatggtgtttgttacagctccatctgaccatctcacatctctatcttatttccatctagacccatggcatctcctaggcgtaggc

SEQ ID NO: 9646 - DNA, 1948 bp, Zea Mays
acaaattgtgtgtgccttggcgtgtcgtggaggccccgggcacgcacgccgcacagtggcatcagctctcagtgcgcgcacgtcaccacaaattgtgtgccttgtcgtggaggccccgggcacgtacgccgcacagggcacacctgctccctccggcctgctctgctcactgctttgattccgcttcggcgcttcgccgcctccggttttctctccgcgcctccagtctccagggacgcaccacctctcccaagtcccaatctcccatggcggcgctgggcacggcgatcacccccgcagcagctaccacggcgccgtgctgctataatcggcatccgcggagccacatcacggcgcgccgtaaccgggttgcctccgcgaggaggcttgacctgtgcgccagctcctcacctgccgtcaccgctcccgacataccagacgaggcgctggtggaacccttggtggcgccggcgccggagacgaagctcaggaagctggcgtgtccaatctgctactaccccctggcgagctcgagcgatcagttggatgatgctaccagtctcgaatgtccaacgtgcaagaaatgctaccccaacaagcaagattactgggatcttacagtgtcagttggttcgacagagtactccgagtccatgccagtggcaacagagttgtttaggactccactggtatcttttctttacgaaagaggatggcgccaaaatttcatatggggtggtttcccaggcctagaaagagagtttgaaatggcaaaaacttatttgaagccaacaattggagggactattgttgatgcaagttgtggaagtggcctgttctcaagattatttattaagagtgggctatattctcttgttgtggcactggatttctcagagaatatgttgaagcagtgcaaccaatacatcaagcaggaaaacatttcagatgagtatgcctttggtcattatgtttagttttgtaccttattcattaggtttagttttgtaccctacttgtcatgtttgacttattaagtctatgtagttagttgttccttcttgtttgtattcatgctttgtagctttgttgtcatgattattgttttattataaaaagttcaaatacaaattgtaatattacacttcttttgtttcaggagattagtattggtgagggctgacatatctagactcccttttgtgagtggttcaattgacgctctgcatgcaggtgctgcaattcattgttggccatccccagcttgtgctgttgcagatatcagtagagtccttcgcccagggggaatttttgttgcttcgacattcgtggcagatgttattccaccagctattccagtattgaagatcgtacgcccgtacattagccaaataactggcaacaataccttcttatctgaagtggagcttgaagatctttgcaaagcatgtgggctggttgatttcaaatttgtcagaagtggattctatataatgttttctgccactaaagcatgctaactaagtagcagcaatcgtccagtcgtttatgtcaagactcctcggttttatactgcaaatggtttccttctgtgcattgtgcggttgtgccatttgctctaaaggttgccaactttcctcaagggggtgtggtgtaaatagtgaacacatatattttacttctacttgaccgacctcattatagcatgaaaatatcatattttttgtgtacagcttcatagatctttgcaattatgtaatttaaggcttgtttggaacagctctaccaacctaaaaactgaatctggatatagaatttagttagatccatggtgaagcagctccaatagttaatggagctgatgatggtgtttgttacagctccatctgaccatctcacatctctatcttatttccatctagacccatggcatctcctaggcgtaggc

SEQ ID NO: 9647 - DNA, 1896 bp, Zea Mays
acaaattgtgtgtgccttggcgtgtcgtggaggccccgggcacgcacgccgcacagtggcatcagctctcagtgcgcgcacgtcaccacaaattgtgtgccttgtcgtggaggccccgggcacgtacgccgcacagggcacacctgctccctccggcctgctctgctcactgctttgattccgcttcggcgcttcgccgcctccggttttctctccgcgcctccagtctccagggacgcaccacctctcccaagtcccaatctcccatggcggcgctgggcacggcgatcacccccgcagcagctaccacggcgccgtgctgctataatcggcatccgcggagccacatcacggcgcgccgtaaccgggttgcctccgcgaggaggcttgacctgtgcgccagctcctcacctgccgtcaccgctcccgacataccagacgaggcgctggtggaacccttggtggcgccggcgccggagacgaagctcaggaagctggcgtgtccaatctgctactaccccctggcgagctcgagcgatcagttggatgatgctaccagtctcgaatgtccaacgtgcaagaaatgctaccccaacaagcaagattactgggatcttacagtgtcagttggttcgacagagtactccgagtccatgccagtggcaacagagttgtttagtttgaaatggcaaaaacttatttgaagccaacaattggagggactattgttgatgcaagttgtggaagtggcctgttctcaagattatttattaagagtgggctatattctcttgttgtggcactggatttctcagagaatatgttgaagcagtgcaaccaatacatcaagcaggaaaacatttcagatgaagtaatgcctctagtatgtttgatcactgtcccctggttctgaggcttaatgtgggctttaagggaaagaagcgtttccactttgagagtttttggccaaagatgcaaggttttcaggaggtggtgtctgattcctggaactctagtatttcggttttttttgtcccatggagagattatctattaaattcaaaagacttgcgaaggccctgcagtcctggagtcaaaaatatgtgggagattagtattggtgagggctgacatatctagactcccttttgtgagtggttcaattgacgctctgcatgcaggtgctgcaattcattgttggccatccccagcttgtgctgttgcagatatcagtagagtccttcgcccagggggaatttttgttgcttcgacattcgtggcagatgttattccaccagctattccagtattgaagatcgtacgcccgtacattagccaaataactggcaacaataccttcttatctgaagtggagcttgaagatctttgcaaagcatgtgggctggttgatttcaaatttgtcagaagtggattctatataatgttttctgccactaaagcatgctaactaagtagcagcaatcgtccagtcgtttatgtcaagactcctcggttttatactgcaaatggtttccttctgtgcattgtgcggttgtgccatttgctctaaaggttgccaactttcctcaagggggtgtggtgtaaatagtgaacacatatattttacttctacttgaccgacctcattatagcatgaaaatatcatattttttgtgtacagcttcatagatctttgcaattatgtaatttaaggcttgtttggaacagctctaccaacctaaaaactgaatctggatatagaatttagttagatccatggtgaagcagctccaatagttaatggagctgatgatggtgtttgttacagctccatctgaccatctcacatctctatcttatttccatctagacccatggcatctcctaggcgtaggc

SEQ ID NO: 9648 - DNA, 2421 bp, Zea Mays
acaaattgtgtgtgccttggcgtgtcgtggaggccccgggcacgcacgccgcacagtggcatcagctctcagtgcgcgcacgtcaccacaaattgtgtgccttgtcgtggaggccccgggcacgtacgccgcacagggcacacctgctccctccggcctgctctgctcactgctttgattccgcttcggcgcttcgccgcctccggttttctctccgcgcctccagtctccagggacgcaccacctctcccaagtcccaatctcccatggcggcgctgggcacggcgatcacccccgcagcagctaccacggcgccgtgctgctataatcggcatccgcggagccacatcacggcgcgccgtaaccgggttgcctccgcgaggaggcttgacctgtgcgccagctcctcacctgccgtcaccgctcccgacataccagacgaggcgctggtggaacccttggtggcgccggcgccggagacgaagctcaggaagctggcgtgtccaatctgctactaccccctggcgagctcgagcgatcagttggatgatgctaccagtctcgaatgtccaacgtgcaagaaatgctaccccaacaagcaagattactgggatcttacagtgtcagttggttcgacagagtactccgagtccatgccagtggcaacagagttgtttagtttgaaatggcaaaaacttatttgaagccaacaattggagggactattgttgatgcaagttgtggaagtggcctgttctcaagattatttattaagagtgggctatattctcttgttgtggcactggatttctcagagaatatgttgaagcagtgcaaccaatacatcaagcaggaaaacatttcagatgagtatgcctttggtcattatgtttagttttgtaccttattcattaggtttagttttgtaccctacttgtcatgtttgacttattaagggctcggagtttggggattttgtttacttaccatccattggtactagaggtggtattctggatcattctgtgtcagtctgttttatgaaggaaaacagcaccaccttgtggttctcgggggtctacggcccccatagagatgaggagaaattggcttttctagaagaactttctcaggtcagaaccagttgccctggtcctgggtgattgcaggggacttcaatatgatccgttgtgctgaggacaagaataattcgaatcttaatagagctctcatgggtagcttaaatatttggattaataatcactctctcaaggagttgcctctaactggaagaagattcacctggtccaaagagatgtccctaccttagtcaagcttgacagggtgttctgcacttctgattgggaggccttattcctagattgttctctgcagagtaatgcctctagtatgtttgatcactgtcccctggttctgaggcttaatgtgggctttaagggaaagaagcgtttccactttgagagtttttggccaaagatgcaaggttttcaggaggtggtgtctgattcctggaactctagtatttcggttttttttgtcccatggagagattatctattaaattcaaaagacttgcgaaggccctgcagtcctggagtcaaaaatatgtgggagattagtattggtgagggctgacatatctagactcccttttgtgagtggttcaattgacgctctgcatgcaggtgctgcaattcattgttggccatccccagcttgtgctgttgcagatatcagtagagtccttcgcccagggggaatttttgttgcttcgacattcgtggcagatgttattccaccagctattccagtattgaagatcgtacgcccgtacattagccaaataactggcaacaataccttcttatctgaagtggagcttgaagatctttgcaaagcatgtgggctggttgatttcaaatttgtcagaagtggattctatataatgttttctgccactaaagcatgctaactaagtagcagcaatcgtccagtcgtttatgtcaagactcctcggttttatactgcaaatggtttccttctgtgcattgtgcggttgtgccatttgctctaaaggttgccaactttcctcaagggggtgtggtgtaaatagtgaacacatatattttacttctacttgaccgacctcattatagcatgaaaatatcatattttttgtgtacagcttcatagatctttgcaattatgtaatttaaggcttgtttggaacagctctaccaacctaaaaactgaatctggatatagaatttagttagatccatggtgaagcagctccaatagttaatggagctgatgatggtgtttgttacagctccatctgaccatctcacatctctatcttatttccatctagacccatggcatctcctaggcgtaggc

SEQ ID NO: 9649 - DNA, 2544 bp, Zea Mays
acaaattgtgtgtgccttggcgtgtcgtggaggccccgggcacgcacgccgcacagtggcatcagctctcagtgcgcgcacgtcaccacaaattgtgtgccttgtcgtggaggccccgggcacgtacgccgcacagggcacacctgctccctccggcctgctctgctcactgctttgattccgcttcggcgcttcgccgcctccggttttctctccgcgcctccagtctccagggacgcaccacctctcccaagtcccaatctcccatggcggcgctgggcacggcgatcacccccgcagcagctaccacggcgccgtgctgctataatcggcatccgcggagccacatcacggcgcgccgtaaccgggttgcctccgcgaggaggcttgacctgtgcgccagctcctcacctgccgtcaccgctcccgacataccagacgaggcgctggtggaacccttggtggcgccggcgccggagacgaagctcaggaagctggcgtgtccaatctgctactaccccctggcgagctcgagcgatcagttggatgatgctaccagtctcgaatgtccaacgtgcaagaaatgctaccccaacaagcaagattactgggatcttacagtgtcagttggttcgacagagtactccgagtccatgccagtggcaacagagttgtttaggactccactggtatcttttctttacgaaagaggatggcgccaaaatttcatatggggtggtttcccaggcctagaaagagaggtcatgctgcttaactatgttgtattcatgaggatgttcagtttgaaatggcaaaaacttatttgaagccaacaattggagggactattgttgatgcaagttgtggaagtggcctgttctcaagattatttattaagagtgggctatattctcttgttgtggcactggatttctcagagaatatgttgaagcagtgcaaccaatacatcaagcaggaaaacatttcagatgagtatgcctttggtcattatgtttagttttgtaccttattcattaggtttagttttgtaccctacttgtcatgtttgacttattaagggctcggagtttggggattttgtttacttaccatccattggtactagaggtggtattctggatcattctgtgtcagtctgttttatgaaggaaaacagcaccaccttgtggttctcgggggtctacggcccccatagagatgaggagaaattggcttttctagaagaactttctcaggtcagaaccagttgccctggtcctgggtgattgcaggggacttcaatatgatccgttgtgctgaggacaagaataattcgaatcttaatagagctctcatgggtagcttaaatatttggattaataatcactctctcaaggagttgcctctaactggaagaagattcacctggtccaaagagatgtccctaccttagtcaagcttgacagggtgttctgcacttctgattgggaggccttattcctagattgttctctgcagagtaatgcctctagtatgtttgatcactgtcccctggttctgaggcttaatgtgggctttaagggaaagaagcgtttccactttgagagtttttggccaaagatgcaaggttttcaggaggtggtgtctgattcctggaactctagtatttcggttttttttgtcccatggagagattatctattaaattcaaaagacttgcgaaggccctgcagtcctggagtcaaaaatatgtgggagattagtattggtgagggctgacatatctagactcccttttgtgagtggttcaattgacgctctgcatgcaggtgctgcaattcattgttggccatccccagcttgtgctgttgcagatatcagtagagtccttcgcccagggggaatttttgttgcttcgacattcgtggcagatgttattccaccagctattccagtattgaagatcgtacgcccgtacattagccaaataactggcaacaataccttcttatctgaagtggagcttgaagatctttgcaaagcatgtgggctggttgatttcaaatttgtcagaagtggattctatataatgttttctgccactaaagcatgctaactaagtagcagcaatcgtccagtcgtttatgtcaagactcctcggttttatactgcaaatggtttccttctgtgcattgtgcggttgtgccatttgctctaaaggttgccaactttcctcaagggggtgtggtgtaaatagtgaacacatatattttacttctacttgaccgacctcattatagcatgaaaatatcatattttttgtgtacagcttcatagatctttgcaattatgtaatttaaggcttgtttggaacagctctaccaacctaaaaactgaatctggatatagaatttagttagatccatggtgaagcagctccaatagttaatggagctgatgatggtgtttgttacagctccatctgaccatctcacatctctatcttatttccatctagacccatggcatctcctaggcgtaggc

SEQ ID NO: 9650 - DNA, 2327 bp, Zea Mays
acaaattgtgtgtgccttggcgtgtcgtggaggccccgggcacgcacgccgcacagtggcatcagctctcagtgcgcgcacgtcaccacaaattgtgtgccttgtcgtggaggccccgggcacgtacgccgcacagggcacacctgctccctccggcctgctctgctcactgctttgattccgcttcggcgcttcgccgcctccggttttctctccgcgcctccagtctccagggacgcaccacctctcccaagtcccaatctcccatggcggcgctgggcacggcgatcacccccgcagcagctaccacggcgccgtgctgctataatcggcatccgcggagccacatcacggcgcgccgtaaccgggttgcctccgcgaggaggcttgacctgtgcgccagctcctcacctgccgtcaccgctcccgacataccagacgaggcgctggtggaacccttggtggcgccggcgccggagacgaagctcaggaagctggcgtgtccaatctgctactaccccctggcgagctcgagcgatcagttggatgatgctaccagtctcgaatgtccaacgtgcaagaaatgctaccccaacaagcaagattactgggatcttacagtgtcagttggttcgacagagtactccgagtccatgccagtggcaacagagttgtttaggactccactggtatcttttctttacgaaagaggatggcgccaaaatttcatatggggtggtttcccaggcctagaaagagagtttgaaatggcaaaaacttatttgaagccaacaattggagggactattgttgatgcaagttgtggaagtggcctgttctcaagattatttattaagagtgggctatattctcttgttgtggcactggatttctcagagaatatgttgaagcagtgcaaccaatacatcaagcaggaaaacatttcagatgagaaaacagcaccaccttgtggttctcgggggtctacggcccccatagagatgaggagaaattggcttttctagaagaactttctcaggtcagaaccagttgccctggtcctgggtgattgcaggggacttcaatatgatccgttgtgctgaggacaagaataattcgaatcttaatagagctctcatgggtagcttaaatatttggattaataatcactctctcaaggagttgcctctaactggaagaagattcacctggtccaaagagatgtccctaccttagtcaagcttgacagggtgttctgcacttctgattgggaggccttattcctagattgttctctgcagagtaatgcctctagtatgtttgatcactgtcccctggttctgaggcttaatgtgggctttaagggaaagaagcgtttccactttgagagtttttggccaaagatgcaaggttttcaggaggtggtgtctgattcctggaactctagtatttcggttttttttgtcccatggagagattatctattaaattcaaaagacttgcgaaggccctgcagtcctggagtcaaaaatatgtgggagattagtattggtgagggctgacatatctagactcccttttgtgagtggttcaattgacgctctgcatgcaggtgctgcaattcattgttggccatccccagcttgtgctgttgcagatatcagtagagtccttcgcccagggggaatttttgttgcttcgacattcgtggcagatgttattccaccagctattccagtattgaagatcgtacgcccgtacattagccaaataactggcaacaataccttcttatctgaagtggagcttgaagatctttgcaaagcatgtgggctggttgatttcaaatttgtcagaagtggattctatataatgttttctgccactaaagcatgctaactaagtagcagcaatcgtccagtcgtttatgtcaagactcctcggttttatactgcaaatggtttccttctgtgcattgtgcggttgtgccatttgctctaaaggttgccaactttcctcaagggggtgtggtgtaaatagtgaacacatatattttacttctacttgaccgacctcattatagcatgaaaatatcatattttttgtgtacagcttcatagatctttgcaattatgtaatttaaggcttgtttggaacagctctaccaacctaaaaactgaatctggatatagaatttagttagatccatggtgaagcagctccaatagttaatggagctgatgatggtgtttgttacagctccatctgaccatctcacatctctatcttatttccatctagacccatggcatctcctaggcgtaggc

SEQ ID NO: 9651 - DNA, 2552 bp, Zea Mays
acaaattgtgtgtgccttggcgtgtcgtggaggccccgggcacgcacgccgcacagtggcatcagctctcagtgcgcgcacgtcaccacaaattgtgtgccttgtcgtggaggccccgggcacgtacgccgcacagggcacacctgctccctccggcctgctctgctcactgctttgattccgcttcggcgcttcgccgcctccggttttctctccgcgcctccagtctccagggacgcaccacctctcccaagtcccaatctcccatggcggcgctgggcacggcgatcacccccgcagcagctaccacggcgccgtgctgctataatcggcatccgcggagccacatcacggcgcgccgtaaccgggttgcctccgcgaggaggcttgacctgtgcgccagctcctcacctgccgtcaccgctcccgacataccagacgaggcgctggtggaacccttggtggcgccggcgccggagacgaagctcaggaagctggcgtgtccaatctgctactaccccctggcgagctcgagcgatcagttggatgatgctaccagtctcgaatgtccaacgtgcaagaaatgctaccccaacaagcaagattactgggatcttacagtgtcagttggttcgacagagtactccgagtccatgccagtggcaacagagttgtttaggtaaagaggactccactggtatcttttctttacgaaagaggatggcgccaaaatttcatatggggtggtttcccaggcctagaaagagaggtcatgctgcttaactatgttgtattcatgaggatgttcagtttgaaatggcaaaaacttatttgaagccaacaattggagggactattgttgatgcaagttgtggaagtggcctgttctcaagattatttattaagagtgggctatattctcttgttgtggcactggatttctcagagaatatgttgaagcagtgcaaccaatacatcaagcaggaaaacatttcagatgagtatgcctttggtcattatgtttagttttgtaccttattcattaggtttagttttgtaccctacttgtcatgtttgacttattaagggctcggagtttggggattttgtttacttaccatccattggtactagaggtggtattctggatcattctgtgtcagtctgttttatgaaggaaaacagcaccaccttgtggttctcgggggtctacggcccccatagagatgaggagaaattggcttttctagaagaactttctcaggtcagaaccagttgccctggtcctgggtgattgcaggggacttcaatatgatccgttgtgctgaggacaagaataattcgaatcttaatagagctctcatgggtagcttaaatatttggattaataatcactctctcaaggagttgcctctaactggaagaagattcacctggtccaaagagatgtccctaccttagtcaagcttgacagggtgttctgcacttctgattgggaggccttattcctagattgttctctgcagagtaatgcctctagtatgtttgatcactgtcccctggttctgaggcttaatgtgggctttaagggaaagaagcgtttccactttgagagtttttggccaaagatgcaaggttttcaggaggtggtgtctgattcctggaactctagtatttcggttttttttgtcccatggagagattatctattaaattcaaaagacttgcgaaggccctgcagtcctggagtcaaaaatatgtgggagattagtattggtgagggctgacatatctagactcccttttgtgagtggttcaattgacgctctgcatgcaggtgctgcaattcattgttggccatccccagcttgtgctgttgcagatatcagtagagtccttcgcccagggggaatttttgttgcttcgacattcgtggcagatgttattccaccagctattccagtattgaagatcgtacgcccgtacattagccaaataactggcaacaataccttcttatctgaagtggagcttgaagatctttgcaaagcatgtgggctggttgatttcaaatttgtcagaagtggattctatataatgttttctgccactaaagcatgctaactaagtagcagcaatcgtccagtcgtttatgtcaagactcctcggttttatactgcaaatggtttccttctgtgcattgtgcggttgtgccatttgctctaaaggttgccaactttcctcaagggggtgtggtgtaaatagtgaacacatatattttacttctacttgaccgacctcattatagcatgaaaatatcatattttttgtgtacagcttcatagatctttgcaattatgtaatttaaggcttgtttggaacagctctaccaacctaaaaactgaatctggatatagaatttagttagatccatggtgaagcagctccaatagttaatggagctgatgatggtgtttgttacagctccatctgaccatctcacatctctatcttatttccatctagacccatggcatctcctaggcgtaggc

SEQ ID NO: 9652 - DNA, 2496 bp, Zea Mays
acaaattgtgtgtgccttggcgtgtcgtggaggccccgggcacgcacgccgcacagtggcatcagctctcagtgcgcgcacgtcaccacaaattgtgtgccttgtcgtggaggccccgggcacgtacgccgcacagggcacacctgctccctccggcctgctctgctcactgctttgattccgcttcggcgcttcgccgcctccggttttctctccgcgcctccagtctccagggacgcaccacctctcccaagtcccaatctcccatggcggcgctgggcacggcgatcacccccgcagcagctaccacggcgccgtgctgctataatcggcatccgcggagccacatcacggcgcgccgtaaccgggttgcctccgcgaggaggcttgacctgtgcgccagctcctcacctgccgtcaccgctcccgacataccagacgaggcgctggtggaacccttggtggcgccggcgccggagacgaagctcaggaagctggcgtgtccaatctgctactaccccctggcgagctcgagcgatcagttggatgatgctaccagtctcgaatgtccaacgtgcaagaaatgctaccccaacaagcaagattactgggatcttacagtgtcagttggttcgacagagtactccgagtccatgccagtggcaacagagttgtttaggactccactggtatcttttctttacgaaagaggatggcgccaaaatttcatatggggtggtttcccaggcctagaaagagagtttgaaatggcaaaaacttatttgaagccaacaattggagggactattgttgatgcaagttgtggaagtggcctgttctcaagattatttattaagagtgggctatattctcttgttgtggcactggatttctcagagaatatgttgaagcagtgcaaccaatacatcaagcaggaaaacatttcagatgagtatgcctttggtcattatgtttagttttgtaccttattcattaggtttagttttgtaccctacttgtcatgtttgacttattaagggctcggagtttggggattttgtttacttaccatccattggtactagaggtggtattctggatcattctgtgtcagtctgttttatgaaggaaaacagcaccaccttgtggttctcgggggtctacggcccccatagagatgaggagaaattggcttttctagaagaactttctcaggtcagaaccagttgccctggtcctgggtgattgcaggggacttcaatatgatccgttgtgctgaggacaagaataattcgaatcttaatagagctctcatgggtagcttaaatatttggattaataatcactctctcaaggagttgcctctaactggaagaagattcacctggtccaaagagatgtccctaccttagtcaagcttgacagggtgttctgcacttctgattgggaggccttattcctagattgttctctgcagagtaatgcctctagtatgtttgatcactgtcccctggttctgaggcttaatgtgggctttaagggaaagaagcgtttccactttgagagtttttggccaaagatgcaaggttttcaggaggtggtgtctgattcctggaactctagtatttcggttttttttgtcccatggagagattatctattaaattcaaaagacttgcgaaggccctgcagtcctggagtcaaaaatatgtgggagattagtattggtgagggctgacatatctagactcccttttgtgagtggttcaattgacgctctgcatgcaggtgctgcaattcattgttggccatccccagcttgtgctatatcagtagagtccttcgcccagggggaatttttgttgcttcgacattcgtggcagatgttattccaccagctattccagtattgaagatcgtacgcccgtacattagccaaataactggcaacaataccttcttatctgaagtggagcttgaagatctttgcaaagcatgtgggctggttgatttcaaatttgtcagaagtggattctatataatgttttctgccactaaagcatgctaactaagtagcagcaatcgtccagtcgtttatgtcaagactcctcggttttatactgcaaatggtttccttctgtgcattgtgcggttgtgccatttgctctaaaggttgccaactttcctcaagggggtgtggtgtaaatagtgaacacatatattttacttctacttgaccgacctcattatagcatgaaaatatcatattttttgtgtacagcttcatagatctttgcaattatgtaatttaaggcttgtttggaacagctctaccaacctaaaaactgaatctggatatagaatttagttagatccatggtgaagcagctccaatagttaatggagctgatgatggtgtttgttacagctccatctgaccatctcacatctctatcttatttccatctagacccatggcatctcctaggcgtaggc

SEQ ID NO: 9653 - DNA, 2933 bp, Zea Mays
cacaaatcacacacaccaacattttgcagcagaatttctttattacaaagttacaagttacaacaaatttacattgtttaccggagtaattacaaaagtggttcaaagaaataaactttgaaatgttataaattatttataagtttgaaatatatgctagctcagtgacaatcctcaataagaagtatagaagaggtacttaggcttataagaaggtcgtgcccaccggcgcttaacaccatcaacatcatcacaaatctagtacctgcaacaacatgggttcgaaaaccctgagtacgaagtgtactttcgcaagtcttacccatttaaggaaaaagacgtttaaggaaaaagactctcaaggatatgctttcttttgggaatcaaggttaagcttatcaagattcaaagactcttttgcagaaaagcttactatgagtggatccttaaaaatccattttacttgttaggttaagtaaagttacttgcatctagagttctttctatcctagttcaagcacttggcctatactagccgtcttttatcatccctttagttcactggattgctacgtgtagggcagtgactaagtcttcatatccgagaagtaacggcgatccgaatcgattaatacccagttggggatctccaaccacacgacatatgtagcacttaacccttgcatatgtcaactcgccaccgggtttctcaagaccagattgggttcacgccaaccgagagcacagatacaccaccgtccaacctcttgccatggagggtacacgctactctcgccatctctccactcccattgcgtgttggcctttctggtattggtccggccgaggcaaatcttacccatgacgaggcatgtggctagttaaaaggtcctcaaccatcaagcctacatcgacacggtccttaatcgactcagacggagacactacaccaagacttccttctcgtgcaagtcacccgcctgatctcagctttattatttaaaatccaaagtttggtacctggcagaggtgcatcttttcagatgttgaacccatctcggtcgtgatggatccaccatcataagtcttttctttgtaaaaattcccatccactgtgaagcatcaccttttgtttttaaaacaaaacattttatttttctaaagcaaggctaagcatcataaaaatccttttcataaaagggtatcaaggaagggtattcaattttccaaggaaagaaatgcatcaattgtttagcacacaactcctatcgcctaatgcatcatataaggtgataaagattttaaaacagcaaggaggtggcaaatgcaccggggcttgcctcgaataaacactacgttagtgtttgttagacgtcgatcacttggcgaccatcctttgtcttggcatttgtttagattatccatcttcaggttggtccatcaacatcatctcgtggagaagcttatgcgcagcgatatcttgtggtcgactcaactttggttctccgcatcacatggttaataaacgtacctaaatgatttgcataatgcacatgaatgcatataaacaggaatatcacaaacctaaataatgctacacgacaacgaattaaacacctagcggtgaggcgttgtaccatttcatacggaaacactagttatcgacatacgactaagcgcaataatcacaaaataataatttaacttaccaagatcagatcgatctgaaatcacaagaacgacgacggttgatggcacatattagcaaaagaactggagacgatgatgttcgcggctgcaaggcgaggctgtgtccgttgcgaaggaacagcccgcagccagagcgcccatgcgacgaacaggacaataccgaggaatcagcaacgagaaccatcacggggcaagacgccagggtcaaacacggggtcgattgattcttcaatttcttgttaggcatttcatcaagcaactagcaatcgacacaaccaagcttcgttgtctgagcacgatggagtgtgttgtggaactcgacatactgagcttccaaggtgggcaaccactgagatcctggcgaggccatgcataggggagccgagcgcggtggcactgggcgagtatggatggcgaaacagggtgcgaccgaggagagcattggggaaaaggtgctggtcagaccagagggcaagctcaccagcgtccatggccatgaaccataagtaaatatccaatattcaacaaatttctccataaccagccaggacccttccttctgtatctccacgccacacaccaacatgacgaactctccacaccaatcggactcaatccgagcaacccggcaaaatcgaactcagctcgcagccggcgtcgcgcggaggcaaagcgggcccaagggatgcgagcgtgccgaggcgacgaaggacatgacaggaacatgagaggcgaggcgcttggacatcaaggcaaagagaggaaaaccagagtgcgaccagggatgtgacgaccggtcatccaatgctccatggatttgggcgggcgatgcaggagagggcgagcagggagctccgagcttgaagagcacacggctagcaaggagagggcgcgccaggaagatggggcacggggccgagcagggagccgacacgcgccagagaaggacaacagcggttagcgtcatggggaagaagaggtcgccgggcaccatgggaaggagcaaggtcgagcagaggaagctctggtcggacacttggacaatggaggacgcacgcaggaaagcaccagggagaggcgaggggaatagggagtaggaaccaggggcgcgcgcacggagctcagagagatggggcgagctgcgggggggggggggggggggggggggggggggggacacaagggagagagagaggaggggccgctgggctaggcgagggcca

SEQ ID NO: 9654 - DNA, 6042 bp, Zea Mays
tgccttttgcagggccccatcatccccctagtacataaaaatgaagggtgaagtaacagacaagaaaagtagtcaatcgagatttaagaacaaaagatccaagaagcatgactagttgtgtattttgaccagtcaactatcgtatataaatatagatgtacaagaagcaaagggggaatattttcaaggtattaccaaggaataggtaaaaagtggaagccttatattgttgccctataaaagttgtatgcgctcttctatgctgttgataatcaaaacgaattgttgagaaaattcagtctgtgttatttaaagttagaatgtggcaaaccctagccctagttaggattggtaatgtattaatatagacagagtagttgggccaagcccattacacaagagtatacaggtaattacatgaggactgacccaaaaccctaacgaggttgctaacaccccccgcaatctcagctctatcttgtacagatgttgaggctggatcgaaactcagtgaaaacactccatgacaaccccttggtgaacatgtttgcgaactgcaacgtggtcggggcgctgagaacgcgaacgtcaccggcggcgacacgctcgcggacaaaatgaaggtagatctccatgtgcttcgtgcgctgatgttgcatgggattggagaggtagaccgcgctgatgttgtcgcagtagatgagggtggcgctctggagggggttgtggagctcctggagaagttggcggagccaggaggcctctgccaagctgttggccggtactcggcctcagcgcaagagcgagagacgacgagctgccgcttggcggcccaggagacgaggttggcgtacaggaacacgacataaccaaaagtgggccaacgcgtgtcgagcaactagccccgtcagcgtcgtcggtgtagaccacaagctccgacgtcgaggagggtcgaaggagaaggccatagtcgatggaggcgcggagatagcgaaggatccgcttgagagcggtgagatagggctcccgcaaggtgtgcatgtgacggcacacctgctggacaacgtaggcaatgtcgggcctggagaaggtcagatactgaagtgcaccggtgaggctccggtagaacgtcccatcgtcttcaaagagcttcacctgagtgtcgacaggcatggagcaaggcttgcaatcgaacatgccaacccgctctaggtctctaggatgtcgagagcgtactagcaccggtgtaggaagagaccctgaggcctccgcccggtggtgatgctaaggaagtggtggagaggccccaggtccttcatcgtgaactcgcgcagaagacgacgatcgtgcgctggagaagatcggcattggacgtcgtgagcacgatgtcgtcgacgtagagcaacaggtagacgatgtcgtcatcgcgccgatagatgaacagggacgtgtccgacatggcctcaacaaagtcgagggagctaagtaggaggcggtgcaattgtaccaggctcgcggtgcctgcttgaggccgtacagggagcgattcagtcgtcaggagttgacgaagccggtgggctggttgcagtagacggtctctgtcagagtgtcatggaggaaagcattcttgacatcgagttgatggaccgcctagtcccgagagagggcaagggagaggacagaccgaacggtggcaacttgacgacgaggctaaaggtctcgtcgtagtccactccgggccgctgggtgaagcctcgaaggaccccaaagggccttgtagcagtcaagcaaggcatctgaggtcagcttgtggcgaaaaatccatttgccagtaaccacgttggtgcctagtggacgcgacacccgacaccaggtcccaagtgtggttggccaacagggtcgcatactcctccatagcgcgacgccattgggggtcgacgagggcagcgcgaataggggaggaaacccggaaggcgttcagaggagcattgatcgtcggtaccagccagtcgacggggcaaagaacgtcgaccgcacggcgagtcaccattgggtgaatgtggtcggggtcacgatggatggcgaccggtggtacaccgatgactcggtgaaggaacgagttggcggggcagcgaggaccgacggagcggtccacctgcgatagtggtagatgagggcagggttggcgaagcgagccatatggggcggcaggtgatggggccacaccaaacataggcgaaggcggcggggccacgctcgtcgacagggccacgcatggcgcaagccgaggagacggggccgcgcatggcacgagcgaggtcaacaaggccgcacgtggcgcaggcgaggtctatagggcagcgcatggtgcgagtggaggcgtctgggccgtgaagggcacgagcagggccaaccggagtggaggaagaacaggatcggggtcaaggagggagtcgagatcggtaggcgaggaggatctagcaaggggagagtcatcttcataaaaaacgacatgacgagatatgagaatgcggtgggtgaggaggtcaaggcagcgacaccccttgtggtcagaggagtaaccaaggaaaagacaataggtggagcgatgggagagtttgtggggagcggtggcagaggtgttgggatagcaggcacagccaaatacacgaaggtggtaataggagagggttgtgccatatagggcaaagtggggagtggggtggctcagcaccttcaagggaaggcggttgaggagatgggtagcgatgtttagggcctctagccagcagctggcaaggagagacacttgaaagaggaggcagcggatcatgttggttgtggtgcaaatgattcgattgacccagccgttatggggagaagtgtaagggcacgagaggcgcaactgaacgtcgtgggagaggaaggagcgagacgcggtgttgtcgaactctcgaccgttatcattaaagggcacaaaccgggcgacgaaattgggtggagacccaggcgaagaagtgtgtgagggtggaaaaggtgtcgaacttcaaccaaagcgggaaagtccaaagaaagtgagagaagtcatctagaatgaccaagtagtatttgtaaccatagaggctggagacaggagaagtccagagatcacaatgaacaagatcaaaggcttgagcagccctagacgtggaagtggaaaaaggaagacgagagtgacaaccactgtttaaaaggcgtcgcctacgcctaggcgtccaggcggcagtccaacgccttgtatcgccataccgctttaaaaaccatggtgacaaccgagctgacaagcatgacagaggcgctcagaggagccccggctacaagagatatttgagcggctagaaagctaggacatcacgtcaggtacagggtgcccgagacgacgatgccaaatggtggaggtggtggtagtagcaagagcatgggggaggatacactggtgggggaagtggatggcaagtgaatagagtagagggggtcggagctgccacagcgagcgagcacgtcacgagtgggaaggtgtcgtatggtgagcccccagggatcaaactccatagaacagtggttgtcactagtgaagtgacgaaccgagagaaggggatgagtcaaatggggagcaacaagaacgtcgttaaggtagaagggtcccgaaaaaaccgatacaccacctactgaggtggccgggagggtagaaccgttccccacaacgaaagaagaaggatgtgaggggtgtggaggatggtagtgagataatgaggtagtggtaggagtggtgtggaaggaagctccgaagttgaacacccaatcggtgggagagggagggtggcaaaggcacgtggtgcgaggagagagccaggggaggtgctccgacagagccactaggaggggagggagacaacaaggtctcgatcaccaggaaggcaatcacagcaaaggggaagacaagtggtccaggctcgtagcggcccgcctgaggatggatctctacatggtcgtggagaaaagggtccatggcccgatcaaaagccacaaaggttacccggataagctggccatcatgaaggctgacgcgcacaaagattgtggtggaactggacagagccgggaaagaagtggcaccgacggccagggcaaaggcagggcacccgacgacaagaggagggacgacatggagagtcggggccatgcgcaggctaggataaagaatagacacggtggcggcgccgagaaggccgagggccacaggagcaacgaacgagggaaggctcttaagaggggggcacataggtgatggcggcgggccagagggtcatggtcagcgccacaggcgcaaagcgaggcaacgcagccaccatggggaggacatgggtgcccgcgcccgtggcgtagagggccaccgatgcagtgggaaggggagtagcaggggacacgccgacggtggaagaagttgttggcacagcagccatgcctaggaagaagacaggaggggtgctgctgcaaggagcgggccagcagcggggaggtctagcagagcagtggggaaactcaggggaagcgttgccgccgtcgtcgatgcagatgcaacaggagagcggtggagccctatgctgctacaagagccagatcgcggtgggctcctaaggaatcgaaggcaccaggagctcccaggattgcgtcttctcgcgtcgataaggagggaagggaaggagtcgggacgtgcggatgcgggctccctcctcttctccggcggctgggcgctgtgaaggagccgctgctggcggatccagcggcggggaggagtatgggaggcgctggtgctggcgccctcctcttctccggcgactagatgctggagcagagatggtggaggtgtgaggagtaggaaagggttggatctagatctggggaggagaaggtcagcggcctagggtgaccagcggtgagcagaggtggccggcgggctgagcaagaggtgaccggcggctgtgggtgggagagaggggagagagaactaaacctatctctggtaccaggttagaatgtgggaaaccctaagcagggctggaaatgtattaatatagacaaagtagttgggccaagcacattacacaagggtatacagttaattacatgaggactaacccaaaaccctaacgaggttgctaacatttaatctaacttttgacagcagatagcaatagatagtcaattgacagagaagaaatcaagaaaacatgcacttattagtgggaatatttatcattatggtgtgtgcatacaaaataaaagagattccacatgcagaccagcttttgcatggatatcatacagaaatggaaatcataccctgagggtggtacagtataaaaaaagacatgctactcattttaaacctgtgcatgtatctactacattcagtacgggcctacagagtgcccagcacagatccaacataagagtccagctgaactggaatgaactaaacgatcatggatagtcataggtaacagaaaataatccctactcttatagtcaggtagttataactcatgtctggtgtcatcgaattactaccagagtaccagcaccacaagcatcaacacctaagatattcaacagaatattcccagaggcggttgcagggacaccagctgcttaagctttcaaggtaacagatcgacacagagttcagtcagttttggcatcggcactgaaactactgaacatcattttcgaaaaccgaaaaaggagtttgcaattgtaacttataaagctgcaatatatgaagtattcatcgtgggcagagcttagatcgaccattagcatgggattacggcttcaggagtcaatcaaatcacaaaggtggatagaaccaaaacgacattaaattccctcgctccaaacgccagcctggcagcgcaagcaaccggacccaaattttctgctagagtgatggcgaaatttaacgacaaagcgaagcccacctccacgaagccggcgcggtga

SEQ ID NO: 9655 - DNA, 778 bp, Zea Mays
atcaatcatgcctatgactaaaatgaatgaacaatctttcttataatacatgccttttgtgtttatgagtaacaccaagatacaaatctgaactcagactgagatggctaatggtacagtggtacagatgacttactattaagtcagcatttccatgaatgtcacttatgcttgcatcaagatatctcccaaggaaagaccaaacatagttgacacagaatgagttcgacatggatgtaatacagtgcatccattgatgagacctcctgaacttcaggatattgagagttggtagcggtatattttcactactcaaactgaatcaccaatgtggattaacttgacactggcttcctagtgatccggtttgttgtctgcatcacttcttataagtatgctgccttattcgagagtcagttcaagttttctagttccatattgccttcctcaagacaagctaggaaacaacctattcaattcatacagtcgcatcctccaggcttgcttcatacatgcattaagcttaggaagaaggaaatgaagcaacctcaagaggacaaaggagctagccaatgcaagacatgtatcttgatgaagtaatcggtctggtgaccttgcccacgataacagagaatcatccttttcagcctttttgccatgatcaactatagtaactgaatcctccattctctccaggcatgtagcgtccaatgacacaggattcaggccttcagaattcgaaaaggaaggtgaaatctaggaaaacttcatggaaaag

SEQ ID NO: 9656 - DNA, 581 bp, Zea Mays
gtctagctcatcctctggcagtgtcgggctgatagccttcctcttctggcttcgggcctcccgaagggagagagtctcctgattggggtccagcggttgcagagctgcagccccagttgctgaagctttcttcggcgccatagcgaaggtttatgattgccgaaggtgttcaaaactcaaatagtggaagtgagttcaccggaggtgggcgccaatgttggggacttattctcaaatgctatgagttaagaacaaggcaacacaaaaaatgttaaacgttaaagtctttcgtccttcgaagcattatttcccttggggatataatgatttttggacgaaggttatgaaggacataccttcataaacacaacatataataatgaagaagaaaacatatgaaatatagaggataacgtaaacaattatatattattatcaactcatttctatattattattatggaaaaatagaaatgatatcaaattacaaatgtaccttcggcttaaaagaaggtaaaaatacaagcgtgacgcaaaagcaaatgccaagtcatcgtgaacagtacgggggcactgttcac

SEQ ID NO: 9657 - DNA, 93 bp, Zea Mays
aagatgcaaaagatccttcagccgaagctagcatggttggtggaaaaaattttcaccgatgtctgggacaatggtggtcgagaaatggcccga

SEQ ID NO: 9658 - DNA, 155 bp, Zea Mays
ctggttcaatgtagcgtggccggtgtgtaagaacctttaccctttgtctcttcggcgttggctcgctgggagcggctgaggcagtttcctgagcaggagttgcgctttttcttttttggccccgcgctgggtagtggtagtcggggtacacgaac

SEQ ID NO: 9659 - DNA, 178 bp, Zea Mays
aaagactcaaaaaaggtacgtatgtaaaatttcatgcatcataaagaattgaaccataaaaaacaagtatattacattcagagttacaagatattacacatattacatttcagaagtttttacaataacacttagtcttccctaagtacaacttccgcagcttcgttcaggagttgat

SEQ ID NO: 9660 - DNA, 2815 bp, Zea Mays
gttacgttttgcgtcgcgtcgtcagggacgacggggtgtgtgtgtgtaactgtgtatagtgggatttgaattccggctccgcgtcatgcttcccgcagattcgcgtttctcgcgtgcccgtaccgccctgccgcgccgctcgcccgcccgcccttttctttttcttgacctttctctatttccacattatgctatggtgatgcttcccgcacgtctctgtttttttccacgccgaagtccggatccggcacgagctatcgagcggggcagaaggttcggttcggggtccttcttcaacaaggaaagggagcagcactaccaaatgtggcgcttgtttaatgacctgtgggatgtgctaggatccggattcctctcgtccagatttctctgatccagctgtatcgggaatacgggaccatctcgttggtggcagcgaagcagacatccaccaagaccaaggcaccaatccgcctcctgcgcgcgctccatcgctcttatcgttgacgacacgagcggctgccaattcctgggctcgccattggttggtggcctcgggatctgagagaggaagatggacgacgaggattactcgtgggtgcggcggacgcgcttctcccactccgtcgtccgctccaattccgggagggagcagttcggcgcattcgtcgagcagttcaaccgtggggccgcgctcaggcagaagggctccgcctcggggttcaagctccatggcctcaacatggagccagggacgaggttgtccacatcgtcccttccgacgacgagctcgttctgcgcccagcccaagcccaagcctaaggacatgtcatcttcagacgccaagccggggcagcacgccaaggcagtcagcgatcgcccgtcgtcgcaagaggcatcggcgaggaaggaggacgatgccaaggcttcaaacggaaagaaaggaattggcaaactcagcgtggccgtacctcgggtacccgcggttcagagcgcggaggttgagagcccgggagcactcgagttctccttccaccctgacgagcagagcctgaagctgcagagagcgtgctcaagccctgccccgttcccgcggaagaaaacgcccggcgatgatgccctcacgcgcagctcgtcgctaagtgtgctcggcgaggcgcccaagacgaagcagagggcgaggtctcccctcccgtctcgccacgttgctgaagtgtttcaagaggccaaatcagccaccaagaggttctccactccgccgccgccccggagatccgcgtcttctctagagctgaatggttgtcctccagcgccggtgacggtgagggcaccgggcaagctgaagaataggaaggagggccatgccaacgggaggatgaaggttgctgcaactgcactggaggtactcgagaaatggtccgtcgatcgctcccagctgctcattgggcacagattcgcgtccggggctcacagccggttgttccacggaatctacaaagagcagcctgttgctgtcaagttcatcagacagcctgatgatgaggaagatgcagagctggctgctcagcttgagaagcagttccacaccgaggtcgccactctgtcacgcctcaatcatcctaatgtcatcaagctggttggagcatgcagcagtccaccagtattctgtgtcatcactgaattcctttctggtggttctctgcgagcgtttttgcacaagttggatcacaaagctcttcctctaggcaagatcatctcaattagcttggacatcgcacgcggcatgtcatacattcactcgcagggagttgttcatcgtgatgtgaagccagagaacatcatattcgatgatgtattctgtgcaaagattgttgattttggaatagcttgtgaagaagagtactgtgaccctctggcaaacgacactgggacatttagatggatggctccagagatgatgaagcacaaagcgtacggtcgaaaagtcgacgtctacagctttggccttattttgtgggaaatgttttctggaacgataccatatgaagagctgaacccatttcaagcagctttcgctgtttttgacaagaatgtgaggccggccattcctactagctgcccaacaccagtacgtcttctaattgagcaatgttgggcctcgcatccggagaagaggcctgacttctctcaaatagttcagatactggagaagtttaagagtgttcttgacagagatggcacactcgacaatatgccaagctcgatctgtcaggagactcatgatcacaagaactggcttgctcattgggtccaaaggctcaagcatagccagcctgatctctctgggcctcctccgccaaaactgttgtaactattcaccattcagtaccttctcccttccaaaccctgctaatccgataggcaacagaatgcaatttcaggttattttctgtttatagacaaaaaaaaattagtagtagtagtagcacagttagtgtttgcttcgcttcaccacggtgttctctctttcaatcaatacacaagatgtgaatacaaaggttgctaagaatgcatcttcaagggcttgaaatggttgagatcgtcacataagaactcatctgacttttcatgtttatttaatatagcagccttgccatgtgttggctagtaacagagctttctacatgcttggtggcttggtgttgtttcatactgttcacttcttgtgctgcttaaaaatttcggaattctgtgcacttgtggacatgtaaatgtgcgacggaacaaatttgaatcaaatggagtcacttttctcatc

SEQ ID NO: 9661 - DNA, 3155 bp, Zea Mays
aagcgagcgagcgagcgaggaagctggagcaaaacaagccggtggaccaagtattcggtgacgaagctgaggcgaaggagaggaggaagggaagggccacgatcgaagagaattcatttcgtacagtgctaacgactttgatacagaggcataaacaatctagcctaagagaagaacactggaaccatggtttcaaaatcatactcaaatctgctagacctgacctctggagatggatttgactttcgacaaccttttaagtctcttcctcgtgtcgtaacttctcctggtattatatctgacactgattgggatacaataagtgatggtgattcagttggttcagcatcttctactgagaggaaaataatcgttgccaacttccttccgttgaattgtacaagagatgaaactggggtgctttccttctcattggatcatgatgcgcttctcatgcaacttaaagatagtttttcaaatgagactgatgttgtgtatgtgggcagtttgaaggttcaggtagatcctggtgagcaggaccaagttgcacagaagcttcttagagaatatcgatgcatacctacttttctcccatctgacctacagcagcagttctatcatggcttctgtaaacaacaattatggccactttttcattatatgcttccaatttgccttgacaagggtgagctatttgatcgcagcctgtttcaagcttatgtccgagccaacaaactttttgcagataaagttatggaagcaatcaatgcagatgatgacttcgtttgggttcatgattatcatctcatgttgctccctacattcttgaggaagaggttacaccgaataaagattggtttcttccttcacagtccttttccctcctcagaaatctataggactctgcctgtaagggatgaaatcctgaagtcactgcttaatgctgatctcattggtttccaaacatttgactatgcccgccacttcctatcttgctgtagcagattgctaggcctgcattatgagtcaaaacgtggttacattggaatagagtattttggccgaacagtgagcctgaagatcctttccgtgggtgtccatattggtcggcttgaatctgtcttaaaattgcctgctacagttagtaaggttcaagaaattgaacaaaggtataagggcaagatactgatgttaggtgtagatgacatggacatcttcaaagggataagtctgaaatttcttggactggagcttcttctggacagaaacccaaagcttagagagaaggttgtccttgtacaaatcatcaatccagcaagaagcacagggaaggacgtgcaagaagctattacagaagctgtctctgtggctgaaaggattaatacaaattatggttcttcaagttacaagcctgttgtcctaattgatcaccacataccattttatgaaaagattgcattctatgctgcgtctgattgctgtattgtaaatgctgtgagggatggcatgaacttagtaccatatgagtatactgtttgccgacagggaaatgaggagattgataaactcagaggtcttggcaaagacacccatcacacaagcacacttattgtttcggagtttgtgggttgctccccatctcttagtggtgctttcagggtaaatccttggagtgtcgatgatgtggcggatgccttgtgccgtgcaactgatttgactgaatccgagaaacggctgcggcatgaaaagcattatcgctatgtcagtactcatgatgttgcttactgggcacgcagctttgctcaagatctggaaagagcatgcaaagatcattatagcagaaggtgttgggcgattggattcggtctgaattttagagttattgctctttctcctggcttcagaaagctgtcgtcagagcactttgtttcttcttataacaaggcttctagaagagcaatatttcttgattacgatggcacacttgtgccccagtcatcaatcaacaaagctccaagtgaagaagtcatttccgttcttaacaccttatgtaatgatccaaagaacattgtgtttatagtaagtggacgaggacgtgattcccttgatgagtggttttctccgtgtgagaagcttggtctagcggcagaacatggctattttatcagatggagcaaggaagccgcatgggagtcaagctattcaaggccgcagcaagaatggaagcacattgccgaacctgtgatgcaggtatacacagagacaacagatggatcttcaatcgagtcaaaggaaagcgccctagtatggcactatttggacgcggaccatgatttcggttccttccaagcaaaggagctacaaggtcatcttgagagggtgctatcgaatgagcctgttgttgtgaagtgtggtcattatattgtagaggtgaaaccacagggagttagcaaggggcttgctgtcaacaagctgattcacacactggtcaagaacgggaaggcaccggatttcctgatgtgcgtcggcaacgacagatctgatgaggacatgtttgaaagcatcaacggtatgacctccaacgctgtcttatcacccacaatgccggagctgtttgcctgttcagtcggtcagaagcccagcaaagcaaaatattatgtggacgacaccagcgaagtaatcagattgctcaagaatgtaacccgcatcccctcgcagcggcaggatgtcagtgccagccatgggcgtgtgaccttcagaggcgtgctcgattacgtggactaggcaccaccacttagttactcgaaaaattattagctgggaagcatgtaaattccaccgtcttctgcctctcaatggttcattctaggagggtgtgttaatccagaattgtagtgtagcctacatgaatcgtcaccattacacaaacagcgtaaatgtgttcgccgtttcagggttcaggtgatgtgtgtaggcaattttggtagggaaggggggagctgctgctggaggttcgcggtgtgaaagggaggcctcttgttcaaacagtaattggttgtctgaatctgttctcctgctgctatattgatgatcgtgttagttctaaaatttatctgtgggtgaattgcagcacagcattagcgcttgactcgatt

SEQ ID NO: 9662 - DNA, 1006 bp, Zea Mays
aactttagccacaaatttcacccaaaaccaaaaaaataataatcccaaattaaagaaaaggagcagaagaaaaacaactttcatcgccgtccgccaccggagctcacttcgtcggccttccctcagtgtcaacccccttctcaaaacttgtatttgcacctcagtccctgccggtctgcccggtcgccgcctcgccggaggaagcccctcgtctccttgccctgcggcgggttcatggggttctcgctgtaccccatgaagacgtccacgcggatgctctggagcactagcttcttccgccataagctcagctcctcctcctgcttcctctgaggacgccccacccgcctcgatcgcttcggcggcgggccgctgctgctgcgctgtcctagcatccgttcaagtgtgtgtttgcgttcttaggtttcaagattggcttttgttgcgttcttggcgagacgaagggactagggcgcggacaaagaatcagcatgcatccgagcgcggtcagtttcgactccggcgacgggcggcggcgcggtggcgcgcagatgctgctcttcggcggcggaggcagcgccaacagcaacggcttcttccgaggtgttccgatggcggtcctggccatggacgacgcgacgcgcgtgggcaagcggcccttcttcacgacacacgaggagctcctggaggaggagtactacgacgagcaggcgccggagaagaagcgccgtctgacggcggagcaggtgcagctgctggagcggagcttcgaggaagagaacaagctggagcctgagcgcaagaccgagctggctcgccgcctggggatggcgccccgccaggtggccgtgtggttccagaaccgccgcgcgcgttggaagacaaagcagctcgagaccgactatgaccgcctcaaggctgcctacaacgcgctcgccgctgaccaccagggcctcctggccgacaacgatagcctccgggcacaggtcttggaaatcaaattttc

SEQ ID NO: 9663 - DNA, 911 bp, Zea Mays
tggctccaactccattcgctgatgacgatgtcagagtgtttttggtttgaggaggagattgaagagttaattctctctctgtctcccaactcccaagctgagcccacgatactctctatctacgcctatggttgagcttgcagtataactgatagtgtgtgtgtgcgcctgtcctgtgtctccataaatacaaccgccaccggtagtccggtacagagagcgagtacagatctgcccacccgctgcgttcctataccgccttcctcttgcttcgcctcctcgtcctcgtcctccaacaccaccagctgagaagacccgatcgagaggtaattaacgtcgtccatggtgatgatgggtcagctggggcgtctggtggacggcatcaagtccaggctgcgcgccggcgccggcaccggaggcaacaagaggggcggggcgaggaaggcggcggcgacgacgacgaccacggggtacgacaaggtggagaagacggagagcatgcgtgtggagatccgcagccgccaggcgcgcaagctcatcgccaagaacctcgacgccgccggctccgtcggacgcaccggccggaccaacaagcgcttcttcctcgccttctgatgcatcatcgatcgagcgtggttcgtcgtctgaggcccctgaactgaacccgttggatacggtacccagcgggtagcaaacctcaggcacgccttctcgccttcgtcgtcctcgcccgtcgccggccgccttatatcgtcatggtagcgccgcgcggggcgggcgaggagctccgctagctctgcgggcgtcggaggcgactgacaggggcgcgtccaacttcgtcgccttccaacgctcgtgacgtgagtgaattcatgcggactcgccacttgcggagagtcggagagcgcgac

SEQ ID NO: 9664 - DNA, 3192 bp, Zea Mays
attgagaggatttgtaccatggaccttggcagtgtgttggttagcatttagagcggtggtcgtgccagccattactccccacaacaagaggtgccggctcatgtttgattctgcagctctagatcgtttgctccctcactgagtgtgatgcttcagctctgggttgttccaaaaacttgctaaggtatcatgattttctgccgtttaaatttcatatgccggctatatctttttttttctggtttcatataaacttctttgttgataagaagtgtagagtagtgacatatttgcctgagctcttattacctgagtagtgcattgcaatggtgtgagctataccaagtttctcaaataaccaatgcaagtgtgttatcctgtccatgaggttgagaggtaaggccagctttgcttagctcccttttcatttgagcaagatattgcttctgtcaatgttcactctggtatttgtttatggcttttggtatcttctgcttacacatggccacattctctgattctatatgtgttatgaggtttcatttgttcactatatgatttacttgtaggtatacttactgatgtggttgcataggtgtcatttgtctctctctgcaggaatgtctcgttatcctgcaccgtatcctatgattcgtcctggttttgttccacgtccaatgccgccgcctggtgttgtgccaattcaacgaccaacaataatttctgggatccgggctattcctcctttggtagccccaactgcccggccacctgctccagctgttaagctggcagataaaccgccaaccgcagtttatgttgggaagatcgccccaacagtggacagtgatttccttctttcacttcttcggctttgtggatctgtcaagagttggaagcgtgcccaagatcctagtaatggaaaacctaaaggttttgggttttgtgaatttgaatctgctgaaggcatccttcgtgcgacacggcttctcaacaaattgagcattgatggtcaggaactggtgattaatataaatgatgccaccaaggaatacctgaagaaacatgttgagggaaagaagagagcacaagagaaggaaaaagaaacagaagatgcaagcggggatggaactacagctgttgctgaaaatgaatcatcaaaacctgtccctgatgaattggatgagacaggagatgctggagataagtacagggaagacaacactgataaatttgggattgttactgacgaagactctcaaactgacaaagatgtcgcagaaaaaataagcaatatgattgaggagtggttaaagactagaccgccacccccaccttcaccagttcaaccatctgctgatagctctggcgtagataaggcaaaaaatgattctgatgataagaatgctgctgatgctgataaaagggcagctaatgaaactgagagatctgaaactgcctctcctgataagaggaaggatagagagcatgataaggacaaacgggacaaagatcttgaaaggcatgaccgtgaacgtgaaagagtacggagggatagagagaaggatcataagcatagagaagctgataggctctacagggatcgccttaaggagtgggaatctagggaaagagagagagaatatcagaggtatagtgaaaaggagaaagaaagagatagagatcataaccgcagaagggagatcctgaagcaggaagatgagagcgatgacgaggataataggaaaaggaaacgaaggagtattagctcacttgaagataggaagaggaggaggcaacgtgaaaaggaggaagatttggcagataaaataagggaggaggaggaaattgcagaagcaaggaggctggctgtagagttgcaacggcaagcagatgaagcagctgcggcggcggctgcagccgccgaagagtctgcatcacttatggagattgatggtgatgacgaaaaggaaacagatgcacaaaacaagtcggctgttgtggaagctgataacatctcgagctttgctaatggtgttggtgctgtaagggaaataatggtgaggaaacatgtatgacacctggtcaaaccgcagatactaagcaaaacaacaatgttccagcaaagaaactgggttttggtttgattggcttgggcaaaaggacatctgttccatcagtttttgctgtagaggatgacgaaaataatgttgataaaagcataagacctctagtacctatcgattactccactgaagaattacaagctgtacatgctaattcttctactggggcaaatgtcacagcagctgccgagtttgccaagcgcatctcagtttctaattcaaaggaagagaaggctgaagctgagaaggataggaataggagatccagtgaagctcgtcctaatgatgagcgaagagagaagctacatgatcgcgagaaggataagcccaagtcagagaacaagaagattctggatgcaaagcaactaattgatatgatcccaaggacaaaggaagagctttttgcctatgatataaactgggcgatatatgacaagcatgagttgcaagagagaatgaggccttggatttcaaaaaagataattgaatttcttggcgaggaggaatcaactttggtggactatattgtttcctgcaccaaagaccatgttcaggctgaaaagatgctagatcttctacagtcgattttcgatgttgaggccgagatgtttgtcctcaagatgtggaggatgcttatatttgagatcaagaaagtcgaatctggactatcaggaagagcaaagtcatgaagcgaagcctgttaccctgtatgacctctgatctgcattactcatcaactgtgaccacacttgtaaggtcatactgcactacaagtatcaaaaaccatttttagtgacagagttgatggatctttttacttgtttcttgtacaaatgcatacgagagttaatgagatactgtgcgtaatatttttattttgatagattgcataactgtgtttggcacagttcacacgagtcaactgcctacttttgcttaacttgttctctggtgaacgaagaatgtcaatgctggcagtagccacaagtgatccctaatcatacatggtgtgtgtgcaaagatgttcgtataatcgtatttcacttttgcttctgtactgtagcag

SEQ ID NO: 9665 - DNA, 3276 bp, Zea Mays
accggtcttcatgcccgagatcgaaatcgaacccaaacggccaaaccaaccatcgtctactcggcggctgggctagcaccctccctaccaccatggcggccgtcgtgcctccgcccgacaacctggacccgcagccggctactcccccagccgccgctccttccgccacgctcaccccgcctcccgccgccacctccaccccaccaacccccttgacgccgggccccgcggcgcctagcccaaaccctaacctaccccctgcccctgcccctgcccctgcccccgcccccgcttccacgcctccggcggcagtcgcgccaccgatgcccccagctccgatctccttcgctgctaccttccgtccactcggtgccccagcgccaccgccgccgtaccaggtcccgcagtacgtcgcggtgccggcgaacccgggctacccgatgcagccgccgggcgtccccgtcgttatgcctccgggcgccgtgcggctgccggccatgtacgggccgccccagccgggagtatacatgccgcagcagggcgctgcgatcccccatcccgcggtggtcgtgccagccattactccccacaacaagaggtgccggctcatgtttgattctgcagctctagatcgtttgctccctcactgagtgtgatgcttcagctctgggttgttccaaaaacttgctaaggaatgtctcgttatcctgcaccgtatcctatgattcgtcctggttttgttccacgtccaatgccgccgcctggtgttgtgccaattcaacgaccaacaataatttctgggatccgggctattcctcctttggtagccccaactgcccggccacctgctccagctgttaagctggcagataaaccgccaaccgcagtttatgttgggaagatcgccccaacagtggacagtgatttccttctttcacttcttcggctttgtggatctgtcaagagttggaagcgtgcccaagatcctagtaatggaaaacctaaaggttttgggttttgtgaatttgaatctgctgaaggcatccttcgtgcgacacggcttctcaacaaattgagcattgatggtcaggaactggtgattaatataaatgatgccaccaaggaatacctgaagaaacatgttgagggaaagaagagagcacaagagaaggaaaaagaaacagaagatgcaagcggggatggaactacagctgttgctgaaaatgaatcatcaaaacctgtccctgatgaattggatgagacaggagatgctggagataagtacagggaagacaacactgataaatttgggattgttactgacgaagactctcaaactgacaaagatgtcgcagaaaaaataagcaatatgattgaggagtggttaaagactagaccgccacccccaccttcaccagttcaaccatctgctgatagctctggcgtagataaggcaaaaaatgattctgatgataagaatgctgctgatgctgataaaagggcagctaatgaaactgagagatctgaaactgcctctcctgataagaggaaggatagagagcatgataaggacaaacgggacaaagatcttgaaaggcatgaccgtgaacgtgaaagagtacggagggatagagagaaggatcataagcatagagaagctgataggctctacagggatcgccttaaggagtgggaatctagggaaagagagagagaatatcagaggtatagtgaaaaggagaaagaaagagatagagatcataaccgcagaagggagatcctgaagcaggaagatgagagcgatgacgaggataataggaaaaggaaacgaaggagtattagctcacttgaagataggaagaggaggaggcaacgtgaaaaggaggaagatttggcagataaaataagggaggaggaggaaattgcagaagcaaggaggctggctgtagagttgcaacggcaagcagatgaagcagctgcggcggcggctgcagccgccgaagagtctgcatcacttatggagattgatggtgatgacgaaaaggaaacagatgcacaaaacaagtcggctgttgtggaagctgataacatctcgagctttgctaatggtgttggtgctggtcgacttagtaagggaaataatggtgaggaaacatgtatgacacctggtcaaaccgcagatactaagcaaaacaacaatgttccagcaaagaaactgggttttggtttgattggcttgggcaaaaggacatctgttccatcagtttttgctgtagaggatgacgaaaataatgttgataaaagcataagacctctagtacctatcgattactccactgaagaattacaagctgtacatgctaattcttctactggggcaaatgtcacagcagctgccgagtttgccaagcgcatctcagtttctaattcaaaggaagagaaggctgaagctgagaaggataggaataggagatccagtgaagctcgtcctaatgatgagcgaagagagaagctacatgatcgcgagaaggataagcccaagtcagagaacaagaagattctggatgcaaagcaactaattgatatgatcccaaggacaaaggaagagctttttgcctatgatataaactgggcgatatatgacaagcatgagttgcaagagagaatgaggccttggatttcaaaaaagataattgaatttcttggcgaggaggaatcaactttggtggactatattgtttcctgcaccaaagaccatgttcaggctgaaaagatgctagatcttctacagtcgattttcgatgttgaggccgagatgtttgtcctcaagatgtggaggatgcttatatttgagatcaagaaagtcgaatctggactatcaggaagagcaaagtcatgaagcgaagcctgttaccctgtatgacctctgatctgcattactcatcaactgtgaccacacttgtaaggtcatactgcactacaagtatcaaaaaccatttttagtgacagagttgatggatctttttacttgtttcttgtacaaatgcatacgagagttaatgagatactgtgcgtaatatttttattttgatagattgcataactgtgtttggcacagttcacacgagtcaactgcctacttttgcttaacttgttctctggtgaacgaagaatgtcaatgctggcagtagccacaagtgatccctaatcatacatggtgtgtgtgcaaagatgttcgtataatcgtatttcacttttgcttctgtactgtagcag

SEQ ID NO: 9666 - DNA, 3767 bp, Zea Mays
accggtcttcatgcccgagatcgaaatcgaacccaaacggccaaaccaaccatcgtctactcggcggctgggctagcaccctccctaccaccatggcggccgtcgtgcctccgcccgacaacctggacccgcagccggctactcccccagccgccgctccttccgccacgctcaccccgcctcccgccgccacctccaccccaccaacccccttgacgccgggccccgcggcgcctagcccaaaccctaacctaccccctgcccctgcccctgcccctgcccccgcccccgcttccacgcctccggcggcagtcgcgccaccgatgcccccagctccgatctccttcgctgctaccttccgtccactcggtgccccagcgccaccgccgccgtaccaggtcccgcagtacgtcgcggtgccggcgaacccgggctacccgatgcagccgccgggcgtccccgtcgttatgcctccgggcgccgtgcggctgccggccatgtacgggccgccccagccgggagtatacatgccgcagcagggcgctgcgatcccccatcccggagaattgagaggatttgtaccatggaccttggcagtgtgttggttagcatttagagcggtggtcgtgccagccattactccccacaacaagaggtgccggctcatgtttgattctgcagctctagatcgtttgctccctcactgagtgtgatgcttcagctctgggttgttccaaaaacttgctaaggtatcatgattttctgccgtttaaatttcatatgccggctatatctttttttttctggtttcatataaacttctttgttgataagaagtgtagagtagtgacatatttgcctgagctcttattacctgagtagtgcattgcaatggtgtgagctataccaagtttctcaaataaccaatgcaagtgtgttatcctgtccatgaggttgagaggtaaggccagctttgcttagctcccttttcatttgagcaagatattgcttctgtcaatgttcactctggtatttgtttatggcttttggtatcttctgcttacacatggccacattctctgattctatatgtgttatgaggtttcatttgttcactatatgatttacttgtaggtatacttactgatgtggttgcataggtgtcatttgtctctctctgcaggaatgtctcgttatcctgcaccgtatcctatgattcgtcctggttttgttccacgtccaatgccgccgcctggtgttgtgccaattcaacgaccaacaataatttctgggatccgggctattcctcctttggtagccccaactgcccggccacctgctccagctgttaagctggcagataaaccgccaaccgcagtttatgttgggaagatcgccccaacagtggacagtgatttccttctttcacttcttcggctttgtggatctgtcaagagttggaagcgtgcccaagatcctagtaatggaaaacctaaaggttttgggttttgtgaatttgaatctgctgaaggcatccttcgtgcgacacggcttctcaacaaattgagcattgatggtcaggaactggtgattaatataaatgatgccaccaaggaatacctgaagaaacatgttgagggaaagaagagagcacaagagaaggaaaaagaaacagaagatgcaagcggggatggaactacagctgttgctgaaaatgaatcatcaaaacctgtccctgatgaattggatgagacaggagatgctggagataagtacagggaagacaacactgataaatttgggattgttactgacgaagactctcaaactgacaaagatgtcgcagaaaaaataagcaatatgattgaggagtggttaaagactagaccgccacccccaccttcaccagttcaaccatctgctgatagctctggcgtagataaggcaaaaaatgattctgatgataagaatgctgctgatgctgataaaagggcagctaatgaaactgagagatctgaaactgcctctcctgataagaggaaggatagagagcatgataaggacaaacgggacaaagatcttgaaaggcatgaccgtgaacgtgaaagagtacggagggatagagagaaggatcataagcatagagaagctgataggctctacagggatcgccttaaggagtgggaatctagggaaagagagagagaatatcagaggtatagtgaaaaggagaaagaaagagatagagatcataaccgcagaagggagatcctgaagcaggaagatgagagcgatgacgaggataataggaaaaggaaacgaaggagtattagctcacttgaagataggaagaggaggaggcaacgtgaaaaggaggaagatttggcagataaaataagggaggaggaggaaattgcagaagcaaggaggctggctgtagagttgcaacggcaagcagatgaagcagctgcggcggcggctgcagccgccgaagagtctgcatcacttatggagattgatggtgatgacgaaaaggaaacagatgcacaaaacaagtcggctgttgtggaagctgataacatctcgagctttgctaatggtgttggtgctggtcgacttagtaagggaaataatggtgaggaaacatgtatgacacctggtcaaaccgcagatactaagcaaaacaacaatgttccagcaaagaaactgggttttggtttgattggcttgggcaaaaggacatctgttccatcagtttttgctgtagaggatgacgaaaataatgttgataaaagcataagacctctagtacctatcgattactccactgaagaattacaagctgtacatgctaattcttctactggggcaaatgtcacagcagctgccgagtttgccaagcgcatctcagtttctaattcaaaggaagagaaggctgaagctgagaaggataggaataggagatccagtgaagctcgtcctaatgatgagcgaagagagaagctacatgatcgcgagaaggataagcccaagtcagagaacaagaagattctggatgcaaagcaactaattgatatgatcccaaggacaaaggaagagctttttgcctatgatataaactgggcgatatatgacaagcatgagttgcaagagagaatgaggccttggatttcaaaaaagataattgaatttcttggcgaggaggaatcaactttggtggactatattgtttcctgcaccaaagaccatgttcaggctgaaaagatgctagatcttctacagtcgattttcgatgttgaggccgagatgtttgtcctcaagatgtggaggatgcttatatttgagatcaagaaagtcgaatctggactatcaggaagagcaaagtcatgaagcgaagcctgttaccctgtatgacctctgatctgcattactcatcaactgtgaccacacttgtaaggtcatactgcactacaagtatcaaaaaccatttttagtgacagagttgatggatctttttacttgtttcttgtacaaatgcatacgagagttaatgagatactgtgcgtaatatttttattttgatagattgcataactgtgtttggcacagttcacacgagtcaactgcctacttttgcttaacttgttctctggtgaacgaagaatgtcaatgctggcagtagccacaagtgatccctaatcatacatggtgtgtgtgcaaagatgttcgtataatcgtatttcacttttgcttctgtactgtagcag

SEQ ID NO: 9667 - DNA, 3577 bp, Zea Mays
accggtcttcatgcccgagatcgaaatcgaacccaaacggccaaaccaaccatcgtctactcggcggctgggctagcaccctccctaccaccatggcggccgtcgtgcctccgcccgacaacctggacccgcagccggctactcccccagccgccgctccttccgccacgctcaccccgcctcccgccgccacctccaccccaccaacccccttgacgccgggccccgcggcgcctagcccaaaccctaacctaccccctgcccctgcccctgcccctgcccccgcccccgcttccacgcctccggcggcagtcgcgccaccgatgcccccagctccgatctccttcgctgctaccttccgtccactcggtgccccagcgccaccgccgccgtaccaggtcccgcagtacgtcgcggtgccggcgaacccgggctacccgatgcagccgccgggcgtccccgtcgttatgcctccgggcgccgtgcggctgccggccatgtacgggccgccccagccgggagtatacatgccgcagcagggcgctgcgatcccccatcccgcggtggtcgtgccagccattactccccacaacaagaggtgccggctcatgtttgattctgcagctctagatcgtttgctccctcactgagtgtgatgcttcagctctgggttgttccaaaaacttgctaagtgcattgcaatggtgtgagctataccaagtttctcaaataaccaatgcaagtgtgttatcctgtccatgaggttgagaggtaaggccagctttgcttagctcccttttcatttgagcaagatattgcttctgtcaatgttcactctggtatttgtttatggcttttggtatcttctgcttacacatggccacattctctgattctatatgtgttatgaggtttcatttgttcactatatgatttacttgtaggtatacttactgatgtggttgcataggtgtcatttgtctctctctgcaggaatgtctcgttatcctgcaccgtatcctatgattcgtcctggttttgttccacgtccaatgccgccgcctggtgttgtgccaattcaacgaccaacaataatttctgggatccgggctattcctcctttggtagccccaactgcccggccacctgctccagctgttaagctggcagataaaccgccaaccgcagtttatgttgggaagatcgccccaacagtggacagtgatttccttctttcacttcttcggctttgtggatctgtcaagagttggaagcgtgcccaagatcctagtaatggaaaacctaaaggttttgggttttgtgaatttgaatctgctgaaggcatccttcgtgcgacacggcttctcaacaaattgagcattgatggtcaggaactggtgattaatataaatgatgccaccaaggaatacctgaagaaacatgttgagggaaagaagagagcacaagagaaggaaaaagaaacagaagatgcaagcggggatggaactacagctgttgctgaaaatgaatcatcaaaacctgtccctgatgaattggatgagacaggagatgctggagataagtacagggaagacaacactgataaatttgggattgttactgacgaagactctcaaactgacaaagatgtcgcagaaaaaataagcaatatgattgaggagtggttaaagactagaccgccacccccaccttcaccagttcaaccatctgctgatagctctggcgtagataaggcaaaaaatgattctgatgataagaatgctgctgatgctgataaaagggcagctaatgaaactgagagatctgaaactgcctctcctgataagaggaaggatagagagcatgataaggacaaacgggacaaagatcttgaaaggcatgaccgtgaacgtgaaagagtacggagggatagagagaaggatcataagcatagagaagctgataggctctacagggatcgccttaaggagtgggaatctagggaaagagagagagaatatcagaggtatagtgaaaaggagaaagaaagagatagagatcataaccgcagaagggagatcctgaagcaggaagatgagagcgatgacgaggataataggaaaaggaaacgaaggagtattagctcacttgaagataggaagaggaggaggcaacgtgaaaaggaggaagatttggcagataaaataagggaggaggaggaaattgcagaagcaaggaggctggctgtagagttgcaacggcaagcagatgaagcagctgcggcggcggctgcagccgccgaagagtctgcatcacttatggagattgatggtgatgacgaaaaggaaacagatgcacaaaacaagtcggctgttgtggaagctgataacatctcgagctttgctaatggtgttggtgctggtcgacttagtaagggaaataatggtgaggaaacatgtatgacacctggtcaaaccgcagatactaagcaaaacaacaatgttccagcaaagaaactgggttttggtttgattggcttgggcaaaaggacatctgttccatcagtttttgctgtagaggatgacgaaaataatgttgataaaagcataagacctctagtacctatcgattactccactgaagaattacaagctgtacatgctaattcttctactggggcaaatgtcacagcagctgccgagtttgccaagcgcatctcagtttctaattcaaaggaagagaaggctgaagctgagaaggataggaataggagatccagtgaagctcgtcctaatgatgagcgaagagagaagctacatgatcgcgagaaggataagcccaagtcagagaacaagaagattctggatgcaaagcaactaattgatatgatcccaaggacaaaggaagagctttttgcctatgatataaactgggcgatatatgacaagcatgagttgcaagagagaatgaggccttggatttcaaaaaagataattgaatttcttggcgaggaggaatcaactttggtggactatattgtttcctgcaccaaagaccatgttcaggctgaaaagatgctagatcttctacagtcgattttcgatgttgaggccgagatgtttgtcctcaagatgtggaggatgcttatatttgagatcaagaaagtcgaatctggactatcaggaagagcaaagtcatgaagcgaagcctgttaccctgtatgacctctgatctgcattactcatcaactgtgaccacacttgtaaggtcatactgcactacaagtatcaaaaaccatttttagtgacagagttgatggatctttttacttgtttcttgtacaaatgcatacgagagttaatgagatactgtgcgtaatatttttattttgatagattgcataactgtgtttggcacagttcacacgagtcaactgcctacttttgcttaacttgttctctggtgaacgaagaatgtcaatgctggcagtagccacaagtgatccctaatcatacatggtgtgtgtgcaaagatgttcgtataatcgtatttcacttttgcttctgtactgtagcag

SEQ ID NO: 9668 - DNA, 3727 bp, Zea Mays
accggtcttcatgcccgagatcgaaatcgaacccaaacggccaaaccaaccatcgtctactcggcggctgggctagcaccctccctaccaccatggcggccgtcgtgcctccgcccgacaacctggacccgcagccggctactcccccagccgccgctccttccgccacgctcaccccgcctcccgccgccacctccaccccaccaacccccttgacgccgggccccgcggcgcctagcccaaaccctaacctaccccctgcccctgcccctgcccctgcccccgcccccgcttccacgcctccggcggcagtcgcgccaccgatgcccccagctccgatctccttcgctgctaccttccgtccactcggtgccccagcgccaccgccgccgtaccaggtcccgcagtacgtcgcggtgccggcgaacccgggctacccgatgcagccgccgggcgtccccgtcgttatgcctccgggcgccgtgcggctgccggccatgtacgggccgccccagccgggagtatacatgccgcagcagggcgctgcgatcccccatcccgcggtggtcgtgccagccattactccccacaacaagaggtgccggctcatgtttgattctgcagctctagatcgtttgctccctcactgagtgtgtttctttatgtacttagatgcttcagctctgggttgttccaaaaacttgctaaggtatcatgattttctgccgtttaaatttcatatgccggctatatctttttttttctggtttcatataaacttctttgttgataagaagtgtagagtagtgacatatttgcctgagctcttattacctgagtagtgcattgcaatggtgtgagctataccaagtttctcaaataaccaatgcaagtgtgttatcctgtccatgaggttgagaggtaaggccagctttgcttagctcccttttcatttgagcaagatattgcttctgtcaatgttcactctggtatttgtttatggcttttggtatcttctgcttacacatggccacattctctgattctatatgtgttatgaggtttcatttgttcactatatgatttacttgtaggtatacttactgatgtggttgcataggtgtcatttgtctctctctgcaggaatgtctcgttatcctgcaccgtatcctatgattcgtcctggttttgttccacgtccaatgccgccgcctggtgttgtgccaattcaacgaccaacaataatttctgggatccgggctattcctcctttggtagccccaactgcccggccacctgctccagctgttaagctggcagataaaccgccaaccgcagtttatgttgggaagatcgccccaacagtggacagtgatttccttctttcacttcttcggctttgtggatctgtcaagagttggaagcgtgcccaagatcctagtaatggaaaacctaaaggttttgggttttgtgaatttgaatctgctgaaggcatccttcgtgcgacacggcttctcaacaaattgagcattgatggtcaggaactggtgattaatataaatgatgccaccaaggaatacctgaagaaacatgttgagggaaagaagagagcacaagagaaggaaaaagaaacagaagatgcaagcggggatggaactacagctgttgctgaaaatgaatcatcaaaacctgtccctgatgaattggatgagacaggagatgctggagataagtacagggaagacaacactgataaatttgggattgttactgacgaagactctcaaactgacaaagatgtcgcagaaaaaataagcaatatgattgaggagtggttaaagactagaccgccacccccaccttcaccagttcaaccatctgctgatagctctggcgtagataaggcaaaaaatgattctgatgataagaatgctgctgatgctgataaaagggcagctaatgaaactgagagatctgaaactgcctctcctgataagaggaaggatagagagcatgataaggacaaacgggacaaagatcttgaaaggcatgaccgtgaacgtgaaagagtacggagggatagagagaaggatcataagcatagagaagctgataggctctacagggatcgccttaaggagtgggaatctagggaaagagagagagaatatcagaggtatagtgaaaaggagaaagaaagagatagagatcataaccgcagaagggagatcctgaagcaggaagatgagagcgatgacgaggataataggaaaaggaaacgaaggagtattagctcacttgaagataggaagaggaggaggcaacgtgaaaaggaggaagatttggcagataaaataagggaggaggaggaaattgcagaagcaaggaggctggctgtagagttgcaacggcaagcagatgaagcagctgcggcggcggctgcagccgccgaagagtctgcatcacttatggagattgatggtgatgacgaaaaggaaacagatgcacaaaacaagtcggctgttgtggaagctgataacatctcgagctttgctaatggtgttggtgctggtcgacttagtaagggaaataatggtgaggaaacatgtatgacacctggtcaaaccgcagatactaagcaaaacaacaatgttccagcaaagaaactgggttttggtttgattggcttgggcaaaaggacatctgttccatcagtttttgctgtagaggatgacgaaaataatgttgataaaagcataagacctctagtacctatcgattactccactgaagaattacaagctgtacatgctaattcttctactggggcaaatgtcacagcagctgccgagtttgccaagcgcatctcagtttctaattcaaaggaagagaaggctgaagctgagaaggataggaataggagatccagtgaagctcgtcctaatgatgagcgaagagagaagctacatgatcgcgagaaggataagcccaagtcagagaacaagaagattctggatgcaaagcaactaattgatatgatcccaaggacaaaggaagagctttttgcctatgatataaactgggcgatatatgacaagcatgagttgcaagagagaatgaggccttggatttcaaaaaagataattgaatttcttggcgaggaggaatcaactttggtggactatattgtttcctgcaccaaagaccatgttcaggctgaaaagatgctagatcttctacagtcgattttcgatgttgaggccgagatgtttgtcctcaagatgtggaggatgcttatatttgagatcaagaaagtcgaatctggactatcaggaagagcaaagtcatgaagcgaagcctgttaccctgtatgacctctgatctgcattactcatcaactgtgaccacacttgtaaggtcatactgcactacaagtatcaaaaaccatttttagtgacagagttgatggatctttttacttgtttcttgtacaaatgcatacgagagttaatgagatactgtgcgtaatatttttattttgatagattgcataactgtgtttggcacagttcacacgagtcaactgcctacttttgcttaacttgttctctggtgaacgaagaatgtcaatgctggcagtagccacaagtgatccctaatcatacatggtgtgtgtgcaaagatgttcgtataatcgtatttcacttttgcttctgtactgtagcag

SEQ ID NO: 9669 - DNA, 3423 bp, Zea Mays
accggtcttcatgcccgagatcgaaatcgaacccaaacggccaaaccaaccatcgtctactcggcggctgggctagcaccctccctaccaccatggcggccgtcgtgcctccgcccgacaacctggacccgcagccggctactcccccagccgccgctccttccgccacgctcaccccgcctcccgccgccacctccaccccaccaacccccttgacgccgggccccgcggcgcctagcccaaaccctaacctaccccctgcccctgcccctgcccctgcccccgcccccgcttccacgcctccggcggcagtcgcgccaccgatgcccccagctccgatctccttcgctgctaccttccgtccactcggtgccccagcgccaccgccgccgtaccaggtcccgcagtacgtcgcggtgccggcgaacccgggctacccgatgcagccgccgggcgtccccgtcgttatgcctccgggcgccgtgcggctgccggccatgtacgggccgccccagccgggagtatacatgccgcagcagggcgctgcgatcccccatcccgcggtggtcgtgccagccattactccccacaacaagaggtgccggctcatgtttgattctgcagctctagatcgtttgctccctcactgagtgtgatgcttcagctctgggttgttccaaaaacttgctaagtgtagagtagtgacatatttgcctgagctcttattacctgagtagtgcattgcaatggtgtgagctataccaagtttctcaaataaccaatgcaagtgtgttatcctgtccatgaggttgagaggtgtcatttgtctctctctgcaggaatgtctcgttatcctgcaccgtatcctatgattcgtcctggttttgttccacgtccaatgccgccgcctggtgttgtgccaattcaacgaccaacaataatttctgggatccgggctattcctcctttggtagccccaactgcccggccacctgctccagctgttaagctggcagataaaccgccaaccgcagtttatgttgggaagatcgccccaacagtggacagtgatttccttctttcacttcttcggctttgtggatctgtcaagagttggaagcgtgcccaagatcctagtaatggaaaacctaaaggttttgggttttgtgaatttgaatctgctgaaggcatccttcgtgcgacacggcttctcaacaaattgagcattgatggtcaggaactggtgattaatataaatgatgccaccaaggaatacctgaagaaacatgttgagggaaagaagagagcacaagagaaggaaaaagaaacagaagatgcaagcggggatggaactacagctgttgctgaaaatgaatcatcaaaacctgtccctgatgaattggatgagacaggagatgctggagataagtacagggaagacaacactgataaatttgggattgttactgacgaagactctcaaactgacaaagatgtcgcagaaaaaataagcaatatgattgaggagtggttaaagactagaccgccacccccaccttcaccagttcaaccatctgctgatagctctggcgtagataaggcaaaaaatgattctgatgataagaatgctgctgatgctgataaaagggcagctaatgaaactgagagatctgaaactgcctctcctgataagaggaaggatagagagcatgataaggacaaacgggacaaagatcttgaaaggcatgaccgtgaacgtgaaagagtacggagggatagagagaaggatcataagcatagagaagctgataggctctacagggatcgccttaaggagtgggaatctagggaaagagagagagaatatcagaggtatagtgaaaaggagaaagaaagagatagagatcataaccgcagaagggagatcctgaagcaggaagatgagagcgatgacgaggataataggaaaaggaaacgaaggagtattagctcacttgaagataggaagaggaggaggcaacgtgaaaaggaggaagatttggcagataaaataagggaggaggaggaaattgcagaagcaaggaggctggctgtagagttgcaacggcaagcagatgaagcagctgcggcggcggctgcagccgccgaagagtctgcatcacttatggagattgatggtgatgacgaaaaggaaacagatgcacaaaacaagtcggctgttgtggaagctgataacatctcgagctttgctaatggtgttggtgctggtcgacttagtaagggaaataatggtgaggaaacatgtatgacacctggtcaaaccgcagatactaagcaaaacaacaatgttccagcaaagaaactgggttttggtttgattggcttgggcaaaaggacatctgttccatcagtttttgctgtagaggatgacgaaaataatgttgataaaagcataagacctctagtacctatcgattactccactgaagaattacaagctgtacatgctaattcttctactggggcaaatgtcacagcagctgccgagtttgccaagcgcatctcagtttctaattcaaaggaagagaaggctgaagctgagaaggataggaataggagatccagtgaagctcgtcctaatgatgagcgaagagagaagctacatgatcgcgagaaggataagcccaagtcagagaacaagaagattctggatgcaaagcaactaattgatatgatcccaaggacaaaggaagagctttttgcctatgatataaactgggcgatatatgacaagcatgagttgcaagagagaatgaggccttggatttcaaaaaagataattgaatttcttggcgaggaggaatcaactttggtggactatattgtttcctgcaccaaagaccatgttcaggctgaaaagatgctagatcttctacagtcgattttcgatgttgaggccgagatgtttgtcctcaagatgtggaggatgcttatatttgagatcaagaaagtcgaatctggactatcaggaagagcaaagtcatgaagcgaagcctgttaccctgtatgacctctgatctgcattactcatcaactgtgaccacacttgtaaggtcatactgcactacaagtatcaaaaaccatttttagtgacagagttgatggatctttttacttgtttcttgtacaaatgcatacgagagttaatgagatactgtgcgtaatatttttattttgatagattgcataactgtgtttggcacagttcacacgagtcaactgcctacttttgcttaacttgttctctggtgaacgaagaatgtcaatgctggcagtagccacaagtgatccctaatcatacatggtgtgtgtgcaaagatgttcgtataatcgtatttcacttttgcttctgtactgtagcag

SEQ ID NO: 9670 - DNA, 3299 bp, Zea Mays
accggtcttcatgcccgagatcgaaatcgaacccaaacggccaaaccaaccatcgtctactcggcggctgggctagcaccctccctaccaccatggcggccgtcgtgcctccgcccgacaacctggacccgcagccggctactcccccagccgccgctccttccgccacgctcaccccgcctcccgccgccacctccaccccaccaacccccttgacgccgggccccgcggcgcctagcccaaaccctaacctaccccctgcccctgcccctgcccctgcccccgcccccgcttccacgcctccggcggcagtcgcgccaccgatgcccccagctccgatctccttcgctgctaccttccgtccactcggtgccccagcgccaccgccgccgtaccaggtcccgcagtacgtcgcggtgccggcgaacccgggctacccgatgcagccgccgggcgtccccgtcgttatgcctccgggcgccgtgcggctgccggccatgtacgggccgccccagccgggagtatacatgccgcagcagggcgctgcgatcccccatcccgcggtggtcgtgccagccattactccccacaacaagaggtgccggctcatgtttgattctgcagctctagatcgtttgctccctcactgagtgtgatgcttcagctctgggttgttccaaaaacttgctaaggtgtcatttgtctctctctgcaggaatgtctcgttatcctgcaccgtatcctatgattcgtcctggttttgttccacgtccaatgccgccgcctggtgttgtgccaattcaacgaccaacaataatttctgggatccgggctattcctcctttggtagccccaactgcccggccacctgctccagctgttaagctggcagataaaccgccaaccgcagtttatgttgggaagatcgccccaacagtggacagtgatttccttctttcacttcttcggctttgtggatctgtcaagagttggaagcgtgcccaagatcctagtaatggaaaacctaaaggttttgggttttgtgaatttgaatctgctgaaggcatccttcgtgcgacacggcttctcaacaaattgagcattgatggtcaggaactggtgattaatataaatgatgccaccaaggaatacctgaagaaacatgttgagggaaagaagagagcacaagagaaggaaaaagaaacagaagatgcaagcggggatggaactacagctgttgctgaaaatgaatcatcaaaacctgtccctgatgaattggatgagacaggagatgctggagataagtacagggaagacaacactgataaatttgggattgttactgacgaagactctcaaactgacaaagatgtcgcagaaaaaataagcaatatgattgaggagtggttaaagactagaccgccacccccaccttcaccagttcaaccatctgctgatagctctggcgtagataaggcaaaaaatgattctgatgataagaatgctgctgatgctgataaaagggcagctaatgaaactgagagatctgaaactgcctctcctgataagaggaaggatagagagcatgataaggacaaacgggacaaagatcttgaaaggcatgaccgtgaacgtgaaagagtacggagggatagagagaaggatcataagcatagagaagctgataggctctacagggatcgccttaaggagtgggaatctagggaaagagagagagaatatcagaggtatagtgaaaaggagaaagaaagagatagagatcataaccgcagaagggagatcctgaagcaggaagatgagagcgatgacgaggataataggaaaaggaaacgaaggagtattagctcacttgaagataggaagaggaggaggcaacgtgaaaaggaggaagatttggcagataaaataagggaggaggaggaaattgcagaagcaaggaggctggctgtagagttgcaacggcaagcagatgaagcagctgcggcggcggctgcagccgccgaagagtctgcatcacttatggagattgatggtgatgacgaaaaggaaacagatgcacaaaacaagtcggctgttgtggaagctgataacatctcgagctttgctaatggtgttggtgctggtcgacttagtaagggaaataatggtgaggaaacatgtatgacacctggtcaaaccgcagatactaagcaaaacaacaatgttccagcaaagaaactgggttttggtttgattggcttgggcaaaaggacatctgttccatcagtttttgctgtagaggatgacgaaaataatgttgataaaagcataagacctctagtacctatcgattactccactgaagaattacaagctgtacatgctaattcttctactggggcaaatgtcacagcagctgccgagtttgccaagcgcatctcagtttctaattcaaaggaagagaaggctgaagctgagaaggataggaataggagatccagtgaagctcgtcctaatgatgagcgaagagagaagctacatgatcgcgagaaggataagcccaagtcagagaacaagaagattctggatgcaaagcaactaattgatatgatcccaaggacaaaggaagagctttttgcctatgatataaactgggcgatatatgacaagcatgagttgcaagagagaatgaggccttggatttcaaaaaagataattgaatttcttggcgaggaggaatcaactttggtggactatattgtttcctgcaccaaagaccatgttcaggctgaaaagatgctagatcttctacagtcgattttcgatgttgaggccgagatgtttgtcctcaagatgtggaggatgcttatatttgagatcaagaaagtcgaatctggactatcaggaagagcaaagtcatgaagcgaagcctgttaccctgtatgacctctgatctgcattactcatcaactgtgaccacacttgtaaggtcatactgcactacaagtatcaaaaaccatttttagtgacagagttgatggatctttttacttgtttcttgtacaaatgcatacgagagttaatgagatactgtgcgtaatatttttattttgatagattgcataactgtgtttggcacagttcacacgagtcaactgcctacttttgcttaacttgttctctggtgaacgaagaatgtcaatgctggcagtagccacaagtgatccctaatcatacatggtgtgtgtgcaaagatgttcgtataatcgtatttcacttttgcttctgtactgtagcag

SEQ ID NO: 9671 - DNA, 3244 bp, Zea Mays
ccgccaccggtcttcatgcccgagatcgaaatcgaacccaaacggccaaaccaaccatcgtctactcggcggctgggctagcaccctccctaccaccatggcggccgtcgtgcctccgcccgacaacctggacccgcagccggctactcccccagccgccgctccttccgccacgctcaccccgcctcccgccgccacctccaccccaccaacccccttgacgccgggccccgcggcgcctagcccaaaccctaacctaccccctgcccctgcccctgcccctgcccccgcccccgcttccacgcctccggcggcagtcgcgccaccgatgcccccagctccgatctccttcgctgctaccttccgtccactcggtgccccagcgccaccgccgccgtaccaggtcccgcagtacgtcgcggtgccggcgaacccgggctacccgatgcagccgccgggcgtccccgtcgttatgcctccgggcgccgtgcggctgccggccatgtacgggccgccccagccgggagtatacatgccgcagcagggcgctgcgatcccccatcccgcggtggtcgtgccagccattactccccacaacaagaggtgccggctcatgtttgattctgcagctctagatcgtttgctccctcactgagtgtggaatgtctcgttatcctgcaccgtatcctatgattcgtcctggttttgttccacgtccaatgccgccgcctggtgttgtgccaattcaacgaccaacaataatttctgggatccgggctattcctcctttggtagccccaactgcccggccacctgctccagctgttaagctggcagataaaccgccaaccgcagtttatgttgggaagatcgccccaacagtggacagtgatttccttctttcacttcttcggctttgtggatctgtcaagagttggaagcgtgcccaagatcctagtaatggaaaacctaaaggttttgggttttgtgaatttgaatctgctgaaggcatccttcgtgcgacacggcttctcaacaaattgagcattgatggtcaggaactggtgattaatataaatgatgccaccaaggaatacctgaagaaacatgttgagggaaagaagagagcacaagagaaggaaaaagaaacagaagatgcaagcggggatggaactacagctgttgctgaaaatgaatcatcaaaacctgtccctgatgaattggatgagacaggagatgctggagataagtacagggaagacaacactgataaatttgggattgttactgacgaagactctcaaactgacaaagatgtcgcagaaaaaataagcaatatgattgaggagtggttaaagactagaccgccacccccaccttcaccagttcaaccatctgctgatagctctggcgtagataaggcaaaaaatgattctgatgataagaatgctgctgatgctgataaaagggcagctaatgaaactgagagatctgaaactgcctctcctgataagaggaaggatagagagcatgataaggacaaacgggacaaagatcttgaaaggcatgaccgtgaacgtgaaagagtacggagggatagagagaaggatcataagcatagagaagctgataggctctacagggatcgccttaaggagtgggaatctagggaaagagagagagaatatcagaggtatagtgaaaaggagaaagaaagagatagagatcataaccgcagaagggagatcctgaagcaggaagatgagagcgatgacgaggataataggaaaaggaaacgaaggagtattagctcacttgaagataggaagaggaggaggcaacgtgaaaaggaggaagatttggcagataaaataagggaggaggaggaaattgcagaagcaaggaggctggctgtagagttgcaacggcaagcagatgaagcagctgcggcggcggctgcagccgccgaagagtctgcatcacttatggagattgatggtgatgacgaaaaggaaacagatgcacaaaacaagtcggctgttgtggaagctgataacatctcgagctttgctaatggtgttggtgctggtcgacttagtaagggaaataatggtgaggaaacatgtatgacacctggtcaaaccgcagatactaagcaaaacaacaatgttccagcaaagaaactgggttttggtttgattggcttgggcaaaaggacatctgttccatcagtttttgctgtagaggatgacgaaaataatgttgataaaagcataagacctctagtacctatcgattactccactgaagaattacaagctgtacatgctaattcttctactggggcaaatgtcacagcagctgccgagtttgccaagcgcatctcagtttctaattcaaaggaagagaaggctgaagctgagaaggataggaataggagatccagtgaagctcgtcctaatgatgagcgaagagagaagctacatgatcgcgagaaggataagcccaagtcagagaacaagaagattctggatgcaaagcaactaattgatatgatcccaaggacaaaggaagagctttttgcctatgatataaactgggcgatatatgacaagcatgagttgcaagagagaatgaggccttggatttcaaaaaagataattgaatttcttggcgaggaggaatcaactttggtggactatattgtttcctgcaccaaagaccatgttcaggctgaaaagatgctagatcttctacagtcgattttcgatgttgaggccgagatgtttgtcctcaagatgtggaggatgcttatatttgagatcaagaaagtcgaatctggactatcaggaagagcaaagtcatgaagcgaagcctgttaccctgtatgacctctgatctgcattactcatcaactgtgaccacacttgtaaggtcatactgcactacaagtatcaaaaaccatttttagtgacagagttgatggatctttttacttgtttcttgtacaaatgcatacgagagttaatgagatactgtgcgtaatatttttattttgatagattgcataactgtgtttggcacagttcacacgagtcaactgcctacttttgcttaacttgttctctggtgaacgaagaatgtcaatgctggcagtagccacaagtgatccctaatcatacatggtgtgtgtgcaaagatgttcgtataatcgtatttcacttttgcttctgtactgtagcag

SEQ ID NO: 9672 - DNA, 3165 bp, Zea Mays
gccttcatcacccaaccgccaccggtcttcatgcccgagatcgaaatcgaacccaaacggccaaaccaaccatcgtctactcggcggctgggctagcaccctccctaccaccatggcggccgtcgtgcctccgcccgacaacctggacccgcagccggctactcccccagccgccgctccttccgccacgctcaccccgcctcccgccgccacctccaccccaccaacccccttgacgccgggccccgcggcgcctagcccaaaccctaacctaccccctgcccctgcccctgcccctgcccccgcccccgcttccacgcctccggcggcagtcgcgccaccgatgcccccagctccgatctccttcgctgctaccttccgtccactcggtgccccagcgccaccgccgccgtaccaggtcccgcagtacgtcgcggtgccggcgaacccgggctacccgatgcagccgccgggcgtccccgtcgttatgcctccgggcgccgtgcggctgccggccatgtacgggccgccccagccgggagtatacatgccgcagcagggcgctgcgatcccccatcccggaatgtctcgttatcctgcaccgtatcctatgattcgtcctggttttgttccacgtccaatgccgccgcctggtgttgtgccaattcaacgaccaacaataatttctgggatccgggctattcctcctttggtagccccaactgcccggccacctgctccagctgttaagctggcagataaaccgccaaccgcagtttatgttgggaagatcgccccaacagtggacagtgatttccttctttcacttcttcggctttgtggatctgtcaagagttggaagcgtgcccaagatcctagtaatggaaaacctaaaggttttgggttttgtgaatttgaatctgctgaaggcatccttcgtgcgacacggcttctcaacaaattgagcattgatggtcaggaactggtgattaatataaatgatgccaccaaggaatacctgaagaaacatgttgagggaaagaagagagcacaagagaaggaaaaagaaacagaagatgcaagcggggatggaactacagctgttgctgaaaatgaatcatcaaaacctgtccctgatgaattggatgagacaggagatgctggagataagtacagggaagacaacactgataaatttgggattgttactgacgaagactctcaaactgacaaagatgtcgcagaaaaaataagcaatatgattgaggagtggttaaagactagaccgccacccccaccttcaccagttcaaccatctgctgatagctctggcgtagataaggcaaaaaatgattctgatgataagaatgctgctgatgctgataaaagggcagctaatgaaactgagagatctgaaactgcctctcctgataagaggaaggatagagagcatgataaggacaaacgggacaaagatcttgaaaggcatgaccgtgaacgtgaaagagtacggagggatagagagaaggatcataagcatagagaagctgataggctctacagggatcgccttaaggagtgggaatctagggaaagagagagagaatatcagaggtatagtgaaaaggagaaagaaagagatagagatcataaccgcagaagggagatcctgaagcaggaagatgagagcgatgacgaggataataggaaaaggaaacgaaggagtattagctcacttgaagataggaagaggaggaggcaacgtgaaaaggaggaagatttggcagataaaataagggaggaggaggaaattgcagaagcaaggaggctggctgtagagttgcaacggcaagcagatgaagcagctgcggcggcggctgcagccgccgaagagtctgcatcacttatggagattgatggtgatgacgaaaaggaaacagatgcacaaaacaagtcggctgttgtggaagctgataacatctcgagctttgctaatggtgttggtgctggtcgacttagtaagggaaataatggtgaggaaacatgtatgacacctggtcaaaccgcagatactaagcaaaacaacaatgttccagcaaagaaactgggttttggtttgattggcttgggcaaaaggacatctgttccatcagtttttgctgtagaggatgacgaaaataatgttgataaaagcataagacctctagtacctatcgattactccactgaagaattacaagctgtacatgctaattcttctactggggcaaatgtcacagcagctgccgagtttgccaagcgcatctcagtttctaattcaaaggaagagaaggctgaagctgagaaggataggaataggagatccagtgaagctcgtcctaatgatgagcgaagagagaagctacatgatcgcgagaaggataagcccaagtcagagaacaagaagattctggatgcaaagcaactaattgatatgatcccaaggacaaaggaagagctttttgcctatgatataaactgggcgatatatgacaagcatgagttgcaagagagaatgaggccttggatttcaaaaaagataattgaatttcttggcgaggaggaatcaactttggtggactatattgtttcctgcaccaaagaccatgttcaggctgaaaagatgctagatcttctacagtcgattttcgatgttgaggccgagatgtttgtcctcaagatgtggaggatgcttatatttgagatcaagaaagtcgaatctggactatcaggaagagcaaagtcatgaagcgaagcctgttaccctgtatgacctctgatctgcattactcatcaactgtgaccacacttgtaaggtcatactgcactacaagtatcaaaaaccatttttagtgacagagttgatggatctttttacttgtttcttgtacaaatgcatacgagagttaatgagatactgtgcgtaatatttttattttgatagattgcataactgtgtttggcacagttcacacgagtcaactgcctacttttgcttaacttgttctctggtgaacgaagaatgtcaatgctggcagtagccacaagtgatccctaatcatacatggtgtgtgtgcaaagatgttcgtataatcgtatttcacttttgcttctgtactgtagcag

SEQ ID NO: 9673 - DNA, 1558 bp, Zea Mays
cagacagaggtcaactggaatccgcgtcctgttgaggaaaacgtttttatggtagttcgtgttcatgtccgatctgaaatggcttcagcgacttcgcgtgcttgattgaaacgcacccagtccccgctcctgtttcgatctcccgaatcccgatcccgctaccggaggcggaggcgatggcggcggcgccggcggtaaggttcccggtcttcgggctcgtgcggctgctgggcttggccgccgcggcggcgatcctcttctgggccgtccacttccgaggcggcatggcgctctccaccgaagaggagagcaagctccccctcttcaacgttcacccagtgttaatgctgattggtttggtggccttgaatggcgaagctcttttggcttataaaactgtgccaggaaccaagaaactgaaaaagctagtgcaccttgccgtgcagttccttgccatgtttctgagtctaattggtctgtgggctgtatggaagttccatgatgaaagaaaaatcgatcatttatatacacttcactcgtggttgggccttacttgcttcatcttcttcagcttgcaggtagactaatagagtgtttggtttgaggaatcaaaccattcaaattgaagtggtgcatcatggattcattcctcaaatttggtggaatgactccattcctcatattagtactaactaaataactataaggaatgaattggtgatggatcaactcattctattccacaaaccaaacaaaaatagtgaggagtgagaagataatagactagttcattcctcaaaccaaacaccccatgagatatgaattcttctgttcagttcttctcatgtgtttttcacattttctcctcttttgtccttgtgttcgaatctctgcagtgggctgctgggttttggaccttttggtaccccggtggatcaagaagtggccgtgcatttttgcttccctggcatgtcttctttggtatattcatctatgttcttgctatcgccacaagtgtgactggactcctggagaagtcaatctttatgcagagcgccaaaatgattgagcgcttctccacagaagccatgtttatgaactccctgggaatgctgctggtgttgttgagcagccttgttattcttgcactcgttagtcctggacccagcatgatcgacacatacagaggctcttctgagtgagaggaaatgattacagcctagtttcttaagctacatttttaatcagtagctgagcaatttttgtgtacatgtacccagaattatgcttttcttcttttgacatggagttagtcagtgttgaggataatttcatccctgttagagtggcttcattcaagtcgcagtaataaaattgtggatgaggctgacaatgaaattacagctgagaatatgactgaagtaacaattcctggttaatcagaagttaaccaattcccaatatgtgatcaacctcttttcagaagtaacaatacgcatttacatgagattgatcaaactcaatcacagagcaaatcttcaccgagaattttttattt

SEQ ID NO: 9674 - DNA, 1626 bp, Zea Mays
gagtattaagcacagagtatcaatgcgtcacctgagcctgttaggtccctttagaaccttgtcgtagtgctagcactggccaagagaacaccacaaactcatgtgactcagaagaacatgatcttgctttggtgccgcaaagcttgactgccttttcaatgtctattcctttgattcaatggaagattacatggaaagtaaattgcagtcctacaatcaaacacgtaaggctgttttttaacacgagtaacataccaaactacacagcaatcttaacactcatgatcaaacacgtaaaggctaatttcctaatatgggtaacatactaaactagcaccaaaggtttatttccctcactcctaagaattttggtgtgagctaccagcatcaatcatgccaatcttggagcggaattcctgaaactttgtctacatatgtcccttgactgagcaacgtcccatttggtccttcacttctatgctgagcaacaatgtttaagataattaaggagatgcttcctcctgatgtacgagtggcaagagatgcacaggatcttcttgttgaatgctgtgtagagttcatcaatctcctttcgtctgaatcgaatgaagtgtgcagcagagaagagaaaaaaacgattgctcctgagcatgttatcaaggctctaagtgatcttggcttcagagagtacattgaggaggtttatgctgcatatgaacagcacaaacttgatactttggattctccaaaagctggcaaattcactgggattgagatgacagaggaagaagctgttgctgagcaacaaaggatgtttgctgaggctcgagcaaggatgaataatggagcccccaaaccaaaggagacagaacaagagccgccacagcaaccacaagcacaaccccaacttcagctgcatactgaaccacagcaacccgtgcaatctcaagtgcagttgcattcgccaacacagcattccctccaacctcaagtgcagctgcacccccagccacaacagctcccacaagtgcaggtgcactctcagacgcagctgcaccctcagccacagcagccccaagtgcaggtccatccgcagctgcagcaactcccacaattacaggcccactcgcagccaccgcaaccccaagtgcaaatccacccacagccgcagcagcccccacaagtgcagttgcagtcatcagtccagcagacctcccaaccccaacctcaggtacatctctacaatcacagggggggctcacaagcgcagctgcagccccaactgccaggtcagctgcagacacaggggcaaaccggacctggcattgacagttagagactactgctggcatatactaggaacctgtatgcttgcttgtgactcgttagatcctgatttaggtttctgtgcttcctgtacaatgtaaatccagtgtgattgcagttgccttgttgctaataatgtgaaaccgttagttactgatgatgtccttactgtgtcgaatactgaatgtcatggcgtggcttatgtgccatgctgaatgatgttctgtggtcattgtaatagcctaacttgacatctgtccatgatgatagtgattgatttgaatgagctcttggtgcata

SEQ ID NO: 9675 - DNA, 1370 bp, Zea Mays
gccggttctctctcctcccatccagtcttacccctgctatttgtacccgccttaccgcgccccctaaccctaggccctcaattccactctgcccgagcaagccgaattgtcgtccgaattcgctcgcggggagcacttgctacctcgcgcccgccttctgtcgcgcggattcgttgctgcgcctggagatggacccgatggacatcgtcggcaagtccaaggaggacgtctccctccccaaatataattaaggagatgcttcctcctgatgtacgagtggcaagagatgcacaggatcttcttgttgaatgctgtgtagagttcatcaatctcctttcgtctgaatcgaatgaagtgtgcagcagagaagagaaaaaaacgattgctcctgagcatgttatcaaggctctaagtgatcttggcttcagagagtacattgaggaggtttatgctgcatatgaacagcacaaacttgatactttggattctccaaaagctggcaaattcactgggattgagatgacagaggaagaagctgttgctgagcaacaaaggatgtttgctgaggctcgagcaaggatgaataatggagcccccaaaccaaaggagacagaacaagagccgccacagcaaccacaagcacaaccccaacttcagctgcatactgaaccacagcaacccgtgcaatctcaagtgcagttgcattcgccaacacagcattccctccaacctcaagtgcagctgcacccccagccacaacagctcccacaagtgcaggtgcactctcagacgcagctgcaccctcagccacagcagccccaagtgcaggtccatccgcagctgcagcaactcccacaattacaggcccactcgcagccaccgcaaccccaagtgcaaatccacccacagccgcagcagcccccacaagtgcagttgcagtcatcagtccagcagacctcccaaccccaacctcaggtacatctctacaatcacagggggggctcacaagcgcagctgcagccccaactgccaggtcagctgcagacacaggggcaaaccggacctggcattgacagttagagactactgctggcatatactaggaacctgtatgcttgcttgtgactcgttagatcctgatttaggtttctgtgcttcctgtacaatgtaaatccagtgtgattgcagttgccttgttgctaataatgtgaaaccgttagttactgatgatgtccttactgtgtcgaatactgaatgtcatggcgtggcttatgtgccatgctgaatgatgttctgtggtcattgtaatagcctaacttgacatctgtccatgatgatagtgattgatttgaatgagctcttggtgcata

SEQ ID NO: 9676 - DNA, 1580 bp, Zea Mays
gccggttctctctcctcccatccagtcttacccctgctatttgtacccgccttaccgcgccccctaaccctaggccctcaattccactctgcccgagcaagccgaattgtcgtccgaattcgctcgcggggagcacttgctacctcgcgcccgccttctgtcgcgcggattcgttgctgcgcctggagatggacccgatggacatcgtcggcaagtccaaggaggacgtctccctccccaaattaatcttgtgagatgatacgctaggaagcttgaattttgaagtgatgctatgaggaaagttaggtctgtcctaaatgctatttaatttctgttccaatccatccgtatgtaggatggttgtcctgggcttgtggcgaagtcttgaatttcgtggattgtggatggctaaatctggcggccttgttgataatcagggcaacaatgtttaagataattaaggagatgcttcctcctgatgtacgagtggcaagagatgcacaggatcttcttgttgaatgctgtgtagagttcatcaatctcctttcgtctgaatcgaatgaagtgtgcagcagagaagagaaaaaaacgattgctcctgagcatgttatcaaggctctaagtgatcttggcttcagagagtacattgaggaggtttatgctgcatatgaacagcacaaacttgatactttggattctccaaaagctggcaaattcactgggattgagatgacagaggaagaagctgttgctgagcaacaaaggatgtttgctgaggctcgagcaaggatgaataatggagcccccaaaccaaaggagacagaacaagagccgccacagcaaccacaagcacaaccccaacttcagctgcatactgaaccacagcaacccgtgcaatctcaagtgcagttgcattcgccaacacagcattccctccaacctcaagtgcagctgcacccccagccacaacagctcccacaagtgcaggtgcactctcagacgcagctgcaccctcagccacagcagccccaagtgcaggtccatccgcagctgcagcaactcccacaattacaggcccactcgcagccaccgcaaccccaagtgcaaatccacccacagccgcagcagcccccacaagtgcagttgcagtcatcagtccagcagacctcccaaccccaacctcaggtacatctctacaatcacagggggggctcacaagcgcagctgcagccccaactgccaggtcagctgcagacacaggggcaaaccggacctggcattgacagttagagactactgctggcatatactaggaacctgtatgcttgcttgtgactcgttagatcctgatttaggtttctgtgcttcctgtacaatgtaaatccagtgtgattgcagttgccttgttgctaataatgtgaaaccgttagttactgatgatgtccttactgtgtcgaatactgaatgtcatggcgtggcttatgtgccatgctgaatgatgttctgtggtcattgtaatagcctaacttgacatctgtccatgatgatagtgattgatttgaatgagctcttggtgcata

SEQ ID NO: 9677 - DNA, 1351 bp, Zea Mays
gccggttctctctcctcccatccagtcttacccctgctatttgtacccgccttaccgcgccccctaaccctaggccctcaattccactctgcccgagcaagccgaattgtcgtccgaattcgctcgcggggagcacttgctacctcgcgcccgccttctgtcgcgcggattcgttgctgcgcctggagatggacccgatggacatcgtcggcaagtccaaggaggacgtctccctccccaaatagttgtttaaaatcttctactgctgattgaactttctgctttgcactttagcaacaatgtttaagataattaaggagatgcttcctcctgatgtacgagtggcaagagatgcacaggatcttcttgttgaatgctgtgtagagttcatcaatctcctttcgtctgaatcgaatgaagtgtgcagcagagaagagaaaaaaacgattgctcctgagcatgttatcaaggctctaagtgatcttggcttcagagagtacattgaggaggtttatgctgcatatgaacagcacaaacttgatactttggattctccaaaagctggcaaattcactgggattgagatgacagaggaagaagctgttgctgagcaacaaaggatgtttgctgaggctcgagcaaggatgaataatggagcccccaaaccaaaggagacagaacaagagccgccacagcaaccacaagcacaaccccaacttcagctgcatactgaaccacagcaacccgtgcaatctcaagtgcagttgcattcgccaacacagcattccctccaacctcaagtgcagctgcacccccagccacaacagctcccacaagtgcaggtgcactctcagacgcagctgcacccccaagtgcaaatccacccacagccgcagcagcccccacaagtgcagttgcagtcatcagtccagcagacctcccaaccccaacctcaggtacatctctacaatcacagggggggctcacaagcgcagctgcagccccaactgccaggtcagctgcagacacaggggcaaaccggacctggcattgacagttagagactactgctggcatatactaggaacctgtatgcttgcttgtgactcgttagatcctgatttaggtttctgtgcttcctgtacaatgtaaatccagtgtgattgcagttgccttgttgctaataatgtgaaaccgttagttactgatgatgtccttactgtgtcgaatactgaatgtcatggcgtggcttatgtgccatgctgaatgatgttctgtggtcattgtaatagcctaacttgacatctgtccatgatgatagtgattgatttgaatgagctcttggtgcata

SEQ ID NO: 9678 - DNA, 1565 bp, Zea Mays
tgaaaagcccaccatgggaattgaacctaggtcatgaaggtgaaaagaaactcctttagctggagagagtgtgcaatttctgttgcattgtcagttggactaatcactggtgcaccaacgtttggaccaccggcctatgcttcttctcttgaacctgttcttccagatgtgtctgttcttatctctggacctcccattaaagatccaggtgctttattgagatatgctttaccaatagataataaagctattcgtgaagttcaaaagccgctggaggatatcactgacagcctcaaggttgctggtgttagagccttggattcagttgaaagaaatgtcagacaagcatcgaaagcactgaacaatgggagaagcttaattcttgctggccttgctgaaccaaaaagagcaaatggagaagagttgttgaataagttggctgttggatttgaggagcttcaaagaattgtggaagacagaaatagggatgcagtagctccaaagcagaaagagcttctccatgtagaagaagacatggtcgatggctttccctttgaaataccagaagagtacagcaacatgcctcttctcaaaggaagagctactgtggatatgaaggttaagattaaggacaatcccaacatggaagactgtgtatttaggatagttctggatggatataatgctcctgtgactgctgggaacttcgtagatcttgtcaaacggaaattctatgatggcatggaaatccaaagagctgatggctttgttgttcaaactggagatccagaggggccagctgagggctttatcgatcccagcaccggcaaaatccgtacggtacctcttgaaattatggttgatggtgataaggcgcctgtatatggtgaaacacttgaagaacttggtcgctacaaggctcaaacaaaactccctttcaacgcttttggaacaatggctatggcaagagaagaatttgatgacaattctgcttctagccaagtattttggctcttgaaagagagtgagctaacaccaagcaatgccaatatattggacgggcggtacgcagtatttggatatgtaactgagaatgaggactacctggctgacgtcaaagttggagatgtcatcgaatcaatccaagtcgtctcaggcttggacaaccttgtcaacccaagctacaagattgtaggataacgtgttttgtatcagagtttcttgtctgtgggtctctgtcctcaagtcgatgtaaagtgctatatagtatcttactcccatatccttctcgctcgttaacgagggtttgtgtcacgcggaattcgatagtaattgaaagtacagagtcattgattggttgtcccatacttagaaaaacctgaaacgaggaacatggccgtgtttctctgttctggaaactttgtccagaaacaaggaacgggaatggtcataaacgacgacgaaacttcaactgattcgcctccaatcaatggagattaggaggaagaccgtaaatcttactgacctaagccaccgcaccaccgtcatggaacggagcatgccac

SEQ ID NO: 9679 - DNA, 1615 bp, Zea Mays
gacaggccatcggaccggcgcgaagcacgacaaaagcatgaaaagcccaccatgggaattgaacctaggtcatgaaggtgaaaagaaactcctttagctggagagagtgtgcaatttctgttgcattgtcagttggactaatcactggtgcaccaacgtttggaccaccggcctatgcttcttctcttgaacctgttcttccagatgtgtctgttcttatctctggacctcccattaaagatccaggtgctttattgagatatgctttaccaatagataataaagctattcgtgaagttcaaaagccgctggaggatatcactgacagcctcaaggttgctggtgttagagccttggattcagttgaaagaaatgtcagacaagcatcgaaagcactgaacaatgggagaagcttaattcttgctggccttgctgaaccaaaaagagcaaatggagaagagttgttgaataagttggctgttggatttgaggagcttcaaagaattgtggaagacagaaatagggatgcagtagctccaaagcagaaagagcttctccagtatgttggaactgtagaagaagacatggtcgatggctttccctttgaaataccagaagagtacagcaacatgcctcttctcaaaggaagagctactgtggatatgaaggttaagattaaggacaatcccaacatggaagactgtgtatttaggatagttctggatggatataatgctcctgtgactgctgggaacttcgtagatcttgtcaaacggaaattctatgatggcatggaaatccaaagagctgatggctttgttgttcaaactggagatccagaggggccagctgagggctttatcgatcccagcaccggcaaaatccgtacggtacctcttgaaattatggttgatggtgataaggcgcctgtatatggtgaaacacttgaagaacttggtcgctacaaggctcaaacaaaactccctttcaacgcttttggaacaatggctatggcaagagaagaatttgatgacaattctgcttctagccaagtattttggctcttgaaagagagtgagctaacaccaagcaatgccaatatattggacgggcggtacgcagtatttggatatgtaactgagaatgaggactacctggctgacgtcaaagttggagatgtcatcgaatcaatccaagtcgtctcaggcttggacaaccttgtcaacccaagctacaagattgtaggataacgtgttttgtatcagagtttcttgtctgtgggtctctgtcctcaagtcgatgtaaagtgctatatagtatcttactcccatatccttctcgctcgttaacgagggtttgtgtcacgcggaattcgatagtaattgaaagtacagagtcattgattggttgtcccatacttagaaaaacctgaaacgaggaacatggccgtgtttctctgttctggaaactttgtccagaaacaaggaacgggaatggtcataaacgacgacgaaacttcaactgattcgcctccaatcaatggagattaggaggaagaccgtaaatcttactgacctaagccaccgcaccaccgtcatggaacggagcatgccac

SEQ ID NO: 9680 - DNA, 1743 bp, Zea Mays
ccggcatgggcccgacttagagatggcccacttaagctcggctcggtgaggtaaacgggcagtgtgcaggccgcactggctgtccgagaatggcagacaggccatcggaccggcgcgaagcacgacaaaagcatgaaaagcccaccatgggaattgaacctaggtcatgaaggtgaaaagaaactcctttagctggagagagtgtgcaatttctgttgcattgtcagttggactaatcactggtgcaccaacgtttggaccaccggcctatgcttcttctcttgaacctgttcttccagatgtgtctgttcttatctctggacctcccattaaagatccaggtgctttattgagatatgctttaccaatagataataaagctattcgtgaagttcaaaagccgctggaggatatcactgacagcctcaaggttgctggtgttagagccttggattcagttgaaagaaatgtcagacaagcatcgaaagcactgaacaatgggagaagcttaattcttgctggccttgctgaaccaaaaagagcaaatggagaagagttgttgaataagttggctgttggatttgaggagcttcaaagaattgtggaagacagaaatagggatgcagtagctccaaagcagaaagagcttctccagtatgttggaacctgagatcttcctgggacattgcatttctgcagtgtagaagaagacatggtcgatggctttccctttgaaataccagaagagtacagcaacatgcctcttctcaaaggaagagctactgtggatatgaaggttaagattaaggacaatcccaacatggaagactgtgtatttaggatagttctggatggatataatgctcctgtgactgctgggaacttcgtagatcttgtcaaacggaaattctatgatggcatggaaatccaaagagctgatggctttgttgttcaaactggagatccagaggggccagctgagggctttatcgatcccagcaccggcaaaatccgtacggtacctcttgaaattatggttgatggtgataaggcgcctgtatatggtgaaacacttgaagaacttggtcgctacaaggctcaaacaaaactccctttcaacgcttttggaacaatggctatggcaagagaagaatttgatgacaattctgcttctagccaagtattttggctcttgaaagagagtgagctaacaccaagcaatgccaatatattggacgggcggtacgcagtatttggatatgtaactgagaatgaggactacctggctgacgtcaaagttggagatgtcatcgaatcaatccaagtcgtctcaggcttggacaaccttgtcaacccaagctacaagattgtaggataacgtgttttgtatcagagtttcttgtctgtgggtctctgtcctcaagtcgatgtaaagtgctatatagtatcttactcccatatccttctcgctcgttaacgagggtttgtgtcacgcggaattcgatagtaattgaaagtacagagtcattgattggttgtcccatacttagaaaaacctgaaacgaggaacatggccgtgtttctctgttctggaaactttgtccagaaacaaggaacgggaatggtcataaacgacgacgaaacttcaactgattcgcctccaatcaatggagattaggaggaagaccgtaaatcttactgacctaagccaccgcaccaccgtcatggaacggagcatgccac

SEQ ID NO: 9681 - DNA, 1765 bp, Zea Mays
aactcgttctcgtcctccaccaccggcgcctcgtctcttcccgtctccccagtccccactctcgtccccgctccctccaaagtccaaaccctaccaccccacttccccaccaccactacatggcggcggcgctcgcctcctcccgctactgctggagccgcccgtcgctgccgccccaaccgacccgcggccgccgctccgtcactagctgcgcgctctccggacgagagaaaagaaactcctttagctggagagagtgtgcaatttctgttgcattgtcagttggactaatcactggtgcaccaacgtttggaccaccggcctatgcttcttctcttgaacctgttcttccagatgtgtctgttcttatctctggacctcccattaaagatccaggtgctttattgagatatgctttaccaatagataataaagctattcgtgaagttcaaaagccgctggaggatatcactgacagcctcaaggttgctggtgttagagccttggattcagttgaaagaaatgtcagacaagcatcgaaagcactgaacaatgggagaagcttaattcttgctggccttgctgaaccaaaaagagcaaatggagaagagttgttgaataagttggctgttggatttgaggagcttcaaagaattgtggaagacagaaatagggatgcagtagctccaaagcagaaagagcttctccagtatgttggaacctgagatcttcctgggacattgcatttctgcagtgtagaagaagacatggtcgatggctttccctttgaaataccagaagagtacagcaacatgcctcttctcaaaggaagagctactgtggatatgaaggttaagattaaggacaatcccaacatggaagactgtgtatttaggatagttctggatggatataatgctcctgtgactgctgggaacttcgtagatcttgtcaaacggaaattctatgatggcatggaaatccaaagagaggggccagctgagggctttatcgatcccagcaccggcaaaatccgtacggtacctcttgaaattatggttgatggtgataaggcgcctgtatatggtgaaacacttgaagaacttggtcgctacaaggctcaaacaaaactccctttcaacgcttttggaacaatggctatggcaagagaagaatttgatgacaattctgcttctagccaagtattttggctcttgaaagagagtgagctaacaccaagcaatgccaatatattggacgggcggtacgcagtatttggatatgtaactgagaatgaggactacctggctgacgtcaaagttggagatgtcatcgaatcaatccaagtcgtctcaggcttggacaaccttgtcaacccaagctacaagattgtaggataacgtgttttgtatcagagtttcttgtctgtgggtctctgtcctcaagtcgatgtaaagtgctatatagtatcttactcccatatccttctcgctcgttaacgagggtttgtgtcacgcggaattcgatagtaattgaaagtacagagtcattgattggttgtcccatacttagaaaaacctgaaacgaggaacatggccgtgtttctctgttctggaaactttgtccagaaacaaggaacgggaatggtcataaacgacgacgaaacttcaactgattcgcctccaatcaatggagattaggaggaagaccgtaaatcttactgacctaagccaccgcaccaccgtcatggaacggagcatgccac

SEQ ID NO: 9682 - DNA, 1807 bp, Zea Mays
cgacccaccaccgcacggaccaactcgttctcgtcctccaccaccggcgcctcgtctcttcccgtctccccagtccccactctcgtccccgctccctccaaagtccaaaccctaccaccccacttccccaccaccactacatggcggcggcgctcgcctcctcccgctactgctggagccgcccgtcgctgccgccccaaccgacccgcggccgccgctccgtcactagctgcgcgctctccggacgagagaaaagaaactcctttagctggagagagtgtgcaatttctgttgcattgtcagttggactaatcactggtgcaccaacgtttggaccaccggcctatgcttcttctcttgaacctgttcttccagatgtgtctgttcttatctctggacctcccattaaagatccaggtgctttattgagatatgctttaccaatagataataaagctattcgtgaagttcaaaagccgctggaggatatcactgacagcctcaaggttgctggtgttagagccttggattcagttgaaagaaatgtcagacaagcatcgaaagcactgaacaatgggagaagcttaattcttgctggccttgctgaaccaaaaagagcaaatggagaagagttgttgaataagttggctgttggatttgaggagcttcaaagaattgtggaagacagaaatagggatgcagtagctccaaagcagaaagagcttctccactgagatcttcctgggacattgcatttctgcagtgtagaagaagacatggtcgatggctttccctttgaaataccagaagagtacagcaacatgcctcttctcaaaggaagagctactgtggatatgaaggttaagattaaggacaatcccaacatggaagactgtgtatttaggatagttctggatggatataatgctcctgtgactgctgggaacttcgtagatcttgtcaaacggaaattctatgatggcatggaaatccaaagagctgatggctttgttgttcaaactggagatccagaggggccagctgagggctttatcgatcccagcaccggcaaaatccgtacggtacctcttgaaattatggttgatggtgataaggcgcctgtatatggtgaaacacttgaagaacttggtcgctacaaggctcaaacaaaactccctttcaacgcttttggaacaatggctatggcaagagaagaatttgatgacaattctgcttctagccaagtattttggctcttgaaagagagtgagctaacaccaagcaatgccaatatattggacgggcggtacgcagtatttggatatgtaactgagaatgaggactacctggctgacgtcaaagttggagatgtcatcgaatcaatccaagtcgtctcaggcttggacaaccttgtcaacccaagctacaagattgtaggataacgtgttttgtatcagagtttcttgtctgtgggtctctgtcctcaagtcgatgtaaagtgctatatagtatcttactcccatatccttctcgctcgttaacgagggtttgtgtcacgcggaattcgatagtaattgaaagtacagagtcattgattggttgtcccatacttagaaaaacctgaaacgaggaacatggccgtgtttctctgttctggaaactttgtccagaaacaaggaacgggaatggtcataaacgacgacgaaacttcaactgattcgcctccaatcaatggagattaggaggaagaccgtaaatcttactgacctaagccaccgcaccaccgtcatggaacggagcatgccac

SEQ ID NO: 9683 - DNA, 1801 bp, Zea Mays
caccggcgccccctcttatcacctcaccgacccaccaccgcacggaccaactcgttctcgtcctccaccaccggcgcctcgtctcttcccgtctccccagtccccactctcgtccccgctccctccaaagtccaaaccctaccaccccacttccccaccaccactacatggcggcggcgctcgcctcctcccgctactgctggagccgcccgtcgctgccgccccaaccgacccgcggccgccgctccgtcactagctgcgcgctctccggacgagagaaaagaaactcctttagctggagagagtgtgcaatttctgttgcattgtcagttggactaatcactggtgcaccaacgtttggaccaccggcctatgcttcttctcttgaacctgttcttccagatgtgtctgttcttatctctggacctcccattaaagatccaggtgctttattgagatatgctttaccaatagataataaagctattcgtgaagttcaaaagccgctggaggatatcactgacagcctcaaggttgctggtgttagagccttggattcagttgaaagaaatgtcagacaagcatcgaaagcactgaacaatgggagaagcttaattcttgctggccttgctgaaccaaaaagagcaaatggagaagagttgttgaataagttggctgttggatttgaggagcttcaaagaattgtggaagacagaaatagggatgcagtagctccaaagcagaaagagcttctccatgtagaagaagacatggtcgatggctttccctttgaaataccagaagagtacagcaacatgcctcttctcaaaggaagagctactgtggatatgaaggttaagattaaggacaatcccaacatggaagactgtgtatttaggatagttctggatggatataatgctcctgtgactgctgggaacttcgtagatcttgtcaaacggaaattctatgatggcatggaaatccaaagagctgatggctttgttgttcaaactggagatccagaggggccagctgagggctttatcgatcccagcaccggcaaaatccgtacggtacctcttgaaattatggttgatggtgataaggcgcctgtatatggtgaaacacttgaagaacttggtcgctacaaggctcaaacaaaactccctttcaacgcttttggaacaatggctatggcaagagaagaatttgatgacaattctgcttctagccaagtattttggctcttgaaagagagtgagctaacaccaagcaatgccaatatattggacgggcggtacgcagtatttggatatgtaactgagaatgaggactacctggctgacgtcaaagttggagatgtcatcgaatcaatccaagtcgtctcaggcttggacaaccttgtcaacccaagctacaagattgtaggataacgtgttttgtatcagagtttcttgtctgtgggtctctgtcctcaagtcgatgtaaagtgctatatagtatcttactcccatatccttctcgctcgttaacgagggtttgtgtcacgcggaattcgatagtaattgaaagtacagagtcattgattggttgtcccatacttagaaaaacctgaaacgaggaacatggccgtgtttctctgttctggaaactttgtccagaaacaaggaacgggaatggtcataaacgacgacgaaacttcaactgattcgcctccaatcaatggagattaggaggaagaccgtaaatcttactgacctaagccaccgcaccaccgtcatggaacggagcatgccac

SEQ ID NO: 9684 - DNA, 1865 bp, Zea Mays
ccaatcctagctcgccaccggcgccccctcttatcacctcaccgacccaccaccgcacggaccaactcgttctcgtcctccaccaccggcgcctcgtctcttcccgtctccccagtccccactctcgtccccgctccctccaaagtccaaaccctaccaccccacttccccaccaccactacatggcggcggcgctcgcctcctcccgctactgctggagccgcccgtcgctgccgccccaaccgacccgcggccgccgctccgtcactagctgcgcgctctccggacgagagaaaagaaactcctttagctggagagagtgtgcaatttctgttgcattgtcagttggactaatcactggtgcaccaacgtttggaccaccggcctatgcttcttctcttgaacctgttcttccagatgtgtctgttcttatctctggacctcccattaaagatccaggtgctttattgagatatgctttaccaatagataataaagctattcgtgaagttcaaaagccgctggaggatatcactgacagcctcaaggttgctggtgttagagccttggattcagttgaaagaaatgtcagacaagcatcgaaagcactgaacaatgggagaagcttaattcttgctggccttgctgaaccaaaaagagcaaatggagaagagttgttgaataagttggctgttggatttgaggagcttcaaagaattgtggaagacagaaatagggatgcagtagctccaaagcagaaagagcttctccagtatgttggaacgtggctgagatcttcctgggacattgcatttctgcagtgtagaagaagacatggtcgatggctttccctttgaaataccagaagagtacagcaacatgcctcttctcaaaggaagagctactgtggatatgaaggttaagattaaggacaatcccaacatggaagactgtgtatttaggatagttctggatggatataatgctcctgtgactgctgggaacttcgtagatcttgtcaaacggaaattctatgatggcatggaaatccaaagagctgatggctttgttgttcaaactggagatccagaggggccagctgagggctttatcgatcccagcaccggcaaaatccgtacggtacctcttgaaattatggttgatggtgataaggcgcctgtatatggtgaaacacttgaagaacttggtcgctacaaggctcaaacaaaactccctttcaacgcttttggaacaatggctatggcaagagaagaatttgatgacaattctgcttctagccaagtattttggctcttgaaagagagtgagctaacaccaagcaatgccaatatattggacgggcggtacgcagtatttggatatgtaactgagaatgaggactacctggctgacgtcaaagttggagatgtcatcgaatcaatccaagtcgtctcaggcttggacaaccttgtcaacccaagctacaagattgtaggataacgtgttttgtatcagagtttcttgtctgtgggtctctgtcctcaagtcgatgtaaagtgctatatagtatcttactcccatatccttctcgctcgttaacgagggtttgtgtcacgcggaattcgatagtaattgaaagtacagagtcattgattggttgtcccatacttagaaaaacctgaaacgaggaacatggccgtgtttctctgttctggaaactttgtccagaaacaaggaacgggaatggtcataaacgacgacgaaacttcaactgattcgcctccaatcaatggagattaggaggaagaccgtaaatcttactgacctaagccaccgcaccaccgtcatggaacggagcatgccac

SEQ ID NO: 9685 - DNA, 1922 bp, Zea Mays
cgcttggccacaaccaatcaagtccttatccatgccgttatccacctcagcggcaagaccaccaatcctagctcgccaccggcgccccctcttatcacctcaccgacccaccaccgcacggaccaactcgttctcgtcctccaccaccggcgcctcgtctcttcccgtctccccagtccccactctcgtccccgctccctccaaagtccaaaccctaccaccccacttccccaccaccactacatggcggcggcgctcgcctcctcccgctactgctggagccgcccgtcgctgccgccccaaccgacccgcggccgccgctccgtcactagctgcgcgctctccggacgagagaaaagaaactcctttagctggagagagtgtgcaatttctgttgcattgtcagttggactaatcactggtgcaccaacgtttggaccaccggcctatgcttcttctcttgaacctgttcttccagatgtgtctgttcttatctctggacctcccattaaagatccaggtgctttattgagatatgctttaccaatagataataaagctattcgtgaagttcaaaagccgctggaggatatcactgacagcctcaaggttgctggtgttagagccttggattcagttgaaagaaatgtcagacaagcatcgaaagcactgaacaatgggagaagcttaattcttgctggccttgctgaaccaaaaagagcaaatggagaagagttgttgaataagttggctgttggatttgaggagcttcaaagaattgtggaagacagaaatagggatgcagtagctccaaagcagaaagagcttctccagtatgttggaacctgagatcttcctgggacattgcatttctgcagtgtagaagaagacatggtcgatggctttccctttgaaataccagaagagtacagcaacatgcctcttctcaaaggaagagctactgtggatatgaaggttaagattaaggacaatcccaacatggaagactgtgtatttaggatagttctggatggatataatgctcctgtgactgctgggaacttcgtagatcttgtcaaacggaaattctatgatggcatggaaatccaaagagctgatggctttgttgttcaaactggagatccagaggggccagctgagggctttatcgatcccagcaccggcaaaatccgtacggtacctcttgaaattatggttgatggtgataaggcgcctgtatatggtgaaacacttgaagaacttggtcgctacaaggctcaaacaaaactccctttcaacgcttttggaacaatggctatggcaagagaagaatttgatgacaattctgcttctagccaagtattttggctcttgaaagagagtgagctaacaccaagcaatgccaatatattggacgggcggtacgcagtatttggatatgtaactgagaatgaggactacctggctgacgtcaaagttggagatgtcatcgaatcaatccaagtcgtctcaggcttggacaaccttgtcaacccaagctacaagattgtaggataacgtgttttgtatcagagtttcttgtctgtgggtctctgtcctcaagtcgatgtaaagtgctatatagtatcttactcccatatccttctcgctcgttaacgagggtttgtgtcacgcggaattcgatagtaattgaaagtacagagtcattgattggttgtcccatacttagaaaaacctgaaacgaggaacatggccgtgtttctctgttctggaaactttgtccagaaacaaggaacgggaatggtcataaacgacgacgaaacttcaactgattcgcctccaatcaatggagattaggaggaagaccgtaaatcttactgacctaagccaccgcaccaccgtcatggaacggagcatgccac

SEQ ID NO: 9686 - DNA, 3746 bp, Zea Mays
gttccacacacttcccatccccggacgcccactccagtactccactacgcctctgatcccgtgccgagtgccgccatttcccgtgccccccaccgccgccccgccgccgacgcgatccccatcacgcgccgcccatggcgccccacctactcaccccaccagccctcaccgttacgggcgccgccgccccaggtcgcctcggcagcgccggatcggcggacccgcggacgcccaggccacgcgcgccgtggcccactttctgctcctcccccagcagagggcggcgggagctgaggaagaggaagggcttgagcgtcgcggcggcggcggaagtagcggagccgggtgggcccgctggggcgatgcggctcaacgagtacatggtcgctgtggaccggcccctcggcgtccgcttcgcgcttggtgtcgacggacgcgtcttcgtccattcccttagaaaagggggaaacgccgagaagtccaggatcatcatggtcggcgacacgcttaagaaggcaggcgccgacggcgaaggcctcgtcaccatcaaagacctaggtgacacggagactgcgctgagggacaagtcaggaccatgcagccttgtccttgagagaccatttgctccttttccaatccatcagttgcatcaaaatgaagattaccacattctatttaacagaggacgagctgctgtggcctcttggaacagtgctgtttggtctacaaagatgaacgaatcttctactggggatggaaaattaggttttgctgtattctccccaaggttgctaagttctcaaggatgggctcttctgtccaatgagaaaggtggactcaatcagagtagcactaaccttgccaatcgcgtaagtgagattgttggtttatattctgatgaagacgatgacaatgctgagtgggcacatggtagctttcctttggaagagtacattaaagcactagaccgtgctaaaggtgaactgtactataatcattcactgggtatgcagtacagcaagataacagaacaaatatttgttgggtcatgtatacaaacagagaaagatgtgaagatgttatcagaaactatggcttcagggtattactgctgttctgaatttccaaagtgaaagcgagcgcattaactggggaatcaattctgagataatcaacagttcctgtcgtgagaataacatcttgatggttaactatcctatacgagaggttgattcattggacctaagaaagaagcttcctttttgtgttggtcttctgttgcgtcttataaggaagaactaccgcatatatgtgacttgtaccactggatatgatagatcaccagcatgtgtgatatcatacttacactgggttcaagatacacctctccatattgctcacaagttcatcactggtttgcactcttgtagacctgacagagctgcaattgtttgggcaacttgggatcttattgctttagttgaaaatggaaggcatgatggtagtcccacacattcagtttgtttcatttggaacagtggtagggagggcgaggatgtagagttagttggagattttacaagtaactggaaagacaaaataaggtgcagccacaagggtggctcaagatatgaggctgaagttcgacttcgacatggaaagtactattacaaatttatagttgggggccaatggaggcattcgacttcgttgcctacagaaacagatgaacatgggaatgtcaacaatgtgatcagagttggcgacattgctcggattcgtcctgctccaagccagctacatataaaagacccatctgttgttaaggtcatagaaagggcgctaactgaggacgagcggtttttattggcgtttgcagcacgccgcatggcatttgcaatctgcccaatcagactgtccccaaagcagtagacgtgtcggtcgtccttctccgagcggaaccaggcgtcatcgaggatcagcgattttcgaagctacagaaaactcatgtatgtaacaacagaggggcttcttactgtatgtacccgttcacacaaaacctggaacgtggctaagtgtctcagcaatgggcacaatgtacacctctttgtaattccatggactgtatacctgaaatgaactccattttagactgacactcttgatataatcggaggccggctcgcaaatggccagtgaacaggctctgcaatctacagctctcatgggatgggagagatgactactttgccggttgccctcccggtctcaaggtaggagaacgcctccacaacctgcgagaaggagaagggcccctccgggtcgatgagtggcttcagcttccctgactcgaggtacgggttgagcttctccaagacggagccgttggaggtgacgacgaaccggaaccctggagggctgacggcgccggtgagaaccaccacgctgccgccttccttcactaccttgacagctttgtcaccctgacctgaatggatcgatggtgcaaagggcagatcatgtcagccgaggcctgagggtgggtgacggatttttgtttttgtgtgtgctgggcatgtgtttgatgatggtgatcttaccgactccgtcgaagacaatgtcgtatttgtccggtagctcttccaagttctccttagtgtagtcgatggcgacatcggcacctaggctcttgagcagctcgatcttcttggtgctggccgtcgcagctaccttggacgcgccgtagacatgcttcgctagcttcattccacatcaagagcagaggcagcagcattgcaaggttgagttcagtcttcggtacgtacgtacccacaccaacatgcaaacagtacctggatcgcaagggagccgacaccgccggcgccaccgaggatgaggacggacttgccggcggatattcctgccctctccaggccctcgttggcggtctcgacggctagcggcaggctggcggcctgcgcgaagtcgaggcccttgggcttgagcgccagcagcttctcctcgacggcggtgtattccgccagcgagccggactgcttgggcccctgcagcggattctcgctgaccatgccgtacacctcgtcgccttccttcaacttcttcacctggctgcccaccttgacgacgacgccggacaagtcgtaccccggcacgaccgggagaggggagtcggtggcctggaacttgccggcccgccgcttggcatcgacggggttgagcgccgcggcgacgaccttgacgagcacctggtcctcgcccacggccggcacagccgcggcctcgtcgagcttgagcacgccggcgtccccgtacgcgtcgtacacccaggccttcatcaccccgggcacctccgtcgccaccgcggccgtggccggggacgaggacgcggacaccgcgacgacgcaccgtcccgaccgaccagcttccgaagctgttcttctaccggcggcgaccctcggcgctgacgacgggacgacgagcttcacgggagcctgaggcggccgcggcaagaagtatgatctcgagtacgaagtggccgggatcgacgaagagaggaacgcgtgcattttttttttctctctctcgatggctcgtctctgatcaactcagttcagagcctgtgcttatgagcaaacggagcaggatgaacgttgcaggtgttctctgctgctctgcttcactggctgttgttatccgtttgcggccgtcaggagtggcgggtagcg

SEQ ID NO: 9687 - DNA, 3729 bp, Zea Mays
gttccacacacttcccatccccggacgcccactccagtactccactacgcctctgatcccgtgccgagtgccgccatttcccgtgccccccaccgccgccccgccgccgacgcgatccccatcacgcgccgcccatggcgccccacctactcaccccaccagccctcaccgttacgggcgccgccgccccaggtcgcctcggcagcgccggatcggcggacccgcggacgcccaggccacgcgcgccgtggcccactttctgctcctcccccagcagagggcggcgggagctgaggaagaggaagggcttgagcgtcgcggcggcggcggaagtagcggagccgggtgggcccgctggggcgatgcggctcaacgagtacatggtcgctgtggaccggcccctcggcgtccgcttcgcgcttggtgtcgacggacgcgtcttcgtccattcccttagaaaagggggaaacgccgagaagtccaggatcatcatggtcggcgacacgcttaagaaggcaggcgccgacggcgaaggcctcgtcaccatcaaagacctaggtgacacggagactgcgctgagggacaagtcaggaccatgcagccttgtccttgagagaccatttgctccttttccaatccatcagttgcatcaaaatgaagattaccacattctatttaacagaggacgagctgctgtggcctcttggaacagtgctgtttggtctacaaagatgaacgaatcttctactggggatggaaaattaggttttgctgtattctccccaaggttgctaagttctcaaggatgggctcttctgtccaatgagaaaggtggactcaatcagagtagcactaaccttgccaatcgcgtaagtgagattgttggtttatattctgatgaagacgatgacaatgctgagtgggcacatggtagctttcctttggaagagtacattaaagcactagaccgtgctaaaggtgaactgtactataatcattcactggataacagaacaaatatttgttgggtcatgtatacaaacagagaaagatgtgaagatgttatcagaaactatggcttcagggtattactgctgttctgaatttccaaagtgaaagcgagcgcattaactggggaatcaattctgagataatcaacagttcctgtcgtgagaataacatcttgatggttaactatcctatacgagaggttgattcattggacctaagaaagaagcttcctttttgtgttggtcttctgttgcgtcttataaggaagaactaccgcatatatgtgacttgtaccactggatatgatagatcaccagcatgtgtgatatcatacttacactgggttcaagatacacctctccatattgctcacaagttcatcactggtttgcactcttgtagacctgacagagctgcaattgtttgggcaacttgggatcttattgctttagttgaaaatggaaggcatgatggtagtcccacacattcagtttgtttcatttggaacagtggtagggagggcgaggatgtagagttagttggagattttacaagtaactggaaagacaaaataaggtgcagccacaagggtggctcaagatatgaggctgaagttcgacttcgacatggaaagtactattacaaatttatagttgggggccaatggaggcattcgacttcgttgcctacagaaacagatgaacatgggaatgtcaacaatgtgatcagagttggcgacattgctcggattcgtcctgctccaagccagctacatataaaagacccatctgttgttaaggtcatagaaagggcgctaactgaggacgagcggtttttattggcgtttgcagcacgccgcatggcatttgcaatctgcccaatcagactgtccccaaagcagtagacgtgtcggtcgtccttctccgagcggaaccaggcgtcatcgaggatcagcgattttcgaagctacagaaaactcatgtatgtaacaacagaggggcttcttactgtatgtacccgttcacacaaaacctggaacgtggctaagtgtctcagcaatgggcacaatgtacacctctttgtaattccatggactgtatacctgaaatgaactccattttagactgacactcttgatataatcggaggccggctcgcaaatggccagtgaacaggctctgcaatctacagctctcatgggatgggagagatgactactttgccggttgccctcccggtctcaaggtaggagaacgcctccacaacctgcgagaaggagaagggcccctccgggtcgatgagtggcttcagcttccctgactcgaggtacgggttgagcttctccaagacggagccgttggaggtgacgacgaaccggaaccctggagggctgacggcgccggtgagaaccaccacgctgccgccttccttcactaccttgacagctttgtcaccctgacctgaatggatcgatggtgcaaagggcagatcatgtcagccgaggcctgagggtgggtgacggatttttgtttttgtgtgtgctgggcatgtgtttgatgatggtgatcttaccgactccgtcgaagacaatgtcgtatttgtccggtagctcttccaagttctccttagtgtagtcgatggcgacatcggcacctaggctcttgagcagctcgatcttcttggtgctggccgtcgcagctaccttggacgcgccgtagacatgcttcgctagcttcattccacatcaagagcagaggcagcagcattgcaaggttgagttcagtcttcggtacgtacgtacccacaccaacatgcaaacagtacctggatcgcaagggagccgacaccgccggcgccaccgaggatgaggacggacttgccggcggatattcctgccctctccaggccctcgttggcggtctcgacggctagcggcaggctggcggcctgcgcgaagtcgaggcccttgggcttgagcgccagcagcttctcctcgacggcggtgtattccgccagcgagccggactgcttgggcccctgcagcggattctcgctgaccatgccgtacacctcgtcgccttccttcaacttcttcacctggctgcccaccttgacgacgacgccggacaagtcgtaccccggcacgaccgggagaggggagtcggtggcctggaacttgccggcccgccgcttggcatcgacggggttgagcgccgcggcgacgaccttgacgagcacctggtcctcgcccacggccggcacagccgcggcctcgtcgagcttgagcacgccggcgtccccgtacgcgtcgtacacccaggccttcatcaccccgggcacctccgtcgccaccgcggccgtggccggggacgaggacgcggacaccgcgacgacgcaccgtcccgaccgaccagcttccgaagctgttcttctaccggcggcgaccctcggcgctgacgacgggacgacgagcttcacgggagcctgaggcggccgcggcaagaagtatgatctcgagtacgaagtggccgggatcgacgaagagaggaacgcgtgcattttttttttctctctctcgatggctcgtctctgatcaactcagttcagagcctgtgcttatgagcaaacggagcaggatgaacgttgcaggtgttctctgctgctctgcttcactggctgttgttatccgtttgcggccgtcaggagtggcgggtagcg

SEQ ID NO: 9688 - DNA, 3729 bp, Zea Mays
gttccacacacttcccatccccggacgcccactccagtactccactacgcctctgatcccgtgccgagtgccgccatttcccgtgccccccaccgccgccccgccgccgacgcgatccccatcacgcgccgcccatggcgccccacctactcaccccaccagccctcaccgttacgggcgccgccgccccaggtcgcctcggcagcgccggatcggcggacccgcggacgcccaggccacgcgcgccgtggcccactttctgctcctcccccagcagagggcggcgggagctgaggaagaggaagggcttgagcgtcgcggcggcggcggaagtagcggagccgggtgggcccgctggggcgatgcggctcaacgagtacatggtcgctgtggaccggcccctcggcgtccgcttcgcgcttggtgtcgacggacgcgtcttcgtccattcccttagaaaagggggaaacgccgagaagtccaggatcatcatggtcggcgacacgcttaagaaggcaggcgccgacggcgaaggcctcgtcaccatcaaagacctaggactgcgctgagggacaagtcaggaccatgcagccttgtccttgagagaccatttgctccttttccaatccatcagttgcatcaaaatgaagattaccacattctatttaacagaggacgagctgctgtggcctcttggaacagtgctgtttggtctacaaagatgaacgaatcttctactggggatggaaaattaggttttgctgtattctccccaaggttgctaagttctcaaggatgggctcttctgtccaatgagaaaggtggactcaatcagagtagcactaaccttgccaatcgcgtaagtgagattgttggtttatattctgatgaagacgatgacaatgctgagtgggcacatggtagctttcctttggaagagtacattaaagcactagaccgtgctaaaggtgaactgtactataatcattcactgggtatgcagtacagcaagataacagaacaaatatttgttgggtcatgtatacaaacagagaaagatgtgaagatgttatcagaaactatgggtattactgctgttctgaatttccaaagtgaaagcgagcgcattaactggggaatcaattctgagataatcaacagttcctgtcgtgagaataacatcttgatggttaactatcctatacgagaggttgattcattggacctaagaaagaagcttcctttttgtgttggtcttctgttgcgtcttataaggaagaactaccgcatatatgtgacttgtaccactggatatgatagatcaccagcatgtgtgatatcatacttacactgggttcaagatacacctctccatattgctcacaagttcatcactggtttgcactcttgtagacctgacagagctgcaattgtttgggcaacttgggatcttattgctttagttgaaaatggaaggcatgatggtagtcccacacattcagtttgtttcatttggaacagtggtagggagggcgaggatgtagagttagttggagattttacaagtaactggaaagacaaaataaggtgcagccacaagggtggctcaagatatgaggctgaagttcgacttcgacatggaaagtactattacaaatttatagttgggggccaatggaggcattcgacttcgttgcctacagaaacagatgaacatgggaatgtcaacaatgtgatcagagttggcgacattgctcggattcgtcctgctccaagccagctacatataaaagacccatctgttgttaaggtcatagaaagggcgctaactgaggacgagcggtttttattggcgtttgcagcacgccgcatggcatttgcaatctgcccaatcagactgtccccaaagcagtagacgtgtcggtcgtccttctccgagcggaaccaggcgtcatcgaggatcagcgattttcgaagctacagaaaactcatgtatgtaacaacagaggggcttcttactgtatgtacccgttcacacaaaacctggaacgtggctaagtgtctcagcaatgggcacaatgtacacctctttgtaattccatggactgtatacctgaaatgaactccattttagactgacactcttgatataatcggaggccggctcgcaaatggccagtgaacaggctctgcaatctacagctctcatgggatgggagagatgactactttgccggttgccctcccggtctcaaggtaggagaacgcctccacaacctgcgagaaggagaagggcccctccgggtcgatgagtggcttcagcttccctgactcgaggtacgggttgagcttctccaagacggagccgttggaggtgacgacgaaccggaaccctggagggctgacggcgccggtgagaaccaccacgctgccgccttccttcactaccttgacagctttgtcaccctgacctgaatggatcgatggtgcaaagggcagatcatgtcagccgaggcctgagggtgggtgacggatttttgtttttgtgtgtgctgggcatgtgtttgatgatggtgatcttaccgactccgtcgaagacaatgtcgtatttgtccggtagctcttccaagttctccttagtgtagtcgatggcgacatcggcacctaggctcttgagcagctcgatcttcttggtgctggccgtcgcagctaccttggacgcgccgtagacatgcttcgctagcttcattccacatcaagagcagaggcagcagcattgcaaggttgagttcagtcttcggtacgtacgtacccacaccaacatgcaaacagtacctggatcgcaagggagccgacaccgccggcgccaccgaggatgaggacggacttgccggcggatattcctgccctctccaggccctcgttggcggtctcgacggctagcggcaggctggcggcctgcgcgaagtcgaggcccttgggcttgagcgccagcagcttctcctcgacggcggtgtattccgccagcgagccggactgcttgggcccctgcagcggattctcgctgaccatgccgtacacctcgtcgccttccttcaacttcttcacctggctgcccaccttgacgacgacgccggacaagtcgtaccccggcacgaccgggagaggggagtcggtggcctggaacttgccggcccgccgcttggcatcgacggggttgagcgccgcggcgacgaccttgacgagcacctggtcctcgcccacggccggcacagccgcggcctcgtcgagcttgagcacgccggcgtccccgtacgcgtcgtacacccaggccttcatcaccccgggcacctccgtcgccaccgcggccgtggccggggacgaggacgcggacaccgcgacgacgcaccgtcccgaccgaccagcttccgaagctgttcttctaccggcggcgaccctcggcgctgacgacgggacgacgagcttcacgggagcctgaggcggccgcggcaagaagtatgatctcgagtacgaagtggccgggatcgacgaagagaggaacgcgtgcattttttttttctctctctcgatggctcgtctctgatcaactcagttcagagcctgtgcttatgagcaaacggagcaggatgaacgttgcaggtgttctctgctgctctgcttcactggctgttgttatccgtttgcggccgtcaggagtggcgggtagcg

SEQ ID NO: 9689 - DNA, 3781 bp, Zea Mays
gttccacacacttcccatccccggacgcccactccagtactccactacgcctctgatcccgtgccgagtgccgccatttcccgtgccccccaccgccgccccgccgccgacgcgatccccatcacgcgccgcccatggcgccccacctactcaccccaccagccctcaccgttacgggcgccgccgccccaggtcgcctcggcagcgccggatcggcggacccgcggacgcccaggccacgcgcgccgtggcccactttctgctcctcccccagcagagggcggcgggagctgaggaagaggaagggcttgagcgtcgcggcggcggcggaagtagcggagccgggtgggcccgctggggcgatgcggctcaacgagtacatggtcgctgtggaccggcccctcggcgtccgcttcgcgcttggtgtcgacggacgcgtcttcgtccattcccttagaaaaggggactgcgctgagggacaagtcaggaccatgcagccttgtccttgagagaccatttgctccttttccaatccatcagttgcatcaaaatgaagattaccacattctatttaacagaggacgagctgctgtggcctcttggaacagtgctgtttggtctacaaagatgaacgaatcttctactggggatggaaaattaggttttgctgtattctccccaaggttgctaagttctcaaggatgggctcttctgtccaatgagaaaggtggactcaatcagagtagcactaaccttgccaatcgcgtaagtgagattgttggtttatattctgatgaagacgatgacaatgctgagtgggcacatggtagctttcctttggaagagtacattaaagcactagaccgtgctaaaggtgaactgtactataatcattcactgggtatgcagtacagcaagataacagaacaaatatttgttgggtcatgtatacaaacagagaaagatgtgaagatgttatcagaaactatgggtattactgctgttctgaatttccaaagtgaaagcgagcgcattaactggggaatcaattctgagataatcaacagttcctgtcgtgagaataacatcttgatggttaactatcctatacgagaggttgattcattggacctaagaaagaagcttcctttttgtgttggtcttctgttgcgtcttataaggaagaactaccgcatatatgtgacttgtaccactggatatgatagatcaccagcatgtgtgatatcatacttacactgggttcaagatacacctctccatattgctcacaagttcatcactggtttgcactcttgtagacctgacagagctgcaattgtttgggcaacttgggatcttattgctttagttgaaaatggaaggcatgatggtagtcccacacattcagtttgtttcatttggaacagtggtagggaggtgagttccttttatacaaaaaaatattacggaagagtgagtatttggcataaaagataatttgttcgagtcagtgtgagaccccatgtatggtcttgacaatcaataacttgagggggttaacttgcacgtgacattggctctagggcgaggatgtagagttagttggagattttacaagtaactggaaagacaaaataaggtgcagccacaagggtggctcaagatatgaggctgaagttcgacttcgacatggaaagtactattacaaatttatagttgggggccaatggaggcattcgacttcgttgcctacagaaacagatgaacatgggaatgtcaacaatgtgatcagagttggcgacattgctcggattcgtcctgctccaagccagctacatataaaagacccatctgttgttaaggtcatagaaagggcgctaactgaggacgagcggtttttattggcgtttgcagcacgccgcatggcatttgcaatctgcccaatcagactgtccccaaagcagtagacgtgtcggtcgtccttctccgagcggaaccaggcgtcatcgaggatcagcgattttcgaagctacagaaaactcatgtatgtaacaacagaggggcttcttactgtatgtacccgttcacacaaaacctggaacgtggctaagtgtctcagcaatgggcacaatgtacacctctttgtaattccatggactgtatacctgaaatgaactccattttagactgacactcttgatataatcggaggccggctcgcaaatggccagtgaacaggctctgcaatctacagctctcatgggatgggagagatgactactttgccggttgccctcccggtctcaaggtaggagaacgcctccacaacctgcgagaaggagaagggcccctccgggtcgatgagtggcttcagcttccctgactcgaggtacgggttgagcttctccaagacggagccgttggaggtgacgacgaaccggaaccctggagggctgacggcgccggtgagaaccaccacgctgccgccttccttcactaccttgacagctttgtcaccctgacctgaatggatcgatggtgcaaagggcagatcatgtcagccgaggcctgagggtgggtgacggatttttgtttttgtgtgtgctgggcatgtgtttgatgatggtgatcttaccgactccgtcgaagacaatgtcgtatttgtccggtagctcttccaagttctccttagtgtagtcgatggcgacatcggcacctaggctcttgagcagctcgatcttcttggtgctggccgtcgcagctaccttggacgcgccgtagacatgcttcgctagcttcattccacatcaagagcagaggcagcagcattgcaaggttgagttcagtcttcggtacgtacgtacccacaccaacatgcaaacagtacctggatcgcaagggagccgacaccgccggcgccaccgaggatgaggacggacttgccggcggatattcctgccctctccaggccctcgttggcggtctcgacggctagcggcaggctggcggcctgcgcgaagtcgaggcccttgggcttgagcgccagcagcttctcctcgacggcggtgtattccgccagcgagccggactgcttgggcccctgcagcggattctcgctgaccatgccgtacacctcgtcgccttccttcaacttcttcacctggctgcccaccttgacgacgacgccggacaagtcgtaccccggcacgaccgggagaggggagtcggtggcctggaacttgccggcccgccgcttggcatcgacggggttgagcgccgcggcgacgaccttgacgagcacctggtcctcgcccacggccggcacagccgcggcctcgtcgagcttgagcacgccggcgtccccgtacgcgtcgtacacccaggccttcatcaccccgggcacctccgtcgccaccgcggccgtggccggggacgaggacgcggacaccgcgacgacgcaccgtcccgaccgaccagcttccgaagctgttcttctaccggcggcgaccctcggcgctgacgacgggacgacgagcttcacgggagcctgaggcggccgcggcaagaagtatgatctcgagtacgaagtggccgggatcgacgaagagaggaacgcgtgcattttttttttctctctctcgatggctcgtctctgatcaactcagttcagagcctgtgcttatgagcaaacggagcaggatgaacgttgcaggtgttctctgctgctctgcttcactggctgttgttatccgtttgcggccgtcaggagtggcgggtagcg

SEQ ID NO: 9690 - DNA, 4213 bp, Zea Mays
tgcctcctccaggctctccagctgtccgtgtccagcatcccgcactccgcagcaccactcgcccgccccacaccaccacacggcctccgcccacgcgcacggcgcacccgtcctgtgctcacatcaccacgccacacgacgcgctcgtcagtcgtcacgcaccccacgacgccccaaccgtcccaaacccagatccttccccgcctcgccaccgccaccgccaccgccaatccaccaccatgcccatggacaccgacgagcgccccctcgtcgagctcgcctccgctgcggccgccactactctcgccgcctcctccacctcctccgcccccttccccgcccctgccacgcctgggttctcccgcgcggtccgctgcaacgcccccgcttcctcgctcccggccgatggcggggccggcgcgcagccggcctacccggagaacgcgatctcgacaaccaagtacacgcccgcgagcttcgtgcccaagtcgctcttcgagcagttccgccgcgccgcgaactgtttcttcctcgtcgtcgcctgcgtctccttcagccctcttgcgccctaccgcgccgtctccgtcctgctcccgctcgtcgtcgtcgtcagcgccgccatggccaaggaggccgtcgaggactggcgccggaagcagcaggacatagaagtgaacaataggaaggttgaggtgtatgatgggatccaatcatttcatgagacagaatggaagaagcttcgagttggcgatataattaaagttaaaaaggatgagttcttccctgctgatcttattttcctttcgtctagctcttgtgatggattatgctatgtggagacgatgaatcttgatggtgagacaaacttgaagcggaaacaggcattagaggtgactatgggcttgaatgatgaccatttccatagtttcaaggctttcattcggtgtgaggatccgaatgagaaattgtattctttcttaggaacactatactacaatgggcaacaatattctctgtctccggaacaggtcctgctaagggattcaaaacttcgtaatacaatgtatatatatggcaccataatatttacgggacatgatacaaaggtgatgcaaaatgcaatggagccaccatcaaagaggagttcagttgaacgaagaatggataaaataatatatctcctttttgtgattctctttgttattgcaacgtttgggtcaattgtgtttggaatgagaacaaagcatgagataagtccaggaagctatgcatggtacctcaggccggatcaagcaaatatattctttgatccaaacaatgcatcgtttgcagcattctgccattttcttacaagcctgatgctgtatgtgtgcttggtgcctatttcattgtatatatcgatagaaattgtcaaggttttacagagcacatttataaatcaagaccagaatatgtattgcgccgagtctgataaacctgcaagagctcgcacttcaaatttgaatgaagaacttggtcaagtccatactatactgtctgacaaaacagggacattaacatgcaattcaatggagttcttgaaatgttccattgctggtgttgcttatggaagtaggcctacagaagttgaaacgtgttatggagaaatagttgaaactaatggcagttttgggcgcaaggacactactgaattcaagagatcagtcaagggatttaatttcactgatagtcatttgatgaatggaagatgggccaaagaatgttctagggatgctatagaaatgtttttccgagtcttagctgtttgccatactgcgattcctgtggcagatggaaattctgctggtatgccttatgaagctgagtctcctgatgaagcagctcttgttacagctgcaagagagtttggctttgaattttatcataggacacaaacaactatatcagtgcatgagtacgatcctgtcgttggtggaaaggttgatagaacatataaactactcaacatcttagaattcagcagtgctcgtaagcgtatgtctgttattgtgaggacagaagagggtcggctatttctgttctgcaaaggagctgacaggctccagtgtaatattcgaaaggctctccaaggataatggaacagctcatctgaccaaaacaaagtgtcacattgatgagtattctgaggcaggtctccggaccctggcacttgcatattgtgaacttactgaagaacaatatgttgtatggaatcaggattactcgtctgccaagaattctgtacatactgatcatgttgcagctgttgagaaggtgtcagaagacattgagaaggatttggttcttttgggtgctactgctgtagaggatagattgcaaaatggggtccctgagtgtatttataaacttgcacaagctggaattaagatctggattttaactggagacaagttggagacagctgtaaacataggttacgcttgtaacctactgaggaaagagatggaggaaatttttatcacactggagaactcaagtacaagtgcttcagaggggtccagtggagaaggaaacaaaattgccacatttgaggaaattgatagaaaattaaaagatgctagaggaaagatttcccaaaaaggaacttcaacttcatttgctcttatcattgacggcaatgctctgacacatgctctcacgggcagccttaagaactcatttctggatctagcagtcaactgtgcatctgttttatgttgtcgggtttcaccaaaacaaaaggcactggtcaccagattggttaaaattaggacaagtaaaactactttagctattggtgatggagcaaatgatgttggtatgctacaagaggctgacattggggttggaataagtggtgctgaaggaatgcaggctgttatggcgagtgactttgcaatagcacagtttcgttttttagagcgattacttcttgtgcatggtcattggtgttatcgtcggattgcagctatgatatgctattttttcttcaagaacatcacatttggctttacgcttttctggtttgaggctcatgctatgttctcagcacaacctgcgtacaatgattggttcatatctttctataatgttgccttcacatctcttcctgtcatcgccctcggtgtttttgacaaggatgtctcttcccatgtttgtcttgaggtcccttcattacatcaagatggcgttaataatgtattcttcagttggtcccgaatactcagttggatgttaaatgggatgtgctgttcaataattatttactttggttccctcaacgctattctggttcaggctgtccgacaggatggtcgcgttgctgggtttgatatccttggggtgaccatgtacacttgtgtagtgtggactgtgaactgccagcttgctctctacatcagctacttcacctggatacaacattttgtcatctggggcagcatactgatttggtacactttccttgtcatatatggtctattttccccagcaatatcaaccactgcatatcatgtttttgtggaagcttgtgcacctagccctttgtactggctatccactctaatgattgtggtgacagccttgatcccattctttgtctacaaaatatcgagaacactctattatccacagtatcatgatcaagttcagagggctaactcaaagaattggtagtgcctgttgtataagatgctactgaatgaggggatgtacagtcagtaatttggtttaacataccacatgctttgctttgtagatcatgatgcagagtttcaggttgtggcagtgcgtctgtcaaatatcagaacacaatggtgacttcgcagtcacgcgaaggaactgcaagcggcaaattgattctttggacctattaccccactaggacacgtttttcttcggggtgccatcatggaagcagattgcaattaggatttatatagaatgatgtatagcatgtcgataactcgaacatgacttcctcgatatatgtagtactgtcttccaaaaaatagcattcttgtagcatcaaacggccaaacctatgttcgtggaagcatagttaataccctttattgctccaatggtttgtacatagttgtatgaatatatgagatggatcttgatgttgtttaacatttgatatgaaatgaataaatgatatgatgttatctct

SEQ ID NO: 9691 - DNA, 4321 bp, Zea Mays
tgcctcctccaggctctccagctgtccgtgtccagcatcccgcactccgcagcaccactcgcccgccccacaccaccacacggcctccgcccacgcgcacggcgcacccgtcctgtgctcacatcaccacgccacacgacgcgctcgtcagtcgtcacgcaccccacgacgccccaaccgtcccaaacccagatccttccccgcctcgccaccgccaccgccaccgccaatccaccaccatgcccatggacaccgacgagcgccccctcgtcgagctcgcctccgctgcggccgccactactctcgccgcctcctccacctcctccgcccccttccccgcccctgccacgcctgggttctcccgcgcggtccgctgcaacgcccccgcttcctcgctcccggccgatggcggggccggcgcgcagccggcctacccggagaacgcgatctcgacaaccaagtacacgcccgcgagcttcgtgcccaagtcgctcttcgagcagttccgccgcgccgcgaactgtttcttcctcgtcgtcgcctgcgtctccttcagccctcttgcgccctaccgcgccgtctccgtcctgctcccgctcgtcgtcgtcgtcagcgccgccatggccaaggaggccgtcgaggactggcgccggaagcagcaggacatagaagtgaacaataggaaggttgaggtgtatgatgggatccaatcatttcatgagacagaatggaagaagcttcgagttggcgatataattaaagttaaaaaggatgagttcttccctgctgatcttattttcctttcgtctagctcttgtgatggattatgctatgtggagacgatgaatcttgatggtgagacaaacttgaagcggaaacaggcattagaggtgactatgggcttgaatgatgaccatttccatagtttcaaggctttcattcggtgtgaggatccgaatgagaaattgtattctttcttaggaacactatactacaatgggcaacaatattctctgtctccggaacaggtcctgctaagggattcaaaacttcgtaatacaatgtatatatatggcaccataatatttacgggacatgatacaaaggtgatgcaaaatgcaatggagccaccatcaaagaggagttcagttgaacgaagaatggataaaataatatatctcctttttgtgattctctttgttattgcaacgtttgggtcaattgtgtttggaatgagaacaaagcatgagataagtccaggaagctatgcatggtacctcaggccggatcaagcaaatatattctttgatccaaacaatgcatcgtttgcagcattctgccattttcttacaagcctgatgctgtatgtgtgcttggtgcctatttcattgtatatatcgatagaaattgtcaaggttttacagagcacatttataaatcaagaccagaatatgtattgcgccgagtctgataaacctgcaagagctcgcacttcaaatttgaatgaagaacttggtcaagtccatactatactgtctgacaaaacagggacattaacatgcaattcaatggagttcttgaaatgttccattgctggtgttgcttatggaagtaggcctacagaagttgaaacgtgttatggagaaatagttgaaactaatggcagttttgggcgcaaggacactactgaattcaagagatcagtcaagggatttaatttcactgatagtcatttgatgaatggaagatgggccaaagaatgttctagggatgctatagaaatgtttttccgagtcttagctgtttgccatactgcgattcctgtggcagatggaaattctgctggtatgccttatgaagctgagtctcctgatgaagcagctcttgttacagctgcaagagagtttggctttgaattttatcataggacacaaacaactatatcagtgcatgagtacgatcctgtcgttggtggaaaggttgatagaacatataaactactcaacatcttagaattcagcagtgctcgtaagcgtatgtctgttattgtgaggacagaagagggtcggctatttctgttctgcaaaggagctgacaggttcaataattgtttttacatgtgatgaaaatcttctatgtttgacactgcatttcccgtttataagtacatatctaattatctatatcatgatagtgttagccttaaagttgtgcaacatatttaaactattccagctattctgaagtgtacctttcttcagagttgtaaacatcacatgctaaaattttcaaccttcaagtcctgttcaaataagtatcattatcttttcatctctgtgctccagtgtaatattcgaaaggctctccaaggataatggaacagctcatctgaccaaaacaaagtgtcacattgatgagtattctgaggcaggtctccggaccctggcacttgcatattgtgaacttactgaagaacaatatgttgtatggaatcaggattactcgtctgccaagaattctgtacatactgatcatgttgcagctgttgagaaggtgtcagaagacattgagaaggatttggttcttttgggtgctactgctgtagaggatagattgcaaaatggggtccctgagtgtatttataaacttgcacaagctggaattaagatctggattttaactggagacaagttggagacagctgtaaacataggttacgcttgtaacctactgaggaaagagatggaggaaatttttatcacactggagaactcaagtacaagtgcttcagaggggtccagtggagaaggaaacaaaattgccacatttgaggaaattgatagaaaattaaaagatgctagaggaaagatttcccaaaaaggaacttcaacttcatttgctcttatcattgacggcaatgctctgacacatgctctcacgggcagccttaagaactcatttctggatctagcagtcaactgtgcatctgttttatgttgtcgggtttcaccaaaacaaaaggcactggtcaccagattggttaaaattaggacaagtaaaactactttagctattggtgatggagcaaatgatgttggtatgctacaagaggctgacattggggttggaataagtggtgctgaaggaatgcaggctgttatggcgagtgactttgcaatagcacagtttcgttttttagagcgattacttcttgtgcatggtcattggtgttatcgtcggattgcagctatgatatgctattttttcttcaagaacatcacatttggctttacgcttttctggtttgaggctcatgctatgttctcagcacaacctgcgtacaatgattggttcatatctttctataatgttgccttcacatctcttcctgtcatcgccctcggtgtttttgacaaggatgtctcttcccatgtttgtcttgaggctgtccgacaggatggtcgcgttgctgggtttgatatccttggggtgaccatgtacacttgtgtagtgtggactgtgaactgccagcttgctctctacatcagctacttcacctggatacaacattttgtcatctggggcagcatactgatttggtacactttccttgtcatatatggtctattttccccagcaatatcaaccactgcatatcatgtttttgtggaagcttgtgcacctagccctttgtactggctatccactctaatgattgtggtgacagccttgatcccattctttgtctacaaaatatcgagaacactctattatccacagtatcatgatcaagttcagagggctaactcaaagaattggtagtgcctgttgtataagatgctactgaatgaggggatgtacagtcagtaatttggtttaacataccacatgctttgctttgtagatcatgatgcagagtttcaggttgtggcagtgcgtctgtcaaatatcagaacacaatggtgacttcgcagtcacgcgaaggaactgcaagcggcaaattgattctttggacctattaccccactaggacacgtttttcttcggggtgccatcatggaagcagattgcaattaggatttatatagaatgatgtatagcatgtcgataactcgaacatgacttcctcgatatatgtagtactgtcttccaaaaaatagcattcttgtagcatcaaacggccaaacctatgttcgtggaagcatagttaataccctttattgctccaatggtttgtacatagttgtatgaatatatgagatggatcttgatgttgtttaacatttgatatgaaatgaataaatgatatgatgttatctct

SEQ ID NO: 9692 - DNA, 4453 bp, Zea Mays
tgcctcctccaggctctccagctgtccgtgtccagcatcccgcactccgcagcaccactcgcccgccccacaccaccacacggcctccgcccacgcgcacggcgcacccgtcctgtgctcacatcaccacgccacacgacgcgctcgtcagtcgtcacgcaccccacgacgccccaaccgtcccaaacccagatccttccccgcctcgccaccgccaccgccaccgccaatccaccaccatgcccatggacaccgacgagcgccccctcgtcgagctcgcctccgctgcggccgccactactctcgccgcctcctccacctcctccgcccccttccccgcccctgccacgcctgggttctcccgcgcggtccgctgcaacgcccccgcttcctcgctcccggccgatggcggggccggcgcgcagccggcctacccggagaacgcgatctcgacaaccaagtacacgcccgcgagcttcgtgcccaagtcgctcttcgagcagttccgccgcgccgcgaactgtttcttcctcgtcgtcgcctgcgtctccttcagccctcttgcgccctaccgcgccgtctccgtcctgctcccgctcgtcgtcgtcgtcagcgccgccatggccaaggaggccgtcgaggactggcgccggaagcagcaggacatagaagtgaacaataggaaggttgaggtgtatgatgggatccaatcatttcatgagacagaatggaagaagcttcgagttggcgatataattaaagttaaaaaggatgagttcttccctgctgatcttattttcctttcgtctagctcttgtgatggattatgctatgtggagacgatgaatcttgatggtgagacaaacttgaagcggaaacaggcattagaggtgactatgggcttgaatgatgaccatttccatagtttcaaggctttcattcggtgtgaggatccgaatgagaaattgtattctttcttaggaacactatactacaatgggcaacaatattctctgtctccggaacaggtcctgctaagggattcaaaacttcgtaatacaatgtatatatatggcaccataatatttacgggacatgatacaaaggtgatgcaaaatgcaatggagccaccatcaaagaggagttcagttgaacgaagaatggataaaataatatatctcctttttgtgattctctttgttattgcaacgtttgggtcaattgtgtttggaatgagaacaaagcatgagataagtccaggaagctatgcatggtacctcaggccggatcaagcaaatatattctttgatccaaacaatgcatcgtttgcagcattctgccattttcttacaagcctgatgctgtatgtgtgcttggtgcctatttcattgtatatatcgatagaaattgtcaaggttttacagagcacatttataaatcaagaccagaatatgtattgcgccgagtctgataaacctgcaagagctcgcacttcaaatttgaatgaagaacttggtcaagtccatactatactgtctgacaaaacagggacattaacatgcaattcaatggagttcttgaaatgttccattgctggtgttgcttatggaagtaggcctacagaagttgaaacgtgttatggagaaatagttgaaactaatggcagttttgggcgcaaggacactactgaattcaagagatcagtcaagggatttaatttcactgatagtcatttgatgaatggaagatgggccaaagaatgttctagggatgctatagaaatgtttttccgagtcttagctgtttgccatactgcgattcctgtggcagatggaaattctgctggtatgccttatgaagctgagtctcctgatgaagcagctcttgttacagctgcaagagagtttggctttgaattttatcataggacacaaacaactatatcagtgcatgagtacgatcctgtcgttggtggaaaggttgatagaacatataaactactcaacatcttagaattcagcagtgctcgtaagcgtatgtctgttattgtgaggacagaagagggtcggctatttctgttctgcaaaggagctgacaggttcaataattgtttttacatgtgatgaaaatcttctatgtttgacactgcatttcccgtttataagtacatatctaattatctatatcatgatagtgttagccttaaagttgtgcaacatatttaaactattccagctattctgaagtgtacctttcttcagagttgtaaacatcacatgctaaaattttcaaccttcaagtcctgttcaaataagtatcattatcttttcatctctgtgctccagtgtaatattcgaaaggctctccaaggataatggaacagctcatctgaccaaaacaaagtgtcacattgatgagtattctgaggcaggtctccggaccctggcacttgcatattgtgaacttactgaagaacaatatgttgtatggaatcaggattactcgtctgccaagaattctgtacatactgatcatgttgcagctgttgagaaggtgtcagaagacattgagaaggatttggttcttttgggtgctactgctgtagaggatagattgcaaaatggggtccctgagtgtatttataaacttgcacaagctggaattaagatctggattttaactggagacaagttggagacagctgtaaacataggttacgcttgtaacctactgaggaaagagatggaggaaatttttatcacactggagaactcaagtacaagtgcttcagaggggtccagtggagaaggaaacaaaattgccacatttgaggaaattgatagaaaattaaaagatgctagaggaaagatttcccaaaaaggaacttcaacttcatttgctcttatcattgacggcaatgctctgacacatgctctcacgggcagccttaagaactcatttctggatctagcagtcaactgtgcatctgttttatgttgtcgggtttcaccaaaacaaaaggcactggtcaccagattggttaaaattaggacaagtaaaactactttagctattggtgatggagcaaatgatgttggtatgctacaagaggctgacattggggttggaataagtggtgctgaaggaatgcaggctgttatggcgagtgactttgcaatagcacagtttcgttttttagagcgattacttcttgtgcatggtcattggtgttatcgtcggattgcagctatgatatgctattttttcttcaagaacatcacatttggctttacgcttttctggtttgaggctcatgctatgttctcagcacaacctgcgtacaatgattggttcatatctttctataatgttgccttcacatctcttcctgtcatcgccctcggtgtttttgacaaggatgtctcttcccatgtttgtcttgaggtcccttcattacatcaagatggcgttaataatgtattcttcagttggtcccgaatactcagttggatgttaaatgggatgtgctgttcaataattatttactttggttccctcaacgctattctggttcaggctgtccgacaggatggtcgcgttgctgggtttgatatccttggggtgaccatgtacacttgtgtagtgtggactgtgaactgccagcttgctctctacatcagctacttcacctggatacaacattttgtcatctggggcagcatactgatttggtacactttccttgtcatatatggtctattttccccagcaatatcaaccactgcatatcatgtttttgtggaagcttgtgcacctagccctttgtactggctatccactctaatgattgtggtgacagccttgatcccattctttgtctacaaaatatcgagaacactctattatccacagtatcatgatcaagttcagagggctaactcaaagaattggtagtgcctgttgtataagatgctactgaatgaggggatgtacagtcagtaatttggtttaacataccacatgctttgctttgtagatcatgatgcagagtttcaggttgtggcagtgcgtctgtcaaatatcagaacacaatggtgacttcgcagtcacgcgaaggaactgcaagcggcaaattgattctttggacctattaccccactaggacacgtttttcttcggggtgccatcatggaagcagattgcaattaggatttatatagaatgatgtatagcatgtcgataactcgaacatgacttcctcgatatatgtagtactgtcttccaaaaaatagcattcttgtagcatcaaacggccaaacctatgttcgtggaagcatagttaataccctttattgctccaatggtttgtacatagttgtatgaatatatgagatggatcttgatgttgtttaacatttgatatgaaatgaataaatgatatgatgttatctct

SEQ ID NO: 9693 - DNA, 4137 bp, Zea Mays
tgcctcctccaggctctccagctgtccgtgtccagcatcccgcactccgcagcaccactcgcccgccccacaccaccacacggcctccgcccacgcgcacggcgcacccgtcctgtgctcacatcaccacgccacacgacgcgctcgtcagtcgtcacgcaccccacgacgccccaaccgtcccaaacccagatccttccccgcctcgccaccgccaccgccaccgccaatccaccaccatgcccatggacaccgacgagcgccccctcgtcgagctcgcctccgctgcggccgccactactctcgccgcctcctccacctcctccgcccccttccccgcccctgccacgcctgggttctcccgcgcggtccgctgcaacgcccccgcttcctcgctcccggccgatggcggggccggcgcgcagccggcctacccggagaacgcgatctcgacaaccaagtacacgcccgcgagcttcgtgcccaagtcgctcttcgagcagttccgccgcgccgcgaactgtttcttcctcgtcgtcgcctgcgtctccttcagccctcttgcgccctaccgcgccgtctccgtcctgctcccgctcgtcgtcgtcgtcagcgccgccatggccaaggaggccgtcgaggactggcgccggaagcagcaggacatagaagtgaacaataggaaggttgaggtgtatgatgggatccaatcatttcatgagacagaatggaagaagcttcgagttggcgatataattaaagttaaaaaggatgagttcttccctgctgatcttattttcctttcgtctagctcttgtgatggattatgctatgtggagacgatgaatcttgatggtgagacaaacttgaagcggaaacaggcattagaggtgactatgggcttgaatgatgaccatttccatagtttcaaggctttcattcggtgtgaggatccgaatgagaaattgtattctttcttaggaacactatactacaatgggcaacaatattctctgtctccggaacaggtcctgctaagggattcaaaacttcgtaatacaatgtatatatatggcaccataatatttacgggacatgatacaaaggtgatgcaaaatgcaatggagccaccatcaaagaggagttcagttgaacgaagaatggataaaataatatatctcctttttgtgattctctttgttattgcaacgtttgggtcaattgtgtttggaatgagaacaaagcatgagataagtccaggaagctatgcatggtacctcaggccggatcaagcaaatatattctttgatccaaacaatgcatcgtttgcagcattctgccattttcttacaagcctgatgctgtatgtgtgcttggtgcctatttcattgtatatatcgatagaaattgtcaaggttttacagagcacatttataaatcaagaccagaatatgtattgcgccgagtctgataaacctgcaagagctcgcacttcaaatttgaatgaagaacttggtcaagtccatactatactgtctgacaaaacagggacattaacatgcaattcaatggagttcttgaaatgttccattgctggtgttgcttatggaagtaggcctacagaagttgaaacgtgttatggagaaatagttgaaactaatggcagttttgggcgcaaggacactactgaattcaagagatcagtcaagggatttaatttcactgatagtcatttgatgaatggaagatgggccaaagaatgttctagggatgctatagaaatgtttttccgagtcttagctgtttgccatactgcgattcctgtggcagatggaaattctgctggtatgccttatgaagctgagtctcctgatgaagcagctcttgttacagctgcaagagagtttggctttgaattttatcataggacacaaacaactatatcagtgcatgagtacgatcctgtcgttggtggaaaggttgatagaacatataaactactcaacatcttagaattcagcagtgctcgtaagcgtatgtctgttattgtgaggacagaagagggtcggctatttctgttctgcaaaggagctgacagtgtaatattcgaaaggctctccaaggataatggaacagctcatctgaccaaaacaaagtgtcacattgatgagtattctgaggattactcgtctgccaagaattctgtacatactgatcatgttgcagctgttgagaaggtgtcagaagacattgagaaggatttggttcttttgggtgctactgctgtagaggatagattgcaaaatggggtccctgagtgtatttataaacttgcacaagctggaattaagatctggattttaactggagacaagttggagacagctgtaaacataggttacgcttgtaacctactgaggaaagagatggaggaaatttttatcacactggagaactcaagtacaagtgcttcagaggggtccagtggagaaggaaacaaaattgccacatttgaggaaattgatagaaaattaaaagatgctagaggaaagatttcccaaaaaggaacttcaacttcatttgctcttatcattgacggcaatgctctgacacatgctctcacgggcagccttaagaactcatttctggatctagcagtcaactgtgcatctgttttatgttgtcgggtttcaccaaaacaaaaggcactggtcaccagattggttaaaattaggacaagtaaaactactttagctattggtgatggagcaaatgatgttggtatgctacaagaggctgacattggggttggaataagtggtgctgaaggaatgcaggctgttatggcgagtgactttgcaatagcacagtttcgttttttagagcgattacttcttgtgcatggtcattggtgttatcgtcggattgcagctatgatatgctattttttcttcaagaacatcacatttggctttacgcttttctggtttgaggctcatgctatgttctcagcacaacctgcgtacaatgattggttcatatctttctataatgttgccttcacatctcttcctgtcatcgccctcggtgtttttgacaaggatgtctcttcccatgtttgtcttgaggtcccttcattacatcaagatggcgttaataatgtattcttcagttggtcccgaatactcagttggatgttaaatgggatgtgctgttcaataattatttactttggttccctcaacgctattctggttcaggctgtccgacaggatggtcgcgttgctgggtttgatatccttggggtgaccatgtacacttgtgtagtgtggactgtgaactgccagcttgctctctacatcagctacttcacctggatacaacattttgtcatctggggcagcatactgatttggtacactttccttgtcatatatggtctattttccccagcaatatcaaccactgcatatcatgtttttgtggaagcttgtgcacctagccctttgtactggctatccactctaatgattgtggtgacagccttgatcccattctttgtctacaaaatatcgagaacactctattatccacagtatcatgatcaagttcagagggctaactcaaagaattggtagtgcctgttgtataagatgctactgaatgaggggatgtacagtcagtaatttggtttaacataccacatgctttgctttgtagatcatgatgcagagtttcaggttgtggcagtgcgtctgtcaaatatcagaacacaatggtgacttcgcagtcacgcgaaggaactgcaagcggcaaattgattctttggacctattaccccactaggacacgtttttcttcggggtgccatcatggaagcagattgcaattaggatttatatagaatgatgtatagcatgtcgataactcgaacatgacttcctcgatatatgtagtactgtcttccaaaaaatagcattcttgtagcatcaaacggccaaacctatgttcgtggaagcatagttaataccctttattgctccaatggtttgtacatagttgtatgaatatatgagatggatcttgatgttgtttaacatttgatatgaaatgaataaatgatatgatgttatctct

SEQ ID NO: 9694 - DNA, 4129 bp, Zea Mays
tgcctcctccaggctctccagctgtccgtgtccagcatcccgcactccgcagcaccactcgcccgccccacaccaccacacggcctccgcccacgcgcacggcgcacccgtcctgtgctcacatcaccacgccacacgacgcgctcgtcagtcgtcacgcaccccacgacgccccaaccgtcccaaacccagatccttccccgcctcgccaccgccaccgccaccgccaatccaccaccatgcccatggacaccgacgagcgccccctcgtcgagctcgcctccgctgcggccgccactactctcgccgcctcctccacctcctccgcccccttccccgcccctgccacgcctgggttctcccgcgcggtccgctgcaacgcccccgcttcctcgctcccggccgatggcggggccggcgcgcagccggcctacccggagaacgcgatctcgacaaccaagtacacgcccgcgagcttcgtgcccaagtcgctcttcgagcagttccgccgcgccgcgaactgtttcttcctcgtcgtcgcctgcgtctccttcagccctcttgcgccctaccgcgccgtctccgtcctgctcccgctcgtcgtcgtcgtcagcgccgccatggccaaggaggccgtcgaggactggcgccggaagcagcaggacatagaagtgaacaataggaaggttgaggtgtatgatgggatccaatcatttcatgagacagaatggaagaagcttcgagttggcgatataattaaagttaaaaaggatgagttcttccctgctgatcttattttcctttcgtctagctcttgtgatggattatgctatgtggagacgatgaatcttgatggtgagacaaacttgaagcggaaacaggcattagaggtgactatgggcttgaatgatgaccatttccatagtttcaaggctttcattcggtgtgaggatccgaatgagaaattgtattctttcttaggaacactatactacaatgggcaacaatattctctgtctccggaacaggtcctgctaagggattcaaaacttcgtaatacaatgtatatatatggcaccataatatttacgggacatgatacaaaggtgatgcaaaatgcaatggagccaccatcaaagaggagttcagttgaacgaagaatggataaaataatatatctcctttttgtgattctctttgttattgcaacgtttgggtcaattgtgtttggaatgagaacaaagcatgagataagtccaggaagctatgcatggtacctcaggccggatcaagcaaatatattctttgatccaaacaatgcatcgtttgcagcattctgccattttcttacaagcctgatgctgtatgtgtgcttggtgcctatttcattgtatatatcgatagaaattgtcaaggttttacagagcacatttataaatcaagaccagaatatgtattgcgccgagtctgataaacctgcaagagctcgcacttcaaatttgaatgaagaacttggtcaagtccatactatactgtctgacaaaacagggacattaacatgcaattcaatggagttcttgaaatgttccattgctggtgttgcttatggaagtaggcctacagaagttgaaacgtgttatggagaaatagttgaaactaatggcagttttgggcgcaaggacactactgaattcaagagatcagtcaagggatttaatttcactgatagtcatttgatgaatggaagatgggccaaagaatgttctagggatgctatagaaatgtttttccgagtcttagctgtttgccatactgcgattcctgtggcagatggaaattctgctggtatgccttatgaagctgagtctcctgatgaagcagctcttgttacagctgcaagagagtttggctttgaattttatcataggacacaaacaactatatcagtgcatgagtacgatcctgtcgttggtggaaagaacatataaactactcaacatcttagaattcagcagtgctcgtaagcgtatgtctgttattgtgaggacagaagagggtcggctatttctgttctgcaaaggagctgacagtgtaatattcgaaaggctctccaaggataatggaacagctcatctgaccaaaacaaagtgtcacattgatgagtattctgaggattactcgtctgccaagaattctgtacatactgatcatgttgcagctgttgagaaggtgtcagaagacattgagaaggatttggttcttttgggtgctactgctgtagaggatagattgcaaaatggggtccctgagtgtatttataaacttgcacaagctggaattaagatctggattttaactggagacaagttggagacagctgtaaacataggttacgcttgtaacctactgaggaaagagatggaggaaatttttatcacactggagaactcaagtacaagtgcttcagaggggtccagtggagaaggaaacaaaattgccacatttgaggaaattgatagaaaattaaaagatgctagaggaaagatttcccaaaaaggaacttcaacttcatttgctcttatcattgacggcaatgctctgacacatgctctcacgggcagccttaagaactcatttctggatctagcagtcaactgtgcatctgttttatgttgtcgggtttcaccaaaacaaaaggcactggtcaccagattggttaaaattaggacaagtaaaactactttagctattggtgatggagcaaatgatgttggtatgctacaagaggctgacattggggttggaataagtggtgctgaaggaatgcaggctgttatggcgagtgactttgcaatagcacagtttcgttttttagagcgattacttcttgtgcatggtcattggtgttatcgtcggattgcagctatgatatgctattttttcttcaagaacatcacatttggctttacgcttttctggtttgaggctcatgctatgttctcagcacaacctgcgtacaatgattggttcatatctttctataatgttgccttcacatctcttcctgtcatcgccctcggtgtttttgacaaggatgtctcttcccatgtttgtcttgaggtcccttcattacatcaagatggcgttaataatgtattcttcagttggtcccgaatactcagttggatgttaaatgggatgtgctgttcaataattatttactttggttccctcaacgctattctggttcaggctgtccgacaggatggtcgcgttgctgggtttgatatccttggggtgaccatgtacacttgtgtagtgtggactgtgaactgccagcttgctctctacatcagctacttcacctggatacaacattttgtcatctggggcagcatactgatttggtacactttccttgtcatatatggtctattttccccagcaatatcaaccactgcatatcatgtttttgtggaagcttgtgcacctagccctttgtactggctatccactctaatgattgtggtgacagccttgatcccattctttgtctacaaaatatcgagaacactctattatccacagtatcatgatcaagttcagagggctaactcaaagaattggtagtgcctgttgtataagatgctactgaatgaggggatgtacagtcagtaatttggtttaacataccacatgctttgctttgtagatcatgatgcagagtttcaggttgtggcagtgcgtctgtcaaatatcagaacacaatggtgacttcgcagtcacgcgaaggaactgcaagcggcaaattgattctttggacctattaccccactaggacacgtttttcttcggggtgccatcatggaagcagattgcaattaggatttatatagaatgatgtatagcatgtcgataactcgaacatgacttcctcgatatatgtagtactgtcttccaaaaaatagcattcttgtagcatcaaacggccaaacctatgttcgtggaagcatagttaataccctttattgctccaatggtttgtacatagttgtatgaatatatgagatggatcttgatgttgtttaacatttgatatgaaatgaataaatgatatgatgttatctct

SEQ ID NO: 9695 - DNA, 4200 bp, Zea Mays
tgcctcctccaggctctccagctgtccgtgtccagcatcccgcactccgcagcaccactcgcccgccccacaccaccacacggcctccgcccacgcgcacggcgcacccgtcctgtgctcacatcaccacgccacacgacgcgctcgtcagtcgtcacgcaccccacgacgccccaaccgtcccaaacccagatccttccccgcctcgccaccgccaccgccaccgccaatccaccaccatgcccatggacaccgacgagcgccccctcgtcgagctcgcctccgctgcggccgccactactctcgccgcctcctccacctcctccgcccccttccccgcccctgccacgcctgggttctcccgcgcggtccgctgcaacgcccccgcttcctcgctcccggccgatggcggggccggcgcgcagccggcctacccggagaacgcgatctcgacaaccaagtacacgcccgcgagcttcgtgcccaagtcgctcttcgagcagttccgccgcgccgcgaactgtttcttcctcgtcgtcgcctgcgtctccttcagccctcttgcgccctaccgcgccgtctccgtcctgctcccgctcgtcgtcgtcgtcagcgccgccatggccaaggaggccgtcgaggactggcgccggaagcagcaggacatagaagtgaacaataggaaggttgaggtgtatgatgggatccaatcatttcatgagacagaatggaagaagcttcgagttggcgatataattaaagttaaaaaggatgagttcttccctgctgatcttattttcctttcgtctagctcttgtgatggattatgctatgtggagacgatgaatcttgatggtgagacaaacttgaagcggaaacaggcattagaggtgactatgggcttgaatgatgaccatttccatagtttcaaggctttcattcggtgtgaggatccgaatgagaaattgtattctttcttaggaacactatactacaatgggcaacaatattctctgtctccggaacaggtcctgctaagggattcaaaacttcgtaatacaatgtatatatatggcaccataatatttacgggacatgatacaaaggtgatgcaaaatgcaatggagccaccatcaaagaggagttcagttgaacgaagaatggataaaataatatatctcctttttgtgattctctttgttattgcaacgtttgggtcaattgtgtttggaatgagaacaaagcatgagataagtccaggaagctatgcatggtacctcaggccggatcaagcaaatatattctttgatccaaacaatgcatcgtttgcagcattctgccattttcttacaagcctgatgctgtatgtgtgcttggtgcctatttcattgtatatatcgatagaaattgtcaaggttttacagagcacatttataaatcaagaccagaatatgtattgcgccgagtctgataaacctgcaagagctcgcacttcaaatttgaatgaagaacttggtcaagtccatactatactgtctgacaaaacagggacattaacatgcaattcaatggagttcttgaaatgttccattgctggtgttgcttatggaagtaggcctacagaagttgaaacgtgttatggagaaatagttgaaactaatggcagttttgggcgcaaggacactactgaattcaagagatcagtcaagggatttaatttcactgatagtcatttgatgaatggaagatgggccaaagaatgttctagggatgctatagaaatgtttttccgagtcttagctgtttgccatactgcgattcctgtggcagatggaaattctgctggtatgccttatgaagctgagtctcctgatgaagcagctcttgttacagctgcaagagagtttggctttgaattttatcataggacacaaacaactatatcagtgcatgagtacgatcctgtcgttggtggaaaggttgatagaacatataaactactcaacatcttagaattcagcagtgctcgtaagcgtatgtctgttattgtgaggacagaagagggtcggctatttctgttctgcaaaggagctgacagtgtaatattcgaaaggctctccaaggataatggaacagctcatctgaccaaaacaaagtgtcacattgatgagtattctgaggcaggtctccggaccctggcacttgcatattgtgaacttactgaagaacaatatgttgtatggaatcaggattactcgtctgccaagaattctgtacatactgatcatgttgcagctgttgagaaggtgtcagaagacattgagaaggatttggttcttttgggtgctactgctgtagaggatagattgcaaaatggggtccctgagtgtatttataaacttgcacaagctggaattaagatctggattttaactggagacaagttggagacagctgtaaacataggttacgcttgtaacctactgaggaaagagatggaggaaatttttatcacactggagaactcaagtacaagtgcttcagaggggtccagtggagaaggaaacaaaattgccacatttgaggaaattgatagaaaattaaaagatgctagaggaaagatttcccaaaaaggaacttcaacttcatttgctcttatcattgacggcaatgctctgacacatgctctcacgggcagccttaagaactcatttctggatctagcagtcaactgtgcatctgttttatgttgtcgggtttcaccaaaacaaaaggtcaccagattggttaaaattaggacaagtaaaactactttagctattggtgatggagcaaatgatgttggtatgctacaagaggctgacattggggttggaataagtggtgctgaaggaatgcaggctgttatggcgagtgactttgcaatagcacagtttcgttttttagagcgattacttcttgtgcatggtcattggtgttatcgtcggattgcagctatgatatgctattttttcttcaagaacatcacatttggctttacgcttttctggtttgaggctcatgctatgttctcagcacaacctgcgtacaatgattggttcatatctttctataatgttgccttcacatctcttcctgtcatcgccctcggtgtttttgacaaggatgtctcttcccatgtttgtcttgaggtcccttcattacatcaagatggcgttaataatgtattcttcagttggtcccgaatactcagttggatgttaaatgggatgtgctgttcaataattatttactttggttccctcaacgctattctggttcaggctgtccgacaggatggtcgcgttgctgggtttgatatccttggggtgaccatgtacacttgtgtagtgtggactgtgaactgccagcttgctctctacatcagctacttcacctggatacaacattttgtcatctggggcagcatactgatttggtacactttccttgtcatatatggtctattttccccagcaatatcaaccactgcatatcatgtttttgtggaagcttgtgcacctagccctttgtactggctatccactctaatgattgtggtgacagccttgatcccattctttgtctacaaaatatcgagaacactctattatccacagtatcatgatcaagttcagagggctaactcaaagaattggtagtgcctgttgtataagatgctactgaatgaggggatgtacagtcagtaatttggtttaacataccacatgctttgctttgtagatcatgatgcagagtttcaggttgtggcagtgcgtctgtcaaatatcagaacacaatggtgacttcgcagtcacgcgaaggaactgcaagcggcaaattgattctttggacctattaccccactaggacacgtttttcttcggggtgccatcatggaagcagattgcaattaggatttatatagaatgatgtatagcatgtcgataactcgaacatgacttcctcgatatatgtagtactgtcttccaaaaaatagcattcttgtagcatcaaacggccaaacctatgttcgtggaagcatagttaataccctttattgctccaatggtttgtacatagttgtatgaatatatgagatggatcttgatgttgtttaacatttgatatgaaatgaataaatgatatgatgttatctct

SEQ ID NO: 9696 - DNA, 1056 bp, Zea Mays
caccatcgatcggtaccgcacggctacgcgtacaactcctgagcaagactcataagcaagatcatgatcattgctagctggccccactgtaactagcaatccaaatgaaagcgcaagccacaagccatgagggcagttcagtctgcacagatcaactccaactccaaccaagaaatagcatcgaaatgctaaagcaatagcaaatgaagcctagtagctagggagcagaaagcctgaagagagacgagacgagacgatgcagctggagaaggggtccctggacctggtgctggtgccatgcgggctggtggtgatgctgagctaccacctcctactcctctaccgcattctccggcatcccgccacgaccgtgatcggctacgagaaccacaacaagctcgcctgggtgcggcgcatggtgcaggcgacccccgacgagacggggctggcgctgagcgtcatctccagcaacatctcggcgtccaccaacctggcgtcgctgtccatcgcgctgggctccctcatcggcgcctgggtcagcagcaccaccaagatgttcatgacggagctcgtctacggcgaccgcagccagtccacggccaccgtcaagtactacgtgcaggccagcttcctcgtcaccaccctcgactccgacgtgccggcgacctacgtgcagcacgccgtcatccggggcggcaacttctggtccatgggcctccgggcgctctacctggccaccacgctgctcatgtgggtcttcgggcccatacccatgttcgcctgctccgtgctcatggtgctcatcctgcacatgctggacaccaactccctgcccctgcaccaacaccaattcacagttaggaaacggcaagctctcacgccaaccatcgccacgactacgagacagcagaccagtccgcagaacccaatgctcagcaacccggtcttgtcacctgttacctttttcacttgagacaatcattgcagaacctgaattttcattaatgttgaactacaaaaatttcattacagatattgtttccaaaactaggacaa

SEQ ID NO: 9697 - DNA, 3553 bp, Zea Mays
atgcctctcctcaacccaaccggatcctctggtggaacttccagggtgccctcgtcggcggcgcgcttctcctcctctacatcgtcgacgccgccgttggttgaaagctcagaggtcatgcctcactcggcgcggcctccggggaccggagccaacttcaaccgcgcgcgcgaccagcgcggcacccgccgcgtctttctgcgtcgcccgccgcctccgcttcggcgtcctcctcatgtcacagccaatggtcatcgaggcgagggaggcagcggcggcgggggagcgcgtcggagcgcgggagaggaggcgggcgggcggtacacgaggcgcggcggcgtggcggaccgtgaggtggcggtgagtgccagcgcggaccctgtgggacggaatgctgcgaccgtcgccactggtggtgaggctccaccgccgcgggaggaggatggcggcggacgaggtggtgttcttgtgagcaagcgcccgtctgctgcgcccgtgctcccaccgcccaagcggagggcggtctccgtcactcggcagttcccacccgcctccaggtggacctcggctgctcctgctccgctcgctggtgcagatgccgacggaggtttgcggacacgatacgaagggcaacgtgagaacagagcttctgatgcattcaagaagccggcagttgctcgtcccctcgcgggcctcaaggatggtgttggtgttggtgtgatgtcgagagcggtgtcccccaaagctgctggcacgagggttctcaaaaagccgtgtgccagggatggagctgctccaatgtcgaacacagatcgtcatgatgctggattggtgaaatcgtctgctgcacatgacagaggaaggggagcaaggattgatgagctgcgggggaagaagggcccggtgaccggcgcacgatttccaccaaagccagagatcatatctaccacacgcaccttgctacctggccatggaaaggatggcggttgccatagcaaggtgcatcggccattggagtctgggcgtgctcatggtagttctttggctgatggacgtgctgtggaaattgttgctgcttgcactggtactagtgctggagctgtacaagatggcaaattagagaatggagaggttccctccaagaaggcttgggggtctcaggtttcttccgatgctgttctgcttgatcctgcatcttatagggatgtttctgcaagagatttccctggtttaagtgggaactttggaaggaagacgctgtcatgggcactagtaaaagatagaaaggtgatgaacaaatatgcagaagtgtctggtgagggcactgtgttgggaagtaaggacatgtttacaaatcaaagcacagtcaagccagacaatgtggttcagaaatttgttacagatgctcagcatataccattttccaaaggcaagaaggaaaccgtacgcgaaaggtgggtaacaacaaatgggattcaggactctgttgagctcactaaggatcgagttatgcaagctcccatgtctgcagacatgtgccccatgcccatgacacacaaaaagaaggctgccacaactagggatttctttggtcacaagaggatggtgaaggcaaaagctctaggtcatcaacagaggatgtttgcctcgggtagtaagagcaaacgggatgatgaggtggcttccaacttgaaaattcatgacatatttagggaaatagttttaaatgaaagaaatctcgagctttacctcaatagttcatcaggcctgccttctgtgaggtgtcaaaggcaatatagatacatgaatgcagatgctaggagcagatttaaaatgttgtgcaggatgtttgagtttgtatgcaggacgcttgtacaaactatggagcagcgttcattgaagatgagaattgacaatgaagctgctaaagtaatgaaggcgttaccaggttttactaaacatggtcctattgtgggacaagttcctggagttgaagttggtgatgagtttctatacagagctcagcttgctattgctggtctacatagtgagtaccggagaggcatttccaccaccacatatagaaatggcatgcttattgcaataagcattgttgcttctggaggttatcctgatgaattgggttgctcaggtgaactgatatacactggttctggcgggaagtctgctgttaagaagaaagatgaggatcaaaagcttaagtgtgggaaccttgcactaaagaattgcatcaaaacaaagactcctgtaagagtgattcatggatttaagtgtcggaataccgatcgaggcagtcattcgggggccaaactaatcccaaaatacacttatgatggattgtatttagtggtggatttctggatggatggtaaaccaggttcaagggtgtttaagtacaagttaaaaaagattcatgggcaaccagaacttcctatgcacatagctaaaagattgaagagcttcaaaagccgtccaggcctgtgcatgactgatatatctcaagggaaggaagccactcccatctgtgtcattaatacagtcgatgatgtgcaacctggacctttccaatacaccactagaattagatatccatttgggcttacagaaaaacacaatcagggttgtgactgcaccaatggttgctcagactctgagagctgtgcctgtgctgtgaagaatggaggggagatcccatttgacttaagtggcgcaattctcaatgagaagtctgtgatatttgagtgtggttcatcttgtaaatgtcctccgtcgtgccgcaacagggtcagtcagcatgatatgaaaataccactggaagtattcaggacaaccaagacaggttggggcgtaagatctctatggtccattcctgctggcagcttcatatgtgagtatatcggtgaggtgcagcatcaaaaggcggctgacaagagaaggaacaacaattacttgtttgatgtaggccttaactatgatgacgagaatgttagcagtgtgttgctatcaaatgtttcaggtttgaactcttctagctcttgctcccaggccatggaagatgtgcgcttcactatagatgcatctgtgtatggaaacatcggaaggttcatcaaccacagctgttcaccaaatcttcaagcacaaaatgttctccgggaccatggtgacaaaaggatgccacatattatgttctttgctgcagagacaattccaccactacaggaactgacttatgactataataactctgaaatagatcgtgtccaaggtgtgaatagaagaatgaaatccaaagtttgtcaatatagttcttcgctgtgtcgtcggaggttctactaaggcatggccgactgatagtcgtgtagtagtttcttgaaaaagaaatatcctacggaatgctgtcacttgtgttttcatttaccagttgatgacactcaaacaatatgagatgttactgctagtaaagtttcgatcctagttgatgacacgagatgctgctgatattaaagaagtattattagttgtacttaaccta

SEQ ID NO: 9698 - DNA, 3498 bp, Zea Mays
cctccaattccaaattctaaaaccccaaccgctctatgcctctcctcaacccaaccggatcctctggtggaacttccagggtgccctcgtcggcggcgcgcttctcctcctctacatcgtcgacgccgccgttggttgaaagctcagaggtcatgcctcactcggcgcggcctccggggaccggagccaacttcaaccgcgcgcgcgaccagcgcggcacccgccgcgtctttctgcgtcgcccgccgcctccgcttcggcgtcctcctcatgtcacagccaatggtcatcgaggcgagggaggcagcggcggcgggggagcgcgtcggagcgcgggagaggaggcgggcgggcggtacacgaggcgcggcggcgtggcggaccgtgaggtggcggtgagtgccagcgcggaccctgtgggacggaatgctgcgaccgtcgccactggtggtgaggctccaccgccgcgggaggaggatggcggcggacgaggtggtgttcttgtgagcaagcgcccgtctgctgcgcccgtgctcccaccgcccaagcggagggcggtctccgtcactcggcagttcccacccgcctccaggtggacctcggctgctcctgctccgctcgctggtgcagatgccgacggaggtttgcggacacgatacgaagggcaacgtgagaacagagcttctgatgcattcaagaagccggcagttgctcgtcccctcgcgggcctcaaggatggtgttggtgttggtgtgatgtcgagagcggtgtcccccaaagctgctggcacgagggttctcaaaaagccgtgtgccagggatggagctgctccaatgtcgaacacagatcgtcatgatgctggattggtgaaatcgtctgctgcacatgacagaggaaggggagcaaggattgatgagctgcgggggaagaagggcccggtgaccggcgcacgatttccaccaaagccagagatcatatctaccacacgcaccttgctacctggccatggaaaggatggcggttgccatagcaaggtgcatcggccattggagtctgggcgtgctcatggtagttctttggctgatggacgtgctgtggaaattgttgctgcttgcactggtactagtgctggagctgtacaagatggcaaattagagaatggagaggttccctccaagaaggcttgggggtctcaggtttcttccgatgctgttctgcttgatcctgcatcttatagggatgtttctgcaagagatttccctggtttaagtgggaactttggaaggaagacgctgtcatgggcactagtaaaagatagaaaggtgatgaacaaatatgaagtgtctggtgagggcactgtgttgggaagtaaggacatgtttacaaatcaaagcacagtcaagccagacaatgtggttcagaaatttgttacagatgctcagcatataccattttccaaaggcaagaaggaaaccgtacgcgaaaggtgggtaacaacaaatgggattcaggactctgttgagctcactaaggatcgagttatgcaagctcccatgtctgcagacatgtgccccatgcccatgacacacaaaaagaaggctgccacaactagggatttctttggtcacaagaggatggtgaaggcaaaagctctaggtcatcaacagaggatgtttgcctcgggtagtaagagcaaacgggatgatgaggtggcttccaacttgaaaattcatgacatatttagggaaatagttttaaatgaaagaaatctcgagctttacctcaatagttcatcaggcctgccttctgtgaggtgtcaaaggcaatatagatacatgaatgcagatgctaggagcagatttaaaatgttgtgcaggatgtttgagtttgtatgcaggacgcttgtacaaactatggagcagcgttcattgaagatgagaattgacaatgaagctgctaaagtaatgaaggcgttaccaggttttactaaacatggtcctattgtgggacaagttcctggagttgaagttggtgatgagtttctatacagagctcagcttgctattgctggtctacatagtgagtaccggagaggcatttccaccaccacatatagaaatggcatgcttattgcaataagcattgttgcttctggaggttatcctgatgaattgggttgctcaggtgaactgatatacactggttctggcgggaagtctgctgttaagaagaaagatgaggatcaaaagcttaagtgtgggaaccttgcactaaagaattgcatcaaaacaaagactcctgtaagagtgattcatggatttaagtgtcggaataccgatcgaggcagtcattcgggggccaaactaatcccaaaatacacttatgatggattgtatttagtggtggatttctggatggatggtaaaccaggttcaagggtgtttaagtacaagttaaaaaagattcatgggcaaccagaacttcctatgcacatagctaaaagattgaagagcttcaaaagccgtccaggcctgtgcatgactgatatatctcaagggaaggaagccactcccatctgtgtcattaatacagtcgatgatgtgcaacctggacctttccaatacaccactagaattagatatccatttgggcttacagaaaaacacaatcagggttgtgactgcaccaatggttgctcagactctgagagctgtgcctgtgctgtgaagaatggaggggagatcccatttgacttaagtggcgcaattctcaatgagaagtctgtgatatttgagtgtggttcatcttgtaaatgtcctccgtcgtgccgcaacagggtcagtcagcatgatatgaaaataccactggaagtattcaggacaaccaagacaggttggggcgtaagatctctatggtccattcctgctggcagcttcatatgtgagtatatcggtgaggtgcagcatcaaaaggcggctgacaagagaaggaacaacaattacttgtttgatgccatggaagatgtgcgcttcactatagatgcatctgtgtatggaaacatcggaaggttcatcaaccacagctgttcaccaaatcttcaagcacaaaatgttctccgggaccatggtgacaaaaggatgccacatattatgttctttgctgcagagacaattccaccactacaggaactgacttatgactataataactctgaaatagatcgtgtccaaggtgtgaatagaagaatgaaatccaaagtttgtcaatatagttcttcgctgtgtcgtcggaggttctactaaggcatggccgactgatagtcgtgtagtagtttcttgaaaaagaaatatcctacggaatgctgtcacttgtgttttcatttaccagttgatgacactcaaacaatatgagatgttactgctagtaaagtttcgatcctagttgatgacacgagatgctgctgatattaaagaagtattattagttgtacttaaccta

SEQ ID NO: 9699 - DNA, 1183 bp, Zea Mays
cagtctagccatggagagggtttcatcagctccagaaatggatgatgttatctcaactgatcagtcaagcagatcaacaaaaagaagggcttaagtttgggattatgttgattcagagctagtagatgggaaagagaaggcgatctgcaaatactgtatgcaacagagcaacatcatgaatgtcccactgaagaagattggtcaaaggcagaagctcttcatggttttctacaagagtttagtgatgcaaccaaagcattctcagcggatagacatcccacatctcatctttttctcaagttgttgctcgttatccgaggtgtgctgcttgatgtgacttggaactcaaatgaactcattaatgagatggcaaatgttatgtatgctaagttccaaaaatattgggaaaatcctaatattgtgttgctcatagctgctgttctagatccatcaatgaagaccgaatttgtcaagttctatttctacacaattggtgataatgttgatgtgaagatgagggagctaaaaaggtacttgaagaaatattacctagagtatgagaaaatcataaggagtcctagtttgcatgtctttattcctcatgaggatcagatgagaagtgagacttttacttcttcacctctctgtggtaaaagaagagtggaacatgcatttgctcaatttgcatctcaaaatatggatgcccgtccagagcgaacagaaatggatacttacttggaggaccctaggatccttgtcaagccggatgaaaacttcaatgttttaggatggtggaagaaaaacatagatgcctatccaatattgtctttgatggctagagattttttggctattcctgtgagtacggtatcctcagaatctgcctttagtgcagctggtagaattcttggaaaaaataggacatcactatctcctgaaacacttgaagctttagtctgtgccaaagactggttgattggattcaatgatgaagaagaaggtgaaccaatgacaggaaagcgaatgtttgattcagatgatgaagaagatgattgggaaatttgatgtaactactgaaccgttgtttgggaactacgtactgaaccattgcctgctatccagctgaaccgttgcctgctatccagctgaaccgttcgaccaccgtccatgagaaggtgatgga

SEQ ID NO: 9700 - DNA, 2181 bp, Zea Mays
ggagtgcttcgcagactcgtagtggctggcggcctttcgttgtctccagtctagccatggagagggtttcatcagctccagaaatggatgatgttatctcaactgatcagtcaagcagatcaacaaaaagaagggcttaagtttgggattatgttgattcagagctagtagatgggaaagagaaggcgatctgcaaatactgtaaggcccacttatcttctgttgcgggtaaaggtacaactcatctgaataggcacatttctacgtattgccatgcaatttcacaagaagagagacaaaggttcttagcgacccaaaaaacaaaacctgatgaggctcatgttttcgaccctgtagtctttcgaggtctaatagccaagtacttccttagcgcagagatttcatttcaaaagtgtgaagatccatcctggaaagaaatgataaattactgccaaccatcttttcgattagtcggtcgacagactgtccgttcagattgcattttgttgtatgaagaggagaagttgcaattgatggaccagtttacgaagttgaaatcccatgttagtttgactgccgatctttggtcctctaaccaaaaccttggctatcttggtgtaacaacacatttcattagtgaagactttgatttgcacaaaaagatcattgcattcaagaaaatttccttccctcatacatcttatgttgtgcaagatggtattacctcttgtttgctagagtggggattggttggggatttgtttactctaacattggataatgctagtgtaaacaatagagcaatgaaagatatgcgagatgcattgggtagtcagatgttttttagtggtgaacacctccatgtgagatgttcttctcatgtgctcaatatcatggttcaagctggactgaaagtcgttccaaatgcaatcgggagcgtgagggatattatcaaggtcgtgacatctacaccatctcgtttgcaaatcttcaattctattgttcaagcattgggtcttaaaagtaaatcagggctgattcttgatgttccacatcgttggaatgcaacctatgatatgttaaatgaagcactaaaatataaggctgctcttaataggtatgcaacagagcaacatcatgaatgtcccactgaagaagattggtcaaaggcagaagctcttcatggttttctacaagagtttagtgatgcaaccaaagcattctcagcggatagacatcccacatctcatctttttctcaagttgttgctcgttatccgaggtgtgctgcttgatgtgacttggaactcaaatgaactcattaatgagatggcaaatgttatgtatgctaagttccaaaaatattgggaaaatcctaatattgtgttgctcatagctgctgttctagatccatcaatgaagaccgaatttgtcaagttctatttctacacaattggtgataatgttgatgtgaagatgagggagctaaaaaggtacttgaagaaatattacctagagtatgagaaaatcataaggagtcctagtttgcatgtctttattcctcatgaggatcagatgagaagtgagacttttacttcttcacctctctgtggtaaaagaagagtggaacatgcatttgctcaatttgcatctcaaaatatggatgcccgtccagagcgaacagaaatggatacttacttggaggaccctaggatccttgtcaagccggatgaaaacttcaatgttttaggatggtggaagaaaaacatagatgcctatccaatattgtctttgatggctagagattttttggctattcctgtgagtacggtatcctcagaatctgcctttagtgcagctggtagaattcttggaaaaaataggacatcactatctcctgaaacacttgaagctttagtctgtgccaaagactggttgattggattcaatgatgaagaagaaggtgaaccaatgacaggaaagcgaatgtttgattcagatgatgaagaagatgattgggaaatttgatatttaggtccaatgagcagatgtttagtagaatagcctgttgttgagtgtagcaagatcgatgattcagtgataacaaagtgacttaccttctccttcatctatgcacattcaagctgaaccgttcgaccaccgtccatgagaaggtgatgga

SEQ ID NO: 9701 - DNA, 2455 bp, Zea Mays
tatactatctattcatatagagatggaatcaccgcccctcacagctgaagcaattgcttatacagagaaaaagatggacatggctttggaggatataattaaaatgtcaaagaaaaagaatcctggaggcaagaaacccccgaggcagccgataaaaaagcatccattccagaatggcaactctaataaagggaatggcaaggttcaaagttttatggagtctagatcaaccattagacaaagaaggtcaaatcttggtggaaatcagttccctgctacaaagcaggctgcgaagaaggctgctgttatgccaatgcacaagggggctatccgttggaacaagccaaggtaaacaatgatgttcttttattgcttatgagaaagtttactgcattcaaggggttgttcaatttattgagtcatgcaccttggattatattggctgagaatgattgtgatgctggtgtttacatggaactgccttaacttctctggttatacacacacaagcttataaagaacaatcgatttcatattcttgtggcacaaggcctgttttcttggttgaactgctacaaatatatggtgaatatagcatatgagccttgaagcttcattgaaagttatggccttctcctttatctgctgttgcctgacatttttctatgcagtttcatggtgtaatttatagctgctggatgagtgttattttggacaccagcattaactgtctgtgagggtttcattagtgttatttgtcaactattgttggaaggactgaaggagatgtgataatggttagcgtctcatgccactggtgacggatcatccatatacagggacgttacatgcctgagtttgaattggttttgactactggctccttggcagtgttcagtgtttatttgttgaatgatgaatgcagtgtaaatctagggtagtgctgctaattggacaattgttgtatgcctccaagggagtatattttgctactgcctcatattcaagttggctgtatccgtaacatcatgccagttttgagcatcctatcataatctgctatatgctccccttgttcactgcgtcccacagagataatgcttgcctgcatttctactggataagagtaaatcatggtatcttacgatttatctcagtatgctgggctgtatggatgctatcttttcaaggtcaactgttgggatttattttcatgattccttatgtgaccttgtttgttctggatcagtggtcactatttacatggcttgagttttatcagtttaatcaatcaataagttgtgtcaacttgggacattgttgaaccatgtgcattgaaatttgggtggaactaaacagtctagactccaaaatgtgagggccttggaaaccaagaggatgcactagatattttcaatgaacactttattgtttctgtttcattttatttcaaaacatggtatgtactccctgacttcacttgagaagcgagaattgtatccttgttttgatgggggtatggtgagtttgctcagaaaacaatatggctcttggttctccgttgcttatgattcttggtactcgagcactcctgctcatgtgagatactaatgttttgattttgatacagtgcaagtaccttagtgcagaggaggcctgtaggtggtgcttttcagaatgccaaggtcaaggagtccaaccaggcagcaccaaggacgatggatgcactctttgcacagatgaaggcgcaacgcttgaggacggtacctcaacagcaggcaaattcttccccctggagtcatttcaaccagcatcgacgtgttcagcagcagcagaggcgaggcagagggtatggtggccgtaatgttggcaaccaatgaatccaactagacatatctactgcatcggagccctttctcttcactggtcttttggaccttggaagaaaggacgccccttggaaaatcaaacttggctttgtttattggaggggtgacaatgggctctaacttggctttgtttattggaggggtgacatcgggctctaaattttacactaagatttaaggatctgattaagatcaggccctatttctattcatttttaaactaaaatttatttagtgtcctactattttgtgaagcgtttggatcgtgatccattaccacctcacctttggacgtggacaggatatgaagcgaagtttgtttgagttttctagttgtgtgcagtctgcttccgtttcagcatgtataatgacatggaaattatttggtcagagattatgatgtcttgtttcttggcttgattagcttcatccccaactaagagtaattcaccttacctagggatgacaacaggtcaggtttagatagggtagaataaatatccgtccgctataatatttgcgaagattatttatatctgtctatgactatactcgcggataacttg

SEQ ID NO: 9702 - DNA, 2580 bp, Zea Mays
gtctctctccctttctcgagttgacgagccctcgacggcgcctacccgcttggtccttgcaatctattgcgtgtctgctttcggtctagggtcgcggagacaggggaatcgattgtgaaaggtggaactgagatggaatcaccgcccctcacagctgaagcaattgcttatacagagaaaaagatggacatggctttggaggatataattaaaatgtcaaagaaaaagaatcctggaggcaagaaacccccgaggcagccgataaaaaagcatccattccagaatggcaactctaataaagggaatggcaaggttcaaagttttatggagtctagatcaaccattagacaaggtgttcttgcacagagaaggtcaaatcttggtggaaatcagttccctgctacaaagcaggctgcgaagaaggctgctgttatgccaatgcacaagggggctatccgttggaacaagccaaggtaaacaatgatgttcttttattgcttatgagaaagtttactgcattcaaggggttgttcaatttattgagtcatgcaccttggattatattggctgagaatgattgtgatgctggtgtttacatggaactgccttaacttctctggttatacacacacaagcttataaagaacaatcgatttcatattcttgtggcacaaggcctgttttcttggttgaactgctacaaatatatggtgaatatagcatatgagccttgaagcttcattgaaagttatggccttctcctttatctgctgttgcctgacatttttctatgcagtttcatggtgtaatttatagctgctggatgagtgttattttggacaccagcattaactgtctgtgagggtttcattagtgttatttgtcaactattgttggaaggactgaaggagatgtgataatggttagcgtctcatgccactggtgacggatcatccatatacagggacgttacatgcctgagtttgaattggttttgactactggctccttggcagtgttcagtgtttatttgttgaatgatgaatgcagtgtaaatctagggtagtgctgctaattggacaattgttgtatgcctccaagggagtatattttgctactgcctcatattcaagttggctgtatccgtaacatcatgccagttttgagcatcctatcataatctgctatatgctccccttgttcactgcgtcccacagagataatgcttgcctgcatttctactggataagagtaaatcatggtatcttacgatttatctcagtatgctgggctgtatggatgctatcttttcaaggtcaactgttgggatttattttcatgattccttatgtgaccttgtttgttctggatcagtggtcactatttacatggcttgagttttatcagtttaatcaatcaataagttgtgtcaacttgggacattgttgaaccatgtgcattgaaatttgggtggaactaaacagtctagactccaaaatgtgagggccttggaaaccaagaggatgcactagatattttcaatgaacactttattgtttctgtttcattttatttcaaaacatggtatgtactccctgacttcacttgagaagcgagaattgtatccttgttttgatgggggtatggtgagtttgctcagaaaacaatatggctcttggttctccgttgcttatgattcttggtactcgagcactcctgctcatgtgagatactaatgttttgattttgatacagtgcaagtaccttagtgcagaggaggcctgtaggtggtgcttttcagaatgccaaggtcaaggagtccaaccaggcagcaccaaggacgatggatgcactctttgcacagatgaaggcgcaacgcttgaggacggtacctcaacagcaggcaaattcttccccctggagtcatttcaaccagcatcgacgtgttcagcagcagcagaggcgaggcagagggtatggtggccgtaatgttggcaaccaatgaatccaactagacatatctactgcatcggagccctttctcttcactggtcttttggaccttggaagaaaggacgccccttggaaaatcaaacttggctttgtttattggaggggtgacaatgggctctaacttggctttgtttattggaggggtgacatcgggctctaaattttacactaagatttaaggatctgattaagatcaggccctatttctattcatttttaaactaaaatttatttagtgtcctactattttgtgaagcgtttggatcgtgatccattaccacctcacctttggacgtggacaggatatgaagcgaagtttgtttgagttttctagttgtgtgcagtctgcttccgtttcagcatgtataatgacatggaaattatttggtcagagattatgatgtcttgtttcttggcttgattagcttcatccccaactaagagtaattcaccttacctagggatgacaacaggtcaggtttagatagggtagaataaatatccgtccgctataatatttgcgaagattatttatatctgtctatgactatactcgcggataacttg

SEQ ID NO: 9703 - DNA, 2754 bp, Zea Mays
gacgcggcccgcagccacggccttccgtaatgtcataactccccttctcgagtccatctccaacctcatccctcccaccccaataatacatccagccggcgccatcaggcccggcaacgcgcaagcggggctgaccatcgaaccctagtccccggccgagccgccctccgccgagccttgcggccgctctgcgtcatccctcttagtctccctccgttcgacacggcttggatccgagatggaatcaccgcccctcacagctgaagcaattgcttatacagagaaaaagatggacatggctttggaggatataattaaaatgtcaaagaaaaagaatcctggaggcaagaaacccccgaggcagccgataaaaaagcatccattccagaatggcaactctaataaagggaatggcaaggttcaaagttttatggagtctagatcaaccattagacaaggtgttcttgcacagagaaggtcaaatcttggtggaaatcagttccctgctacaaagcaggctgcgaagaaggctgctgttatgccaatgcacaagggggctatccgttggaacaagccaaggtaaacaatgatgttcttttattgcttatgagaaagtttactgcattcaaggggttgttcaatttattgagtcatgcaccttggattatattggctgagaatgattgtgatgctggtgtttacatggaactgccttaacttctctggttatacacacacaagcttataaagaacaatcgatttcatattcttgtggcacaaggcctgttttcttggttgaactgctacaaatatatggtgaatatagcatatgagccttgaagcttcattgaaagttatggccttctcctttatctgctgttgcctgacatttttctatgcagtttcatggtgtaatttatagctgctggatgagtgttattttggacaccagcattaactgtctgtgagggtttcattagtgttatttgtcaactattgttggaaggactgaaggagatgtgataatggttagcgtctcatgccactggtgacggatcatccatatacagggacgttacatgcctgagtttgaattggttttgactactggctccttggcagtgttcagtgtttatttgttgaatgatgaatgcagtgtaaatctagggtagtgctgctaattggacaattgttgtatgcctccaagggagtatattttgctactgcctcatattcaagttggctgtatccgtaacatcatgccagttttgagcatcctatcataatctgctatatgctccccttgttcactgcgtcccacagagataatgcttgcctgcatttctactggataagagtaaatcatggtatcttacgatttatctcagtatgctgggctgtatggatgctatcttttcaaggtcaactgttgggatttattttcatgattccttatgtgaccttgtttgttctggatcagtggtcactatttacatggcttgagttttatcagtttaatcaatcaataagttgtgtcaacttgggacattgttgaaccatgtgcattgaaatttgggtggaactaaacagtctagactccaaaatgtgagggccttggaaaccaagaggatgcactagatattttcaatgaacactttattgtttctgtttcattttatttcaaaacatggtatgtactccctgacttcacttgagaagcgagaattgtatccttgttttgatgggggtatggtgagtttgctcagaaaacaatatggctcttggttctccgttgcttatgattcttggtactcgagcactcctgctcatgtgagatactaatgttttgattttgatacagtgcaagtaccttagtgcagaggaggcctgtaggtggtgcttttcagaatgccaaggtatggagtatggactttgtcaaatcttgaccttaatgctgagtaaataggacaaactggccgaaaaggtcaaggagtccaaccaggcagcaccaaggacgatggatgcactctttgcacagatgaaggcgcaacgcttgaggacggtacctcaacagcaggcaaattcttccccctggagtcatttcaaccagcatcgacgtgttcagcagcagcagaggcgaggcagagggtatggtggccgtaatgttggcaaccaatgaatccaactagacatatctactgcatcggagccctttctcttcactggtcttttggaccttggaagaaaggacgccccttggaaaatcaaacttggctttgtttattggaggggtgacaatgggctctaacttggctttgtttattggaggggtgacatcgggctctaaattttacactaagatttaaggatctgattaagatcaggccctatttctattcatttttaaactaaaatttatttagtgtcctactattttgtgaagcgtttggatcgtgatccattaccacctcacctttggacgtggacaggatatgaagcgaagtttgtttgagttttctagttgtgtgcagtctgcttccgtttcagcatgtataatgacatggaaattatttggtcagagattatgatgtcttgtttcttggcttgattagcttcatccccaactaagagtaattcaccttacctagggatgacaacaggtcaggtttagatagggtagaataaatatccgtccgctataatatttgcgaagattatttatatctgtctatgactatactcgcggataacttg

SEQ ID NO: 9704 - DNA, 2884 bp, Zea Mays
gacgcggcccgcagccacggccttccgtaatgtcataactccccttctcgagtccatctccaacctcatccctcccaccccaataatacatccagccggcgccatcaggcccggcaacgcgcaagcggggctgaccatcgaaccctagtccccggccgagccgccctccgccgagccttgcggccgctctgcgtcatccctcttagtctccctccgttcgacacggcttggatccgagatggaatcaccgcccctcacagctgaagcaattgcttatacagagaaaaagatggacatggctttggaggatataattaaaatgtcaaagaaaaagaatcctggaggcaagaaacccccgaggcagccgataaaaaagcatccattccagaatggcaactctaataaagggaatggcaaggttcaaagttttatggagtctagatcaaccattagacaaggtgttcttgcacagagaaggtcaaatcttggtggaaatcagttccctgctacaaagcaggctgcgaagaaggctgctgttatgccaatgcacaagggggctatccgttggaacaagccaaggtaaacaatgatgttcttttattgcttatgagaaagtttactgcattcaaggggttgttcaatttattgagtcatgcaccttggattatattggctgagaatgattgtgatgctggtgtttacatggaactgccttaacttctctggttatacacacacaagcttataaagaacaatcgatttcatattcttgtggcacaaggcctgttttcttggttgaactgctacaaatatatggtgaatatagcatatgagccttgaagcttcattgaaagttatggccttctcctttatctgctgttgcctgacatttttctatgcagtttcatggtgtaatttatagctgctggatgagtgttattttggacaccagcattaactgtctgtgagggtttcattagtgttatttgtcaactattgttggaaggactgaaggagatgtgataatggttagcgtctcatgccactggtgacggatcatccatatacagggacgttacatgcctgagtttgaattggttttgactactggctccttggcagtgttcagtgtttatttgttgaatgatgaatgcagtgtaaatctagggtagtgctgctaattggacaattgttgtatgcctccaagggagtatattttgctactgcctcatattcaagttggctgtatccgtaacatcatgccagttttgagcatcctatcataatctgctatatgctccccttgttcactgcgtcccacagagataatgcttgcctgcatttctactggataagagtaaatcatggtatcttacgatttatctcagtatgctgggctgtatggatgctatcttttcaaggtcaactgttgggatttattttcatgattccttatgtgaccttgtttgttctggatcagtggtcactatttacatggcttgagttttatcagtttaatcaatcaataagttgtgtcaacttgggacattgttgaaccatgtgcattgaaatttgggtggaactaaacagtctagactccaaaattgcaagtaccttagtgcagaggaggcctgtaggtggtgcttttcagaatgccaaggtatggagtatggactttgtcaaatcttgaccttaatgctgagtaaataggacaaactggccgaaaaggtaaactgtttcctaatgtattgtatctgatgcataataatcaacttaagatgtaatgggtgatcttttggcctatcaatataatgacatcttggaaaaccattgctattgtaattgatattttgtgttctttcttgatatgttttaatgcatagacagcatagttttctcacataatccatcttttttctggtatcctcgtgtcacttcataatcatctgtagtagtttcagagccgtgatcagtgctatactcgagtccatttttatttttagaagttgcgtgatacatgaacttctatttgtttgattaatatattcgttgaattatcatgtcctgtagttttttttgtcgctgctgatcatacgcccgtaatctatttgtaggtcaaggagtccaaccaggcagcaccaaggacgatggatgcactctttgcacagatgaaggcgcaacgcttgaggacggtacctcaacagcaggcaaattcttccccctggagtcatttcaaccagcatcgacgtgttcagcagcagcagaggcgaggcagagggtatggtggccgtaatgttggcaaccaatgaatccaactagacatatctactgcatcggagccctttctcttcactggtcttttggaccttggaagaaaggacgccccttggaaaatcaaacttggctttgtttattggaggggtgacaatgggctctaacttggctttgtttattggaggggtgacatcgggctctaaattttacactaagatttaaggatctgattaagatcaggccctatttctattcatttttaaactaaaatttatttagtgtcctactattttgtgaagcgtttggatcgtgatccattaccacctcacctttggacgtggacaggatatgaagcgaagtttgtttgagttttctagttgtgtgcagtctgcttccgtttcagcatgtataatgacatggaaattatttggtcagagattatgatgtcttgtttcttggcttgattagcttcatccccaactaagagtaattcaccttacctagggatgacaacaggtcaggtttagatagggtagaataaatatccgtccgctataatatttgcgaagattatttatatctgtctatgactatactcgcggataacttg

SEQ ID NO: 9705 - DNA, 2664 bp, Zea Mays
gacgcggcccgcagccacggccttccgtaatgtcataactccccttctcgagtccatctccaacctcatccctcccaccccaataatacatccagccggcgccatcaggcccggcaacgcgcaagcggggctgaccatcgaaccctagtccccggccgagccgccctccgccgagccttgcggccgctctgcgtcatccctcttagtctccctccgttcgacacggcttggatccgagatggaatcaccgcccctcacagctgaagcaattgcttatacagagaaaaagatggacatggctttggaggatataattaaaatgtcaaagaaaaagaatcctggaggcaagaaacccccgaggcagccgggtgttcttgcacagagaaggtcaaatcttggtggaaatcagttccctgctacaaagcaggctgcgaagaaggctgctgttatgccaatgcacaagggggctatccgttggaacaagccaaggtaaacaatgatgttcttttattgcttatgagaaagtttactgcattcaaggggttgttcaatttattgagtcatgcaccttggattatattggctgagaatgattgtgatgctggtgtttacatggaactgccttaacttctctggttatacacacacaagcttataaagaacaatcgatttcatattcttgtggcacaaggcctgttttcttggttgaactgctacaaatatatggtgaatatagcatatgagccttgaagcttcattgaaagttatggccttctcctttatctgctgttgcctgacatttttctatgcagtttcatggtgtaatttatagctgctggatgagtgttattttggacaccagcattaactgtctgtgagggtttcattagtgttatttgtcaactattgttggaaggactgaaggagatgtgataatggttagcgtctcatgccactggtgacggatcatccatatacagggacgttacatgcctgagtttgaattggttttgactactggctccttggcagtgttcagtgtttatttgttgaatgatgaatgcagtgtaaatctagggtagtgctgctaattggacaattgttgtatgcctccaagggagtatattttgctactgcctcatattcaagttggctgtatccgtaacatcatgccagttttgagcatcctatcataatctgctatatgctccccttgttcactgcgtcccacagagataatgcttgcctgcatttctactggataagagtaaatcatggtatcttacgatttatctcagtatgctgggctgtatggatgctatcttttcaaggtcaactgttgggatttattttcatgattccttatgtgaccttgtttgttctggatcagtggtcactatttacatggcttgagttttatcagtttaatcaatcaataagttgtgtcaacttgggacattgttgaaccatgtgcattgaaatttgggtggaactaaacagtctagactccaaaatgtgagggccttggaaaccaagaggatgcactagatattttcaatgaacactttattgtttctgtttcattttatttcaaaacatggtatgtactccctgacttcacttgagaagcgagaattgtatccttgttttgatgggggtatggtgagtttgctcagaaaacaatatggctcttggttctccgttgcttatgattcttggtactcgagcactcctgctcatgtgagatactaatgttttgattttgatacagtgcaagtaccttagtgcagaggaggcctgtaggtggtgcttttcagaatgccaaggtatggagtatggactttgtcaaatcttgaccttaatgctgagtaaataggacaaactggccgaaaaggtcaaggagtccaaccaggcagcaccaaggacgatggatgcactctttgcacagatgaaggcgcaacgcttgaggacggtacctcaacagcaggcaaattcttccccctggagtcatttcaaccagcatcgacgtgttcagcagcagcagaggcgaggcagagggtatggtggccgtaatgttggcaaccaatgaatccaactagacatatctactgcatcggagccctttctcttcactggtcttttggaccttggaagaaaggacgccccttggaaaatcaaacttggctttgtttattggaggggtgacaatgggctctaacttggctttgtttattggaggggtgacatcgggctctaaattttacactaagatttaaggatctgattaagatcaggccctatttctattcatttttaaactaaaatttatttagtgtcctactattttgtgaagcgtttggatcgtgatccattaccacctcacctttggacgtggacaggatatgaagcgaagtttgtttgagttttctagttgtgtgcagtctgcttccgtttcagcatgtataatgacatggaaattatttggtcagagattatgatgtcttgtttcttggcttgattagcttcatccccaactaagagtaattcaccttacctagggatgacaacaggtcaggtttagatagggtagaataaatatccgtccgctataatatttgcgaagattatttatatctgtctatgactatactcgcggataacttg

SEQ ID NO: 9706 - DNA, 2684 bp, Zea Mays
gacgcggcccgcagccacggccttccgtaatgtcataactccccttctcgagtccatctccaacctcatccctcccaccccaataatacatccagccggcgccatcaggcccggcaacgcgcaagcggggctgaccatcgaaccctagtccccggccgagccgccctccgccgagccttgcggccgctctgcgtcatccctcttagtctccctccgttcgacacggcttggatccgatggaatcaccgcccctcacagctgaagcaattgcttatacagagaaaaagatggacatggctttggaggatataattaaaatgtcaaagaaaaagaatcctggaggcaagaaacccccgaggcagccgataaaaaagcatccattccagaatggcaactctaataaagggaatggcaaggttcaaagttttatggagtctagatcaaccattagacaaggtgttcttgcacagagaaggtcaaatcttggtggaaatcagttccctgctacaaagcaggctgcgaagaaggctgctgttatgccaatgcacaagggggctatccgttggaacaagccaaggtaaacaatgatgttcttttattgcttatgagaaagtttactgcattcaaggggttgttcaatttattgagtcatgcaccttggattatattggctgagaatgattgtgatgctggtgtttacatggaactgccttaacttctctggttatacacacacaagcttataaagaacaatcgatttcatattcttgtggcacaaggcctgttttcttggttgaactgctacaaatatatggtgaatatagcatatgagccttgaagcttcattgaaagttatggccttctcctttatctgctgttgcctgacatttttctatgcagtttcatggtgtaatttatagctgctggatgagtgttattttggacaccagcattaactgtctgtgagggtttcattagtgttatttgtcaactattgttggaaggactgaaggagatgtgataatggttagcgtctcatgccactggtgacggatcatccatatacagggacgttacatgcctgagtttgaattggttttgactactggctccttggcagtgttcagtgtttatttgttgaatgatgaatgcagtgtaaatctagggtagtgctgctaattggacaattgttgtatgcctccaagggagtatattttgctactgcctcatattcaagttggctgtatccgtaacatcatgccagttttgagcatcctatcataatctgctatatgctccccttgttcactgcgtcccacagagataatgcttgcctgcatttctactggataagagtaaatcatggtatcttacgatttatctcagtatgctgggctgtatggatgctatcttttcaaggtcaactgttgggatttattttcatgattccttatgtgaccttgtttgttctggatcagtggtcactatttacatggcttgagttttatcagtttaatcaatcaataagttgtgtcaacttgggacattgttgaaccatgtgcattgaaatttgggtggaactaaacagtctagactccaaaatgtgagggccttggaaaccaagaggatgcactagatattttcaatgaacactttattgtttctgtttcattttatttcaaaacatggtatgtactccctgacttcacttgagaagcgagaattgtatccttgttttgatgggggtatggtgagtttgctcagaaaacaatatggctcttggttctccgttgcttatgattcttggtactcgagcactcctgctcatgtgagatactaatgttttgattttgatacagtgcaagtaccttagtgcagaggaggcctgtaggtggtgcttttcagaatgccaaggtcaaggagtccaaccaggcagcaccaaggacgatggatgcactctttgcacagatgaaggcgcaacgcttgaggacggtacctcaacagcaggcaaattcttccccctggagtcatttcaaccagcatcgacgtgttcagcagcagcagaggcgaggcagagggtatggtggccgtaatgttggcaaccaatgaatccaactagacatatctactgcatcggagccctttctcttcactggtcttttggaccttggaagaaaggacgccccttggaaaatcaaacttggctttgtttattggaggggtgacaatgggctctaacttggctttgtttattggaggggtgacatcgggctctaaattttacactaagatttaaggatctgattaagatcaggccctatttctattcatttttaaactaaaatttatttagtgtcctactattttgtgaagcgtttggatcgtgatccattaccacctcacctttggacgtggacaggatatgaagcgaagtttgtttgagttttctagttgtgtgcagtctgcttccgtttcagcatgtataatgacatggaaattatttggtcagagattatgatgtcttgtttcttggcttgattagcttcatccccaactaagagtaattcaccttacctagggatgacaacaggtcaggtttagatagggtagaataaatatccgtccgctataatatttgcgaagattatttatatctgtctatgactatactcgcggataacttg

SEQ ID NO: 9707 - DNA, 3032 bp, Zea Mays
cgacgcggcccgcagccacggccttccgtaatgtcataactccccttctcgagtccatctccaacctcatccctcccaccccaataatacatccagccggcgccatcaggcccggcaacgcgcaagcggggctgaccatcgaaccctagtccccggccgagccgccctccgccgagccttgcggccgctctgcgtcatccctcttagtctccctccgttcgacacggcttggatccgagatggaatcaccgcccctcacagctgaagcaattgcttatacagagaaaaagatggacatggctttggaggatataattaaaatgtcaaagaaaaagaatcctggaggcaagaaacccccgaggcagccgataaaaaagcatccattccagaatggcaactctaataaagggaatggcaaggttcaaagttttatggagtctagatcaaccattagacaaggtgttcttgcacagagaaggtcaaatcttggtggaaatcagttccctgctacaaagcaggctgcgaagaaggctgctgttatgccaatgcacaagggggctatccgttggaacaagccaaggtaaacaatgatgttcttttattgcttatgagaaagtttactgcattcaaggggttgttcaatttattgagtcatgcaccttggattatattggctgagaatgattgtgatgctggtgtttacatggaactgccttaacttctctggttatacacacacaagcttataaagaacaatcgatttcatattcttgtggcacaaggcctgttttcttggttgaactgctacaaatatatggtgaatatagcatatgagccttgaagcttcattgaaagttatggccttctcctttatctgctgttgcctgacatttttctatgcagtttcatggtgtaatttatagctgctggatgagtgttattttggacaccagcattaactgtctgtgagggtttcattagtgttatttgtcaactattgttggaaggactgaaggagatgtgataatggttagcgtctcatgccactggtgacggatcatccatatacagggacgttacatgcctgagtttgaattggttttgactactggctccttggcagtgttcagtgtttatttgttgaatgatgaatgcagtgtaaatctagggtagtgctgctaattggacaattgttgtatgcctccaagggagtatattttgctactgcctcatattcaagttggctgtatccgtaacatcatgccagttttgagcatcctatcataatctgctatatgctccccttgttcactgcgtcccacagagataatgcttgcctgcatttctactggataagagtaaatcatggtatcttacgatttatctcagtatgctgggctgtatggatgctatcttttcaaggtcaactgttgggatttattttcatgattccttatgtgaccttgtttgttctggatcagtggtcactatttacatggcttgagttttatcagtttaatcaatcaataagttgtgtcaacttgggacattgttgaaccatgtgcattgaaatttgggtggaactaaacagtctagactccaaaatgtgagggccttggaaaccaagaggatgcactagatattttcaatgaacactttattgtttctgtttcattttatttcaaaacatggtatgtactccctgacttcacttgagaagcgagaattgtatccttgttttgatgggggtatgtgcaagtaccttagtgcagaggaggcctgtaggtggtgcttttcagaatgccaaggtatggagtatggactttgtcaaatcttgaccttaatgctgagtaaataggacaaactggccgaaaaggtaaactgtttcctaatgtattgtatctgatgcataataatcaacttaagatgtaatgggtgatcttttggcctatcaatataatgacatcttggaaaaccattgctattgtaattgatattttgtgttctttcttgatatgttttaatgcatagacagcatagttttctcacataatccatcttttttctggtatcctcgtgtcacttcataatcatctgtagtagtttcagagccgtgatcagtgctatactcgagtccatttttatttttagaagttgcgtgatacatgaacttctatttgtttgattaatatattcgttgaattatcatgtcctgtagttttttttgtcgctgctgatcatacgcccgtaatctatttgtaggtcaaggagtccaaccaggcagcaccaaggacgatggatgcactctttgcacagatgaaggcgcaacgcttgaggacggtacctcaacagcaggcaaattcttccccctggagtcatttcaaccagcatcgacgtgttcagcagcagcagaggcgaggcagagggtatggtggccgtaatgttggcaaccaatgaatccaactagacatatctactgcatcggagccctttctcttcactggtcttttggaccttggaagaaaggacgccccttggaaaatcaaacttggctttgtttattggaggggtgacaatgggctctaacttggctttgtttattggaggggtgacatcgggctctaaattttacactaagatttaaggatctgattaagatcaggccctatttctattcatttttaaactaaaatttatttagtgtcctactattttgtgaagcgtttggatcgtgatccattaccacctcacctttggacgtggacaggatatgaagcgaagtttgtttgagttttctagttgtgtgcagtctgcttccgtttcagcatgtataatgacatggaaattatttggtcagagattatgatgtcttgtttcttggcttgattagcttcatccccaactaagagtaattcaccttacctagggatgacaacaggtcaggtttagatagggtagaataaatatccgtccgctataatatttgcgaagattatttatatctgtctatgactatactcgcggataacttg

SEQ ID NO: 9708 - DNA, 1480 bp, Zea Mays
ccggccgcgacgcggcccgcagccacggccttccgtaatgtcataactccccttctcgagtccatctccaacctcatccctcccaccccaataatacatccagccggcgccatcaggcccggcaacgcgcaagcggggctgaccatcgaaccctagtccccggccgagccgccctccgccgagccttgcggccgctctgcgtcatccctcttagtctccctccgttcgacacggcttggatccgagatggaatcaccgcccctcacagctgaagcaattgcttatacagagaaaaagatggacatggctttggaggatataattaaaatgtcaaagaaaaagaatcctggaggcaagaaacccccgaggcagccgataaaaaagcatccattccagaatggcaactctaataaagggaatggcaaggttcaaagttttatggagtctagatcaaccattagacaaggtgttcttgcacagagaaggtcaaatcttggtggaaatcagttccctgctacaaagcaggctgcgaagaaggctgctgttatgccaatgcacaagggggctatccgttggaacaagccaagtgcaagtaccttagtgcagaggaggcctgtaggtggtgcttttcagaatgccaaggtatggagtatggactttgtcaaatcttgaccttaatgctgagtaaataggacaaactggccgaaaaggtcaaggagtccaaccaggcagcaccaaggacgatggatgcactctttgcacagatgaaggcgcaacgcttgaggacggtacctcaacagcaggcaaattcttccccctggagtcatttcaaccagcatcgacgtgttcagcagcagcagaggcgaggcagagggtatggtggccgtaatgttggcaaccaatgaatccaactagacatatctactgcatcggagccctttctcttcactggtcttttggaccttggaagaaaggacgccccttggaaaatcaaacttggctttgtttattggaggggtgacaatgggctctaacttggctttgtttattggaggggtgacatcgggctctaaattttacactaagatttaaggatctgattaagatcaggccctatttctattcatttttaaactaaaatttatttagtgtcctactattttgtgaagcgtttggatcgtgatccattaccacctcacctttggacgtggacaggatatgaagcgaagtttgtttgagttttctagttgtgtgcagtctgcttccgtttcagcatgtataatgacatggaaattatttggtcagagattatgatgtcttgtttcttggcttgattagcttcatccccaactaagagtaattcaccttacctagggatgacaacaggtcaggtttagatagggtagaataaatatccgtccgctataatatttgcgaagattatttatatctgtctatgactatactcgcggataacttg

SEQ ID NO: 9709 - DNA, 2200 bp, Zea Mays
ccggccgcgacgcggcccgcagccacggccttccgtaatgtcataactccccttctcgagtccatctccaacctcatccctcccaccccaataatacatccagccggcgccatcaggcccggcaacgcgcaagcggggctgaccatcgaaccctagtccccggccgagccgccctccgccgagccttgcggccgctctgcgtcatccctcttagtctccctccgttcgacacggcttggatccgagatggaatcaccgcccctcacagctgaagcaattgcttatacagagaaaaagatggacatggctttggaggatataattaaaatgtcaaagaaaaagaatcctggaggcaagaaacccccgaggcagccgataaaaaagcatccattccagaatggcaactctaataaagggaatggcaaggttcaaagttttatggagtctagatcaaccattagacaaggtgttcttgcacagagaaggtcaaatcttggtggaaatcagttccctgctacaaagcaggctgcgaagaaggctgctgttatgccaatgcacaagggggctatccgttggaacaagccaaggtaaacaatgatgttcttttattgcttatgagaaagtttactgcattcaaggggttgttcaatttattgagtcatgcaccttggattatattggctgagaatgattgtgatgctggtgtttacatggaactgccttaacttctctggttatacacacacaagcttataaagaacaatcgatttcatattcttgtggcacaaggcctgttttcttggttgaactgctacaaatatatggtgaatatagcatatgagccttgaagcttcattgaaagttatggccttctcctttatctgctgttgcctgacatttttctatgcagtttcatggtgtaatttatagctgctggatgagtgttattttggacaccagcattaactgtctgtgagggtttcattagtgttatttgtcaactattgttggaaggactgaaggagatgtgataatggttagcgtctcatgccactggtgacggatcatccatatacagggacgttacatgcctgagtttgaattggttttgactactggctccttggcagtgttcagtgtttatttgttgaatgatgaatgcagtgtaaatctagggtagtgctgctaattggacaattgttgtatgcctccaagggagtatattttgctactgcctcatattcaagttggctgtatccgtaacatcatgccagttttgagcatcctatcataatctgctatatgctccccttgttcactgcgtcccacagagataatgcttgcctgcatttctactggataagagtaaatcatgtgcaagtaccttagtgcagaggaggcctgtaggtggtgcttttcagaatgccaaggtcaaggagtccaaccaggcagcaccaaggacgatggatgcactctttgcacagatgaaggcgcaacgcttgaggacggtacctcaacagcaggcaaattcttccccctggagtcatttcaaccagcatcgacgtgttcagcagcagcagaggcgaggcagagggtatggtggccgtaatgttggcaaccaatgaatccaactagacatatctactgcatcggagccctttctcttcactggtcttttggaccttggaagaaaggacgccccttggaaaatcaaacttggctttgtttattggaggggtgacaatgggctctaacttggctttgtttattggaggggtgacatcgggctctaaattttacactaagatttaaggatctgattaagatcaggccctatttctattcatttttaaactaaaatttatttagtgtcctactattttgtgaagcgtttggatcgtgatccattaccacctcacctttggacgtggacaggatatgaagcgaagtttgtttgagttttctagttgtgtgcagtctgcttccgtttcagcatgtataatgacatggaaattatttggtcagagattatgatgtcttgtttcttggcttgattagcttcatccccaactaagagtaattcaccttacctagggatgacaacaggtcaggtttagatagggtagaataaatatccgtccgctataatatttgcgaagattatttatatctgtctatgactatactcgcggataacttg

SEQ ID NO: 9710 - DNA, 1888 bp, Zea Mays
gagaatccaaatccaaacctcaccggccgcgacgcggcccgcagccacggccttccgtaatgtcataactccccttctcgagtccatctccaacctcatccctcccaccccaataatacatccagccggcgccatcaggcccggcaacgcgcaagcggggctgaccatcgaaccctagtccccggccgagccgccctccgccgagccttgcggccgctctgcgtcatccctcttagtctccctccgttcgacacggcttggatccgagatggaatcaccgcccctcacagctgaagcaattgcttatacagagaaaaagatggacatggctttggaggatataattaaaatgtcaaagaaaaagaatcctggaggcaagaaacccccgaggcagccgataaaaaagcatccattccagaatggcaactctaataaagggaatggcaaggttcaaagttttatggagtctagatcaaccattagacaaggtgttcttgcacagagaaggtcaaatcttggtggaaatcagttccctgctacaaagcaggctgcgaagaaggctgctgttatgccaatgcacaagggggctatccgttggaacaagccaagtgcaagtaccttagtgcagaggaggcctgtaggtggtgcttttcagaatgccaaggtatggagtatggactttgtcaaatcttgaccttaatgctgagtaaataggacaaactggccgaaaaggtaaactgtttcctaatgtattgtatctgatgcataataatcaacttaagatgtaatgggtgatcttttggcctatcaatataatgacatcttggaaaaccattgctattgtaattgatattttgtgttctttcttgatatgttttaatgcatagacagcatagttttctcacataatccatcttttttctggtatcctcgtgtcacttcataatcatctgtagtagtttcagagccgtgatcagtgctatactcgagtccatttttatttttagaagttgcgtgatacatgaacttctatttgtttgattaatatattcgttgaattatcatgtcctgtagttttttttgtcgctgctgatcatacgcccgtaatctatttgtaggtcaaggagtccaaccaggcagcaccaaggacgatggatgcactctttgcacagatgaaggcgcaacgcttgaggacggtacctcaacagcaggcaaattcttccccctggagtcatttcaaccagcatcgacgtgttcagcagcagcagaggcgaggcagagggtatggtggccgtaatgttggcaaccaatgaatccaactagacatatctactgcatcggagccctttctcttcactggtcttttggaccttggaagaaaggacgccccttggaaaatcaaacttggctttgtttattggaggggtgacaatgggctctaacttggctttgtttattggaggggtgacatcgggctctaaattttacactaagatttaaggatctgattaagatcaggccctatttctattcatttttaaactaaaatttatttagtgtcctactattttgtgaagcgtttggatcgtgatccattaccacctcacctttggacgtggacaggatatgaagcgaagtttgtttgagttttctagttgtgtgcagtctgcttccgtttcagcatgtataatgacatggaaattatttggtcagagattatgatgtcttgtttcttggcttgattagcttcatccccaactaagagtaattcaccttacctagggatgacaacaggtcaggtttagatagggtagaataaatatccgtccgctataatatttgcgaagattatttatatctgtctatgactatactcgcggataacttg

SEQ ID NO: 9711 - DNA, 1610 bp, Zea Mays
gttatatatattctctcactagaaatttatctatattttttagagccctcaatattttatactatctccgtttttaatatataacgagtggttaaaactttaaaaaacgtcaacgacatcatttatttaagaaaggaagtagtatttagctaggatttataaggtgcttttaggtagagaatccaaatccaaacctcaccggccgcgacgcggcccgcagccacggccttccgtaatgtcataactccccttctcgagtccatctccaacctcatccctcccaccccaataatacatccagccggcgccatcaggcccggcaacgcgcaagcggggctgaccatcgaaccctagtccccggccgagccgccctccgccgagccttgcggccgctctgcgtcatccctcttagtctccctccgttcgacacggcttggatccgagatggaatcaccgcccctcacagctgaagcaattgcttatacagagaaaaagatggacatggctttggaggatataattaaaatgtcaaagaaaaagaatcctggaggcaagaaacccccgaggcagccgataaaaaagcatccattccagaatggcaactctaataaagggaatggcaaggttcaaagttttatggagtctagatcaaccattagacaaggtgttcttgcacagagaaggtcaaatcttggtggaaatcagttccctgctacaaagcaggctgcgaagaaggctgctgttatgccaatgcacaagggggctatccgttggaacaagccaagtgcaagtaccttagtgcagaggaggcctgtaggtggtgcttttcagaatgccaaggtcaaggagtccaaccaggcagcaccaaggacgatggatgcactctttgcacagatgaaggcgcaacgcttgaggacggtacctcaacagcaggcaaattcttccccctggagtcatttcaaccagcatcgacgtgttcagcagcagcagaggcgaggcagagggtatggtggccgtaatgttggcaaccaatgaatccaactagacatatctactgcatcggagccctttctcttcactggtcttttggaccttggaagaaaggacgccccttggaaaatcaaacttggctttgtttattggaggggtgacaatgggctctaacttggctttgtttattggaggggtgacatcgggctctaaattttacactaagatttaaggatctgattaagatcaggccctatttctattcatttttaaactaaaatttatttagtgtcctactattttgtgaagcgtttggatcgtgatccattaccacctcacctttggacgtggacaggatatgaagcgaagtttgtttgagttttctagttgtgtgcagtctgcttccgtttcagcatgtataatgacatggaaattatttggtcagagattatgatgtcttgtttcttggcttgattagcttcatccccaactaagagtaattcaccttacctagggatgacaacaggtcaggtttagatagggtagaataaatatccgtccgctataatatttgcgaagattatttatatctgtctatgactatactcgcggataacttg

SEQ ID NO: 9712 - DNA, 2721 bp, Zea Mays
gttatatatattctctcactagaaatttatctatattttttagagccctcaatattttatactatctccgtttttaatatataacgagtggttaaaactttaaaaaacgtcaacgacatcatttatttaagaaaggaagtagtatttagctaggatttataaggtgcttttaggtagagaatccaaatccaaacctcaccggccgcgacgcggcccgcagccacggccttccgtaatgtcataactccccttctcgagtccatctccaacctcatccctcccaccccaataatacatccagccggcgccatcaggcccggcaacgcgcaagcggggctgaccatcgaaccctagtccccggccgagccgccctccgccgagccttgcggccgctctgcgtcatccctcttagtctccctccgttcgacacggcttggatccgagatggaatcaccgcccctcacagctgaagcaattgcttatacagagaaaaagatggacatggctttggaggatataattaaaatgtcaaagaaaaagaatcctggaggcaagaaacccccgaggcagccgataaaaaagcatccattccagaatggcaactctaataaagggaatggcaaggttcaaagttttatggagtctagatcaaccattagacaaggtgttcttgcacagagaaggtcaaatcttggtggaaatcagttccctgctacaaagcaggctgcgaagaaggctgctgttatgccaatgcacaagggggctatccgttggaacaagccaaggtaaacaatgatgttcttttattgcttatgagaaagtttactgcattcaaggggttgttcaatttattgagtcatgcaccttggattatattggctgagaatgattgtgatgctggtgtttacatggaactgccttaacttctctggttatacacacacaagcttataaagaacaatcgatttcatattcttgtggcacaaggcctgttttcttggttgaactgctacaaatatatggtgaatatagcatatgagccttgaagcttcattgaaagttatggccttctcctttatctgctgttgcctgacatttttctatgcagtttcatggtgtaatttatagctgctggatgagtgttattttggacaccagcattaactgtctgtgagggtttcattagtgttatttgtcaactattgttggaaggactgaaggagatgtgataatggttagcgtctcatgccactggtgacggatcatccatatacagggacgttacatgcctgagtttgaattggttttgactactggctccttggcagtgttcagtgtttatttgttgaatgatgaatgcagtgtaaatctagggtagtgctgctaattggacaattgttgtatgcctccaagggagtatattttgctactgcctcatattcaagttggctgtatccgtaacatcatgccagttttgagcatcctatcataatctgctatatgctccccttgttcactgcgtcccacagagataatgcttgcctgcatttctactggataagagtaaatcatggtatcttacgatttatctcagtatgctgggctgtatggatgctatcttttcaaggtcaactgttgggatttattttcatgattccttatgtgaccttgtttgttctggatcagtggtcactatttacatggcttgagttttatcagtttaatcaatcaataagttgtgtcaacttgggacattgttgaaccatgtgcattgaaatttgggtggaactaaacagtctagactccaaaatgtgagggccttggaaaccaagaggatgcactagatattttcaatgaacactttattgtttctgtttcattttatttcaaaacatgtgcaagtaccttagtgcagaggaggcctgtaggtggtgcttttcagaatgccaaggtcaaggagtccaaccaggcagcaccaaggacgatggatgcactctttgcacagatgaaggcgcaacgcttgaggacggtacctcaacagcaggcaaattcttccccctggagtcatttcaaccagcatcgacgtgttcagcagcagcagaggcgaggcagagggtatggtggccgtaatgttggcaaccaatgaatccaactagacatatctactgcatcggagccctttctcttcactggtcttttggaccttggaagaaaggacgccccttggaaaatcaaacttggctttgtttattggaggggtgacaatgggctctaacttggctttgtttattggaggggtgacatcgggctctaaattttacactaagatttaaggatctgattaagatcaggccctatttctattcatttttaaactaaaatttatttagtgtcctactattttgtgaagcgtttggatcgtgatccattaccacctcacctttggacgtggacaggatatgaagcgaagtttgtttgagttttctagttgtgtgcagtctgcttccgtttcagcatgtataatgacatggaaattatttggtcagagattatgatgtcttgtttcttggcttgattagcttcatccccaactaagagtaattcaccttacctagggatgacaacaggtcaggtttagatagggtagaataaatatccgtccgctataatatttgcgaagattatttatatctgtctatgactatactcgcggataacttg

SEQ ID NO: 9713 - DNA, 2783 bp, Zea Mays
gttatatatattctctcactagaaatttatctatattttttagagccctcaatattttatactatctccgtttttaatatataacgagtggttaaaactttaaaaaacgtcaacgacatcatttatttaagaaaggaagtagtatttagctaggatttataaggtgcttttaggtagagaatccaaatccaaacctcaccggccgcgacgcggcccgcagccacggccttccgtaatgtcataactccccttctcgagtccatctccaacctcatccctcccaccccaataatacatccagccggcgccatcaggcccggcaacgcgcaagcggggctgaccatcgaaccctagtccccggccgagccgccctccgccgagccttgcggccgctctgcgtcatccctcttagtctccctccgttcgacacggcttggatccgagatggaatcaccgcccctcacagctgaagcaattgcttatacagagaaaaagatggacatggctttggaggatataattaaaatgtcaaagaaaaagaatcctggaggcaagaaacccccgaggcagccgataaaaaagcatccattccagaatggcaactctaataaagggaatggcaaggttcaaagttttatggagtctagatcaaccattagacaaggtgttcttgcacagagaaggtcaaatcttggtggaaatcagttccctgctacaaagcaggctgcgaagaaggctgctgttatgccaatgcacaagggggctatccgttggaacaagccaaggtaaacaatgatgttcttttattgcttatgagaaagtttactgcattcaaggggttgttcaatttattgagtcatgcaccttggattatattggctgagaatgattgtgatgctggtgtttacatggaactgccttaacttctctggttatacacacacaagcttataaagaacaatcgatttcatattcttgtggcacaaggcctgttttcttggttgaactgctacaaatatatggtgaatatagcatatgagccttgaagcttcattgaaagttatggccttctcctttatctgctgttgcctgacatttttctatgcagtttcatggtgtaatttatagctgctggatgagtgttattttggacaccagcattaactgtctgtgagggtttcattagtgttatttgtcaactattgttggaaggactgaaggagatgtgataatggttagcgtctcatgccactggtgacggatcatccatatacagggacgttacatgcctgagtttgaattggttttgactactggctccttggcagtgttcagtgtttatttgttgaatgatgaatgcagtgtaaatctagggtagtgctgctaattggacaattgttgtatgcctccaagggagtatattttgctactgcctcatattcaagttggctgtatccgtaacatcatgccagttttgagcatcctatcataatctgctatatgctccccttgttcactgcgtcccacagagataatgcttgcctgcatttctactggataagagtaaatcatggtatcttacgatttatctcagtatgctgggctgtatggatgctatcttttcaaggtcaactgttgggatttattttcatgattccttatgtgaccttgtttgttctggatcagtggtcactatttacatggcttgagttttatcagtttaatcaatcaataagttgtgtcaacttgggacattgttgaaccatgtgcattgaaatttgggtggaactaaacagtctagactccaaaatgtgagggccttggaaaccaagaggatgcactagatattttcaatgaacactttattgtttctgtttcattttatttcaaaacatggtatgtactccctgacttcacttgagaagcgagaattgtatccttgttttgatgggggtatgtgcaagtaccttagtgcagaggaggcctgtaggtggtgcttttcagaatgccaaggtcaaggagtccaaccaggcagcaccaaggacgatggatgcactctttgcacagatgaaggcgcaacgcttgaggacggtacctcaacagcaggcaaattcttccccctggagtcatttcaaccagcatcgacgtgttcagcagcagcagaggcgaggcagagggtatggtggccgtaatgttggcaaccaatgaatccaactagacatatctactgcatcggagccctttctcttcactggtcttttggaccttggaagaaaggacgccccttggaaaatcaaacttggctttgtttattggaggggtgacaatgggctctaacttggctttgtttattggaggggtgacatcgggctctaaattttacactaagatttaaggatctgattaagatcaggccctatttctattcatttttaaactaaaatttatttagtgtcctactattttgtgaagcgtttggatcgtgatccattaccacctcacctttggacgtggacaggatatgaagcgaagtttgtttgagttttctagttgtgtgcagtctgcttccgtttcagcatgtataatgacatggaaattatttggtcagagattatgatgtcttgtttcttggcttgattagcttcatccccaactaagagtaattcaccttacctagggatgacaacaggtcaggtttagatagggtagaataaatatccgtccgctataatatttgcgaagattatttatatctgtctatgactatactcgcggataacttg

SEQ ID NO: 9714 - DNA, 750 bp, Zea Mays
catgtcttcattaaaactaaaccctaggaggtcatcactggtgtaccacatacaagtgccattgattggtgggctcttggaattctcttgtatgaaatgttgtatggacgtacaccttttcgaggaaagaacaggaaaaggacatttcataatatcctgcacaaagaccttacatttccaagtagcattccggttagtcctgcggctaagcaattaatccatggattgctacagagagatccctcttctcgacttggttcaagtgctgctgcaaacgatatcaagcaacatcccttttttgaagatatacactggccactcatccgttgcatggagcccccagagcttgatgttccactgaaactaactcggaaggaacctgaacaaaaagtgaagcctgaggaggatatatactcatgttcagattattgagacattttaaggttgtacgatcccccctcccgaccccgtgcatgactttcagcctgaagagattttatattaccgagtggaaataacgttgctgagcatgtacatagtaataaaagaggtttataggcatgcaagatttccagcctgaattgcacaagaggtcgttgtaagtcattcttttggttaggttaagtgaataatccatcaacaggataaagttcttgtaaatgtacactttctttggcatatataataaaaatcttactaatttccgttggtcaaaggtctacgcaaattaggctttgcccacaaaaatat

SEQ ID NO: 9715 - DNA, 761 bp, Zea Mays
cagcaacctgtcggcccctgccggtggctacaatgagcgaggtcatcactggtgtaccacatacaagtgccattgattggtgggctcttggaattctcttgtatgaaatgttgtatggacgtacaccttttcgaggaaagaacaggaaaaggacatttcataatatcctgcacaaagaccttacatttccaagtagcattccggttagtcctgcggctaagcaattaatccatggattgctacagagagatccctcttctcgacttggttcaagtgctgctgcaaacgatatcaagcaacatcccttttttgaagatatacactggccactcatccgttgcatggagcccccagagcttgatgttccactgaaactaactcggaaggaacctgaacaaaaagtgaagcctgaggaggatatatactcatgttcagattattgagacattttaaggttgtacgatcccccctcccgaccccgtgcatgactttcagcctgaagagattttatattaccgagtggaaataacgttgctgagcatgtacatagtaataaaagaggtttataggcatgcaagatttccagcctgaattgcacaagaggtcgttgtaagtcattcttttggttaggttaagtgaataatccatcaacaggataaagttcttgtaaatgtacactttctttggcatatataataaaaatcttactaatttccgttggtcaaaggtctacgcaaattaggctttgcccacaaaaatat

SEQ ID NO: 9716 - DNA, 967 bp, Zea Mays
ctatacttcacactagagtggtgagtttactattttctacttgcacgatatttgcagtggagaacaaatagtttttcacgtgtcaatgatacagatttagactgtttattggttcctcaatcatgtgataaagcattctacatcaaggcgaagaagatctaaggagtatctgcccccaagttttgtttcagatcctgccactccatcaaattcttttgttggaactgaagagtacatagctccagaggtcatcactggtgtaccacatacaagtgccattgattggtgggctcttggaattctcttgtatgaaatgttgtatggacgtacaccttttcgaggaaagaacaggaaaaggacatttcataatatcctgcacaaagaccttacatttccaagtagcattccggttagtcctgcggctaagcaattaatccatggattgctacagagagatccctcttctcgacttggttcaagtgctgctgcaaacgatatcaagcaacatcccttttttgaagatatacactggccactcatccgttgcatggagcccccagagcttgatgttccactgaaactaactcggaaggaacctgaacaaaaagtgaagcctgaggaggatatatactcatgttcagattattgagacattttaaggttgtacgatcccccctcccgaccccgtgcatgactttcagcctgaagagattttatattaccgagtggaaataacgttgctgagcatgtacatagtaataaaagaggtttataggcatgcaagatttccagcctgaattgcacaagaggtcgttgtaagtcattcttttggttaggttaagtgaataatccatcaacaggataaagttcttgtaaatgtacactttctttggcatatataataaaaatcttactaatttccgttggtcaaaggtctacgcaaattaggctttgcccacaaaaatat

SEQ ID NO: 9717 - DNA, 1792 bp, Zea Mays
aagggcgactagtacggagcttcatcgaatttcttcaagggccagagaccgacatgtccacagttgataagatccgggaagctatccgggaacagaaagaaatcactgtccagctaatcaactacaccaagagcgggaagaagttttggaacttgttccacctacagccaatgcgagaccagaaaggagagcttcaatacttcattggagttcaattggatggaagcgaccatgttgaaccccttaggaatcgtctctctgagaacactgaactacaaagtgctaaattggtcaaagctacggcagagaatgtggatgaagcagtcagagagcttcctgatcccaacctggtaagagaccagaggatctatgggacatttactcacgatatgtttccccaaagcctcataaacgttacaactcttcttggattgcgatggaaaagattataaaatctggtgtgaagattggcttgaagcacttcaagcctataaaacctttgggttatggtgacactggcagtgtacatttggtggagttgcaaggaagcggtgaattatttgcaatgaaggcaatggacaaatcagtgatgttgaaccgcaacaaggttcatcgagcttgtatggaaagagaaatatactcactattggatcatccttttctcccaacattatatacttcattccagacaccaacacatgtttgtctcataacagacttttgtcctggaggagaattatttgcactactcgatatgcaaccaatgaaacttttcagagaagaatctgcaaggttttatgctgcagaggttgtaattggcctggagtatctccattgccttggaataatataccgtgacctaaagccagaaaacattttgctccaagaggatggccacatcgttctgactgattttgacctctcttttttgacttcctcaaaacctcatgtgataaagcattctacatcaaggcgaagaagatctaaggagtatctgcccccaagttttgtttcagatcctgccactccatcaaattcttttgttggaactgaagagtacatagctccagaggtcatcactggtgtaccacatacaagtgccattgattggtgggctcttggaattctcttgtatgaaatgttgtatggacgtacaccttttcgaggaaagaacaggaaaaggacatttcataatatcctgcacaaagaccttacatttccaagtagcattccggttagtcctgcggctaagcaattaatccatggattgctacagagagatccctcttctcgacttggttcaagtgctgctgcaaacgatatcaagcaacatcccttttttgaagatatacactggccactcatccgttgcatggagcccccagagcttgatgttccactgaaactaactcggaaggaacctgaacaaaaagtgaagcctgaggaggatatatactcatgttcagattattgagacattttaaggttgtacgatcccccctcccgaccccgtgcatgactttcagcctgaagagattttatattaccgagtggaaataacgttgctgagcatgtacatagtaataaaagaggtttataggcatgcaagatttccagcctgaattgcacaagaggtcgttgtaagtcattcttttggttaggttaagtgaataatccatcaacaggataaagttcttgtaaatgtacactttctttggcatatataataaaaatcttactaatttccgttggtcaaaggtctacgcaaattaggctttgcccacaaaaatat

SEQ ID NO: 9718 - DNA, 3558 bp, Zea Mays
ccgagctggccgcgggtgaggggaccggtggccgtcgcgcggccatggaaacagatggaggggcgggacgagacgaccgtgagtcgctcacaaggacaaggccggattgcattatccgctcgctgtgcctgccctgcttcttccgccattctttccgtctctgctctactttcttggtcgcctgtccggaggctcctccccgcggcccctgagcaaactgtaccatagccgcgtgattgattggttcacgggagggacagggagcggcgtcaagctggttttggtagtaaaaaatcacttcaattgtcccctcattcccatactaaagcaggctgcccaaaatttctcaatattgtcctcagaatttgttgctgtgcttttgccagaagcggtgcttgcttcggcagatggttgttctcccgcacctgtcctaccgccgttgatcgcgagagtctcgtacgtagtcttcgggggcaagcatccatggcggagtcatcgtcaaggcaagcggccgagatggtggagaagtggatggcgttcccgtctggctccgacgccggcagcggcttcgcgttcccggcgccacgctcagtgtcgggcgcgggcaaggagatagtggagctggcgtcgccctccacagccacggccacggccacggccacgaccacggccagtgccggcaacaggcaggcctcgttccagcgcggccgcgacagtggcgtgggcagcaccaggtcgtccatggacggcgcgcgcgcgtcgggggactcgtcgatgccgcgggtgtcgcaggagctcaaggacgcgctgtccagcctgcagcagaccttcgtggtctccgacgccacccgcccggactgccccatcatctacgccagcgccggcttctacaccatgaccggctacacccccaaggaagtcaccggccgcaactgccgcttcctgcagggccccgacacggacatgaacgaggttgccaagatccgggacgccgttaaaaccggccgcagtttctgcggccgcttgctcaactaccgcaaggacggcacgcccttctggaacatgctcaccgtcacccccatccgcgacgacaacggcaaggatgcaagtcgaggtgagcaagtacacggaggggctcagcgaaaagcgcatgcggccaaacgagatgccagtgtccctcatccactacgacgaccggcagaaggagacggcaatgtcatcgatcacggaggtggtgcagacggtgaagcacccgcgcgctcgctccgagggtgaacaggagcccgtggagcctgcaccgcccgtcatggcgtcgccgttggtggcccctggcacgccgtcgggcggtgccagcctcaagtccccgctctgggacgtgaagaaggaggactcacggctgagccggaagtcgagccgccgctcttccctcatggggttcaagatggggaagaggagctcgataggaagcaaggatgcccttccagcggaggtggaggccccggcgccggcgccggcgccaccggagtcaacgacggagaagcagcgcaagaacagctgggagcaagaggggagggagagggacatcaggcaggggatcgatctagccacgacactagagcgtatcgagaagaacttcgtcatcacggatcccaggctccccgacaaccccatcatcttcgcgtcggatagcttcttggagctgacggagtacacgcgggaagagatcctcgggaggaattgcagatttcttcaagggccagagaccgacatgtccacagttgataagatccgggaagctatccgggaacagaaagaaatcactgtccagctaatcaactacaccaagagcgggaagaagttttggaacttgttccacctacagccaatgcgagaccagaaaggagagcttcaatacttcattggagttcaattggatggaagcgaccatgttgaaccccttaggaatcgtctctctgagaacactgaactacaaagtgctaaattggtcaaagctacggcagagaatgtggatgaagcagtcagagagcttcctgatcccaacctgagaccagaggatctatgggacatttactcacgatatgtttccccaaagcctcataaacgttacaactcttcttggattgcgatggaaaagattataaaatctggtgtgaagattggcttgaagcacttcaagcctataaaacctttgggttatggtgacactggcagtgtacatttggtggagttgcaaggaagcggtgaattatttgcaatgaaggcaatggacaaatcagtgatgttgaaccgcaacaaggttcatcgagcttgtatggaaagagaaatatactcactattggatcatccttttctcccaacattatatacttcattccagacaccaacacatgtttgtctcataacagacttttgtcctggaggagaattatttgcactactcgatatgcaaccaatgaaacttttcagagaagaatctgcaaggttttatgctgcagaggttgtaattggcctggagtatctccattgccttggaataatataccgtgacctaaagccagaaaacattttgctccaagaggatggccacatcgttctgactgattttgacctctcttttttgacttcctcaaaacctcatgtgataaagcattctacatcaaggcgaagaagatctaaggagtatctgcccccaagttttgtttcagatcctgccactccatcaaattcttttgttggaactgaagagtacatagctccaggggcagggtcacaaataagggatgaacaaaagaggtggtgcttgttggcgcccagggagcagcaacctgtcggcccctgccggtggctacaatgagcgaggtcatcactggtgtaccacatacaagtgccattgattggtgggctcttggaattctcttgtatgaaatgttgtatggacgtacaccttttcgaggaaagaacaggaaaaggacatttcataatatcctgcacaaagaccttacatttccaagtagcattccgagagatccctcttctcgacttggttcaagtgctgctgcaaacgatatcaagcaacatcccttttttgaagatatacactggccactcatccgttgcatggagcccccagagcttgatgttccactgaaactaactcggaaggaacctgaacaaaaagtgaagcctgaggaggatatatactcatgttcagattattgagacattttaaggttgtacgatcccccctcccgaccccgtgcatgactttcagcctgaagagattttatattaccgagtggaaataacgttgctgagcatgtacatagtaataaaagaggtttataggcatgcaagatttccagcctgaattgcacaagaggtcgttgtaagtcattcttttggttaggttaagtgaataatccatcaacaggataaagttcttgtaaatgtacactttctttggcatatataataaaaatcttactaatttccgttggtcaaaggtctacgcaaattaggctttgcccacaaaaatat

SEQ ID NO: 9719 - DNA, 3421 bp, Zea Mays
ccgagctggccgcgggtgaggggaccggtggccgtcgcgcggccatggaaacagatggaggggcgggacgagacgaccgtgagtcgctcacaaggacaaggccggattgcattatccgctcgctgtgcctgccctgcttcttccgccattctttccgtctctgctctactttcttggtcgcctgtccggaggctcctccccgcggcccctgagcaaactgtaccatagccgcgtgattgattggttcacgggagggacagggagcggcgtcaagctggttttgaagcggtgcttgcttcggcagatggttgttctcccgcacctgtcctaccgccgttgatcgcgagagtctcgtacgtagtcttcgggggcaagcatccatggcggagtcatcgtcaaggcaagcggccgagatggtggagaagtggatggcgttcccgtctggctccgacgccggcagcggcttcgcgttcccggcgccacgctcagtgtcgggcgcgggcaaggagatagtggagctggcgtcgccctccacagccacggccacggccacggccacgaccacggccagtgccggcaacaggcaggcctcgttccagcgcggccgcgacagtggcgtgggcagcaccaggtcgtccatggacggcgcgcgcgcgtcgggggactcgtcgatgccgcgggtgtcgcaggagctcaaggacgcgctgtccagcctgcagcagaccttcgtggtctccgacgccacccgcccggactgccccatcatctacgccagcgccggcttctacaccatgaccggctacacccccaaggaagtcaccggccgcaactgccgcttcctgcagggccccgacacggacatgaacgaggttgccaagatccgggacgccgttaaaaccggccgcagtttctgcggccgcttgctcaactaccgcaaggacggcacgcccttctggaacatgctcaccgtcacccccatccgcgacgacaacggcaaggtcatcaagttcatcgggatgcaagtcgaggtgagcaagtacacggaggggctcagcgaaaagcgcatgcggccaaacgagatgccagtgtccctcatccactacgacgaccggcagaaggagacggcaatgtcatcgatcacggaggtggtgcagacggtgaagcacccgcgcgctcgctccgagggtgaacaggagcccgtggagcctgcaccgcccgtcatggcgtcgccgttggtggcccctggcacgccgtcgggcggtgccagcctcaagtccccgctctgggacgtgaagaaggaggactcacggctgagccggaagtcgagccgccgctcttccctcatggggttcaagatggggaagaggagctcgataggaagcaaggatgcccttccagcggaggtggaggccccggcgccggcgccggcgccaccggagtcaacgacggagaagcagcgcaagaacagctgggagcaagaggggagggagagggacatcaggcaggggatcgatctagccacgacactagagcgtatcgagaagaacttcgtcatcacggatcccaggctccccgacaaccccatcatcttcgcgtcggatagcttcttggagctgacggagtacacgcgggaagagatcctcgggaggaattgcagatttcttcaagggccagagaccgacatgtccacagttgataagatccgggaagctatccgggaacagaaagaaatcactgtccagctaatcaactacaccaagagcgggaagaagttttggaacttgttccacctacagccaatgcgagaccagaaaggagagcttcaatacttcattggagttcaattggatggaagcgaccatgttgaaccccttaggaatcgtctctctgagaacactgaactacaaagtgctaaattggtcaaagctacggcagagaatgtggatgaagcagtcagagagcttcctgatcccaacctgagaccagaggatctatgggacatttactcacgatatgtttccccaaagcctcataaacgttacaactcttcttggattgcgatggaaaagattataaaatctggtgtgaagattggcttgaagcacttcaagcctataaaacctttgggttatggtgacactggcagtgtacatttggtggagttgcaaggaagcggtgaattatttgcaatgaaggcaatggacaaatcagtgatgttgaaccgcaacaaggttcatcgagcttgtatggaaagagaaatatactcactattggatcatccttttctcccaacattatatacttcattccagacaccaacacatgtttgtctcataacagacttttgtcctggaggagaattatttgcactactcgatatgcaaccaatgaaacttttcagagaagaatctgcaaggttttatgctgcagaggttgtaattggcctggagtatctccattgccttggaataatataccgtgacctaaagccagaaaacattttgctccaagaggatggccacatcgttctgactgattttgacctctcttttttgacttcctcaaaacctcatgtgataaagcattctacatcaaggcgaagaagatctaaggagtatctgcccccaagttttgtttcagatcctgccactccatcaaattcttttgttggaactgaagagtacatagctccagaggtcatcactggtgtaccacatacaagtgccattgattggtgggctcttggaattctcttgtatgaaatgttgtatggacgtacaccttttcgaggaaagaacaggaaaaggacatttcataatatcctgcacaaagaccttacatttccaagtagcattccggttagtcctgcggctaagcaattaatccatggattgctacagagagatccctcttctcgacttggttcaagtgctgctgcaaacgatatcaagcaacatcccttttttgaagatatacactggccactcatccgttgcatggagcccccagagcttgatgttccactgaaactaactcggaaggaacctgaacaaaaagtgaagcctgaggaggatatatactcatgttcagattattgagacattttaagggcaggttgtacgatcccccctcccgaccccgtgcatgactttcagcctgaagagattttatattaccgagtggaaataacgttgctgagcatgtacatagtaataaaagaggtttataggcatgcaagatttccagcctgaattgcacaagaggtcgttgtaagtcattcttttggttaggttaagtgaataatccatcaacaggataaagttcttgtaaatgtacactttctttggcatatataataaaaatcttactaatttccgttggtcaaaggtctacgcaaattaggctttgcccacaaaaatat

SEQ ID NO: 9720 - DNA, 856 bp, Zea Mays
ctctatatcttcttcttgtcctccgcctccatttcgcgttcccttcgttgcgtcttgaaaggggagagagagagagagaagagagagagaagagagagagagagagaggagtgggagacccgcgagaggctgccgtgtagggaccgtagactcagcgactgcgaaggagggataaggggatggccgggatcggaccgatcaggcaggactgggagccggtcgttgtgcggaagaaggcacccaccgccgccgccaagaaggatgagaaggccgtcaacgccgcgcgccgcgccggtgcggagatcgataccatgaagaagtacaacgctggtacgaacaaggcggcatccagcggtacatccctcaacaccaagcgcctcgacgacgacaccgaaaacctcgcccatgagcgagttccaagtgatctgaagaagaatctcatgcaagcaaggctcgataagaagctgacacaggcacaacttgctcagatgataaatgagaagccacaggtgattcaggagtatgaatcaggcaaggcaatccccaaccagcagatcattagcaagctcgagagggccctgggaaccaagttgcgtggcaagaaatagctttcctacgagtttgtgtcccggagcatcataatagggggaagacaaggcaagctgtctgcttatttgtctatgtttggtatctcaagtcctgcggactgtttctgttggcacaagagggaataaatgtgttcacggacctgtaatgcttgctccttgtcatatgaccttgctctaaacatttgtgatgaagctgtcaaggctcggcaagtcggcatcgatggcttgcccccggctcctgctttccc

SEQ ID NO: 9721 - DNA, 2825 bp, Zea Mays
gtcaaagatgttatgcagaacattagggatgaggccaaattgtggggaggcaggtgacaaagtcctcagtagcatttagcctaattgttctgcttataggtcattggccgcagtttctttctttggtcaatcctcttgtacgaaccatatcgtgacatgcttgtatgagtaattgagtattctaaggctactcttttttaccctccagattatataattcagcttaaataagttaaaagtcaaacaaacaacacagattattaagtagactatataatctagataactagattatgataatccataagcagatcattaggtgcttatataatctataagctggattatataatcctggaaggaaacaacaaacaggacttggactatagccagcagatcgtgcattggctgtgcaaaacactgttttgcattatagactgcgctgtttacacaataaattttgaaatgtgagatgaagatgagtaagatgctagagatagcctcgtggaggtccaatggaagtgcacaagcttgtttgattctgccatctgtccttgaactcacaaatcgtccattctactccatttagatcctcaatctctgtttggttctaagagcaagtccaagcaggtaaccttgcttgtatgctgatgtggcacactgacatgagcttaacctctctcctcttttccctgagctccaagtctgctctctcccaagctgaaccacgggtgccggcggctccaccacagctcctcagcttgaggttgctcagaggccacgtgtcggcgaggcttcagtgggcacacatcatgcatgccaatatggtgtgggctgctctggcaggggaaatgtgctggagtcaccctcgctgagtgggttgtgcccctggctgcacgcctgaatcaaagcaaccgtcatcgttgcactcgatgggcatggaagccggcgctgatgatgaccaggggattcaaacaggtacgcaaagaagccactgccatagttattaatggcgtgtttggtttgaggtcaaagtaggatttgagttgggggcgacaccatccactcgattttttagatcacgccgcccccaaaaatcactccggcgttcacctcgcccccgcttactctccatccaaacactatagaaaatgtggccgcctcatttcatccctccttgtacatccaaccaaacgcgataaggcgacttaagaggagcgacccctttttaggcataaggcgaggcgacgccttactcctatataaaatatataaagatagaaaaatatagagagttaagtgaggtgtttatagaaatatataatataatatacttgcacacaaaatttaggttctgaacgtccatctagaagcccattaattcatatattgtgcaaaaaaggaaacagaaaagagaaggaaaaaagaacggtatggacttttatttggtggcccatctagaagaccatcaaccacaaacacaagtgccctaactttttcactactcccacataggcacagctgccgctactctcgcataggcacagccgccgacgactcccgctccctcccccacagcgcttggcacgcggcctgtgcgcctccagtcctccgcacaccggccggcgtgccccaagcgcggcccacgcgcttgcgcgtctgcgaccgccgcgcgcctgcgacctccaccgccacacccctgcgacctccgccgccacgccttacgtccgtgggcaaggcgagcaggacgccttgccatccaagcgcgccttaacgcttcagcgacgccttaataagcatggccactgctcatggagatctcaacagtgaactcagtgagcatgaagatgtcgacgccaatgatgaagccaaagctgaaccatgtgaggcaccggcaaatctcgtttttgttgcatgcggaccggtcgacgaaacagtcatggacggccggatgtggatcagccgcccaacagtgccccagttcacgaactacaactccaagttctctgtgccgccgccagtagctccttgtcgttgctacagctttgcctgtgtccatgccccctcctctcccctgagctaaacagtggcagggccacgacacctgagcccctagccacaccttcccaagccacatgtgcgcctccccaatccatgccgaagagaggagaatgggctagacccacatgtcagtatgccaaaacagtatacggacgctagacccattttactggatctgagacccaaatagagattgtggaaaatggtcgatctaggagttcataggttgggatggcacagcaaaacaagtttgaggacccccagtggagtttactcttcttaatatagtgaattaatgatgcacaactccacatccaagggaaaaagaaagaatcgatggcaccgatttttgttattttgcacagctatcatctcttcatttccagatctcccatcatctaactctgttttctgggttttctttgagaaaatacccataatgaataatcatcttatttttattagaatagcataccatgtactgactagttaatgtatgtcaaactccaaatgaagcataactggtcatgcaaataaagttatataaagtcatgcaaatgaagcaaataaagtcatataaagccactcaaaaaaatggaagtatatggcaccacatgaagaataagatgccaaaagtcatgcaaataaagttatatatagcacaaaattaagcatatccaaataaattaacaaatagagtacaagagatcaagaagcacatacctttgccagaaaagatatggaaaaggaacacttcagagcca

SEQ ID NO: 9722 - DNA, 1958 bp, Zea Mays
atcaccacatagacataaccgcacgccttcccgttgtccatttgctccacgggccagcctgccggcgccgccactgcaaagtccgtacacacagacacacaacgcacgtcaccgccatgtctgccgccactgcttgcatgcccctggtccttgatccgtctcctctccatggatcggcggcaatggcagatgccgttgagaggcggcagcccggtggcatggagaccaccaagaccggttccgagggaacgctcggccgcgtcgtcaggagccagctgcaggctgcagctgcccggatcgatgtggccggctgcccggccggcgtaatcaagaacggccggccaggcagcactagtataattttcattatggaacgtatcctgttcttcttccttaagctgacaaacatgatgcattcgatcgatcagccaagtgtttggcaacgaggacgacgaccgtgctgggcacggcgacggcgacgaggtgagcaagccgcgggcggtggtccacacactgacgtgcgagcgcaagccattgttcgagggcttcgcgctctggcggagcatcggcaggcctgagcttcccgaactggatccaatcttatcgttcgacgaattcgagtgtacgttactacagaactaactaacatcacgatcatgcatgcatacgccaaacagttgtcaagaacatgcatgatttttgttcctgaacataacaaaaagtggcaactgataaagtggcttcttaaaatgtcgtcctgatgtacaccacacttaatgttggctgtcaaaagtcaagctgtttgtgcacatataaacctcattattgagttattataacgccccttgaatctgaatgagactcataaaaagtcttgatgtgtgctctaatggaaagtcttaattaaataagtactacagtatgtatggatcacagcacaaaacccattcacaccttgtcatttttctgtgtttcagtttctgctccagctggcttccttgaccatcctcacaggggatttgagaacgttacctatatgctcgagggcggcatcagttaccacgacttttcaggccacaagggaaccatcaacccaggagacgttcagtggctgacggcggggcgcggcgtcgtgcacgcggagatgcccgccgccggccagggagtacagaggggcatcaacatctggatcaacctctctgccgccgacaagatggtggagccgaggtaccaggacctggcgagccacgacatccccgccgccgcggcggacgccgctggcggcgtctccgtcaaggtcatcgcgggcgagtgcctcggcgcgcgctccccgctccggccccgcaccccggcgctgtgcctcgacgtcgccctgcggcccggcgcgcgcctgcgccagcctgtcccgcgcgggtggagcgcctgcgcgtacgtcatccacggcgaggccgccttcggcactgcctccggcgagggtaacggcgcctccacggctaccgcgcgcacgctcgtcgtgttcggtggcgacggcgacggcgtggagctgcggggcgatgcagcgggccagggcgcgagggtcatgctggtcgcagctcggtcgcacggcgaggcggtggcgcgggacggccccttcgtcatgaatacccgggaggaggtggaccaggcgcgggaggactaccgccaccgccgcaacggcttcgagatggccgacggctggacctccgatcacgcctccgcagctgaaaagcattcataggatacacctaccttaggctagtcgcgcgcggatgcaactgtgtaaggctttatatgtagtttgatttccatcaataatccacaagttttatttccaaaattgtgggttttttccaaaaaattgtgggctttaatagcatagcaaattgtttgcaataatgtgacatgttatatatagtcaatctggaatcgattttcaaaaa

SEQ ID NO: 9723 - DNA, 2158 bp, Zea Mays
cagctgagctgaggatggcggcagcgtggaggccgcgtgacaacgatgacgacgacgaggacgatgcgggcggcggagccgatgatgatgatccgcacaggagtggccctaggcctacgcagacccgtgttgtaagaggatttgtggaccaagaaagtattcaacaaatattccactatctggaaccacttattagtagggtggtgcgagaggaaatccagaacatcttttcgcattgtcacaatgatcacatgccaatcaggtctcttcctctacgcatccgagaggcacatgtcttgccccatctgaagctagtctttgctaagcagcttaagcaaccaatcttcacaaacaacaaaatcgttgatatagcgaacaacccaattgaaatccatctcatggacacgacaaccaactctatgatcccaccagcagatactcaccttggaccatcatcagtagtaagactagaagtgctggttctgaacggtgattttcagtgtgaggaccgtgatgtgtggacggctgaccagtttaatgcagtggttctgaaggctagagaagggaagagaccattgctcgtgggctcactcaatgtccctatgaacaatcatggagtggctgtgattgatgatgtgttctttactgataattcgagctggataaggtgccggaagtttcgaattggtgtgcgcatcatgcccgcggatcatcttggatcaagagtcaaagaggcagtgagtgagagcttcaccgtcagagatcatcgtggtgaatcgtacaaaaaacactatcctcctttgatgactgacaacatatggaggctcaagaacattggaaaagatggaccaatcgataagaggttgcagtctgaggggattaggaacgtccaggacttcttgaagcttaacaccatagatcctgaaaaactccaagctctcgtcggcatgtcagataagcaatggaacacaacgctgaatcatgcaaaaacgtgtgacatgggacggaaatgttacactttcaagactgtagggtgtgacattacctttaaccccataggagaggtcttacgggcaagaattggagaccatacatttcctctgcaagaactgcacccatatcaactgttccatgtgaagcaactggccgctcaggcataccagatgtgggatcaactggaagaagtacccaatgaaaaattatttgctgcaaataagagctttgttccaagaagtagttctgatcaggagcggactgagagccaagcagagagcatgatcagctcagggtcgcagaatactaagtatcttgactacacaggaactgctacctctggtgccgcagcaatgccgaacagctgcagcacatcagattctataggagctgctccagctgatgatgccatgctctggagaccgagcataccaccagaatgtaacttcagctggcaggactcagcagcttgttgggattaagtggattaacctttcatcgatgttgcttgtttcctgtttccaataatggcatgtttgatccatagtacttattgtactattgggtgaaatgttatgcttttgaacatgcgactgcttgcacgcggtttttcaattcaataaaactatgtgaacacaaggtcgttgatatatgcccttgtagtttaggtttgtgataaataattatcaacagagtagcatcttcctacacgacagattgaacaccaaatcagtgctcaagagaagaaatatggatctaggctcctacacatgtgaaaattgcatacgacagaaagaggaaacatgggatcatctatttctgaaatgtagcttcgacaagagatgttgggtaatggtcgggatcacgtcaacccagtccttgaacccacacaatgcaatctgtggtatgcgaaggaagttcacacaaccctggtccatggagacagttatcacaatgatatggtgcatttgaaaatgcagaaatcagtggatcttgaaaaacactcctccgaccacctagcggtgtaaaatcatgttcgttcaagcgatgaaccttaacacctacaagatgcaggatatggtagcttaaaatgtcagacaatggatacacacattgtaatacgagattgtaatctataaacacatatatagaaaagtaataaaat

SEQ ID NO: 9724 - DNA, 1026 bp, Zea Mays
agaatggcatgtcggcaccctgaggtgaagtgggctcagaggatcgacaaggtttacatcactgtacagttacctgacgcaaaggatgctaaggtcaatttggatccagatggtgtcttcacattctctggcagtgctggtacaaacttgtatgaattgaaactagatctgaatgacaaagtaaacgttgaggctagcaaaataagtgtgggggtcaggtccatattctgtatcgtagaaaaagctgaagccaaatggtggaagaaactcgttcgagatgatcaaagggcacctcactttgtgaaagttgattgggacaaatgggttgatgaagatgatgatggtgctgatatcaacatggatgggatggacttctcgaatttcggtggcatgggtggtatgggcggcatgggtggcatgggtgatatggctggtatgggtggtcttggtggcatgggtggtatgggtggtcttggtggcatgggcggtatgggaatggatgatttcgaagatgagagtgatgatgaagaagtgtcgaaacctcaagctgcggacaaggctgttgaggctgaggagacggagtcagcggaaaccaagattgaggcggctcagagcagttgaagatgcttatgatctaagctagattgtatcctcatgttaattctgctgaatcggaggacaaaccttacatttatggtgctggcaagtcccagtggcgtgccatgaaaatttacgttccgtcttttaactgggtatccgagtgtcgtgctcagcatattatggatattatttccgtaatgcttcctttggtcgccaatcatgtggtgaagagtttgttttactggattgctttatttgttttttggtcgccaatcgaatggtctggtcaaaaggactagtggcgacgtgattttgttatttggttctctacccagcaatacaactcccacggtaaagtgctacagaggagcaccttcaactgagcaccttcaactgtttctaatatttattcttccaatattgcta

SEQ ID NO: 9725 - DNA, 1259 bp, Zea Mays
ctcatatggccgtatcacaattcacacctagcccatcatacctactcgacctacaccagcccttttcggcctgctactgccgatccgttccctcagcccctcacaccgcttacttgactcctcccgaacttccacatctctgctctgccttcccagtctcccatccctgaaaacctcacaaaaccctcgctcgctccccaccaccccgccgcgccgccgcctgtaccagctgcgtcaagatgagtcggcaccctgaggtgaagtgggctcagaggatcgacaaggtttacatcactgtacagttacctgacgcaaaggatgctaaggtcaatttggatccagatggtgtcttcacattctctggcagtgctggtacaaacttgtatgaattgaaactagatctgaatgacaaagtaaacgttgaggctagcaaaataagtgtgggggtcaggtccatattctgtatcgtagaaaaagctgaagccaaatggtggaagaaactcgttcgagatgatcaaagggcacctcactttgtgaaagttgattgggacaaatgggttgatgaagatgatgatggtgctgatatcaacatggatgggatggacttctcgaatttcggtggcatgggtggtatgggcggcatgggtggcatgggtgatatggctggtatgggtggtcttggtggcatgggtggtatgggtggtcttggtggcatgggcggtatgggaatggatgatttcgaagatgagagtgatgatgaagaagtgtcgaaacctcaagctgcggacaaggctgttgaggctgaggagacggagtcagcggaaaccaagattgaggcggctcagagcagttgaagatgcttatgatctaagctagattgtatcctcatgttaattctgctgaatcggaggacaaaccttacatttatggtgctggcaagtcccagtggcgtgccatgaaaatttacgttccgtcttttaactgggtatccgagtgtcgtgctcagcatattatggatattatttccgtaatgcttcctttggtcgccaatcatgtggtgaagagtttgttttactggattgctttatttgttttttggtcgccaatcgaatggtctggtcaaaaggactagtggcgacgtgattttgttatttggttctctacccagcaatacaactcccacggtaaagtgctacagaggagcaccttcaactgagcaccttcaactgtttctaatatttattcttccaatattgcta

SEQ ID NO: 9726 - DNA, 1718 bp, Zea Mays
gtactattcctgatgaagtaccttctgacatttatgtatttaagtgcattgtagtcaattcctttgactagcaaaacctaaaatgttgtctatcatgtccttggtttatcttgtgttactaaaattttaaattgtttggaatatttctttgactacaaaacctaaaaggagacttgaaaggtggaatatatccaaagatctagcttggagtatgaacgcatggaaggcctgaaccttgatttggggcttctgttgggtttcaactttagtctaccccatcttgtttgggactaaaagactttgttgttattactgttgttgtactacatttttaaagtgatttgctaattcctgtttttattctagcataggctaaactagtgacatagagtatggtaatgaattgggctaaacatgaatccttagtttctttctgcaagtttacatggttattaatcagatatccaggtcatggttttgaagcagcctctccacattttacagggaaaggcttacatcggtttatcccttactcagagcactgagtctgtccttttgttatttgtattttcttgtgtaacactgaagctcctcagtgcagcatcttacgggaggcactgttatattgagaaacaaggattttattattctatatagaggcaaggattttcttcctggtggagttgctcaaactgtcattcaacgagaagctcaggtacatgatgaacaggtgaaggaagaggaagcccgactgaaagcagttgactcacttcagatggttggtgaattatctgaagaaagttctttaggaactttcagggagtaccagggtttccatgctaagtttgtgcatgaaaatactgaaaactctaacaccatgattgaactagaggctgagaagtatagattggaaaaggaactgaaagaccatgagtggaagctttccgttctcaacaagaagattgaaagatctaaccaggcactggcaaagcttcacagttcttggagcccttcagagcagtctgctgatagagaacacttgacagaagaggaaaaaataatgttccgccggattggccgcaaaatggatgggcttgttctcctaggaaggcgtggtatctttgatggtgtaattgaagagattcatcagcactggaaacataaagaggttgtgaaagtaattacaaaacagaatcaaactcgacagatcatgtacgccgcgagtctgctcgaggttgagacaggtgggatattaatagcagtagaaaagctcacaaccagccatgccataatactttaccgtggaaaaaactatcgccgcccagcaaaatcatcatttagtaatctcctaacaaaaagagaagcgctccgaagatcaatcgaggtccaacgacgagggtcaatgaaatactttgttcgggagagacagaagtccattttggaattgaaaaggaaactgaggtatgtgacaaggcaaatcaggtatcgaaccccatgatcatgaagagtttggatagcatggttagtaaatgatagttagaatttgcaataatgactgcatccaatttttttccttaatatgggatagccgtgtaaactgtgaagcccaacatgaacaattctgaagtgtacagattatataatagtgtctgttgtacatatgtgacacttttgactttacccatatttcatgaaacaagagatttttttttctgctt

SEQ ID NO: 9727 - DNA, 2219 bp, Zea Mays
ccccacatggcgccaccgccgctgcccctcttctccccgtccctaaaggccccgccgccgccgccatggctccacgggtcctctacccaaagccgcgactccgcacccccggtgcctccactccccgccgaggcaactccttccaagttccgcatcgacagccccaaaccggcaccggcaaggaaaaacaccaaaacagcagccaagcccctcactgccggagtccccgggggccgcacccaccgagcggtcctcggcatcatccggcgcgtccgctccctcgagctctccgatgctccgagtccgaattccgtccacaccagcaacagcggtgccgccgccgccgcattccaccttacgatcgagctgtccccgccgcgggaaccaggccaatatgtggttgagaaggagaagtcacgggctgttccgtgggcggctgctagggacgagggcctcaaggttgcgctgcggcgggagaagaagccgcgggagccgacgcgcgcggagaccgagctggagacccacgagctgcatcgcctgcggcggttggcgcgtgggataggcaggtgggcgcgggccaagaaggccggagtcaccgacgaggtagtcaaggaggtgcgaagggaatgggccagtggtgaggagctcgccgccgtgcgcatagtcgagccactccgccggtccatggatcgcgccagggaaattcttgagattaaaacaggaggcttagttgtgtggacaaaaggagacatgcattttgtctacagaggaagcaaatatcagcaaaacgcaaagcatagtcacacttttctaactaatgttcataaagatgatgcttttcaagaaaatgatcaaagcatttgtggccagaaggatgaagaacctgtcaagggtacactatatgagagagaagtcaatagactattggacactttgggccctcgatttgttgattggtggtgggacacaccattacctgttgatgctgatctcctcccagagtttgttccaggctttaagactccatataggctgtgccctcctggggtgagaccaacactagctgatgaggagctgacatacttgcgcaagcttgcacgccttttgccaacacattttgcccttggtagaaacacaagattgcagggtttggctgctgctatactgaagctttgggagaaaagccttatagcaaaaattgcagtgaaaataggtatccagaatacaaacaatgaacaaatggcatggaacctcaagcatcttacgggaggcactgttatattgagaaacaaggattttattattctatatagaggcaaggattttcttcctggtggagttgctcaaactgtcattcaacgagaagctcaggtacatgatgaacaggtgaaggaagaggaagcccgactgaaagcagttgactcacttcagatggttggtgaattatctgaagaaagttctttaggaactttcagggagtaccagggtttccatgctaagtttgtgcatgaaaatactgaaaactctaacaccatgattgaactagaggctgagaagtatagattggaaaaggaactgaaagaccatgagtggaagctttccgttctcaacaagaagattgaaagatctaaccaggcactggcaaagcttcacagttcttggagcccttcagagcagtctgctgatagagaacacttgacagaagaggaaaaaataatgttccgccggattggccgcaaaatggatgggcttgttctcctaggaaggcgtggtatctttgatggtgtaattgaagagattcatcagcactggaaacataaagaggttgtgaaagtaattacaaaacagaatcaaactcgacagatcatgtacgccgcgagtctgctcgaggttgagacagtcaatgaaatactttgttcgggagagacagaagtccattttggaattgaaaaggaaactgaggtatgtgacaaggcaaatcaggtatcgaaccccatgatcatgaagagtttggatagcatggttagtaaatgatagttagaatttgcaataatgactgcatccaatttttttccttaatatgggatagccgtgtaaactgtgaagcccaacatgaacaattctgaagtgtacagattatataatagtgtctgttgtacatatgtgacacttttgactttacccatatttcatgaaacaagagatttttttttctgctt

SEQ ID NO: 9728 - DNA, 2318 bp, Zea Mays
ccccacatggcgccaccgccgctgcccctcttctccccgtccctaaaggccccgccgccgccgccatggctccacgggtcctctacccaaagccgcgactccgcacccccggtgcctccactccccgccgaggcaactccttccaagttccgcatcgacagccccaaaccggcaccggcaaggaaaaacaccaaaacagcagccaagcccctcactgccggagtccccgggggccgcacccaccgagcggtcctcggcatcatccggcgcgtccgctccctcgagctctccgatgctccgagtccgaattccgtccacaccagcaacagcggtgccgccgccgccgcattccaccttacgatcgagctgtccccgccgcgggaaccaggccaatatgtggttgagaaggagaagtcacgggctgttccgtgggcggctgctagggacgagggcctcaaggttgcgctgcggcgggagaagaagccgcgggagccgacgcgcgcggagaccgagctggagacccacgagctgcatcgcctgcggcggttggcgcgtgggataggcaggtgggcgcgggccaagaaggccggagtcaccgacgaggtagtcaaggaggtgcgaagggaatgggccagtggtgaggagctcgccgccgtgcgcatagtcgagccactccgccggtccatggatcgcgccagggaaattcttgagattaaaacaggaggcttagttgtgtggacaaaaggagacatgcattttgtctacagaggaagcaaatatcagcaaaacgcaaagcatagtcacacttttctaactaatgttcataaagatgatgcttttcaagaaaatgatcaaagcatttgtggccagaaggatgaagaacctgtcaagggtacactatatgagagagaagtcaatagactattggacactttgggccctcgatttgttgattggtggtgggacacaccattacctgttgatgctgatctcctcccagagtttgttccaggctttaagactccatataggctgtgccctcctggggtgagaccaacactagctgatgaggagctgacatacttgcgcaagcttgcacgccttttgccaacacattttgcccttggtagaaacacaagattgcagggtttggctgctgctatactgaagctttgggagaaaagccttatagcaaaaattgcagtgaaaataggtatccagaatacaaacaatgaacaaatggcatggaacctcaagaggcaaggattttcttcctggtggagttgctcaaactgtcattcaacgagaagctcaggtacatgatgaacaggtgaaggaagaggaagcccgactgaaagcagttgactcacttcagatggttggtgaattatctgaagaaagttctttaggaactttcagggagtaccagggtttccatgctaagtttgtgcatgaaaatactgaaaactctaacaccatgattgaactagaggctgagaagtatagattggaaaaggaactgaaagaccatgagtggaagctttccgttctcaacaagaagattgaaagatctaaccaggcactggcaaagcttcacagttcttggagcccttcagagcagtctgctgatagagaacacttgacagaagaggaaaaaataatgttccgccggattggccgcaaaatggatgggcttgttctcctaggaaggcgtggtatctttgatggtgtaattgaagagattcatcagcactggaaacataaagaggttgtgaaagtaattacaaaacagaatcaaactcgacagatcatgtacgccgcgagtctgctcgaggttgagacaggtgggatattaatagcagtagaaaagctcacaaccagccatgccataatactttaccgtggaaaaaactatcgccgcccagcaaaatcatcatttagtaatctcctaacaaaaagagaagcgctccgaagatcaatcgaggtccaacgacgagggtcaatgaaatactttgttcgggagagacagaagtccattttggaattgaaaaggaaactgaggtatgtgacaaggcaaatcaggtatcgaaccccatgatcatgaagagtttggatagcatggttagtaaatgatagttagaatttgcaataatgactgcatccaatttttttccttaatatgggatagccgtgtaaactgtgaagcccaacatgaacaattctgaagtgtacagattatataatagtgtctgttgtacatatgtgacacttttgactttacccatatttcatgaaacaagagatttttttttctgctt

SEQ ID NO: 9729 - DNA, 2379 bp, Zea Mays
ccccacatggcgccaccgccgctgcccctcttctccccgtccctaaaggccccgccgccgccgccatggctccacgggtcctctacccaaagccgcgactccgcacccccggtgcctccactccccgccgaggcaactccttccaagttccgcatcgacagccccaaaccggcaccggcaaggaaaaacaccaaaacagcagccaagcccctcactgccggagtccccgggggccgcacccaccgagcggtcctcggcatcatccggcgcgtccgctccctcgagctctccgatgctccgagtccgaattccgtccacaccagcaacagcggtgccgccgccgccgcattccaccttacgatcgagctgtccccgccgcgggaaccaggccaatatgtggttgagaaggagaagtcacgggctgttccgtgggcggctgctagggacgagggcctcaaggttgcgctgcggcgggagaagaagccgcgggagccgacgcgcgcggagaccgagctggagacccacgagctgcatcgcctgcggcggttggcgcgtgggataggcaggtgggcgcgggccaagaaggccggagtcaccgacgaggtagtcaaggaggtgcgaagggaatgggccagtggtgaggagctcgccgccgtgcgcatagtcgagccactccgccggtccatggatcgcgccagggaaattcttgagattaaaacaggaggcttagttgtgtggacaaaaggagacatgcattttgtctacagaggaagcaaatatcagcaaaacgcaaagcatagtcacacttttctaactaatgttcataaagatgatgcttttcaagaaaatgatcaaagcatttgtggccagaaggatgaagaacctgtcaagggtacactatatgagagagaagtcaatagactattggacactttgggccctcgatttgttgattggtggtgggacacaccattacctgttgatgctgatctcctcccagagtttgttccaggctttaagactccatataggctgtgccctcctggggtgagaccaacactagctgatgaggagctgacatacttgcgcaagcttgcacgccttttgccaacacattttgcccttggtagaaacacaagattgcagggtttggctgctgctatactgaagctttgggagaaaagccttatagcaaaaattgcagtgaaaataggtatccagaatacaaacaatgaacaaatggcatggaacctcaagtgcagcatcttacgggaggcactgttatattgagaaacaaggattttattattctatatagaggcaaggattttcttcctggtggagttgctcaaactgtcattcaacgagaagctcaggtacatgatgaacaggtgaaggaagaggaagcccgactgaaagcagttgactcacttcagatggttggtgaattatctgaagaaagttctttaggaactttcagggagtaccagggtttccatgctaagtttgtgcatgaaaatactgaaaactctaacaccatgattgaactagaggctgagaagtatagattggaaaaggaactgaaagaccatgagtggaagctttccgttctcaacaagaagattgaaagatctaaccaggcactggcaaagcttcacagttcttggagcccttcagagcagtctgctgatagagaacacttgacagaagaggaaaaaataatgttccgccggattggccgcaaaatggatgggcttgttctcctaggaaggcgtggtatctttgatggtgtaattgaagagattcatcagcactggaaacataaagaggttgtgaaagtaattacaaaacagaatcaaactcgacagatcatgtacgccgcgagtctgctcgaggttgagacaggtgggatattaatagcagtagaaaagctcacaaccagccatgccataatactttaccgtggaaaaaactatcgccgcccagcaaaatcatcatttagtaatctcctaacaaaaagagaagcgctccgaagatcaatcgaggtccaacgacgagggtcaatgaaatactttgttcgggagagacagaagtccattttggaattgaaaaggaaactgaggtatgtgacaaggcaaatcaggtatcgaaccccatgatcatgaagagtttggatagcatggttagtaaatgatagttagaatttgcaataatgactgcatccaatttttttccttaatatgggatagccgtgtaaactgtgaagcccaacatgaacaattctgaagtgtacagattatataatagtgtctgttgtacatatgtgacacttttgactttacccatatttcatgaaacaagagatttttttttctgctt

SEQ ID NO: 9730 - DNA, 2387 bp, Zea Mays
ccccacatggcgccaccgccgctgcccctcttctccccgtccctaaaggccccgccgccgccgccatggctccacgggtcctctacccaaagccgcgactccgcacccccggtgcctccactccccgccgaggcaactccttccaagttccgcatcgacagccccaaaccggcaccggcaaggaaaaacaccaaaacagcagccaagcccctcactgccggagtccccgggggccgcacccaccgagcggtcctcggcatcatccggcgcgtccgctccctcgagctctccgatgctccgagtccgaattccgtccacaccagcaacagcggtgccgccgccgccgcattccaccttacgatcgagctgtccccgccgcgggaaccaggccaatatgtggttgagaaggagaagtcacgggctgttccgtgggcggctgctagggacgagggcctcaaggttgcgctgcggcgggagaagaagccgcgggagccgacgcgcgcggagaccgagctggagacccacgagctgcatcgcctgcggcggttggcgcgtgggataggcaggtgggcgcgggccaagaaggccggagtcaccgacgaggtagtcaaggaggtgcgaagggaatgggccagtggtgaggagctcgccgccgtgcgcatagtcgagccactccgccggtccatggatcgcgccagggaaattcttgagattaaaacaggaggcttagttgtgtggacaaaaggagacatgcattttgtctacagaggaagcaaatatcagcaaaacgcaaagcatagtcacacttttctaactaatgttcataaagatgatgcttttcaagaaaatgatcaaagcatttgtggccagaaggatgaagaacctgtcaagggtacactatatgagagagaagtcaatagactattggacactttgggccctcgatttgttgattggtggtgggacacaccattacctgttgatgctgatctcctcccagagtttgttccaggctttaagactccatataggctgtgccctcctggggtgagaccaacactagctgatgaggagctgacatacttgcgcaagcttgcacgccttttgccaacacattttgcccttggtagaaacacaagattgcagggtttggctgctgctatactgaagctttgggagaaaagccttatagcaaaaattgcagtgaaaataggtatccagaatacaaacaatgaacaaatggcatggaacctcaagctcctcagtgcagcatcttacgggaggcactgttatattgagaaacaaggattttattattctatatagaggcaaggattttcttcctggtggagttgctcaaactgtcattcaacgagaagctcaggtacatgatgaacaggtgaaggaagaggaagcccgactgaaagcagttgactcacttcagatggttggtgaattatctgaagaaagttctttaggaactttcagggagtaccagggtttccatgctaagtttgtgcatgaaaatactgaaaactctaacaccatgattgaactagaggctgagaagtatagattggaaaaggaactgaaagaccatgagtggaagctttccgttctcaacaagaagattgaaagatctaaccaggcactggcaaagcttcacagttcttggagcccttcagagcagtctgctgatagagaacacttgacagaagaggaaaaaataatgttccgccggattggccgcaaaatggatgggcttgttctcctaggaaggcgtggtatctttgatggtgtaattgaagagattcatcagcactggaaacataaagaggttgtgaaagtaattacaaaacagaatcaaactcgacagatcatgtacgccgcgagtctgctcgaggttgagacaggtgggatattaatagcagtagaaaagctcacaaccagccatgccataatactttaccgtggaaaaaactatcgccgcccagcaaaatcatcatttagtaatctcctaacaaaaagagaagcgctccgaagatcaatcgaggtccaacgacgagggtcaatgaaatactttgttcgggagagacagaagtccattttggaattgaaaaggaaactgaggtatgtgacaaggcaaatcaggtatcgaaccccatgatcatgaagagtttggatagcatggttagtaaatgatagttagaatttgcaataatgactgcatccaatttttttccttaatatgggatagccgtgtaaactgtgaagcccaacatgaacaattctgaagtgtacagattatataatagtgtctgttgtacatatgtgacacttttgactttacccatatttcatgaaacaagagatttttttttctgctt

SEQ ID NO: 9731 - DNA, 3630 bp, Zea Mays
ctctccgcactatggccctcgatttgattcgggtctgagcacttcatcccattccccgccccagatcacgcccaccgctgtcctgttcgccttccgccgtgccatcccatatccaccgtgctccccaccctccctactcctccccgttgggtgctgacctttttccctctcttacggaaatcatgcttcatctggtgatgttcttaatatggagcaacggataagcttatccgtgtgtcagtttctctaatatctaagtagggtttcccaccgtcccccgttacgtctagtatgccattagttttaggctgtgtctgatccattaatggcactgcaaccaagacgtgccatcgtccagtcgcaccatcacaagagccgacaaagggtaccatactcttttttgacagtgaatcaactgacactgtttgcacccagagatagagagatagaacaaatacacaacaattttgtaaaaaaaaagtcagtcctatgtgtggggatttcagaaattacaagcaaatcatttttttttctttaacaagttgcagcaagaaacttctttcgaggagcgaaacatgcacctcgacattggtggcggcatttattttgttcttgatttgcctttcccaatagctacgatgcacactactattcaactccgcacaccatttctgctcagtgagcataattcacacaccaataatcttgctcctagcagcggccaaaggcagatccatggaggttatgactggggcactaccgagcctcatccccaagcttgctaatctagtcgctggtgagtacaatctgcaaaagggtgtcaaaggggatatcatgttcctccaagaagagcttgagagcatgagggatgcactcgaggagatctccaaggttccagcagaccagcttcccaacagagataagatttgggctaggaacgtgagagagctctcctacgacatagagcccaagattcgccataaaatggctactgaaattaggacgatcaaaaggcgcatcgttgaggtgcacgaacgacatatcaggtatgaaattaatcttggtcctgataagcttggcaatgctgctgtagatccccgaatatttggtcagtacacagagctgaaagagcttgttggcatcgacgagacaagagatgagttaatcgatattatgatggaagggaatgtagtccccatgaagcaagtgtctcaaactcctgacttgaagaaattattcaagagtttgctctatgatcttggcaagtacatcaatgaagaatcgttggatgagagacagctcatcaatgtactcagagaattccttcaagagagaaggtatttaattgttattgatgacatatgggacatctcagtctggaaaatgattagatgtgctttaccagacaatgatatcgggtacattattgttacaaccacacgcatttccgatgttgctgaaaaagttggtggtgcttataagctaaaacctctttcattgaacaactctcgagaattaatgtataagataatatttgggaacgaaaatagagaaaacactaaagacaaagaaatatgtttagatgaggagcttgcagaagtatcaaataaaatactaaagaaatgtgccggtgtgcccctagctattattacgatggctagtgtactagcttgtaaagcaagaaatgaaatggagtggtatgaggtgtacaactctattggtgttggcattgagaacaatctagatgtggggaatatgagaaagattttgtcattcagctattacgatatggcatcccatctcaagacatgtttattatacttaagtatgtttccagaagattataaaattgagaaagatcgtttgatatggatgtggatagctgaaggctttgtccaatatgtgaaacaagggaagagcctatttgagcatggagagagttacttcaatgaactcataaacagagagtgccaaacgggattgggagcctaacaagccttgaagaactcacatttctaggcatttatgactccactgtggacattatagaagagctgggccagctaacggagctacgggtactgcatatcgttctttttggtgaatggaacgacaagctggtggagtgcctgcacaagctgaaaaagttgaaatatctatatatcaaggaccgcagtggtcaacttaacattggtggtttggatgcctgggtagcccctccaaatctccaaatattgaatacgcgatcgggttgctggttcaccacactgtcagcatcagcatggatgaatccatctcttcttcaggacctctccttatctaccaccgtgagggagttgcagcaggatgacattataattcttgggagtttgccagctctccgctatctaaatctgatgattgttggtgaggatttgggagttcacaatgaaatccatggggaatgcattgttggtgctggtttgttcccatccctagtatactgccagctctggggaaatgtggcgcctatagtgtttcagcgaggagccatgccacggctcagaacccttgactttcggttatctgttcaagaggtgagaggaatcaacggcagggatggtggtatcgacttgggcctcaggaacctgccatcactccagaaggtttgggttcatttggaccctgagggcgctaacaaggcagaggtgaaggaactggaggctgagttgacgcgtgccatcaaaattcatccaaatcatcctcagctgtatggaattcaggatgaagatgcagatgatgaatgatgcactggagaaaagattaccaattatgcagaagctagtgcactttcaactttcatggcactggtctcaaggattgtctgattcagatggattacttctgtttctgtctcagattcagaatgtgatgtccaccccaatcatccaacccttaaggaacatggtgtcatggtgatgaagatgagccaacttgtgatcatccgctggaaaatggaagagcaatctggtggcctgatggactagcaaacctggaagtaagtacaaacaaaacacgagacagagacacagagtcgggcctaagatttagcaaaactgatgctgggttgggtatgtatgccctgtttggtgtgctctgatcagaggatgacatttacagaattaaagcgtagtgtggcaatgtggcagcctggggaaacctgcaactggcgatctggaggtctggagagaacaaaacgccagtgacagttggggcttaggcttggcaagcctaatattgcaatagcacatatgaataacggttgtttgttgcgactggaagtcctgtttggtttttttacatagtgtttgctgttttcactcatgcctttttcttttgtgttttgtgtactgtcttgggtgttcctagggttgccaaaccgtttttgtgacaccccagtgtcacctagggtttctctcaaaatgccaaaccaagaaccatcattttatgtgaatcaaattaagcatgagcatcaaattgacttaagaatgaagaatccatcatgcatatacttaaaagtatcatgatcagaacaaatgggtctttcaaaaaggtaataatgttgcaaccctaataaaaaccctaagtgag

SEQ ID NO: 9732 - DNA, 3811 bp, Zea Mays
ctctccgcactatggccctcgatttgattcgggtctgagcacttcatcccattccccgccccagatcacgcccaccgctgtcctgttcgccttccgccgtgccatcccatatccaccgtgctccccaccctccctactcctccccgttgggtgctgacctttttccctctcttacggaaatcatgcttcatctggtgatgttcttaatatggagcaacggataagcttatccgtgtgtcagtttctctaatatctaagtagggtttcccaccgtcccccgttacgtctagtatgccattagttttaggctgtgtctgatccattaatggcactgcaaccaagacgtgccatcgtccagtcgcaccatcacaagagccgacaaagggtaccatactcttttttgacagtgaatcaactgacactgtttgcacccagagatagagagatagaacaaatacacaacaattttgtaaaaaaaaagtcagtcctatgtgtggggatttcagaaattacaagcaaatcatttttttttctttaacaagttgcagcaagaaacttctttcgaggagcgaaacatgcacctcgacattggtggcggcatttattttgttcttgatttgcctttcccaatagctacgatgcacactactattcaactccgcacaccatttctgctcagtgagcataattcacacaccaataatcttgctcctagcagcggccaaaggcagatccatggaggttatgactggggcactaccgagcctcatccccaagcttgctaatctagtcgctggtgagtacaatctgcaaaagggtgtcaaaggggatatcatgttcctccaagaagagcttgagagcatgagggatgcactcgaggagatctccaaggttccagcagaccagcttcccaacagagataagatttgggctaggaacgtgagagagctctcctacgacatagagcccaagattcgccataaaatggctactgaaattaggacgatcaaaaggcgcatcgttgaggtgcacgaacgacatatcaggtatgaaattaatcttggtcctgataagcttggcaatgctgctgtagatccccgaatatttggtcagtacacagagctgaaagagcttgttggcatcgacgagacaagagatgagttaatcgatattatgatggaagggaatgtagtccccatgaagcaaggcaagataatttccattgttggatttggggggcttggaaaaacaactcttgctaatgctgtttatgagaagataagagcattgttcgattgctgtgcatttgtttcagtgtctcaaactcctgacttgaagaaattattcaagagtttgctctatgatcttggcaagtacatcaatgaagaatcgttggatgagagacagctcatcaatgtactcagagaattccttcaagagagaaggtatttaattgttattgatgacatatgggacatctcagtctggaaaatgattagatgtgctttaccagacaatgatatcgggtctgaaggctttgtccaatatgtgaaacaagggaagagcctatttgagcatggagagagttacttcaatgaactcataaacagaggtatgatccaacccatatataaccaagctggcatgatatatgaatgtcgtgtgcatgatatggtgcttggtcttatatgttccttgtcaaatggagaaaattttgttacaacattaaatggtttgggtcacggatctccatcaaatatgattaggagattatcagttcaaaatggcaatgagagtcaagctatgactctgcaaaccagaaacttgcagcaagtaaggtcggttgttgcctttccggatgccaccgctagtgtagttacggtcttgaggagcttccgagttctacgtgtactagatttacaagattgtgacctttcacaatgttgcagcctgaagtaccttgggaatctatttcacttgaggtatctaggactatgtaacacaagtattacacagctccctgaagaaattgtaaacttgcaacttctacaaatactggatgtatggaacaataaaatgtattgcctaccctcaactattgtgcagctgagatatttgatgtgcctttacattgatggttttactagagtgccaaacgggattgggagcctaacaagccttgaagaactcacatttctaggcatttatgactccactgtggacattatagaagagctgggccagctaacggagctacgggtactgcatatcgttctttttggtgaatggaacgacaagctggtggagtgcctgcacaagctgaaaaagttgaaatatctatatatcaaggaccgcagtggtcaacttaacattggtggtttggatgcctgggtagcccctccaaatctccaaatattgaatacgcgatcgggttgctggttcaccacactgtcagcatcagcatggatgaatccatctcttcttcaggacctctccttatctaccaccgtgagggagttgcagcaggatgacattataattcttgggagtttgccagctctccgctatctaaatctgatgattgttggtgaggatttgggagttcacaatgaaatccatggggaatgcattgttggtgctggtttgttcccatccctagtatactgccagctctggggaaatgtggcgcctatagtgtttcagcgaggagccatgccacggctcagaacccttgactttcggttatctgttcaagaggtgagaggaatcaacggcagggatggtggtatcgacttgggcctcaggaacctgccatcactccagaaggtttgggttcatttggaccctgagggcgctaacaaggcagaggtgaaggaactggaggctgagttgacgcgtgccatcaaaattcatccaaatcatcctcagctgtatggaattcaggatgaagatgcagatgatgaatgatgcactggagaaaagattaccaattatgcagaagctagtgcactttcaactttcatggcactggtctcaaggattgtctgattcagatggattacttctgtttctgtctcagattcagaatgtgatgtccaccccaatcatccaacccttaaggaacatggtgtcatggtgatgaagatgagccaacttgtgatcatccgctggaaaatggaagagcaatctggtggcctgatggactagcaaacctggaagtaagtacaaacaaaacacgagacagagacacagagtcgggcctaagatttagcaaaactgatgctgggttgggtatgtatgccctgtttggtgtgctctgatcagaggatgacatttacagaattaaagcgtagtgtggcaatgtggcagcctggggaaacctgcaactggcgatctggaggtctggagagaacaaaacgccagtgacagttggggcttaggcttggcaagcctaatattgcaatagcacatatgaataacggttgtttgttgcgactggaagtcctgtttggtttttttacatagtgtttgctgttttcactcatgcctttttcttttgtgttttgtgtactgtcttgggtgttcctagggttgccaaaccgtttttgtgacaccccagtgtcacctagggtttctctcaaaatgccaaaccaagaaccatcattttatgtgaatcaaattaagcatgagcatcaaattgacttaagaatgaagaatccatcatgcatatacttaaaagtatcatgatcagaacaaatgggtctttcaaaaaggtaataatgttgcaaccctaataaaaaccctaagtgag

SEQ ID NO: 9733 - DNA, 3743 bp, Zea Mays
ctctccgcactatggccctcgatttgattcgggtctgagcacttcatcccattccccgccccagatcacgcccaccgctgtcctgttcgccttccgccgtgccatcccatatccaccgtgctccccaccctccctactcctccccgttgggtgctgacctttttccctctcttacggaaatcatgcttcatctggtgatgttcttaatatggagcaacggataagcttatccgtgtgtcagtttctctaatatctaagtagggtttcccaccgtcccccgttacgtctagtatgccattagttttaggctgtgtctgatccattaatggcactgcaaccaagacgtgccatcgtccagtcgcaccatcacaagagccgacaaagggtaccatactcttttttgacagtgaatcaactgacactgtttgcacccagagatagagagatagaacaaatacacaacaattttgtaaaaaaaaagtcagtcctatgtgtggggatttcagaaattacaagcaaatcatttttttttctttaacaagttgcagcaagaaacttctttcgaggagcgaaacatgcacctcgacattggtggcggcatttattttgttcttgatttgcctttcccaatagctacgatgcacactactattcaactccgcacaccatttctgctcagtgagcataattcacacaccaataatcttgctcctagcagcggccaaaggcagatccatggaggttatgactggggcactaccgagcctcatccccaagcttgctaatctagtcgctggtgagtacaatctgcaaaagggtgtcaaaggggatatcatgttcctccaagaagagcttgagagcatgagggatgcactcgaggagatctccaaggttccagcagaccagcttcccaacagagataagatttgggctaggaacgtgagagagctctcctacgacatagagcccaagattcgccataaaatggctactgaaattaggacgatcaaaaggcgcatcgttgaggtgcacgaacgacatatcaggtatgaaattaatcttggtcctgataagcttggcaatgctgctgtagatccccgaatatttggtcagtacacagagctgaaagagcttgttggcatcgacgagacaagagatgagttaatcgatattatgatggaagggaatgtagtccccatgaagcaaggcaagataatttccattgttggatttggggggcttggaaaaacaactcttgctaatgctgtttatgagaagataagagcattgttcgattgctgtgcatttgtttcagtgtctcaaactcctgacttgaagaaattattcaagagtttgctctatgatcttggcaagtacatcaatgaagaatcgttggatgagagacagctcatcaatgtactcagagaattccttcaagagagaaggtatttaattgttattgatgacatatgggacatctcagtctggaaaatgattagatgtgctttaccagacaatgatatcgggtacattattgttacaaccacacgcatttccgatgttgctgaaaaagttggtggtgcttataagctaaaacctctttcattgaacaactctcgagaattaatgtataagataatatttgggaacgaaaatagagaaaacactaaagacaaagaaatatgtttagatgaggagcttgcagaagtatcaaataaaatactaaagaaatgtgccggtgtgcccctagctattattacgatggctagtgtactagcttgtaaagcaagaaatgaaatggagtggtatgaggtgtacaactctattggtgttggcattgagaacaatctagatgtggggaatatgagaaagattttgtcattcagctattacgatatggcatcccatctcaagacatgtttattatacttaagtatgtttccagaagattataaaattgagaaagatcgtttgatatggatgtggatagctgaaggctttgtccaatatgtgaaacaagggaagagcctatttgagcatggagagagttacttcaatgaactcataaacagagagtgccaaacgggattgggagcctaacaagccttgaagaactcacatttctaggcatttatgactccactgtggacattatagaagagctgggccagctaacggagctacgggtactgcatatcgttctttttggtgaatggaacgacaagctggtggagtgcctgcacaagctgaaaaagttgaaatatctatatatcaaggaccgcagtggtcaacttaacattggtggtttggatgcctgggtagcccctccaaatctccaaatattgaatacgcgatcgggttgctggttcaccacactgtcagcatcagcatggatgaatccatctcttcttcaggacctctccttatctaccaccgtgagggagttgcagcaggatgacattataattcttgggagtttgccagctctccgctatctaaatctgatgattgttggtgaggatttgggagttcacaatgaaatccatggggaatgcattgttggtgctggtttgttcccatccctagtatactgccagctctggggaaatgtggcgcctatagtgtttcagcgaggagccatgccacggctcagaacccttgactttcggttatctgttcaagaggtgagaggaatcaacggcagggatggtggtatcgacttgggcctcaggaacctgccatcactccagaaggtttgggttcatttggaccctgagggcgctaacaaggcagaggtgaaggaactggaggctgagttgacgcgtgccatcaaaattcatccaaatcatcctcagctgtatggaattcaggatgaagatgcagatgatgaatgatgcactggagaaaagattaccaattatgcagaagctagtgcactttcaactttcatggcactggtctcaaggattgtctgattcagatggattacttctgtttctgtctcagattcagaatgtgatgtccaccccaatcatccaacccttaaggaacatggtgtcatggtgatgaagatgtaaggagccaacttgtgatcatccgctggaaaatggaagagcaatctggtggcctgatggactagcaaacctggaagtaagtacaaacaaaacacgagacagagacacagagtcgggcctaagatttagcaaaactgatgctgggttgggtatgtatgccctgtttggtgtgctctgatcagaggatgacatttacagaattaaagcgtagtgtggcaatgtggcagcctggggaaacctgcaactggcgatctggaggtctggagagaacaaaacgccagtgacagttggggcttaggcttggcaagcctaatattgcaatagcacatatgaataacggttgtttgttgcgactggaagtcctgtttggtttttttacatagtgtttgctgttttcactcatgcctttttcttttgtgttttgtgtactgtcttgggtgttcctagggttgccaaaccgtttttgtgacaccccagtgtcacctagggtttctctcaaaatgccaaaccaagaaccatcattttatgtgaatcaaattaagcatgagcatcaaattgacttaagaatgaagaatccatcatgcatatacttaaaagtatcatgatcagaacaaatgggtctttcaaaaaggtaataatgttgcaaccctaataaaaaccctaagtgag

SEQ ID NO: 9734 - DNA, 3744 bp, Zea Mays
tgcttccctcccttcccatcgccatctctctctccgcactatggccctcgatttgattcgggtctgagcacttcatcccattccccgccccagatcacgcccaccgctgtcctgttcgccttccgccgtgccatcccatatccaccgtgctccccaccctccctactcctccccgttgggtgctgacctttttccctctcttacggaaatcatgcttcatctggtgatgttcttaatatggagcaacggataagcttatccgtgtgtcagtttctctaatatctaagtagggtttcccaccgtcccccgttacgtctagtatgccattagttttaggctgtgtctgatccattaatggcactgcaaccaagacgtgccatcgtccagtcgcaccatcacaagagccgacaaaggcggccaaaggcagatccatggaggttatgactggggcactaccgagcctcatccccaagcttgctaatctagtcgctggtgagtacaatctgcaaaagggtgtcaaaggggatatcatgttcctccaagaagagcttgagagcatgagggatgcactcgaggagatctccaaggttccagcagaccagcttcccaacagagataagatttgggctaggaacgtgagagagctctcctacgacatagagcccaagattcgccataaaatggctactgaaattaggacgatcaaaaggcgcatcgttgaggtgcacgaacgacatatcaggtatgaaattaatcttggtcctgataagcttggcaatgctgctgtagatccccgaatatttggtcagtacacagagctgaaagagcttgttggcatcgacgagacaagagatgagttaatcgatattatgatggaagggaatgtagtccccatgaagcaagtgtctcaaactcctgacttgaagaaattattcaagagtttgctctatgatcttggcaagtacatcaatgaagaatcgttggatgagagacagctcatcaatgtactcagagaattccttcaagagagaaggtatttaattgttattgatgacatatgggacatctcagtctggaaaatgattagatgtgctttaccagacaatgatatcgggtacattattgttacaaccacacgcatttccgatgttgctgaaaaagttggtggtgcttataagctaaaacctctttcattgaacaactctcgagaattaatgtataagataatatttgggaacgaaaatagagaaaacactaaagacaaagaaatatgtttagatgaggagcttgcagaagtatcaaataaaatactaaagaaatgtgccggtgtgcccctagctattattacgatggctagtgtactagcttgtaaagcaagaaatgaaatggagtggtatgaggtgtacaactctattggtgttggcattgagaacaatctagatgtggggaatatgagaaagattttgtcattcagctattacgatatggcatcccatctcaagacatgtttattatacttaagtatgtttccagaagattataaaattgagaaagatcgtttgatatggatgtggatagctgaaggctttgtccaatatgtgaaacaagggaagagcctatttgagcatggagagagttacttcaatgaactcataaacagaggtatgatccaacccatatataaccaagctggcatgatatatgaatgtcgtgtgcatgatatggtgcttggtcttatatgttccttgtcaaatggagaaaattttgttacaacattaaatggtttgggtcacggatctccatcaaatatgattaggagattatcagttcaaaatggcaatgagagtcaagctatgactctgcaaaccagaaacttgcagcaagtaaggtcggttgttgcctttccggatgccaccgctagtgtagttacggtcttgaggagcttccgagttctacgtgtactagatttacaagattgtgacctttcacaatgttgcagcctgaagtaccttgggaatctatttcacttgaggtatctaggactatgtaacacaagtattacacagctccctgaagaaattgtaaacttgcaacttctacaaatactggatgtatggaacaataaaatgtattgcctaccctcaactattgtgcagctgagatatttgatgtgcctttacattgatggttttactagagtgccaaacgggattgggagcctaacaagccttgaagaactcacatttctaggcatttatgactccactgtggacattatagaagagctgggccagctaacggagctacgggtactgcatatcgttctttttggtgaatggaacgacaagctggtggagtgcctgcacaagctgaaaaagttgaaatatctatatatcaaggaccgcagtggtcaacttaacattggtggtttggatgcctgggtagcccctccaaatctccaaatattgaatacgcgatcgggttgctggttcaccacactgtcagcatcagcatggatgaatccatctcttcttcaggacctctccttatctaccaccgtgagggagttgcagcaggatgacattataattcttgggagtttgccagctctccgctatctaaatctgatgattgttggtgaggatttgggagttcacaatgaaatccatggggaatgcattgttggtgctggtttgttcccatccctagtatactgccagctctggggaaatgtggcgcctatagtgtttcagcgaggagccatgccacggctcagaacccttgactttcggttatctgttcaagaggtgagaggaatcaacggcagggatggtggtatcgacttgggcctcaggaacctgccatcactccagaaggtttgggttcatttggaccctgagggcgctaacaaggcagaggtgaaggaactggaggctgagttgacgcgtgccatcaaaattcatccaaatcatcctcagctgtatggaattcaggatgaagatgcagatgatgaatgatgcactggagaaaagattaccaattatgcagaagctagtgcactttcaactttcatggcactggtctcaaggattgtctgattcagatggattacttctgtttctgtctcagattcagaatgtgatgtccaccccaatcatccaacccttaaggaacatggtgtcatggtgatgaagatgtaaggagccaacttgtgatcatccgctggaaaatggaagagcaatctggtggcctgatggactagcaaacctggaaaattaaagcgtagtgtggcaatgtggcagcctggggaaacctgcaactggcgatctggaggtctggagagaacaaaacgccagtgacagttggggcttaggcttggcaagcctaatattgcaatagcacatatgaataacggttgtttgttgcgactggaagtcctgtttggtttttttacatagtgtttgctgttttcactcatgcctttttcttttgtgttttgtgtactgtcttgggtgttcctagggttgccaaaccgtttttgtgacaccccagtgtcacctagggtttctctcaaaatgccaaaccaagaaccatcattttatgtgaatcaaattaagcatgagcatcaaattgacttaagaatgaagaatccatcatgcatatacttaaaagtatcatgatcagaacaaatgggtctttcaaaaaggtaataatgttgcaaccctaataaaaaccctaagtgag

SEQ ID NO: 9735 - DNA, 3778 bp, Zea Mays
gtcgccctctccctcgtcctcgcccgtcgcacgtgttgtgtgatccagcaagaaacttctttcgaggagcgaaacatgcacctcgacattggtggcggcatttattttgttcttgatttgcctttcccaatagctacgatgcacactactattcaactccgcacaccatttctgctcagtgagcataattcacacaccaataatcttgctcctagcagcggccaaaggcagatccatggaggttatgactggggcactaccgagcctcatccccaagcttgctaatctagtcgctggtgagtacaatctgcaaaagggtgtcaaaggggatatcatgttcctccaagaagagcttgagagcatgagggatgcactcgaggagatctccaaggttccagcagaccagcttcccaacagagataagatttgggctaggaacgtgagagagctctcctacgacatagagcccaagattcgccataaaatggctactgaaattaggacgatcaaaaggcgcatcgttgaggtgcacgaacgacatatcaggtatgaaattaatcttggtcctgataagcttggcaatgctgctgtagatccccgaatatttggtcagtacacagagctgaaagagcttgttggcatcgacgagacaagagatgagttaatcgatattatgatggaagggaatgtagtccccatgaagcaaggcaagataatttccattgttggatttggggggcttggaaaaacaactcttgctaatgctgtttatgagaagataagagcattgttcgattgctgtgcatttgtttcagtgtctcaaactcctgacttgaagaaattattcaagagtttgctctatgatcttggcaagtacatcaatgaagaatcgttggatgagagacagctcatcaatgtactcagagaattccttcaagagagaaggtatttaattgttattgatgacatatgggacatctcagtctggaaaatgattagatgtgctttaccagacaatgatatcgggtacattattgttacaaccacacgcatttccgatgttgctgaaaaagttggtggtgcttataagctaaaacctctttcattgaacaactctcgagaattaatgtataagataatatttgggaacgaaaatagagaaaacactaaagacaaagaaatatgtttagatgaggagcttgcagaagtatcaaataaaatactaaagaaatgtgccggtgtgcccctagctattattacgatggctagtgtactagcttgtaaagcaagaaatgaaatggagtggtatgaggtgtacaactctattggtgttggcattgagaacaatctagatgtggggaatatgagaaagattttgtcattcagctattacgatatggcatcccatctcaagacatgtttattatacttaagtatgtttccagaagattataaaattgagaaagatcgtttgatatggatgtggatagctgaaggctttgtccaatatgtgaaacaagggaagagcctatttgagcatggagagagttacttcaatgaactcataaacagaggtatgatccaacccatatataaccaagctggcatgatatatgaatgtcgtgtgcatgatatggtgcttggtcttatatgttccttgtcaaatggagaaaattttgttacaacattaaatggtttgggtcacggatctccatcaaatatgattaggagattatcagttcaaaatggcaatgagagtcaagctatgactctgcaaaccagaaacttgcagcaagtaaggtcggttgttgcctttccggatgccaccgctagtgtagttacggtcttgaggagcttccgagttctacgtgtactagatttacaagattgtgacctttcacaatgttgcagcctgaagtaccttgggaatctatttcacttgaggtatctaggactatgtaacacaagtattacacagctccctgaagaaattgtaaacttgcaacttctacaaatactggatgtatggaacaataaaatgtattgcctaccctcaactattgtgcagctgagatatttgatgtgcctttacattgatggttttactagagtgccaaacgggattgggagcctaacaagccttgaagaactcacatttctaggcatttatgactccactgtggacattatagaagagctgggccagctaacggagctacgggtactgcatatcgttctttttggtgaatggaacgacaagctggtggagtgcctgcacaagctgaaaaagttgaaatatctatatatcaaggaccgcagtggtcaacttaacattggtggtttggatgcctgggtagcccctccaaatctccaaatattgaatacgcgatcgggttgctggttcaccacactgtcagcatcagcatggatgaatccatctcttcttcaggacctctccttatctaccaccgtgagggagttgcagcaggatgacattataattcttgggagtttgccagctctccgctatctaaatctgatgattgttggtgaggatttgggagttcacaatgaaatccatggggaatgcattgttggtgctggtttgttcccatccctagtatactgccagctctggggaaatgtggcgcctatagtgtttcagcgaggagccatgccacggctcagaacccttgactttcggttatctgttcaagaggtgagaggaatcaacggcagggatggtggtatcgacttgggcctcaggaacctgccatcactccagaaggtttgggttcatttggaccctgagggcgctaacaaggcagaggtgaaggaactggaggctgagttgacgcgtgccatcaaaattcatccaaatcatcctcagctgtatggaattcaggatgaagatgcagatgatgaatgatgcactggagaaaagattaccaattatgcagaagctagtgcactttcaactttcatggcactggtctcaaggattgtctgattcagatggattacttctgtttctgtctcagattcagaatgtgatgtccaccccaatcatccaacccttaaggaacatggtgtcatggtgatgaagatgtaaggagccaacttgtgatcatccgctggaaaatggaagagcaatctggtggcctgatggactagcaaacctggaagtaagtacaaacaaaacacgagacagagacacagagtcgggcctaagatttagcaaaactgatgctgggttgggtatgtatgccctgtttggtgtgctctgatcagaggatgacatttacagaattaaagcgtagtgtggcaatgtggcagcctggggaaacctgcaactggcgatctggaggtctggagagaacaaaacgccagtgacagttggggcttaggcttggcaagcctaatattgcaatagcacatatgaataacggttgtttgttgcgactggaagtcctgtttggtttttttacatagtgtttgctgttttcactcatgcctttttcttttgtgttttgtgtactgtcttgggtgttcctagggttgccaaaccgtttttgtgacaccccagtgtcacctagggtttctctcaaaatgccaaaccaagaaccatcattttatgtgaatcaaattaagcatgagcatcaaattgacttaagaatgaagaatccatcatgcatatacttaaaagtatcatgatcagaacaaatgggtctttcaaaaaggtaataatgttgcaaccctaataaaaaccctaagtgag

SEQ ID NO: 9736 - DNA, 3688 bp, Zea Mays
ccgtccgccgtcgtcgccctctccctcgtcctcgcccgtcgcacgtgttgtgtgatccagttgcagcaagaaacttctttcgaggagcgaaacatgcacctcgacattggtggcggcatttattttgttcttgatttgcctttcccaatagctacgatgcacactactattcaactccgcacaccatttctgctcagtgagcataattcacacaccaataatcttgctcctagcagcggccaaaggcagatccatggaggttatgactggggcactaccgagcctcatccccaagcttgctaatctagtcgctggtgagtacaatctgcaaaagggtgtcaaaggggatatcatgttcctccaagaagagcttgagagcatgagggatgcactcgaggagatctccaaggttccagcagaccagcttcccaacagagataagatttgggctaggaacgtgagagagctctcctacgacatagagcccaagattcgccataaaatggctactgaaattaggacgatcaaaaggcgcatcgttgaggtgcacgaacgacatatcaggtatgaaattaatcttggtcctgataagcttggcaatgctgctgtagatccccgaatatttggtcagtacacagagctgaaagagcttgttggcatcgacgagacaagagatgagttaatcgatattatgatggaagggaatgtagtccccatgaagcaagtgtctcaaactcctgacttgaagaaattattcaagagtttgctctatgatcttggcaagtacatcaatgaagaatcgttggatgagagacagctcatcaatgtactcagagaattccttcaagagagaaggtatttaattgttattgatgacatatgggacatctcagtctggaaaatgattagatgtgctttaccagacaatgatatcgggtacattattgttacaaccacacgcatttccgatgttgctgaaaaagttggtggtgcttataagctaaaacctctttcattgaacaactctcgagaattaatgtataagataatatttgggaacgaaaatagagaaaacactaaagacaaagaaatatgtttagatgaggagcttgcagaagtatcaaataaaatactaaagaaatgtgccggtgtgcccctagctattattacgatggctagtgtactagcttgtaaagcaagaaatgaaatggagtggtatgaggtgtacaactctattggtgttggcattgagaacaatctagatgtggggaatatgagaaagattttgtcattcagctattacgatatggcatcccatctcaagacatgtttattatacttaagtatgtttccagaagattataaaattgagaaagatcgtttgatatggatgtggatagctgaaggctttgtccaatatgtgaaacaagggaagagcctatttgagcatggagagagttacttcaatgaactcataaacagaggtatgatccaacccatatataaccaagctggcatgatatatgaatgtcgtgtgcatgatatggtgcttggtcttatatgttccttgtcaaatggagaaaattttgttacaacattaaatggtttgggtcacggatctccatcaaatatgattaggagattatcagttcaaaatggcaatgagagtcaagctatgactctgcaaaccagaaacttgcagcaagtaaggtcggttgttgcctttccggatgccaccgctagtgtagttacggtcttgaggagcttccgagttctacgtgtactagatttacaagattgtgacctttcacaatgttgcagcctgaagtaccttgggaatctatttcacttgaggtatctaggactatgtaacacaagtattacacagctccctgaagaaattgtaaacttgcaacttctacaaatactggatgtatggaacaataaaatgtattgcctaccctcaactattgtgcagctgagatatttgatgtgcctttacattgatggttttactagagtgccaaacgggattgggagcctaacaagccttgaagaactcacatttctaggcatttatgactccactgtggacattatagaagagctgggccagctaacggagctacgggtactgcatatcgttctttttggtgaatggaacgacaagctggtggagtgcctgcacaagctgaaaaagttgaaatatctatatatcaaggaccgcagtggtcaacttaacattggtggtttggatgcctgggtagcccctccaaatctccaaatattgaatacgcgatcgggttgctggttcaccacactgtcagcatcagcatggatgaatccatctcttcttcaggacctctccttatctaccaccgtgagggagttgcagcaggatgacattataattcttgggagtttgccagctctccgctatctaaatctgatgattgttggtgaggatttgggagttcacaatgaaatccatggggaatgcattgttggtgctggtttgttcccatccctagtatactgccagctctggggaaatgtggcgcctatagtgtttcagcgaggagccatgccacggctcagaacccttgactttcggttatctgttcaagaggtgagaggaatcaacggcagggatggtggtatcgacttgggcctcaggaacctgccatcactccagaaggtttgggttcatttggaccctgagggcgctaacaaggcagaggtgaaggaactggaggctgagttgacgcgtgccatcaaaattcatccaaatcatcctcagctgtatggaattcaggatgaagatgcagatgatgaatgatgcactggagaaaagattaccaattatgcagaagctagtgcactttcaactttcatggcactggtctcaaggattgtctgattcagatggattacttctgtttctgtctcagattcagaatgtgatgtccaccccaatcatccaacccttaaggaacatggtgtcatggtgatgaagatgtaaggagccaacttgtgatcatccgctggaaaatggaagagcaatctggtggcctgatggactagcaaacctggaagtaagtacaaacaaaacacgagacagagacacagagtcgggcctaagatttagcaaaactgatgctgggttgggtatgtatgccctgtttggtgtgctctgatcagaggatgacatttacagaattaaagcgtagtgtggcaatgtggcagcctggggaaacctgcaactggcgatctggaggtctggagagaacaaaacgccagtgacagttggggcttaggcttggcaagcctaatattgcaatagcacatatgaataacggttgtttgttgcgactggaagtcctgtttggtttttttacatagtgtttgctgttttcactcatgcctttttcttttgtgttttgtgtactgtcttgggtgttcctagggttgccaaaccgtttttgtgacaccccagtgtcacctagggtttctctcaaaatgccaaaccaagaaccatcattttatgtgaatcaaattaagcatgagcatcaaattgacttaagaatgaagaatccatcatgcatatacttaaaagtatcatgatcagaacaaatgggtctttcaaaaaggtaataatgttgcaaccctaataaaaaccctaagtgag

SEQ ID NO: 9737 - DNA, 2949 bp, Zea Mays
caatccagtagcgcgccgcctctggccgtccgccgtcgtcgccctctccctcgtcctcgcccgtcgcacgtgttgtgtgatccagcggccaaaggcagatccatggaggttatgactggggcactaccgagcctcatccccaagcttgctaatctagtcgctggtgagtacaatctgcaaaagggtgtcaaaggggatatcatgttcctccaagaagagcttgagagcatgagggatgcactcgaggagatctccaaggttccagcagaccagcttcccaacagagataagatttgggctaggaacgtgagagagctctcctacgacatagagcccaagattcgccataaaatggctactgaaattaggacgatcaaaaggcgcatcgttgaggtgcacgaacgacatatcaggtatgaaattaatcttggtcctgataagcttggcaatgctgctgtagatccccgaatatttggtcagtacacagagctgaaagagcttgttggcatcgacgagacaagagatgagttaatcgatattatgatggaagggaatgtagtccccatgaagcaagtgtctcaaactcctgacttgaagaaattattcaagagtttgctctatgatcttggcaagtacatcaatgaagaatcgttggatgagagacagctcatcaatgtactcagagaattccttcaagagagaaggtatttaattgttattgatgacatatgggacatctcagtctggaaaatgattagatgtgctttaccagacaatgatatcgggtacattattgttacaaccacacgcatttccgatgttgctgaaaaagttggtggtgcttataagctaaaacctctttcattgaacaactctcgagaattaatgtataagataatatttgggaacgaaaatagagaaaacactaaagacaaagaaatatgtttagatgaggagcttgcagaagtatcaaataaaatactaaagaaatgtgccggtgtgcccctagctattattacgatggctagtgtactagcttgtaaagcaagaaatgaaatggagtggtatgaggtgtacaactctattggtgttggcattgagaacaatctagatgtggggaatatgagaaagattttgtcattcagctattacgatatggcatcccatctcaagacatgtttattatacttaagtatgtttccagaagattataaaattgagaaagatcgtttgatatggatgtggatagctgaaggctttgtccaatatgtgaaacaagggaagagcctatttgagcatggagagagttacttcaatgaactcataaacagaggcatttatgactccactgtggacattatagaagagctgggccagctaacggagctacgggtactgcatatcgttctttttggtgaatggaacgacaagctggtggagtgcctgcacaagctgaaaaagttgaaatatctatatatcaaggaccgcagtggtcaacttaacattggtggtttggatgcctgggtagcccctccaaatctccaaatattgaatacgcgatcgggttgctggttcaccacactgtcagcatcagcatggatgaatccatctcttcttcaggacctctccttatctaccaccgtgagggagttgcagcaggatgacattataattcttgggagtttgccagctctccgctatctaaatctgatgattgttggtgaggatttgggagttcacaatgaaatccatggggaatgcattgttggtgctggtttgttcccatccctagtatactgccagctctggggaaatgtggcgcctatagtgtttcagcgaggagccatgccacggctcagaacccttgactttcggttatctgttcaagaggtgagaggaatcaacggcagggatggtggtatcgacttgggcctcaggaacctgccatcactccagaaggtttgggttcatttggaccctgagggcgctaacaaggcagaggtgaaggaactggaggctgagttgacgcgtgccatcaaaattcatccaaatcatcctcagctgtatggaattcaggatgaagatgcagatgatgaatgatgcactggagaaaagattaccaattatgcagaagctagtgcactttcaactttcatggcactggtctcaaggattgtctgattcagatggattacttctgtttctgtctcagattcagaatgtgatgtccaccccaatcatccaacccttaaggaacatggtgtcatggtgatgaagatgtaaggagccaacttgtgatcatccgctggaaaatggaagagcaatctggtggcctgatggactagcaaacctggaagtaagtacaaacaaaacacgagacagagacacagagtcgggcctaagatttagcaaaactgatgctgggttgggtatgtatgccctgtttggtgtgctctgatcagaggatgacatttacagaattaaagcgtagtgtggcaatgtggcagcctggggaaacctgcaactggcgatctggaggtctggagagaacaaaacgccagtgacagttggggcttaggcttggcaagcctaatattgcaatagcacatatgaataacggttgtttgttgcgactggaagtcctgtttggtttttttacatagtgtttgctgttttcactcatgcctttttcttttgtgttttgtgtactgtcttgggtgttcctagggttgccaaaccgtttttgtgacaccccagtgtcacctagggtttctctcaaaatgccaaaccaagaaccatcattttatgtgaatcaaattaagcatgagcatcaaattgacttaagaatgaagaatccatcatgcatatacttaaaagtatcatgatcagaacaaatgggtctttcaaaaaggtaataatgttgcaaccctaataaaaaccctaagtgag

SEQ ID NO: 9738 - DNA, 3002 bp, Zea Mays
caatccagtagcgcgccgcctctggccgtccgccgtcgtcgccctctccctcgtcctcgcccgtcgcacgtgttgtgtgatccagcggccaaaggcagatccatggaggttatgactggggcactaccgagcctcatccccaagcttgctaatctagtcgctggtgagtacaatctgcaaaagggtgtcaaaggggatatcatgttcctccaagaagagcttgagagcatgagggatgcactcgaggagatctccaaggttccagcagaccagcttcccaacagagataagatttgggctaggaacgtgagagagctctcctacgacatagagcccaagattcgccataaaatggctactgaaattaggacgatcaaaaggcgcatcgttgaggtgcacgaacgacatatcaggtatgaaattaatcttggtcctgataagcttggcaatgctgctgtagatccccgaatatttggtcagtacacagagctgaaagagcttgttggcatcgacgagacaagagatgagttaatcgatattatgatggaagggaatgtagtccccatgaagcaagtgtctcaaactcctgacttgaagaaattattcaagagtttgctctatgatcttggcaagtacatcaatgaagaatcgttggatgagagacagctcatcaatgtactcagagaattccttcaagagagaaggtatttaattgttattgatgacatatgggacatctcagtctggaaaatgattagatgtgctttaccagacaatgatatcgggtacattattgttacaaccacacgcatttccgatgttgctgaaaaagttggtggtgcttataagctaaaacctctttcattgaacaactctcgagaattaatgtataagataatatttgggaacgaaaatagagaaaacactaaagacaaagaaatatgtttagatgaggagcttgcagaagtatcaaataaaatactaaagaaatgtgccggtgtgcccctagctattattacgatggctagtgtactagcttgtaaagcaagaaatgaaatggagtggtatgaggtgtacaactctattggtgttggcattgagaacaatctagatgtggggaatatgagaaagattttgtcattcagctattacgatatggcatcccatctcaagacatgtttattatacttaagtatgtttccagaagattataaaattgagaaagatcgtttgatatggatgtggatagctgaaggctttgtccaatatgtgaaacaagggaagagcctatttgagcatggagagagttacttcaatgaactcataaacagagagtgccaaacgggattgggagcctaacaagccttgaagaactcacatttctaggcatttatgactccactgtggacattatagaagagctgggccagctaacggagctacgggtactgcatatcgttctttttggtgaatggaacgacaagctggtggagtgcctgcacaagctgaaaaagttgaaatatctatatatcaaggaccgcagtggtcaacttaacattggtggtttggatgcctgggtagcccctccaaatctccaaatattgaatacgcgatcgggttgctggttcaccacactgtcagcatcagcatggatgaatccatctcttcttcaggacctctccttatctaccaccgtgagggagttgcagcaggatgacattataattcttgggagtttgccagctctccgctatctaaatctgatgattgttggtgaggatttgggagttcacaatgaaatccatggggaatgcattgttggtgctggtttgttcccatccctagtatactgccagctctggggaaatgtggcgcctatagtgtttcagcgaggagccatgccacggctcagaacccttgactttcggttatctgttcaagaggtgagaggaatcaacggcagggatggtggtatcgacttgggcctcaggaacctgccatcactccagaaggtttgggttcatttggaccctgagggcgctaacaaggcagaggtgaaggaactggaggctgagttgacgcgtgccatcaaaattcatccaaatcatcctcagctgtatggaattcaggatgaagatgcagatgatgaatgatgcactggagaaaagattaccaattatgcagaagctagtgcactttcaactttcatggcactggtctcaaggattgtctgattcagatggattacttctgtttctgtctcagattcagaatgtgatgtccaccccaatcatccaacccttaaggaacatggtgtcatggtgatgaagatgtaaggagccaacttgtgatcatccgctggaaaatggaagagcaatctggtggcctgatggactagcaaacctggaagtaagtacaaacaaaacacgagacagagacacagagtcgggcctaagatttagcaaaactgatgctgggttgggtatgtatgccctgtttggtgtgctctgatcagaggatgacatttacagaattaaagcgtagtgtggcaatgtggcagcctggggaaacctgcaactggcgatctggaggtctggagagaacaaaacgccagtgacagttggggcttaggcttggcaagcctaatattgcaatagcacatatgaataacggttgtttgttgcgactggaagtcctgtttggtttttttacatagtgtttgctgttttcactcatgcctttttcttttgtgttttgtgtactgtcttgggtgttcctagggttgccaaaccgtttttgtgacaccccagtgtcacctagggtttctctcaaaatgccaaaccaagaaccatcattttatgtgaatcaaattaagcatgagcatcaaattgacttaagaatgaagaatccatcatgcatatacttaaaagtatcatgatcagaacaaatgggtctttcaaaaaggtaataatgttgcaaccctaataaaaaccctaagtgag

SEQ ID NO: 9739 - DNA, 3399 bp, Zea Mays
agacaaccccatatctctagtggcaatccagtagcgcgccgcctctggccgtccgccgtcgtcgccctctccctcgtcctcgcccgtcgcacgtgttgtgtgatccagcggccaaaggcagatccatggaggttatgactggggcactaccgagcctcatccccaagcttgctaatctagtcgctggtgagtacaatctgcaaaagggtgtcaaaggggatatcatgttcctccaagaagagcttgagagcatgagggatgcactcgaggagatctccaaggttccagcagaccagcttcccaacagagataagatttgggctaggaacgtgagagagctctcctacgacatagagcccaagattcgccataaaatggctactgaaattaggacgatcaaaaggcgcatcgttgaggtgcacgaacgacatatcagtgtctcaaactcctgacttgaagaaattattcaagagtttgctctatgatcttggcaagtacatcaatgaagaatcgttggatgagagacagctcatcaatgtactcagagaattccttcaagagagaaggtatttaattgttattgatgacatatgggacatctcagtctggaaaatgattagatgtgctttaccagacaatgatatcgggtacattattgttacaaccacacgcatttccgatgttgctgaaaaagttggtggtgcttataagctaaaacctctttcattgaacaactctcgagaattaatgtataagataatatttgggaacgaaaatagagaaaacactaaagacaaagaaatatgtttagatgaggagcttgcagaagtatcaaataaaatactaaagaaatgtgccggtgtgcccctagctattattacgatggctagtgtactagcttgtaaagcaagaaatgaaatggagtggtatgaggtgtacaactctattggtgttggcattgagaacaatctagatgtggggaatatgagaaagattttgtcattcagctattacgatatggcatcccatctcaagacatgtttattatacttaagtatgtttccagaagattataaaattgagaaagatcgtttgatatggatgtggatagctgaaggctttgtccaatatgtgaaacaagggaagagcctatttgagcatggagagagttacttcaatgaactcataaacagaggtatgatccaacccatatataaccaagctggcatgatatatgaatgtcgtgtgcatgatatggtgcttggtcttatatgttccttgtcaaatggagaaaattttgttacaacattaaatggtttgggtcacggatctccatcaaatatgattaggagattatcagttcaaaatggcaatgagagtcaagctatgactctgcaaaccagaaacttgcagcaagtaaggtcggttgttgcctttccggatgccaccgctagtgtagttacggtcttgaggagcttccgagttctacgtgtactagatttacaagattgtgacctttcacaatgttgcagcctgaagtaccttgggaatctatttcacttgaggtatctaggactatgtaacacaagtattacacagctccctgaagaaattgtaaacttgcaacttctacaaatactggatgtatggaacaataaaatgtattgcctaccctcaactattgtgcagctgagatatttgatgtgcctttacattgatggttttactagagtgccaaacgggattgggagcctaacaagccttgaagaactcacatttctaggcatttatgactccactgtggacattatagaagagctgggccagctaacggagctacgggtactgcatatcgttctttttggtgaatggaacgacaagctggtggagtgcctgcacaagctgaaaaagttgaaatatctatatatcaaggaccgcagtggtcaacttaacattggtggtttggatgcctgggtagcccctccaaatctccaaatattgaatacgcgatcgggttgctggttcaccacactgtcagcatcagcatggatgaatccatctcttcttcaggacctctccttatctaccaccgtgagggagttgcagcaggatgacattataattcttgggagtttgccagctctccgctatctaaatctgatgattgttggtgaggatttgggagttcacaatgaaatccatggggaatgcattgttggtgctggtttgttcccatccctagtatactgccagctctggggaaatgtggcgcctatagtgtttcagcgaggagccatgccacggctcagaacccttgactttcggttatctgttcaagaggtgagaggaatcaacggcagggatggtggtatcgacttgggcctcaggaacctgccatcactccagaaggtttgggttcatttggaccctgagggcgctaacaaggcagaggtgaaggaactggaggctgagttgacgcgtgccatcaaaattcatccaaatcatcctcagctgtatggaattcaggatgaagatgcagatgatgaatgatgcactggagaaaagattaccaattatgcagaagctagtgcactttcaactttcatggcactggtctcaaggattgtctgattcagatggattacttctgtttctgtctcagattcagaatgtgatgtccaccccaatcatccaacccttaaggaacatggtgtcatggtgatgaagatgtaaggagccaacttgtgatcatccgctggaaaatggaagagcaatctggtggcctgatggactagcaaacctggaagtaagtacaaacaaaacacgagacagagacacagagtcgggcctaagatttagcaaaactgatgctgggttgggtatgtatgccctgtttggtgtgctctgatcagaggatgacatttacagaattaaagcgtagtgtggcaatgtggcagcctggggaaacctgcaactggcgatctggaggtctggagagaacaaaacgccagtgacagttggggcttaggcttggcaagcctaatattgcaatagcacatatgaataacggttgtttgttgcgactggaagtcctgtttggtttttttacatagtgtttgctgttttcactcatgcctttttcttttgtgttttgtgtactgtcttgggtgttcctagggttgccaaaccgtttttgtgacaccccagtgtcacctagggtttctctcaaaatgccaaaccaagaaccatcattttatgtgaatcaaattaagcatgagcatcaaattgacttaagaatgaagaatccatcatgcatatacttaaaagtatcatgatcagaacaaatgggtctttcaaaaaggtaataatgttgcaaccctaataaaaaccctaagtgag

SEQ ID NO: 9740 - DNA, 4041 bp, Zea Mays
ctccaatcaagacaaccccatatctctagtggcaatccagtagcgcgccgcctctggccgtccgccgtcgtcgccctctccctcgtcctcgcccgtcgcacgtgttgtgtgatccaggtgactctgcttccctcccttcccatcgccatctctctctccgcactatggccctcgatttgattcgggtctgagcacttcatcccattccccgccccagatcacgcccaccgctgtcctgttcgccttccgccgtgccatcccatatccaccgtgctccccaccctccctactcctccccgttgggtgctgacctttttccctctcttacggaaatcatgcttcatctggtgatgttcttaatatggagcaacggataagcttatccgtgtgtcagtttctctaatatctaagtagggtttcccaccgtcccccgttacgtctagtatgccattagttttaggctgtgtctgatccattaatggcactgcaaccaagacgtgccatcgtccagtcgcaccatcacaagagccgacaaagggtaccatactcttttttgacagtgaatcaactgacactgtttgcacccagagatagagagatagaacaaatacacaacaattttgtaaaaaaaaagtcagtcctatgtgtggggatttcagaaattacaagcaaatcatttttttttctttaacaagttgcagcaagaaacttctttcgaggagcgaaacatgcacctcgacattggtggcggcatttattttgttcttgatttgcctttcccaatagctacgatgcacactactattcaactccgcacaccatttctgctcagtgagcataattcacacaccaataatcttgctcctagcagcggccaaaggcagatccatggaggttatgactggggcactaccgagcctcatccccaagcttgctaatctagtcgctggtgagtacaatctgcaaaagggtgtcaaaggggatatcatgttcctccaagaagagcttgagagcatgagggatgcactcgaggagatctccaaggttccagcagaccagcttcccaacagagataagatttgggctaggaacgtgagagagctctcctacgacatagagcccaagattcgccataaaatggctactgaaattaggacgatcaaaaggcgcatcgttgaggtgcacgaacgacatatcagagctgaaagagcttgttggcatcgacgagacaagagatgagttaatcgatattatgatggaagggaatgtagtccccatgaagcaagtgtctcaaactcctgacttgaagaaattattcaagagtttgctctatgatcttggcaagtacatcaatgaagaatcgttggatgagagacagctcatcaatgtactcagagaattccttcaagagagaaggtatttaattgttattgatgacatatgggacatctcagtctggaaaatgattagatgtgctttaccagacaatgatatcgggtacattattgttacaaccacacgcatttccgatgttgctgaaaaagttggtggtgcttataagctaaaacctctttcattgaacaactctcgagaattaatgtataagataatatttgggaacgaaaatagagaaaacactaaagacaaagaaatatgtttagatgaggagcttgcagaagtatcaaataaaatactaaagaaatgtgccggtgtgcccctagctattattacgatggctagtgtactagcttgtaaagcaagaaatgaaatggagtggtatgaggtgtacaactctattggtgttggcattgagaacaatctagatgtggggaatatgagaaagattttgtcattcagctattacgatatggcatcccatctcaagacatgtttattatacttaagtatgtttccagaagattataaaattgagaaagatcgtttgatatggatgtggatagctgaaggctttgtccaatatgtgaaacaagggaagagcctatttgagcatggagagagttacttcaatgaactcataaacagaggtatgatccaacccatatataaccaagctggcatgatatatgaatgtcgtgtgcatgatatggtgcttggtcttatatgttccttgtcaaatggagaaaattttgttacaacattaaatggtttgggtcacggatctccatcaaatatgattaggagattatcagttcaaaatggcaatgagagtcaagctatgactctgcaaaccagaaacttgcagcaagtaaggtcggttgttgcctttccggatgccaccgctagtgtagttacggtcttgaggagcttccgagttctacgtgtactagatttacaagattgtgacctttcacaatgttgcagcctgaagtaccttgggaatctatttcacttgaggtatctaggactatgtaacacaagtattacacagctccctgaagaaattgtaaacttgcaacttctacaaatactggatagtgccaaacgggattgggagcctaacaagccttgaagaactcacatttctaggcatttatgactccactgtggacattatagaagagctgggccagctaacggagctacgggtactgcatatcgttctttttggtgaatggaacgacaagctggtggagtgcctgcacaagctgaaaaagttgaaatatctatatatcaaggaccgcagtggtcaacttaacattggtggtttggatgcctgggtagcccctccaaatctccaaatattgaatacgcgatcgggttgctggttcaccacactgtcagcatcagcatggatgaatccatctcttcttcaggacctctccttatctaccaccgtgagggagttgcagcaggatgacattataattcttgggagtttgccagctctccgctatctaaatctgatgattgttggtgaggatttgggagttcacaatgaaatccatggggaatgcattgttggtgctggtttgttcccatccctagtatactgccagctctggggaaatgtggcgcctatagtgtttcagcgaggagccatgccacggctcagaacccttgactttcggttatctgttcaagaggtgagaggaatcaacggcagggatggtggtatcgacttgggcctcaggaacctgccatcactccagaaggtttgggttcatttggaccctgagggcgctaacaaggcagaggtgaaggaactggaggctgagttgacgcgtgccatcaaaattcatccaaatcatcctcagctgtatggaattcaggatgaagatgcagatgatgaatgatgcactggagaaaagattaccaattatgcagaagctagtgcactttcaactttcatggcactggtctcaaggattgtctgattcagatggattacttctgtttctgtctcagattcagaatgtgatgtccaccccaatcatccaacccttaaggaacatggtgtcatggtgatgaagatgtaaggagccaacttgtgatcatccgctggaaaatggaagagcaatctggtggcctgatggactagcaaacctggaaaattaaagcgtagtgtggcaatgtggcagcctggggaaacctgcaactggcgatctggaggtctggagagaacaaaacgccagtgacagttggggcttaggcttggcaagcctaatattgcaatagcacatatgaataacggttgtttgttgcgactggaagtcctgtttggtttttttacatagtgtttgctgttttcactcatgcctttttcttttgtgttttgtgtactgtcttgggtgttcctagggttgccaaaccgtttttgtgacaccccagtgtcacctagggtttctctcaaaatgccaaaccaagaaccatcattttatgtgaatcaaattaagcatgagcatcaaattgacttaagaatgaagaatccatcatgcatatacttaaaagtatcatgatcagaacaaatgggtctttcaaaaaggtaataatgttgcaaccctaataaaaaccctaagtgag

SEQ ID NO: 9741 - DNA, 1401 bp, Zea Mays
ctccaatcaagacaaccccatatctctagtggcaatccagtagcgcgccgcctctggccgtccgccgtcgtcgccctctccctcgtcctcgcccgtcgcacgtgttgtgtgatccagcggccaaaggcagatccatggaggttatgactggggcactaccgagcctcatccccaagcttgctaatctagtcgctggtgagtacaatctgcaaaagggtgtcaaaggggatatcatgttcctccaagaagagcttgagagcatgagggatgcactcgaggagatctccaaggttccagcagaccagcttcccaacagagataagatttgggctaggaacgtgagagagctctcctacgacatagagcccaagattcgccataaaatggctactgaaattaggacgatcaaaaggcgcatcgttgaggtgcacgaacgacatatcaggtatgaaattaatcttggtcctgataagcttggcaatgctgctgtagatccccgaatatttggtcagtacacagagctgaaagagcttgttggcatcgacgagacaagagatgagttaatcgatattatgatggaagggaatgtagtccccatgaagcaagtgtctcaaactcctgacttgaagaaattattcaagagtttgctctatgatcttggcaagtacatcaatgaagaatcgttggatgagagacagctcatcaatgtactcagagaattccttcaagagagaaggagccaacttgtgatcatccgctggaaaatggaagagcaatctggtggcctgatggactagcaaacctggaagtaagtacaaacaaaacacgagacagagacacagagtcgggcctaagatttagcaaaactgatgctgggttgggtatgtatgccctgtttggtgtgctctgatcagaggatgacatttacagaattaaagcgtagtgtggcaatgtggcagcctggggaaacctgcaactggcgatctggaggtctggagagaacaaaacgccagtgacagttggggcttaggcttggcaagcctaatattgcaatagcacatatgaataacggttgtttgttgcgactggaagtcctgtttggtttttttacatagtgtttgctgttttcactcatgcctttttcttttgtgttttgtgtactgtcttgggtgttcctagggttgccaaaccgtttttgtgacaccccagtgtcacctagggtttctctcaaaatgccaaaccaagaaccatcattttatgtgaatcaaattaagcatgagcatcaaattgacttaagaatgaagaatccatcatgcatatacttaaaagtatcatgatcagaacaaatgggtctttcaaaaaggtaataatgttgcaaccctaataaaaaccctaagtgag

SEQ ID NO: 9742 - DNA, 3460 bp, Zea Mays
ctaacattcaatcgtccactccaatcaagacaaccccatatctctagtggcaatccagtagcgcgccgcctctggccgtccgccgtcgtcgccctctccctcgtcctcgcccgtcgcacgtgttgtgtgatccagcggccaaaggcagatccatggaggttatgactggggcactaccgagcctcatccccaagcttgctaatctagtcgctggtgagtacaatctgcaaaagggtgtcaaaggggatatcatgttcctccaagaagagcttgagagcatgagggatgcactcgaggagatctccaaggttccagcagaccagcttcccaacagagataagatttgggctaggaacgtgagagagctctcctacgacatagagcccaagattcgccataaaatggctactgaaattaggacgatcaaaaggcgcatcgttgaggtgcacgaacgacatatcaggtatgaaattaatcttggtcctgataagcttggcaatgctgctgtagatccccgaatatttggtcagtacacagagctgaaagagcttgttggcatcgacgagacaagagatgagttaatcgatattatgatggaagggaatgtagtccccatgaagcaagtgtctcaaactcctgacttgaagaaattattcaagagtttgctctatgatcttggcaagtacatcaatgaagaatcgttggatgagagacagctcatcaatgtactcagagaattccttcaagagagaaggtatttaattgttattgatgacatatgggacatctcagtctggaaaatgattagatgtgctttaccagacaatgatatcgggtacattattgttacaaccacacgcatttccgatgttgctgaaaaagttggtggtgcttataagctaaaacctctttcattgaacaactctcgagaattaatgtataagataatatttgggaacgaaaatagagaaaacactaaagacaaagaaatatgtttagatgaggagcttgcagaagtatcaaataaaatactaaagaaatgtgccggtgtgcccctagctattattacgatggctagtgtactagcttgtaaagcaagaaatgaaatggagtggtatgaggtgtacaactctattggtgttggcattgagaacaatctagatgtggggaatatgagaaagattttgtcattcagctattacgatatggcatcccatctcaagacatgtttattatacttaagtatgtttccagaagattataaaattgagaaagatcgtttgatatggatgtggatagctgaaggctttgtccaatatgtgaaacaagggaagagcctatttgagcatggagagagttacttcaatgaactcataaacagaggtatgatccaacccatatataaccaagctggcatgatatatgaatgtcgtgtgcatgatatggtgcttggtcttatatgttccttgtcaaatggagaaaattttgttacaacattaaatggtttgggtcacggatctccatcaaatatgattaggagattatcagttcaaaatggcaatgagagtcaagctatgactctgcaaaccagaaacttgcagcaagtaaggtcggttgttgcctttccggatgccaccgctagtgtagttacggtcttgaggagcttccgagttctacgtgtactagatttacaagattgtgacctttcacaatgttgcagcctgaagtaccttgggaatctatttcacttgaggtatctaggactatgtaacacaagtattacacagctccctgaagaaattgtaaacttgcaacttctacaaatactggatgtatggaacaataaaatgtattgcctaccctcaactattgtgcagctgagatatttgatgtgcctttacattgatggttttactagagtgccaaacgggattgggagcctaacaagccttgaagaactcacatttctaggcatttatgactccactgtggacattatagaagagctgggccagctaacggagctacgggtactgcatatcgttctttttggtgaatggaacgacaagctggtggagtgcctgcacaagctgaaaaagttgaaatatctatatatcaaggaccgcagtggtcaacttaacattggtggtttggatgcctgggtagcccctccaaatctccaaatattgaatacgcgatcgggttgctggttcaccacactgtcagcatcagcatggatgaatccatctcttcttcaggacctctccttatctaccaccgtgagggagttgcagcaggatgacattataattcttgggagtttgccagctctccgctatctaaatctgatgattgttggtgaggatttgggagttcacaatgaaatccatggggaatgcattgttggtgctggtttgttcccatccctagtatactgccagctctggggaaatgtggcgcctatagtgtttcagcgaggagccatgccacggctcagaacccttgactttcggttatctgttcaagaggtgagaggaatcaacggcagggatggtggtatcgacttgggcctcaggaacctgccatcactccagaaggtttgggttcatttggaccctgagggcgctaacaaggcagaggtgaaggaactggaggctgagttgacgcgtgccatcaaaattcatccaaatcatcctcagctgtatggaattcaggatgaagatgcagatgatgaatgatgcactggagaaaagattaccaattatgcagaagctagtgcactttcaactttcatggcactggtctcaaggattgtctgattcagatggattacttctgtttctgtctcagattcagaatgtgatgtccaccccaatcatccaacccttaaggaacatggtgtcatggtgatgaagatgagccaacttgtgatcatccgctggaaaatggaagagcaatctggtggcctgatggactagcaaacctggaaaattaaagcgtagtgtggcaatgtggcagcctggggaaacctgcaactggcgatctggaggtctggagagaacaaaacgccagtgacagttggggcttaggcttggcaagcctaatattgcaatagcacatatgaataacggttgtttgttgcgactggaagtcctgtttggtttttttacatagtgtttgctgttttcactcatgcctttttcttttgtgttttgtgtactgtcttgggtgttcctagggttgccaaaccgtttttgtgacaccccagtgtcacctagggtttctctcaaaatgccaaaccaagaaccatcattttatgtgaatcaaattaagcatgagcatcaaattgacttaagaatgaagaatccatcatgcatatacttaaaagtatcatgatcagaacaaatgggtctttcaaaaaggtaataatgttgcaaccctaataaaaaccctaagtgag

SEQ ID NO: 9743 - DNA, 3421 bp, Zea Mays
ctaacattcaatcgtccactccaatcaagacaaccccatatctctagtggcaatccagtagcgcgccgcctctggccgtccgccgtcgtcgccctctccctcgtcctcgcccgtcgcacgtgttgtgtgatccagcggccaaaggcagatccatggaggttatgactggggcactaccgagcctcatccccaagcttgctaatctagtcgctggtgagtacaatctgcaaaagggtgtcaaaggggatatcatgttcctccaagaagagcttgagagcatgagggatgcactcgaggagatctccaaggttccagcagaccagcttcccaacagagataagatttgggctaggaacgtgagagagctctcctacgacatagagcccaagattcgccataaaatggctactgaaattaggacgatcaaaaggcgcatcgttgaggtgcacgaacgacatatcagtgtctcaaactcctgacttgaagaaattattcaagagtttgctctatgatcttggcaagtacatcaatgaagaatcgttggatgagagacagctcatcaatgtactcagagaattccttcaagagagaaggtatttaattgttattgatgacatatgggacatctcagtctggaaaatgattagatgtgctttaccagacaatgatatcgggtacattattgttacaaccacacgcatttccgatgttgctgaaaaagttggtggtgcttataagctaaaacctctttcattgaacaactctcgagaattaatgtataagataatatttgggaacgaaaatagagaaaacactaaagacaaagaaatatgtttagatgaggagcttgcagaagtatcaaataaaatactaaagaaatgtgccggtgtgcccctagctattattacgatggctagtgtactagcttgtaaagcaagaaatgaaatggagtggtatgaggtgtacaactctattggtgttggcattgagaacaatctagatgtggggaatatgagaaagattttgtcattcagctattacgatatggcatcccatctcaagacatgtttattatacttaagtatgtttccagaagattataaaattgagaaagatcgtttgatatggatgtggatagctgaaggctttgtccaatatgtgaaacaagggaagagcctatttgagcatggagagagttacttcaatgaactcataaacagaggtatgatccaacccatatataaccaagctggcatgatatatgaatgtcgtgtgcatgatatggtgcttggtcttatatgttccttgtcaaatggagaaaattttgttacaacattaaatggtttgggtcacggatctccatcaaatatgattaggagattatcagttcaaaatggcaatgagagtcaagctatgactctgcaaaccagaaacttgcagcaagtaaggtcggttgttgcctttccggatgccaccgctagtgtagttacggtcttgaggagcttccgagttctacgtgtactagatttacaagattgtgacctttcacaatgttgcagcctgaagtaccttgggaatctatttcacttgaggtatctaggactatgtaacacaagtattacacagctccctgaagaaattgtaaacttgcaacttctacaaatactggatgtatggaacaataaaatgtattgcctaccctcaactattgtgcagctgagatatttgatgtgcctttacattgatggttttactagagtgccaaacgggattgggagcctaacaagccttgaagaactcacatttctaggcatttatgactccactgtggacattatagaagagctgggccagctaacggagctacgggtactgcatatcgttctttttggtgaatggaacgacaagctggtggagtgcctgcacaagctgaaaaagttgaaatatctatatatcaaggaccgcagtggtcaacttaacattggtggtttggatgcctgggtagcccctccaaatctccaaatattgaatacgcgatcgggttgctggttcaccacactgtcagcatcagcatggatgaatccatctcttcttcaggacctctccttatctaccaccgtgagggagttgcagcaggatgacattataattcttgggagtttgccagctctccgctatctaaatctgatgattgttggtgaggatttgggagttcacaatgaaatccatggggaatgcattgttggtgctggtttgttcccatccctagtatactgccagctctggggaaatgtggcgcctatagtgtttcagcgaggagccatgccacggctcagaacccttgactttcggttatctgttcaagaggtgagaggaatcaacggcagggatggtggtatcgacttgggcctcaggaacctgccatcactccagaaggtttgggttcatttggaccctgagggcgctaacaaggcagaggtgaaggaactggaggctgagttgacgcgtgccatcaaaattcatccaaatcatcctcagctgtatggaattcaggatgaagatgcagatgatgaatgatgcactggagaaaagattaccaattatgcagaagctagtgcactttcaactttcatggcactggtctcaaggattgtctgattcagatggattacttctgtttctgtctcagattcagaatgtgatgtccaccccaatcatccaacccttaaggaacatggtgtcatggtgatgaagatgagccaacttgtgatcatccgctggaaaatggaagagcaatctggtggcctgatggactagcaaacctggaagtaagtacaaacaaaacacgagacagagacacagagtcgggcctaagatttagcaaaactgatgctgggttgggtatgtatgccctgtttggtgtgctctgatcagaggatgacatttacagaattaaagcgtagtgtggcaatgtggcagcctggggaaacctgcaactggcgatctggaggtctggagagaacaaaacgccagtgacagttggggcttaggcttggcaagcctaatattgcaatagcacatatgaataacggttgtttgttgcgactggaagtcctgtttggtttttttacatagtgtttgctgttttcactcatgcctttttcttttgtgttttgtgtactgtcttgggtgttcctagggttgccaaaccgtttttgtgacaccccagtgtcacctagggtttctctcaaaatgccaaaccaagaaccatcattttatgtgaatcaaattaagcatgagcatcaaattgacttaagaatgaagaatccatcatgcatatacttaaaagtatcatgatcagaacaaatgggtctttcaaaaaggtaataatgttgcaaccctaataaaaaccctaagtgag

SEQ ID NO: 9744 - DNA, 3062 bp, Zea Mays
aacacattgactatgctaacattcaatcgtccactccaatcaagacaaccccatatctctagtggcaatccagtagcgcgccgcctctggccgtccgccgtcgtcgccctctccctcgtcctcgcccgtcgcacgtgttgtgtgatccagcggccaaaggcagatccatggaggttatgactggggcactaccgagcctcatccccaagcttgctaatctagtcgctggtgagtacaatctgcaaaagggtgtcaaaggggatatcatgttcctccaagaagagcttgagagcatgagggatgcactcgaggagatctccaaggttccagcagaccagcttcccaacagagataagatttgggctaggaacgtgagagagctctcctacgacatagagcccaagattcgccataaaatggctactgaaattaggacgatcaaaaggcgcatcgttgaggtgcacgaacgacatatcaggtatgaaattaatcttggtcctgataagcttggcaatgctgctgtagatccccgaatatttggtcagtacacagagctgaaagagcttgttggcatcgacgagacaagagatgagttaatcgatattatgatggaagggaatgtagtccccatgaagcaagtgtctcaaactcctgacttgaagaaattattcaagagtttgctctatgatcttggcaagtacatcaatgaagaatcgttggatgagagacagctcatcaatgtactcagagaattccttcaagagagaaggtatttaattgttattgatgacatatgggacatctcagtctggaaaatgattagatgtgctttaccagacaatgatatcgggtacattattgttacaaccacacgcatttccgatgttgctgaaaaagttggtggtgcttataagctaaaacctctttcattgaacaactctcgagaattaatgtataagataatatttgggaacgaaaatagagaaaacactaaagacaaagaaatatgtttagatgaggagcttgcagaagtatcaaataaaatactaaagaaatgtgccggtgtgcccctagctattattacgatggctagtgtactagcttgtaaagcaagaaatgaaatggagtggtatgaggtgtacaactctattggtgttggcattgagaacaatctagatgtggggaatatgagaaagattttgtcattcagctattacgatatggcatcccatctcaagacatgtttattatacttaagtatgtttccagaagattataaaattgagaaagatcgtttgatatggatgtggatagctgaaggctttgtccaatatgtgaaacaagggaagagcctatttgagcatggagagagttacttcaatgaactcataaacagagagtgccaaacgggattgggagcctaacaagccttgaagaactcacatttctaggcatttatgactccactgtggacattatagaagagctgggccagctaacggagctacgggtactgcatatcgttctttttggtgaatggaacgacaagctggtggagtgcctgcacaagctgaaaaagttgaaatatctatatatcaaggaccgcagtggtcaacttaacattggtggtttggatgcctgggtagcccctccaaatctccaaatattgaatacgcgatcgggttgctggttcaccacactgtcagcatcagcatggatgaatccatctcttcttcaggacctctccttatctaccaccgtgagggagttgcagcaggatgacattataattcttgggagtttgccagctctccgctatctaaatctgatgattgttggtgaggatttgggagttcacaatgaaatccatggggaatgcattgttggtgctggtttgttcccatccctagtatactgccagctctggggaaatgtggcgcctatagtgtttcagcgaggagccatgccacggctcagaacccttgactttcggttatctgttcaagaggtgagaggaatcaacggcagggatggtggtatcgacttgggcctcaggaacctgccatcactccagaaggtttgggttcatttggaccctgagggcgctaacaaggcagaggtgaaggaactggaggctgagttgacgcgtgccatcaaaattcatccaaatcatcctcagctgtatggaattcaggatgaagatgcagatgatgaatgatgcactggagaaaagattaccaattatgcagaagctagtgcactttcaactttcatggcactggtctcaaggattgtctgattcagatggattacttctgtttctgtctcagattcagaatgtgatgtccaccccaatcatccaacccttaaggaacatggtgtcatggtgatgaagatgagccaacttgtgatcatccgctggaaaatggaagagcaatctggtggcctgatggactagcaaacctggaagtaagtacaaacaaaacacgagacagagacacagagtcgggcctaagatttagcaaaactgatgctgggttgggtatgtatgccctgtttggtgtgctctgatcagaggatgacatttacagaattaaagcgtagtgtggcaatgtggcagcctggggaaacctgcaactggcgatctggaggtctggagagaacaaaacgccagtgacagttggggcttaggcttggcaagcctaatattgcaatagcacatatgaataacggttgtttgttgcgactggaagtcctgtttggtttttttacatagtgtttgctgttttcactcatgcctttttcttttgtgttttgtgtactgtcttgggtgttcctagggttgccaaaccgtttttgtgacaccccagtgtcacctagggtttctctcaaaatgccaaaccaagaaccatcattttatgtgaatcaaattaagcatgagcatcaaattgacttaagaatgaagaatccatcatgcatatacttaaaagtatcatgatcagaacaaatgggtctttcaaaaaggtaataatgttgcaaccctaataaaaaccctaagtgag

SEQ ID NO: 9745 - DNA, 3421 bp, Zea Mays
attttggcgagcggcaacacattgactatgctaacattcaatcgtccactccaatcaagacaaccccatatctctagtggcaatccagtagcgcgccgcctctggccgtccgccgtcgtcgccctctccctcgtcctcgcccgtcgcacgtgttgtgtgatccagcggccaaaggcagatccatggaggttatgactggggcactaccgagcctcatccccaagcttgctaatctagtcgctggtgagtacaatctgcaaaagggtgtcaaaggggatatcatgttcctccaagaagagcttgagagcatgagggatgcactcgaggagatctccaaggttccagcagaccagcttcccaacagagataagatttgggctaggaacgtgagagagctctcctacgacatagagcccaagattcgccataaaatggctactgaaattaggacgatcaaaaggcgcatcgttgaggtgcacgaacgacatatcagagctgaaagagcttgttggcatcgacgagacaagagatgagttaatcgatattatgatggaagggaatgtagtccccatgaagcaagtgtctcaaactcctgacttgaagaaattattcaagagtttgctctatgatcttggcaagtacatcaatgaagaatcgttggatgagagacagctcatcaatgtactcagagaattccttcaagagagaaggtatttaattgttattgatgacatatgggacatctcagtctggaaaatgattagatgtgctttaccagacaatgatatcgggtacattattgttacaaccacacgcatttccgatgttgctgaaaaagttggtggtgcttataagctaaaacctctttcattgaacaactctcgagaattaatgtataagataatatttgggaacgaaaatagagaaaacactaaagacaaagaaatatgtttagatgaggagcttgcagaagtatcaaataaaatactaaagaaatgtgccggtgtgcccctagctattattacgatggctagtgtactagcttgtaaagcaagaaatgaaatggagtggtatgaggtgtacaactctattggtgttggcattgagaacaatctagatgtggggaatatgagaaagattttgtcattcagctattacgatatggcatcccatctcaagacatgtttattatacttaagtatgtttccagaagattataaaattgagaaagatcgtttgatatggatgtggatagctgaaggctttgtccaatatgtgaaacaagggaagagcctatttgagcatggagagagttacttcaatgaactcataaacagaggtatgatccaacccatatataaccaagctggcatgatatatgaatgtcgtgtgcatgatatggtgcttggtcttatatgttccttgtcaaatggagaaaattttgttacaacattaaatggtttgggtcacggatctccatcaaatatgattaggagattatcagttcaaaatggcaatgagagtcaagctatgactctgcaaaccagaaacttgcagcaagtaaggtcggttgttgcctttccggatgccaccgctagtgtagttacggtcttgaggagcttccgagttctacgtgtactagatttacaagattgtgacctttcacaatgttgcagcctgaagtaccttgggaatctatttcacttgaggtatctaggactatgtaacacaagtattacacagctccctgaagaaattgtaaacttgcaacttctacaaatactggatgtatggaacaataaaatgtattgcctaccctcaactattgtgcagctgagatatttgatgtgcctttacattgatggttttactagagtgccaaacgggattgggagcctaacaagccttgaagaactcacatttctaggcatttatgactccactgtggacattatagaagagctgggccagctaacggagctacgggtactgcatatcgttctttttggtgaatggaacgacaagctggtggagtgcctgcacaagctgaaaaagttgaaatatctatatatcaaggaccgcagtggtcaacttaacattggtggtttggatgcctgggtagcccctccaaatctccaaatattgaatacgcgatcgggttgctggttcaccacactgtcagcatcagcatggatgaatccatctcttcttcaggacctctccttatctaccaccgtgagggagttgcagcaggatgacattataattcttgggagtttgccagctctccgctatctaaatctgatgattgttggtgaggatttgggagttcacaatgaaatccatggggaatgcattgttggtgctggtttgttcccatccctagtatactgccagctctggggaaatgtggcgcctatagtgtttcagcgaggagccatgccacggctcagaacccttgactttcggttatctgttcaagaggtgagaggaatcaacggcagggatggtggtatcgacttgggcctcaggaacctgccatcactccagaaggtttgggttcatttggaccctgagggcgctaacaaggcagaggtgaaggaactggaggctgagttgacgcgtgccatcaaaattcatccaaatcatcctcagctgtatggaattcaggatgaagatgcagatgatgaatgatgcactggagaaaagattaccaattatgcagaagctagtgcactttcaactttcatggcactggtctcaaggattgtctgattcagatggattacttctgtttctgtctcagattcagaatgtgatgtccaccccaatcatccaacccttaaggaacatggtgtcatggtgatgaagatgtaaggagccaacttgtgatcatccgctggaaaatggaagagcaatctggtggcctgatggactagcaaacctggaaaattaaagcgtagtgtggcaatgtggcagcctggggaaacctgcaactggcgatctggaggtctggagagaacaaaacgccagtgacagttggggcttaggcttggcaagcctaatattgcaatagcacatatgaataacggttgtttgttgcgactggaagtcctgtttggtttttttacatagtgtttgctgttttcactcatgcctttttcttttgtgttttgtgtactgtcttgggtgttcctagggttgccaaaccgtttttgtgacaccccagtgtcacctagggtttctctcaaaatgccaaaccaagaaccatcattttatgtgaatcaaattaagcatgagcatcaaattgacttaagaatgaagaatccatcatgcatatacttaaaagtatcatgatcagaacaaatgggtctttcaaaaaggtaataatgttgcaaccctaataaaaaccctaagtgag

SEQ ID NO: 9746 - DNA, 590 bp, Zea Mays
tgggtttatacacccacacttcccaccgagctaaattcacctccttttttggtcctgggattaaagcagaaatcggaaaaggtggcggtgatctatatgaagttcgtctaatctcagacactgtttagaaacaatctttgtgaattttctctaatacaaaactaaacttttattttttttctttgatccgctgattttgcatatatgatgttaatagcatcagattttacccttgtttctgttgtgccttctgagcttccatgtatattggctgttgatccttggccatgacctgacaccttcatacactccatggacatgtgtgaaggaaaagttgttgtaatattagatgtaaatgaactttgattgggaacgctgtccatatagttgaaaggtatttagctgtttttttcatggagttgaataatgttggatttgacgcatccatctttctgatgctgaggattggctaacttttgtccacataagaaacgtagtgccatagttaacttgttcggaaagcagcggcagagcatttgtacttacaattcaaagattgtttcttgacaatggactttgtaaagttcttc

SEQ ID NO: 9747 - DNA, 600 bp, Zea Mays
ataatcaatctgcaagggaagctatggagtatgatgaaggctaaattcacctccttttttggtcctgggattaaagcagaaatcggaaaaggtggcggtgatctatatgaagttcgtctaatctcagacactgtttagaaacaatctttgtgaattttctctaatacaaaactaaacttttattttttttctttgatccgctgattttgcatatatgatgttaatagcatcagattttacccttgtttctgttgtgccttctgagcttccatgtatattggctgttgatccttggccatgacctgacaccttcatacactccatggacatgtgtgaaggaaaagttgttgtaatattagatgtaaatgaactttgattgggaacgctgtccatatagttgaaaggtatttagctgtttttttcatggagttgaataatgttggatttgacgcatccatctttctgatgctgaggattggctaacttttgtccacataagaaacgtagtgccatagttaacttgttcggaaagcagcggcagagcatttgtacttacaattcaaagattgtttcttgacaatggactttgtaaagttcttc

SEQ ID NO: 9748 - DNA, 1419 bp, Zea Mays
ctcagttgcgttgtgggtgatccactcgttcttccctccacgcgccaaaaccccagccacggccatctcctcctccactcctcccgttcgtccacatccaaaagcttcccaggagaaaaaaagaacagttatttgcagcgggaaccctaacaaatcactcgctacaagcgagcgagggagagatgtctctccagtacgtggcgcccccggtccgagcactcgccgtgctaccggcgccaggcccccctcgccgccggacaagccatgtgtccctataccttccgagccggcggccagggctcgccgtcgccccggtccgtgcggcggagtcgtcctctccgcccaccgtgcccgcctccgcggccggcaaggctgtcgtcccggacgacgagttctccctcgccaaggtctctttcggtgtgatcgggctggggcttgggctctcgctcctgtcgtacggattcggatcgtatttcaacctgcttcctggttcggaatggtcagctttgctgctaacctacgggtttcctctcacaatcatcggcatggccttaaagtatgcagaactgaaaccagtaccctgcataacctacgctgatgcctttgctctaagagaaaagtgtgctacccctattctgaagcaggtcaggagtgatgttacacgttttagatatggtgatgaacaacacttggatgaagcactgcagagaatctttcaatatgggtgggggcattcctagacgtaatgcacctatattacaaaagattcgagaggaagtaactgacgatgggaaatacagtttagtactcgtatttgaagccaaagcattggagctatctgattttgagaagagacaggctaaattcacctccttttttggtcctgggattaaagcagaaatcggaaaaggtggcggtgatctatatgaagttcgtctaatctcagacactgtttagaaacaatctttgtgaattttctctaatacaaaactaaacttttattttttttctttgatccgctgattttgcatatatgatgttaatagcatcagattttacccttgtttctgttgtgccttctgagcttccatgtatattggctgttgatccttggccatgacctgacaccttcatacactccatggacatgtgtgaaggaaaagttgttgtaatattagatgtaaatgaactttgattgggaacgctgtccatatagttgaaaggtatttagctgtttttttcatggagttgaataatgttggatttgacgcatccatctttctgatgctgaggattggctaacttttgtccacataagaaacgtagtgccatagttaacttgttcggaaagcagcggcagagcatttgtacttacaattcaaagattgtttcttgacaatggactttgtaaagttcttc

SEQ ID NO: 9749 - DNA, 1419 bp, Zea Mays
ctcagttgcgttgtgggtgatccactcgttcttccctccacgcgccaaaaccccagccacggccatctcctcctccactcctcccgttcgtccacatccaaaagcttcccaggagaaaaaaagaacagttatttgcagcgggaaccctaacaaatcactcgctacaagcgagcgagggagagatgtctctccagtacgtggcgcccccggtccgagcactcgccgtgctaccggcgccaggcccccctcgccgccggacaagccatgtgtccctataccttccgagccggcggccagggctcgccgtcgccccggtccgtgcggcggagtcgtcctctccgcccaccgtgcccgcctccgcggccggcaaggctgtcgtcccggacgacgagttctccctcgccaaggtctctttcggtgtgatcgggctggggcttgggctctcgctcctgtcgtacggattcggatcgtatttcaacctgcttcctggttcggaatggtcagctttgctgctaacctacgggtttcctctcacaatcatcggcatggccttaaagtatgcagaactgaaaccagtaccctgcataacctacgctgatgcctttgctctaagagaaaagtgtgctacccctattctgaagcaggagtgatgttacacgttttagatatggtgatgaacaacacttggatgaagcactgcagagaatctttcaatatggtttgggtgggggcattcctagacgtaatgcacctatattacaaaagattcgagaggaagtaactgacgatgggaaatacagtttagtactcgtatttgaagccaaagcattggagctatctgattttgagaagagacaggctaaattcacctccttttttggtcctgggattaaagcagaaatcggaaaaggtggcggtgatctatatgaagttcgtctaatctcagacactgtttagaaacaatctttgtgaattttctctaatacaaaactaaacttttattttttttctttgatccgctgattttgcatatatgatgttaatagcatcagattttacccttgtttctgttgtgccttctgagcttccatgtatattggctgttgatccttggccatgacctgacaccttcatacactccatggacatgtgtgaaggaaaagttgttgtaatattagatgtaaatgaactttgattgggaacgctgtccatatagttgaaaggtatttagctgtttttttcatggagttgaataatgttggatttgacgcatccatctttctgatgctgaggattggctaacttttgtccacataagaaacgtagtgccatagttaacttgttcggaaagcagcggcagagcatttgtacttacaattcaaagattgtttcttgacaatggactttgtaaagttcttc

SEQ ID NO: 9750 - DNA, 1442 bp, Zea Mays
tcggatttggtttctggtctcagttgcgttgtgggtgatccactcgttcttccctccacgcgccaaaaccccagccacggccatctcctcctccactcctcccgttcgtccacatccaaaagcttcccaggagaaaaaaagaacagttatttgcagcgggaaccctaacaaatcactcgctacaagcgagcgagggagagatgtctctccagtacgtggcgcccccggtccgagcactcgccgtgctaccggcgccaggcccccctcgccgccggacaagccatgtgtccctataccttccgagccggcggccagggctcgccgtcgccccggtccgtgcggcggagtcgtcctctccgcccaccgtgcccgcctccgcggccggcaaggctgtcgtcccggacgacgagttctccctcgccaaggtctctttcggtgtgatcgggctggggcttgggctctcgctcctgtcgtacggattcggatcgtatttcaacctgcttcctggttcggaatggtcagctttgctgctaacctacgggtttcctctcacaatcatcggcatggccttaaagtatgcagaactgaaaccagtaccctgcataacctacgctgatgcctttgctctaagagaaaagtgtgctacccctattctgaagcaggtcaggagtgatgttacacgttttagatatggtgatgaacaacacttggatgaagcactgcagagaatctttcaatatggtttgggtgggggcattcctagacgtaatgcacctatattacaaaagattcgagaggaagtaactgacgatgggaaatacagtttagtactcgtatttgaagccaaagcattggagctatctgattttgagaagagacaggctaaattcacctccttttttggtcctgggattaaagcagaaatcggaaaaggtggcggtgatctatatgaagttcgtctaatctcagacactgtttagaaacaatctttgtgaattttctctaatacaaaactaaacttttattttttttctttgatccgctgattttgcatatatgatgttaatagcatcagattttacccttgtttctgttgtgccttctgagcttccatgtatattggctgttgatccttggccatgacctgacaccttcatacactccatggacatgtgtgaaggaaaagttgttgtaatattagatgtaaatgaactttgattgggaacgctgtccatatagttgaaaggtatttagctgtttttttcatggagttgaataatgttggatttgacgcatccatctttctgatgctgaggattggctaacttttgtccacataagaaacgtagtgccatagttaacttgttcggaaagcagcggcagagcatttgtacttacaattcaaagattgtttcttgacaatggactttgtaaagttcttc

SEQ ID NO: 9751 - DNA, 1138 bp, Zea Mays
cggatttggtttctggtctcagttgcgttgtgggtgatccactcgttcttccctccacgcgccaaaaccccagccacggccatctcctcctccactcctcccgttcgtccacatccaaaagcttcccaggagaaaaaaagaacagttatttgcagcgggaaccctaacaaatcactcgctacaagcgagcgagggagagatgtctctccagtacgtggcgcccccggtccgagcactcgccgtgctaccggcgccaggcccccctcgccgccggacaagccatgtgtccctataccttccgagccggcggccagggctcgccgtcgccccggtccgtgcggcggagtcgtcctctccgcccaccgtgcccgcctccgcggccggcaaggctgtcgtcccggacgacgagttctccctcgccaaggtctctttcggtgtgatcgggctggggcttgggctctcgctcctgtcgtacggattcggatcgtatttcaacctgcttcctggttcggaatggtcagctttgctgctaacctacgggtttcctctcacaatcatcggcatggccttaaagtatgcagaactgaaaccagtaccctgcataacctacgctgatgcctttgctctaagagaaaagtgtgctacccctattctgaagcaggtcaggagtgatgttacacgttttagatatggtgatgaacaacacttggatgaagcactgcagagaatctttcaatatggtttgggtgggggcattcctagacgtaatgcacctatattacaaaagattcgagaggaagtaactgacgatgggaaatacagtttagtactcgtatttgaagccaaagcattggagctatctgattttgagaagagacagacaatgtcatggccgatacctgagcatgaccatggcgaaggagacaagatgctggccgctggtgtggctgctgagtagtggttttttttaattgtgtcggcgttcgtgtgtgggccgtggaagcgtgtgtgcttgggctgttgaggtgggcttgctcagtttggtgcctttatagtctggtgtgttgtatcagagaagattatcgaatagcaaaatacagtttcctgtcacaactcacctcgctgttttgtttaccgg

SEQ ID NO: 9752 - DNA, 1328 bp, Zea Mays
atccgtcagtttgaccggtacacaaaccatagcgacaaataattaggaacagagggagtagaatggaagaatagtctttactttgcttcttaccttatggaagctcaaagtggaacaactttgtctcctagaggttctactccagatgtgaaagagagtcaagaagttaaagaagcactcagagcacaaatggaagtgcaacgaagattgcacgaacaagtggagaagcatatgcagatccgaatggaggcgaaccagaagtacatcgacacgatactagataaggcgttcaagatagtatctgagcaactgagtggcttcagcatatctgaccaagacctaccgattctcacctctgctagggccatgcttagccctgcagatcacttgagttcgtctgtcttcccccagctctccgtcagctccgttagccttcacaatcctggtcctggaggagggaaaggccttccgcatgttgccgacagccacgtgttctcccagaggccacctgaacaattcaagcgcaaatcacgttgagaagcattgctagctcgacgcagatgcatgacctgatcaagggcacactggaaaatcagaggaatttcgtctgacatgtgcacggtgcaatcgttcacccatcctcccgtagcacatctgtgaaaatcaaggttatcttggtctatttcggtacatctagactgacctttattaatatctaatgtaatgcctaagtggactagataagtaattcgcttgatgtaaactgcccagctgtaggatccagttttaaagtcctgttccacgcacttaaaacttaggggccgtctctcgggcggcttcagcagctctggctctttgtcggatccctaccaaaggccatgtcccagaacagcttctgagcaggagctcatatacggctggaagccggagcctaagggggcgtttggttacttgtatgggtgagcctggctcgtatctagtgagcctggctcagactggactggctgagtgcatgcagtatagcgtgtttggttgtgtgtatgtggccagtctggttcacaagagatgtttggttgcttgcatgagtacatggtgcatgagttaaaaaaatttaaaaaatctattaatagacactaattatatggtaaattgcttaatagatactaattacatgttaatatacactaattatatattaatcttaatcacgtaatttttttatttgaaatatatatagtatgagtggtctagtttcgttcgcaaaaatgtcaggaacgcggatatgaaatcggttcggtgattaaatcttttaattagacgatataatg

SEQ ID NO: 9753 - DNA, 1757 bp, Zea Mays
tctctccttgggtgaaaactctgctgcgcaagcaaaagcggaacacgaaagcggggaggaacgacagcagccatcagaagaaagctccaatctttctcgccctctcgcggttcggaggagggacccgggcgcaaagactctaaagcgcaggtgagctccgggcggggaagatgttccccagcctgatccaccacgctagccacggccgacccgacgtcgccgtcgccgaggacgcaccacgcagtggctgcgggttagggctgcccgggcacggcggcgggcccagcgtggtgctcacggccgatcccaagcctaggctccgctggacggccgacctccacgaccgcttcgtcgatgccgtcgcccagctcggcgggcctgataaagcaacaccgaaagctatcatgaggacaatgggagtgaagggcctcaccctttttcacttgaaaagccatcttcagattgggaagacagtctggaaaagagttaacggagcaatcaaaagatgcttcttaccttatggaagctcaaagtggaacaactttgtctcctagaggttctactccagatgtgaaagagagtcaagaagttaaagaagcactcagagcacaaatggaagtgcaacgaagattgcacgaacaagtggaggtccagaagcatatgcagatccgaatggaggcgaaccagaagtacatcgacacgatactagataaggcgttcaagatagtatctgagcaactgagtggcttcagcatatctgaccaagacctaccgattctcacctctgctagggccatgcttagccctgcagatcacttgagttcgtctgtcttcccccagctctccgtcagctccgttagccttcacaatcctggtcctggaggagggaaaggccttccgcatgttgccgacagccacgtgttctcccagaggccacctgaacaattcaagcgcaaatcacgttgagaagcattgctagctcgacgcagatgcatgacctgatcaagggcacactggaaaatcagaggaatttcgtctgacatgtgcacggtgcaatcgttcacccatcctcccgtagcacatctgtgaaaatcaaggttatcttggtctatttcggtacatctagactgacctttattaatatctaatgtaatgcctaagtggactagataagtaattcgcttgatgtaaactgcccagctgtaggatccagttttaaagtcctgttccacgcacttaaaacttaggggccgtctctcgggcggcttcagcagctctggctctttgtcggatccctaccaaaggccatgtcccagaacagcttctgagcaggagctcatatacggctggaagccggagcctaagggggcgtttggttacttgtatgggtgagcctggctcgtatctagtgagcctggctcagactggactggctgagtgcatgcagtatagcgtgtttggttgtgtgtatgtggccagtctggttcacaagagatgtttggttgcttgcatgagtacatggtgcatgagttaaaaaaatttaaaaaatctattaatagacactaattatatggtaaattgcttaatagatactaattacatgttaatatacactaattatatattaatcttaatcacgtaatttttttatttgaaatatatatagtatgagtggtctagtttcgttcgcaaaaatgtcaggaacgcggatatgaaatcggttcggtgattaaatcttttaattagacgatataatg

SEQ ID NO: 9754 - DNA, 1397 bp, Zea Mays
gtttgtacagttctttgattgttatgttgcagcagttagtaggaaaaaaagtttgtacctttggttgagggaaatatcatggtgtgcttgttattcccgaaggacttatagaaagcattccagaaatgtatgctcttattcaggaaatcaatatccttcacaacagtaatgttcctgtggctgagatgtcatcacaactgtctccgtgggcagctgctctgttccagttcttgccacccttcatcaggagagagctgctgctccaccaagaatcagataactctgcgcagttgtcccaaattgacacggagcaactgctggcccatctagtagaaacagaaatgataaagagaacgaaagaaggaaggtacaagggaaggaagttcagttcagtatgtcatttctttggatatcaggctcgaggatctacaccatcaaatttcgactgtgactatgcttatgctcttggacgtatctccctgcatatgattgcagttggattgactggctacatggcaactgtggctaatctgaaagaccctgttgacaaatggagatgtgctgctgctcctttaactgcgatgatgagtgtgaagaggcatttacgtggccctggagcaatccctatagggaggccttccattcacccttctccaattgacctgaaagggaaggcttatgagttgctgcgagagaaggcttcaagcttcctccttgacgacttctacaggactccaggaggcattcagttcgaagggcctggttcagatgcaaagcccatcacgctgaccattgagaaccaggactacatgggtgacattgagatactgaaagagtaccttggcaaggttaggaccatggtgaagccagggtgctcccgggagatcctgaaggcggcgatcagttccatggtgtcggtgacggatgtgctgactgtgatgtcccaccccctcaacgccgagctgcccctctaccatttcaagtgagcgagggcatcagtctggttgttattcctagagtgtttttgaaacagcagaagattctgcttcatggctgccggtcttctttttttttaatttgggtgagaattaagcaatgggttgtactaataaacactgaaacagtacttgatactgaactgagtcgcgtgctagttgtattattggtggcagtattccagttttcaagaggtctctagaatatccaagattgataacactcatctttcagcctagcaatatagtagtagttctttctttacttactattaatgcactttctctcctcgcaaagttaagaattgcccaaccacctcttcttcctcgctgccctccaaggtggccaagagccaacagatcgatgacagaaactacaaattaaaaacaaacaaataaaaa

SEQ ID NO: 9755 - DNA, 1509 bp, Zea Mays
gatcagtactattattttgttcgtctgatgggacgaaaagcatctcatgttgcctttgaatgtgcacttcagtcacacccaaacatgctcatcttaggcgaggaggtagcattgtcaaaactcacactgatggaaattataagcaagatatgtgatggagtacaagcaagggcagaattagggaaatatcatggtgtgcttgttattcccgaaggacttatagaaagcattccagaaatgtatgctcttattcaggaaatcaatatccttcacaacagtaatgttcctgtggctgagatgtcatcacaactgtctccgtgggcagctgctctgttccagttcttgccacccttcatcaggagagagctgctgctccaccaagaatcagataactctgcgcagttgtcccaaattgacacggagcaactgctggcccatctagtagaaacagaaatgataaagagaacgaaagaaggaaggtacaagggaaggaagttcagttcagtatgtcatttctttggatatcaggctcgaggatctacaccatcaaatttcgactgtgactatgcttatgctcttggacgtatctccctgcatatgattgcagttggattgactggctacatggcaactgtggctaatctgaaagaccctgttgacaaatggagatgtgctgctgctcctttaactgcgatgatgagtgtgaagaggcatttacgtggccctggagcaatccctatagggaggccttccattcacccttctccaattgacctgaaagggaaggcttatgagttgctgcgagagaaggcttcaagcttcctccttgacgacttctacaggactccaggaggcattcagttcgaagggcctggttcagatgcaaagcccatcacgctgaccattgagaaccaggactacatgggtgacattgagatactgaaagagtaccttggcaaggttaggaccatggtgaagccagggtgctcccgggagatcctgaaggcggcgatcagttccatggtgtcggtgacggatgtgctgactgtgatgtcccaccccctcaacgccgagctgcccctctaccatttcaagtgagcgagggcatcagtctggttgttattcctagagtgtttttgaaacagcagaagattctgcttcatggctgccggtcttctttttttttaatttgggtgagaattaagcaatgggttgtactaataaacactgaaacagtacttgatactgaactgagtcgcgtgctagttgtattattggtggcagtattccagttttcaagaggtctctagaatatccaagattgataacactcatctttcagcctagcaatatagtagtagttctttctttacttactattaatgcactttctctcctcgcaaagttaagaattgcccaaccacctcttcttcctcgctgccctccaaggtggccaagagccaacagatcgatgacagaaactacaaattaaaaacaaacaaataaaaa

SEQ ID NO: 9756 - DNA, 1753 bp, Zea Mays
gctagtttattatctacactacttagataaaaactatggctgccagtgccatgggtcgggttcgggtccgtccgcgtcctccgtagtaggtagcgtaccccactcgtacacggtacacagtacactcatcaccctcccctaagaacccggaaatccatggccaatcacatgatggcatcatgcggccatgacagcccggggagaaacgacgctcgcaggcgctgcccgagatctcgcggaccgatggcaatggcatccatccacgcgaggctcgagccgccaaagcagggaagcagagagcaagcttaataagcaaccgcgtttcccagattccttggcactgcagcagctgcgtccaagcttgctaggtggtggcggcagcagcagcctgcgcctatgtacactgcaatggcagcgcgaccgctgcttcttccccctccggtcctcctcctcctggtggtgctggctgcttcgtcggccgcccatggctacggcgcctacggctacggcgacgctgctgctgagctcagggtcgggttctacaaggactcgtgcccggacgccgaggccgtcgtccgcaggatcgtcgccaaggccgtccaagaggaccccacggccaacgcgccgctgctcaggctccacttccacgactgcttcgtccggggctgcgacggctccgtgctcgtcaactccaccagggggaacacggcggagaaggacgccaagcccaaccacacgctggacgccttcgacgtcatcgacgacatcaaggaggcgctggagaagcgctgcccggggaccgtctcctgcgccgacatcctcgccatcgccgccagggacgccgtctcgctggccaccaaggtggtgaccaagggcggctggagcagggacggcaacctctaccaggtggagaccggcaggcgggacggccgcgtgtccagagccaaggaggccgtcaagaacttgccggactccatggatggcatccgcaagctcatcaggaggttcgcttccaagaacctcagcgtcaaggatctcgctgttctctcaggcgcccacgcgatcggcaaatcgcactgcccgtcgatcgccaagcggctgcgcaacttcacggcgcaccgggacagcgacccgaccctggacggcgcgtacgcggcggagctgaggcggcagtgccggaggcgcagggacaacacgacggagctggagatggtgccggggagctccaccgcgttcggcacggcctactacggcctggtcgcggagcggagggcgctcttccactccgacgaggcgctgctcaggaacggggagaccagggcgctcgtctaccgctatagggacgcgccgtccgaggcggcgttcctcgcggacttcggggcgtccatgctcaacatgggcagggtgggcgtgctcaccggcgcccagggggagatcaggaagaggtgcgcctttgtcaactagctagcgatatgctggattgtactttgtaccctctcgccttaattaaaatttaaatgctggagtttcacctagtctcgagagaatcttccatttttactactacatagataatagatttaggaacgtttctaggttttatatgattgtgaaacgtttgggctgagctcatctgtaactgtaaactctgatggaatgcgataacgtgttccatattgtgtgaaccggctttgacttgggaaagggaaatggatattctctccgtcttgtaaccataggctatatatgtgtg

SEQ ID NO: 9757 - DNA, 790 bp, Zea Mays
ctcaagcaacttcatcgtgaagctgctaaaatagtcgacctactattatcaagatccatgaagtgccttattatcaagatccatgcactcatcgtgaagtgccttattatcaagatccatgcaatcatcaacgttctcaaccaattgatggtctgtcagcaaacaatgtcggaaacctcgggtgagagaaagacaaaaaaagtgagcatcattcgattagggtactcctccgcgatctttgagatgagaagggtgcccattctagatccagtgcctcctccgaaggaatggcaaacttggaatcctgatcacagcaagaaaaataagggggtgtttagtttgtagggactaatttttagtccctccattttatttcatttagtctctaaattaccaaatacggaaactaaagttcatgcattgtaactcataacttcagaagtccaggcatttcaatttaggaaaagcatggtccacagttatgactactgactaaaacagtaaaagttgatgcaaactttctcgagtgaccaaaataattcaaaaagctacaaatgctgctgaatcatgccatgcacaagcaatattataatatgtatatcacctccagcgattttctgaaataatggtacaaaaataatactggccagaagcaaatacagtatgacaaaaagcgaagcttcttcctcattatcctgaatatggaaatggaaagtgtaagaaatttatgtgcaagctaagtttcattataacagttgaatactgttaatattttaaaaacttgaatcag

SEQ ID NO: 9758 - DNA, 519 bp, Zea Mays
tcgtgcccgcggcgaatcacgcgcacgaccggcccctcgcggcgaatcccctcccacccgcgacgaatcccctacccgaacctctcgccaccaccgcggcgaaccacgcgcaaatctctcagccacccccatcctcgtgcaaatctgtcgccaccaccacccgctacgcccgctctcaacaacctccgcctccatcgccgtgcgtctcggccatccctcgactctgagatttacgccgctctcaagaacccccgctctcaaaaaccatgctcccaaggaggtactgcagactgctcgcaagtcctggtagcgcagaaccgcgcgtcctcaatccgctactccggcaagcccgctccccgactgttcaactaatccgccgtcacctcgcgtccgccctcgtcacattggttttcgccgaggtgtctggacaagtagcagcatttcatgtgacggttgacaggtgtgcattttactgctgcagattcctcggctggcaggctgctgcgctcttgagagaac

SEQ ID NO: 9759 - DNA, 585 bp, Zea Mays
cacgtatgccgcgaatcccgcgcacgaccgcccccaaccgcgattcccctcgtgcccgcggcgaatcacgcgcacgaccggcccctcgcggcgaatcccctcccacccgcgacgaatcccctacccgaacctctcgccaccaccgcggcgaaccacgcgcaaatctctcagccacccccatcctcgtgcaaatctgtcgccaccaccacccgctacgcccgctctcaacaacctccgcctccatcgccgtgcgtctcggccatccctcgactctgagatttacgccgctctcaagaacccccgctctcaaaaaccatgctcccaaggaggtactgcagactgctcgcaagtcctggtagcgcagaaccgcgcgtcctcaatccgctactccggcaagcccgctccccgactgttcaactaatccgccgtcacctcgcgtccgccctcgtcacattggttttcgccgaggtgtctggacaagtagcagcatttcatgtgacggttgacaggtgtgcattttactgctgcagattcctcggctggcagggccatgtgggggagtgctagacgaatggaatttgatag

SEQ ID NO: 9760 - DNA, 605 bp, Zea Mays
cgcgaatcccgcgcacgaccgcccccaaccgcgattcccctcgtgcccgcggcgaatcacgcgcacgaccggcccctcgcggcgaatcccctcccacccgcgacgaatcccctacccgaacctctcgccaccaccgcggcgaaccacgcgcaaatctctcagccacccccatcctcgtgcaaatctgtcgccaccaccacccgctacgcccgctctcaacaacctccgcctccatcgccgtgcgtctcggccatccctcgactctgagatttacgccgctctcaagaacccccgctctcaaaaaccatgctcccaaggaggtactgcagactgctcgcaagtcctggtagcgcagaaccgcgcgtcctcaatccgctactccggcaagcccgctccccgactgttcaactaatccgccgtcacctcgcgtccgccctcgtcacattggttttcgccgaggtgtctggacaagtagcagcatttcatgtgacggttgacaggtgtgcattttactgctgcagattcctcggctggcagctcttctcccgagaccatatgattcggatcacattgccggtttgctgcaccactttggactgtgcctc

SEQ ID NO: 9761 - DNA, 1203 bp, Zea Mays
cgcgaatcccgcgcacgaccgcccccaaccgcgattcccctcgtgcccgcggcgaatcacgcgcacgaccggcccctcgcggcgaatcccctcccacccgcgacgaatcccctacccgaacctctcgccaccaccgcggcgaaccacgcgcaaatctctcagccacccccatcctcgtgcaaatctgtcgccaccaccacccgctacgcccgctctcaacaacctccgcctccatcgccgtgcgtctcggccatccctcgactctgagatttacgccgctctcaagaacccccgctctcaaaaaccatgctcccaaggaggtactgcagactgctcgcaagtcctggtagcgcagaaccgcgcgtcctcaatccgctactccggcaagcccgctccccgactgttcaactaatccgccgtcacctcgcgtccgccctcgtcacattggttttcgccgaggtgtctggacaagtagcagcatttcatgtgacggttgacaggtgtgcattttactgctgcagattcctcggctggcaggtactttcctttcttttaccctattggctgtatgagttcattgttttttgttatttctctttttattagttcatttccatgctagctgtagatcaagttaatccagatgcattaactcagtgaattaaccagatgcattatggaacaacatatctgcagatcaagttaatccatacttttgtatggtttccctttcagattaatcttaaataaattgtgcttatttttttgcttgttatttttgcttaacaataataaaaaactgccaagagtttatttattttgtaatgaaactgtcatgtgtcaactaaactcatctttctcatctgtagtctcttatctcccatcccaaacaaccaattccattaatacatccttttgtttaagcattcaattgaacataaatgaccaattgtcaactaaaaataaggccaggatagaaataggatgtgtcatcctctggaagcagtcaatctcaaattctcagtctcaataaatctgcccatgagacactattataaaatcaaaataataagcagcaatgccaagattatctgcaatgaaatcaggcttgttgatgttttttgtgttatgcaacaccaagcactcagtttaagtaccaccacacaggaatcgtggtgtatatgcaccataagacaaaaaaat

SEQ ID NO: 9762 - DNA, 540 bp, Zea Mays
gtctggacaagtagcagcatttcatgtgacggttgacaggtgtgccttttactgctgcagattcctcggctggcaggaaccaaacaatcactaatgcaagtggatctccagggccatgtgggggagtgctagacgaatggaatttgatagggatgcaaagattcttcgaaggaactttgtaattgatctgttaagttacgaggacaattcatgccgctatgctatccttgcaaacatacaataaagacttatcaatatcgcttaaaaggattagattaatgtacggttgtcgacatatttgcttattattaaaatttgtaagacatcacattttttaattgaggttgcatcaataaacaggttgatgtagaccaataaggtttgtgtgtggtttacatgttttaaatataaatatatgtgggcagctagcacatctaaggtgccgtttggttcatgtattggtaacgtaatggataactgataacgttaaatcatgtttgtttaagtccaattgtaatcgataacacactacaaatggat

SEQ ID NO: 9763 - DNA, 551 bp, Zea Mays
gccgtcacctcgcgtccgccctcgtcacattggttttcgccgaggtgtctggacaagtagcagcatttcatgtgacggttgacaggtgtgccttttactgctgcagattcctcggctggcagggccatgtgggggagtgctagacgaatggaatttgatagggatgcaaagattcttcgaaggaactttgtaattgatctgttaagttacgaggacaattcatgccgctatgctatccttgcaaacatacaataaagacttatcaatatcgcttaaaaggattagattaatgtacggttgtcgacatatttgcttattattaaaatttgtaagacatcacattttttaattgaggttgcatcaataaacaggttgatgtagaccaataaggtttgtgtgtggtttacatgttttaaatataaatatatgtgggcagctagcacatctaaggtgccgtttggttcatgtattggtaacgtaatggataactgataacgttaaatcatgtttgtttaagtccaattgtaatcgataacacactacaaatggat

SEQ ID NO: 9764 - DNA, 841 bp, Zea Mays
gttcaactactccgccgtcacctcgcgtccgccctcgtcacattggttttcgccgaggtgtctggacaagtagcagcatttcatgtgacggttgacaggtgtgccttttactgctgcagattcctcggctggcagctcttctcccgagaccatatgattcggatcacattgccggtttgctgcaccactttggactgtgcctctactcatcaaccaatcatcccaagatggataagcaggcagaagatgcatctctttgaagaagagcgcactagtttctcttgctcggatgaaacgtccaaataactaaattggcatgtgtttagattaaaaagttaattataacattcttttattcgagacaaattacatgctaggaaccaaacaatcactaatgcaagtggatctccagggccatgtgggggagtgctagacgaatggaatttgatagggatgcaaagattcttcgaaggaactttgtaattgatctgttaagttacgaggacaattcatgccgctatgctatccttgcaaacatacaataaagacttatcaatatcgcttaaaaggattagattaatgtacggttgtcgacatatttgcttattattaaaatttgtaagacatcacattttttaattgaggttgcatcaataaacaggttgatgtagaccaataaggtttgtgtgtggtttacatgttttaaatataaatatatgtgggcagctagcacatctaaggtgccgtttggttcatgtattggtaacgtaatggataactgataacgttaaatcatgtttgtttaagtccaattgtaatcgataacacactacaaatggat

SEQ ID NO: 9765 - DNA, 1179 bp, Zea Mays
ggataacgaagggataagctgggcagcggccactcccatccccgcacttcaccggcctcctcctcctccccgtccatcgccgtcgccggggcttcctacaacttcaaaatggcggctaccgccaccgccatggctatagcaactatctcccccgccgctccgattccatccgcgcccttcccatcccttcccctccccctcggcctccgcctccgctctcaacccctcctcttcgctgcttcccgccgccgcttcctccatgttcccaaagccgcctcctgggacgaatccgtccccgaggatggtggagatgcggaggaatccgttgccgctggggacgacgaggacgaggaggagaagcagcggcccgagccggtgtcctcctccgagttccagttcgcggcgccacccgagggctacgtcgagcccgcggcgtttgacgagctaccgccggagtccccagaagacgtggcggcggcgtacgaatctctctacgggccggccttcagcggcgagacattgctggggaacaatgtctttgaggtcaaggtcaaccgcgtcaccaaggtcgtcaagggagggaggcagctctcctaccgcgcaatcgtcgtcgttggcgacatgaagggccacgttggtgtcggcgtgggaaaggccaaggaggtcacggaggccatcaccaaggccgccatgaacggccggcgcaaccttgtcacagtgccgctaactaagtactccacattcccgcacagagctgatgcggactatggagcagccaagcagctgcgcagcaagaaccccctgaacaacgctcgagccactatcaaggcgacgcagatgatgaagcagttcaaggatgtcgctgaggagcgtggtattccaatggaggagctgtggaaatgataaaaacaattcgaaaccaagacccccccccccctttgtagcattctttctcctgtcgctgtatttttcttaaggtcttcatttttctgctgtatctatgggatgaatcccgcctcacggtttcttttttgcatctctcttctgaaattctgtgtgtgagaatttagtccatgagatctgaccctatatgcttgctcttcacttctgtacactgctactggtggaaattcagaccaaagaatgaacagatttagcgcgaaaatgcatcttgtctgt

SEQ ID NO: 9766 - DNA, 508 bp, Zea Mays
ggcggaaccgctgaaggaagcagaaggcgaggtggatcagtggatggcgtattggtgtcgcgtctcgcgtaagcaagtggggcagacttcaccgccgtgcgcgcccgccagaccgcacaccgccacatccaccgcgcgccgaccagcccccgctcctccacctccactgcacacgccggccagcccccactcctccacctccaccgcgcgccggccagcccccgctcctccacctccactgcacgcgccggccagcccccactcctccacctccacctccaccgcgcgccggcaagcccccgctcctccacctccactgcgcgcgccggccagcccgctcctccaccgcatcaggaaggcgagccagagatcgagcgacccgagaaaaggaggaaacacaagcgtaatcagaagccgaagtccagggagctcaatccaatggagtggatcgctgaagcccggcaccagcctttactattgaacgcacatgaatcactcgttaaggcta

SEQ ID NO: 9767 - DNA, 1959 bp, Zea Mays
cttaccaatcaaatagatagtagatatggctgcttgagttccaactaccgcaacaagagttgctatgatggaggttgtccagtatatggcttatgcaattagggtatcttaactttggtgaagtttagtgtgcaacccattagcataccgtatacagattacatgatttgtggtatctaccaatcgaaccactctgtgcaggtacaagatatccctcaccgctgaagatgacactgacactgccgagtttatcttctttggacgaatggcgcagcgcctcattaaaaaaaatgtggacaccctcatctcgactaatccacccggtttcattccaagagaaattacagatctactggaaaagtctttcgagtggaatgttagcttcatcgaaagcacaattatttatggcagtgtttccttccaagtgaatgctataaacgcataaatggatggtggcaacatgcttccaactacaccgtcctcacagccgtcgtcgaccatactttctcaagtaggacacggatcaggtgtcgcacaaaacagaggggctgccttcatccacgagccgtcactaacaccagagagtcacaaagtttcatctagcgccaagtgtaacatacagacaaccccacatcagggagacaatctgctgcagggaacagagattatcacttctccgcctaacgtgcaggcgccatcaggagctgcttacagcgtgctagatgggtctacaaacaaggctcacaaaagtgttgccggaaaaaggtctcgaacatcaccgtccaagaaggttgccaagaaactttttagagatgaagacacaggagatgacgatgttgctggttccacagacgttgatgctgagtaacgatatgtccaattctcccctacaacttcatgagatatatgcttccaagtgttccagctgcatgtagtataaggcagttggtactaagcaaatcaaaagcccaatgatcagtaataactacttttaactaactaaaacactgtgatgcataggaacaacattcaaagcaagatcacagattaccaaatatctcaagcaagcattctaaaactaacagcaggtccatatgcgggtcattgaactaatatataaacaaaatagaaaattagcaagtttttagaaaagaggtcaataggataaaacatcagcaagtcaaaaaaattgatagtcaaatgattttgaatggattaccttcatagacatcttaggtcgagctctaccgaaaataaatttagacattatatttcagattgcaatgcttgccaaaacttgttaattgattgctacccttttttagttgcagtgcttttggacacgagcaccaccagccatggagacccgcttttgggaactgaggatcgcttttgggaactatctcagttcatctaggttactcttagaacttgcgtcccctgctgtgcagggagtatggttttatgctttggtgggtatcactgcagaagaaagcactgcactgatacttgctgctttagaaagtaaggcacaaaaggatcttactcctgttggaagagatgctttgtcacgaattagaggtcgagattttgactcagcatgtggtcttactgaggataccggggccttggttaaatggattcctgttaaggagaaattggttgtcctcaagaaaaatgtggaaccttatgtacagaaggaagccaagaggttttctaagccttacattgatcaaattgctgagatcactacactaagagaacagttcatgcgtatgggtcatttcttgcgtctgcaaccacataccatcgacaggcgaccatcatggactacctccatcagcatggggtacccaggtcatttgcaacgaaggagttagtttggttcctggtaagcacaccacactaattcggcagtggacctcaggtcatgggcaccctttaccgtgagaagcgttg

SEQ ID NO: 9768 - DNA, 2096 bp, Zea Mays
gatagacatagaccaactttacccctttcagtgtttgcctttgatttttttaacccatcagtaacagcaatgcagagattcatagctacccagctgatgtcagggatgtaaatatgccctagaaattcgtttgacgtatgcacagcgttagaacaggagcaatagccctgtacaaggatttgcttaccaatcaaatagatagtagatatggctgcttgagttccaactaccgcaacaagagttgctatgatggaggttgtccagtatatggcttatgcaattagggtatcttaactttggtgaagtttagtgtgcaacccattagcataccgtatacagattacatgatttgtggtatctaccaatcgaaccactctgtgcaggtacaagatatccctcaccgctgaagatgacactgacactgccgagtttatcttctttggacgaatggcgcagcgcctcattaaaaaaaatgtggacaccctcatctcgactaatccacccggtttcattccaagagaaattacagatctactggaaaagtctttcgagtggaatgttagcttcatcgaaagcacaattatttatggcagtgtttccttccaagtgaatgctataaacgcataaatggatggtggcaacatgcttccaactacaccgtcctcacagccgtcgtcgaccatactttctcaagtaggacacggatcaggtgtcgcacaaaacagaggggctgccttcatccacgagccgtcactaacaccagagagtcacaaagtttcatctagcgccaagtgtaacatacagacaaccccacatcagggagacaatctgctgcagggaacagagattatcacttctccgcctaacgtgcaggcgccatcaggagctgcttacagcgtgctagatgggtctacaaacaaggctcacaaaagtgttgccggaaaaaggtctcgaacatcaccgtccaagaaggttgccaagaaactttttagagatgaagacacaggagatgacgatgttgctggttccacagacgttgatgctgagtaacgatatgtccaattctcccctacaacttcatgagatatatgcttccaagtgttccagctgcatgtagtataaggcagttggtactaagcaaatcaaaagcccaatgatcagtaataactacttttaactaactaaaacactgtgatgcataggaacaacattcaaagcaagatcacagattaccaaatatctcaagcaagcattctaaaactaacagcaggtccatatgcgggtcattgaactaatatataaacaaaatagaaaattagcaagtttttagaaaagaggtcaataggataaaacatcagcaagtcaaaaaaattgatagtcaaatgattttgaatggattaccttcatagacatcttaggtcgagctctaccgaaaataaatttagacattatatttcagattgcaatgcttgccaaaacttgttaattgattgctacccttttttagttgcagtgcttttggacacgagcaccaccagccatggagacccgcttttgggaactgaggatcgcttttgggaactatctcagttcatctaggttactcttagaacttgcgtcccctgctgtgcagggagtatggttttatgctttggtgggtatcactgcagaagaaagcactgcactgatacttgctgctttagaaagtaaggcacaaaaggatcttactcctgttggaagagatgctttgtcacgaattagaggtcgagattttgactcagcatgtggtcttactgaggataccggggccttggttgtatgaaatggattcctgttaaggagaaattggttgtcctcaagaaaaatgtggaaccttatgtacagaaggtatcgacaagatcagtgaagttttataagtcatcaagggatgctgtgacacctcacattgtcaaagttaaagagtttgctcatcccaggaagccaagaggttttctaagccttacattgatcaaattgctgagatcactacactaagagaacagttcatgcgtatgggtcatttcttgcgtctgcaaccacataccatcgacagttag

SEQ ID NO: 9769 - DNA, 2091 bp, Zea Mays
gatagacatagaccaactttacccctttcagtgtttgcctttgatttttttaacccatcagtaacagcaatgcagagattcatagctacccagctgatgtcagggatgtaaatatgccctagaaattcgtttgacgtatgcacagcgttagaacaggagcaatagccctgtacaaggatttgcttaccaatcaaatagatagtagatatggctgcttgagttccaactaccgcaacaagagttgctatgatggaggttgtccagtatatggcttatgcaattagggtatcttaactttggtgaagtttagtgtgcaacccattagcataccgtatacagattacatgatttgtggtatctaccaatcgaaccactctgtgcaggtacaagatatccctcaccgctgaagatgacactgacactgccgagtttatcttctttggacgaatggcgcagcgcctcattaaaaaaaatgtggacaccctcatctcgactaatccacccggtttcattccaagagaaattacagatctactggaaaagtctttcgagtggaatgttagcttcatcgaaagcacaattatttatggcagtgtttccttccaagtgaatgctataaacgcataaatggatggtggcaacatgcttccaactacaccgtcctcacagccgtcgtcgaccatactttctcaagtaggacacggatcaggtgtcgcacaaaacagaggggctgccttcatccacgagccgtcactaacaccagagagtcacaaagtttcatctagcgccaagtgtaacatacagacaaccccacatcagggagacaatctgctgcagggaacagagattatcacttctccgcctaacgtgcaggcgccatcaggagctgcttacagcgtgctagatgggtctacaaacaaggctcacaaaagtgttgccggaaaaaggtctcgaacatcaccgtccaagaaggttgccaagaaactttttagagatgaagacacaggagatgacgatgttgctggttccacagacgttgatgctgagtaacgatatgtccaattctcccctacaacttcatgagatatatgcttccaagtgttccagctgcatgtagtataaggcagttggtactaagcaaatcaaaagcccaatgatcagtaataactacttttaactaactaaaacactgtgatgcataggaacaacattcaaagcaagatcacagattaccaaatatctcaagcaagcattctaaaactaacagcaggtccatatgcgggtcattgaactaatatataaacaaaatagaaaattagcaagtttttagaaaagaggtcaataggataaaacatcagcaagtcaaaaaaattgatagtcaaatgattttgaatggattaccttcatagacatcttaggtcgagctctaccgaaaataaatttagacattatatttcagattgcaatgcttgccaaaacttgttaattgattgctacccttttttagttgcagtgcttttggacacgagcaccaccagccatggagacccgcttttgggaactgaggatcgcttttgggaactatctcagttcatctaggttactcttagaacttgcgtcccctgctgtgcagggagtatggttttatgctttggtgggtatcactgcagaagaaagcactgcactgatacttgctgctttagaaagtaaggcacaaaaggatcttactcctgttggaagagatgctttgtcacgaattagaggtcgagattttgactcagcatgtggtcttactgaggataccggggccttggttaaatggattcctgttaaggagaaattggttgtcctcaagaaaaatgtggaaccttatgtacagaaggtatcgacaagatcagtgaagttttataagtcatcaagggatgctgtgacacctcacattgtcaaagttaaagagtttgctcatcccaggaagccaagaggttttctaagccttacattgatcaaattgctgagatcactacactaagagaacagttcatgcgtatgggtcatttcttgcgtctgcaaccacataccatcgacagttag

SEQ ID NO: 9770 - DNA, 2954 bp, Zea Mays
ccacacggtgacacatacaagtgcaccaataattcctgtgacagcataggatcgcctaccccaaggtcaggtcttatacgtctctccccgtttttgttaaagtcctgctagacaccttctatttagatcttaaaaagttaactcatatgcgttctaaattaaacacactgtaaccatgatagacatagaccaactttacccctttcagtgtttgcctttgatttttttaacccatcagtaacagcaatgcagagattcatagctacccagctgatgtcagggatgtaaatatgccctagaaattcgtttgacgtatgcacagcgttagaacaggagcaatagccctgtacaaggatttgcttaccaatcaaatagatagtagatatggctgcttgagttccaactaccgcaacaagagttgctatgatggaggttgtccagtatatggcttatgcaattagggtatcttaactttggtgaagtttagtgtgcaacccattagcataccgtatacagattacatgatttgtggtatctaccaatcgaaccactctgtgcaggtacaagatatccctcaccgctgaagatgacactgacactgccgagtttatcttctttggacgaatggcgcagcgcctcattaaaaaaaatgtggacaccctcatctcgactaatccacccggtttcattccaagagaaattacagatctactggaaaagtctttcgagtggaatgttagcttcatcgaaagcacaattatttatggcagtgtttccttccaagtgaatgctataaacgcataaatggatggtggcaacatgcttccaactacaccgtcctcacagccgtcgtcgaccatactttctcaagtgcagctcttttcgctgcaccctctccccatcaaatacatctctcgtggttctaacctgttttttggtctggctgccaactccgcagtaggacacggatcaggtgtcgcacaaaacagaggggctgccttcatccacgagccgtcactaacaccagagagtcacaaagtttcatctagcgccaagtgtaacatacagacaaccccacatcagggagacaatctgctgcagggaacagagattatcacttctccgcctaacgtgcaggcgccatcaggagctgcttacagcgtgctagatgggtctacaaacaaggctcacaaaagtgttgccggaaaaaggtctcgaacatcaccgtccaagaaggttgccaagaaactttttagagatgaagacacaggagatgacgatgttgctggttccacagacgttgatgctgagtaacgatatgtccaattctcccctacaacttcatgagatatatgcttccaagtgttccagctgcatgtagtataaggcagttggtactaagcaaatcaaaagcccaatgatcagtaataactacttttaactaactaaaacactgtgatgcataggaacaacattcaaagcaagatcacagattaccaaatatctcaagcaagcattctaaaactaacagcaggtccatatgcgggtcattgaactaatatataaacaaaatagaaaattagcaagtttttagaaaagaggtcaataggataaaacatcagcaagtcaaaaaaattgatagtcaaatgattttgaatggattaccttcatagacatcttaggtcgagctctaccgaaaataaatttagacattatatttcagattgcaatgcttgccaaaacttgttaattgattgctacccttttttagttgcagtgcttttggacacgagcaccaccagccatggagacccgcttttgggaactgaggatcgcttttgggaactatctcagttcatctaggttactcttagaacttgcgtcccctgctgtgcagggagtatggttttatgcttgtaagatatgagcagcgctatgctgtgtgcttcactgcaagttatgtattttggtacttctaaggtagtaactgctcataactgttctatgcgtgcgatcttgcgaggaccatactcgtggtatgtaaagcatgcctatgtagtctaggcctgtacaagacatttcttcccttggtgcttgtactatttctctttgtcgttctgtgctactaccagccatctgtttgtcgttctactccccttagcatgtaactattgagtggtaaccaatcagacgcgtccatttcaagattttccttagtttccattgagatttgtctattaccacggttatctgttaaacaaactatgaagttcagcatataatggtcagaggctatggtatttatcttatagtacaggaaatagacatcggagcagctcctatgttccattaaaggacgaaggcaattcaattctgaatgataagaaaaataccaagattcagcttgggataaaaaagatttggtctcacccacttgagactgtatgaactattatggtggcgtggactgtggatcttaactgacctgaacacagcctggaacacatcaggccactgatatttcctgctaagaggcgcaaggttgtcactatgaagaagaggaaggaaagggtgtcctgactcctgaatcaacccttccttcagtggtgggtatcactgcagaagaaagcactgcactgatacttgctgctttagaaagtaaggcacaaaaggatcttactcctgttggaagagatgctttgtcacgaattagaggtcgagattttgactcagcatgtggtcttactgaggataccggggccttggttaaatggattcctgttaaggagaaattggttgtcctcaagaaaaatgtggaaccttatgtacagaaggaagccaagaggttttctaagccttacattgatcaaattgctgagatcactacactaagagaacagttcatgcgtatgggtcatttcttgcgtctgcaaccacataccatcgacagttag

SEQ ID NO: 9771 - DNA, 1583 bp, Zea Mays
attacatgatttgtggtatctaccaatcgaaccactctgtgcaggtacaagatatccctcaccgctgaagatgacactgacactgccgagtttatcttctttggacgaatggcgcagcgcctcattaaaaaaaatgtggacaccctcatctcgactaatccacccggtttcattccaagagaaattacagatctactggaaaagtctttcgagtggaatgttagcttcatcgaaagcacaattatttatggcagtgtttccttccaagtgaatgctataaacgcataaatggatggtggcaacatgcttccaactacaccgtcctcacagccgtcgtcgaccatactttctcaagcagtaggacacggatcaggtgtcgcacaaaacagaggggctgccttcatccacgagccgtcactaacaccagagagtcacaaagtttcatctagcgccaagtgtaacatacagacaaccccacatcagggagacaatctgctgcagggaacagagattatcacttctccgcctaacgtgcaggcgccatcaggagctgcttacagcgtgctagatgggtctacaaacaaggctcacaaaagtgttgccggaaaaaggtctcgaacatcaccgtccaagaaggttgccaagaaactttttagagatgaagacacaggagatgacgatgttgctggttccacagacgttgatgctgagtaacgatatgtccaattctcccctacaacttcatgagatatatgcttccaagtgttccagctgcatgtagtataaggcagttggtactaagcaaatcaaaagcccaatgatcagtaataactacttttaactaactaaaacactgtgatgcataggaacaacattcaaagcaagatcacagattaccaaatatctcaagcaagcattctaaaactaacagcaggtccatatgcgggtcattgaactaatatataaacaaaatagaaaattagcaagtttttagaaaagaggtcaataggataaaacatcagcaagtcaaaaaaattgatagtcaaatgattttgaatggattaccttcatagacatcttaggtcgagctctaccgaaaataaatttagacattatatttcagattgcaatgcttgccaaaacttgttaattgattgctacccttttttagttgcagtgcttttggacacgagcaccaccagccatggagacccgcttttgggaactgaggatcgcttttgggaactatctcagttcatctaggttactcttagaacttgcgtcccctgctgtgcagggagtatggttttatgcttgtaagatatgagcagcgctatgctgtgtgcttcactgcaagttatgtattttggtacttctaaggtagtaactgctcataactgttctatgcgtgcgatcttgcgaggaccatactcgtggtatgtaaagcatgcctatgtagtctaggcctgtacaagacatttcttcccttggtgcttgtactatttctctttgtcgttctgtgctactaccagccatctgtttgtcgttctactccccttagcatgtaactattgagtggtaac

SEQ ID NO: 9772 - DNA, 1641 bp, Zea Mays
aattagggtatcttaactttggtgaagtttagtgtgcaacccattagcataccgtatacagattacatgatttgtggtatctaccaatcgaaccactctgtgcaggtacaagatatccctcaccgctgaagatgacactgacactgccgagtttatcttctttggacgaatggcgcagcgcctcattaaaaaaaatgtggacaccctcatctcgactaatccacccggtttcattccaagagaaattacagatctactggaaaagtctttcgagtggaatgttagcttcatcgaaagcacaattatttatggcagtgtttccttccaagtgaatgctataaacgcataaatggatggtggcaacatgcttccaactacaccgtcctcacagccgtcgtcgaccatactttctcaagtaggacacggatcaggtgtcgcacaaaacagaggggctgccttcatccacgagccgtcactaacaccagagagtcacaaagtttcatctagcgccaagtgtaacatacagacaaccccacatcagggagacaatctgctgcagggaacagagattatcacttctccgcctaacgtgcaggcgccatcaggagctgcttacagcgtgctagatgggtctacaaacaaggctcacaaaagtgttgccggaaaaaggtctcgaacatcaccgtccaagaaggttgccaagaaactttttagagatgaagacacaggagatgacgatgttgctggttccacagacgttgatgctgagtaacgatatgtccaattctcccctacaacttcatgagatatatgcttccaagtgttccagctgcatgtagtataaggcagttggtactaagcaaatcaaaagcccaatgatcagtaataactacttttaactaactaaaacactgtgatgcataggaacaacattcaaagcaagatcacagattaccaaatatctcaagcaagcattctaaaactaacagcaggtccatatgcgggtcattgaactaatatataaacaaaatagaaaattagcaagtttttagaaaagaggtcaataggataaaacatcagcaagtcaaaaaaattgatagtcaaatgattttgaatggattaccttcatagacatcttaggtcgagctctaccgaaaataaatttagacattatatttcagattgcaatgcttgccaaaacttgttaattgattgctacccttttttagttgcagtgcttttggacacgagcaccaccagccatggagacccgcttttgggaactgaggatcgcttttgggaactatctcagttcatctaggttactcttagaacttgcgtcccctgctgtgcagggagtatggttttatgcttgtaagatatgagcagcgctatgctgtgtgcttcactgcaagttatgtattttggtacttctaaggtagtaactgctcataactgttctatgcgtgcgatcttgcgaggaccatactcgtggtatgtaaagcatgcctatgtagtctaggcctgtacaagacatttcttcccttggtgcttgtactatttctctttgtcgttctgtgctactaccagccatctgtttgtcgttctactccccttagcatgtaactattgagtggtaac

SEQ ID NO: 9773 - DNA, 1721 bp, Zea Mays
cagaaatatcataatgcaagctgcctacttaggatttagatggatcattcattcacagagaaagggaaaaaaaggtttgtaccagtaaaattatctgatgtacgcaaagaagtgcagtgtcccatatgcttaggcatcatccggaagactagaacagttatggaatgcctgcaccggttctgtagggaatgcattgacaaatccatgcgacttgggaacaacgagtgtccagcgtgccgcacacactgtgcgagccggcgttctttgagagatgatccgaattatgatgccttgattgcagctctatatccagatattgacaaatatgaagaagaggagctagcgttcaacgaagaggagaatgaccgcaacaagcagattcaagcatccattgctgaggcttttcggaaacaatcagaagttattgggcggaagtctactgccaaagctactgctgctgcatttatgaagaggatggaaacggtgaaagctgtagcaaagaggcctcatctgcggaggagagttccccagagaaaaagcagaaacgactgccaaaatggccaacaccgcgttcttcacctgcccgagcatgcaatgatgaggttgcttctgatgaaaaggatgatgtaggaatatccagggaaaatttcagcacatctcctctacgagcatggggaaagaatggcactcgcagtcagactcgccacagtagcttcagtggttcaaatggcaggatggtcaagggtgggcgcatgatcaagttggttgagtgcttgcgaaattctgacgacaatgaaggcgagcgtgatgtacatctttgtctgcttccacttgatggacaaacggcaccaaatctggagaagtcatatctgtgttgcggcccaactctgtccatcaaacaactttgtcagtttgtcgccagtcagacatctcacaaagatgaagaagttgagatgtatgcgctgaagccttcttgtagcaagcctgtcagcactaatacatgcggtcctgacaaagcaaggctcgcaggggaggaacgcctttcagacttgcgctcctcgttcacatttcctaatggggttctggagctggtgtatgccataaaagtggctaactagatgctgagtgaaggcccattagttcaaatggaagtgttttttgtttatacatatcttcatcgtgatcccttgacgaaatgacaggtttgggctcttgaatacaacttggaaggaaaaaaaacgttgggggagactagttgttgtataattagcttgtgagatgtgagataaatgtgcgtacgttgtcaacgaatagtttcagaagagtcagattggcttccacagttcacctcgctgcaacccaaaatctggtctccactgccggcatttgggggaatttctcggttgggtgaaggctgagttatttcctcgagtggtcaagttgttttacttccacagttcaccagtttcagcttttgtaattcatcggttcatattcttcaggcggcagccagtccgtgctgcgaacgacttcccagatacatgtaacataaatcttataaaaaatatatatgtaacagaaattactttttttgtcgtttctttgtacggcacaaggacagtcgtatttaaccttgagctggttataccagagtgttactattttattatatctgtacttatacaaactacaaggcaatgtattcttcctttgcgaatgtt

SEQ ID NO: 9774 - DNA, 2042 bp, Zea Mays
catccactcaaagccaggaccaggagccgtagaaaaaccagcccaagaggagagagagagacctccgtgccagccccgccccacctcgccgcctctccacgcgacctgctcgccgctgccgccggcgccgcatcacaaatgcccacccagaagcgcccgcctccgcctccgccaccctctccctccccctccgcggcccctggcgccggctcgccccctccctcgtctccgccgctgccgacggccgagcccgcggagaagaagcccaagctggaggtgaacggcagcgccggcgccgaagccaacggcaacgccaacgatttcggcgcgaaggaggggacggaggtggaggcgtcggagtctgagtcggaggatgcggacgccgcaaaacaggagtttgtaccagtaaaattatctgatgtacgcaaagaagtgcagtgtcccatatgcttaggcatcatccggaagactagaacagttatggaatgcctgcaccggttctgtagggaatgcattgacaaatccatgcgacttgggaacaacgagtgtccagcgtgccgcacacactgtgcgagccggcgttctttgagagatgatccgaattatgatgccttgattgcagctctatatccagatattgacaaatatgaagaagaggagctagcgttcaacgaagaggagaatgaccgcaacaagcagattcaagcatccattgctgaggcttttcggaaacaatcagaagttattgggcggaagtctactgccaaagctactgctgctgcatttatgaagaggatggaaacggtgaaagctgtagcaaagaggcctcatctgcggaggagagttccccagagaaaaagcagaaacgactgccaaaatggccaacaccgcgttcttcacctgcccgagcatgcaatgatgaggttgcttctgatgaaaaggatgatgtaggaatatccagggaaaatttcagcacatctcctctacgagcatggggaaagaatggcactcgcagtcagactcgccacagtagcttcagtggttcaaatggcaggatggtcaagggtgggcgcatgatcaagttggttgagtgcttgcgaaattctgacgacaatgaaggcgagcgtgatgtacatctttgtctgcttccacttgatggacaaacggcaccaaatctggagaagtcatatctgtgttgcggcccaactctgtccatcaaacaactttgtcagtttgtcgccagtcagacatctcacaaagatgaagaagttgagatgtatgcgctgaagccttcttgtagcaagcctgtcagcactaatacatgcggtcctgacaaagcaaggctcgcaggggaggaacgcctttcagacttgcgctcctcgttcacatttcctaatggggttctggagctggtgtatgccataaaagtggctaactagatgctgagtgaaggcccattagttcaaatggaagtgttttttgtttatacatatcttcatcgtgatcccttgacgaaatgacaggtttgggctcttgaatacaacttggaaggaaaaaaaacgttgggggagactagttgttgtataattagcttgtgagatgtgagataaatgtgcgtacgttgtcaacgaatagtttcagaagagtcagattggcttccacagttcacctcgctgcaacccaaaatctggtctccactgccggcatttgggggaatttctcggttgggtgaaggctgagttatttcctcgagtggtcaagttgttttacttccacagttcaccagtttcagcttttgtaattcatcggttcatattcttcaggcggcagccagtccgtgctgcgaacgacttcccagatacatgtaacataaatcttataaaaaatatatatgtaacagaaattactttttttgtcgtttctttgtacggcacaaggacagtcgtatttaaccttgagctggttataccagagtgttactattttattatatctgtacttatacaaactacaaggcaatgtattcttcctttgcgaatgtt

SEQ ID NO: 9775 - DNA, 2004 bp, Zea Mays
catccactcaaagccaggaccaggagccgtagaaaaaccagcccaagaggagagagagagacctccgtgccagccccgccccacctcgccgcctctccacgcgacctgctcgccgctgccgccggcgccgcatcacaaatgcccacccagaagcgcccgcctccgcctccgccaccctctccctccccctccgcggcccctggcgccggctcgccccctccctcgtctccgccgctgccgacggccgagcccgcggagaagaagcccaagctggaggtgaacggcagcgccggcgccgaagccaacggcaacgccaacgatttcggcgcgaaggaggggacggaggtggaggcgtcggagtctgagtcggaggatgcggacgccgcaaaacaggagaacaacgagtgtccagcgtgccgcacacactgtgcgagccggcgttctttgagagatgatccgaattatgatgccttgattgcagctctatatccagatattgacaaatatgaagaagaggagctagcgttcaacgaagaggagaatgaccgcaacaagcagattcaagcatccattgctgaggcttttcggaaacaatcagaagttattgggcggaagtctactgccaaagctactgctgctgcatttgtaagaagatcacgccgtaacattcggcctaatgggcagaatacctatttccgtggccgaggaaaagccagttctgatgacgttgctctggcctgttctgaagatgaagaggatggaaacggtgaaagctgtagcaaagaggcctcatctgcggaggagagttccccagagaaaaagcagaaacgactgccaaaatggccaacaccgcgttcttcacctgcccgagcatgcaatgatgaggttgcttctgatgaaaaggatgatgtaggaatatccagggaaaatttcagcacatctcctctacgagcatggggaaagaatggcactcgcagtcagactcgccacagtagcttcagtggttcaaatggcaggatggtcaagggtgggcgcatgatcaagttggttgagtgcttgcgaaattctgacgacaatgaaggcgagcgtgatgtacatctttgtctgcttccacttgatggacaaacggcaccaaatctggagaagtcatatctgtgttgcggcccaactctgtccatcaaacaactttgtcagtttgtcgccagtcagacatctcacaaagatgaagaagttgagatgtatgcgctgaagccttcttgtagcaagcctgtcagcactaatacatgcggtcctgacaaagcaaggctcgcaggggaggaacgcctttcagacttgcgctcctcgttcacatttcctaatggggttctggagctggtgtatgccataaaagtggctaactagatgctgagtgaaggcccattagttcaaatggaagtgttttttgtttatacatatcttcatcgtgatcccttgacgaaatgacaggtttgggctcttgaatacaacttggaaggaaaaaaaacgttgggggagactagttgttgtataattagcttgtgagatgtgagataaatgtgcgtacgttgtcaacgaatagtttcagaagagtcagattggcttccacagttcacctcgctgcaacccaaaatctggtctccactgccggcatttgggggaatttctcggttgggtgaaggctgagttatttcctcgagtggtcaagttgttttacttccacagttcaccagtttcagcttttgtaattcatcggttcatattcttcaggcggcagccagtccgtgctgcgaacgacttcccagatacatgtaacataaatcttataaaaaatatatatgtaacagaaattactttttttgtcgtttctttgtacggcacaaggacagtcgtatttaaccttgagctggttataccagagtgttactattttattatatctgtacttatacaaactacaaggcaatgtattcttcctttgcgaatgtt

SEQ ID NO: 9776 - DNA, 1330 bp, Zea Mays
gttaattcatagattgcactacatatacctccttttgcatttctaactactgaggtactttcgaagtttggatctggcttctttcttctagtacaggttgtgatgcttttagacttcacaaataattggaatgactcatgggttgagaaagaagagcggaaatgggaaatagctttgctggtagtgactgtggtttgctatctttctacattggccttctctggtgtgctcttcatgtggtttaatccatccggtcatgactgtggtctcaatgtgttctttatcgtcatgacactcatccttgcttttgcgtttgcaatagttgctttacatcctcaggtccatggaagcgttatgcctgcttctgtcatttctgtttactgcgcatacctgtgctacacgagtctctcgagtgaaccggatgactatgagtgcaatgggcttcacaggcattctaagcaggtttcaatgagtgctcttatactcgggatgctcactacggtgctctctgttgtgtactcagcagtccgtgctggatcctcgactacattcctttcaccgccatcatctcctagatctggagccaaaaacccgctactcggtgacgaggaggacggcaaaggcgatggcaaagaaagcgaaccgcgacccgtgagctactcctacaccttcttccacctcatcttcgcccttgcaagcatgtattcagccatgctcctgaccggctggacgagcgctgcatcagagagctccgagctgatggatgttggatggacgaccgtctgggtgcgcatctgcacggaatgggtcaccgccgggttgtacatctggaccctcatcgccccactgctcttcccagaccgtgatttctcctaggcacccacgcacccatagcctatgagttgtttggtggtgttagttgcgattgtgaatatgaataagccgaagctgggagctggtagggatctggtattgtctctgtatgctatctggcatgcctaatgtgatggcactggttagtacctgtttgtatggccttgtatagaatatatttcgaccgagtgtaggttgtggactttaaaagcagaaaaacaaaactgagcagaaaaacaaaactaagggtaaaatgaggaacactagcaaaactgaggataccagcttaaaaaccctatatcttaaggggtaagtacaaaaaataaagagacgtattttggttaagtaatatctcgattctctaagtctagatatgttccattcatacaattcatataaggtcttgttcggttaattcccttacccatggattggatgggattgaaaaaaataagaa

SEQ ID NO: 9777 - DNA, 1559 bp, Zea Mays
ggatgctatagaactttccacaagggattgacatttaccagggataaatgcgtttgatcaaacaccaccagaagaatggtttcaaatgaatgctgttcttcgtgtaagcctggggaacttcttgttctttgcaatattttctctcgtgatgattggtgtgaaagaccagaatgaccggcgagatgcctggcaccatggtggctggattgcaaagattgctgtatgggctgttctcattgttcttatgttctgtgtgccgaacattgtcattactatttacgaggtactttcgaagtttggatctggcttctttcttctagtacaggttgtgatgcttttagacttcacaaataattggaatgactcatgggttgagaaagaagagcggaaatgggaaatagctttgctggtagtgactgtggtttgctatctttctacattggccttctctggtgtgctcttcatgtggtttaatccatccggtcatgactgtggtctcaatgtgttctttatcgtcatgacactcatccttgcttttgcgtttgcaatagttgctttacatcctcaggtccatggaagcgttatgcctgcttctgtcatttctgtttactgcgcatacctgtgctacacgagtctctcgagtgaaccggatgactatgagtgcaatgggcttcacaggcattctaagcaggtttcaatgagtgctcttatactcgggatgctcactacggtgctctctgttgtgtactcagcagtccgtgctggatcctcgactacattcctttcaccgccatcatctcctagatctggagccaaaaacccgctactcggtgacgaggaggacggcaaaggcgatggcaaagaaagcgaaccgcgacccgtgagctactcctacaccttcttccacctcatcttcgcccttgcaagcatgtattcagccatgctcctgaccggctggacgagcgctgcatcagagagctccgagctgatggatgttggatggacgaccgtctgggtgcgcatctgcacggaatgggtcaccgccgggttgtacatctggaccctcatcgccccactgctcttcccagaccgtgatttctcctaggcacccacgcacccatagcctatgagttgtttggtggtgttagttgcgattgtgaatatgaataagccgaagctgggagctggtagggatctggtattgtctctgtatgctatctggcatgcctaatgtgatggcactggttagtacctgtttgtatggccttgtatagaatatatttcgaccgagtgtaggttgtggactttaaaagcagaaaaacaaaactgagcagaaaaacaaaactaagggtaaaatgaggaacactagcaaaactgaggataccagcttaaaaaccctatatcttaaggggtaagtacaaaaaataaagagacgtattttggttaagtaatatctcgattctctaagtctagatatgttccattcatacaattcatataaggtcttgttcggttaattcccttacccatggattggatgggattgaaaaaaataagaa

SEQ ID NO: 9778 - DNA, 1516 bp, Zea Mays
ataaatgcgtttgatcaaacaccaccagaagaatggtttcaaatgaatgctgttcttcgtgtaagcctggggaacttcttgttctttgcaatattttctctcgtgatgattggtgtgaaagaccagaatgaccggcgagatgcctggcaccatggtggctggattgcaaagattgctgtatgggctgttctcattgttcttatgttctgtgtgccgaacattgtcattactatttacgaggtactttcgaagtttggatctggcttctttcttctagtacaggttgtgatgcttttagacttcacaaataattggaatgactcatgggttgagaaagaagagcggaaatgggaaatagctttgctggtagtgactgtggtttgctatctttctacattggccttctctggtgtgctcttcatgtggtttaatccatccggtcatgactgtggtctcaatgtgttctttatcgtcatgacactcatccttgcttttgcgtttgcaatagttgctttacatcctcaggtccatggaagcgttatgcctgcttctgtcatttctgtttactgcgcatacctgtgctacacgagtctctcgagtgaaccggatgactatgagtgcaatgggcttcacaggcattctaagcaggtttcaatgagtgctcttatactcgggatgctcactacggtgctctctgttgtgtactcagcagtccgtgctggatcctcgactacattcctttcaccgccatcatctcctagatctggagccaaaaacccgctactcggtgacgaggaggacggcaaaggcgatggcaaagaaagcgaaccgcgacccgtgagctactcctacaccttcttccacctcatcttcgcccttgcaagcatgtattcagccatgctcctgaccggctggacgagcgctgcatcagagagctccgagctgatggatgttggatggacgaccgtctgggtgcgcatctgcacggaatgggtcaccgccgggttgtacatctggaccctcatcgccccactgctcttcccagaccgtgatttctcctaggcacccacgcacccatagcctatgagttgtttggtggtgttagttgcgattgtgaatatgaataagccgaagctgggagctggtagggatctggtattgtctctgtatgctatctggcatgcctaatgtgatggcactggttagtacctgtttgtatggccttgtatagaatatatttcgaccgagtgtaggttgtggactttaaaagcagaaaaacaaaactgagcagaaaaacaaaactaagggtaaaatgaggaacactagcaaaactgaggataccagcttaaaaaccctatatcttaaggggtaagtacaaaaaataaagagacgtattttggttaagtaatatctcgattctctaagtctagatatgttccattcatacaattcatataaggtcttgttcggttaattcccttacccatggattggatgggattgaaaaaaataagaa

SEQ ID NO: 9779 - DNA, 2837 bp, Zea Mays
ccacgagacaggcataggcaccgtcgcacagagctgtgacttttttttaagcaccacagagctgggactttgagagggaggactcagcgagctccaaagccgacgaggataaagaggatcccggctccgcacgcgggagcgagaggatcgccggcgcaggatgtggtgcgcatcgtgcttggcgtccgcctgcgcgggctgcacctgcaacctctgcacgtcggcggcatcggccgtgtcccgccgctccgcgcgcctcgcttactgcggcctcttcgccgcctcccttatcctctccttcttgctccgccagttcgccgcgccgctcctcaagcatatcccatgattcactaaatttctccatgtcctgaaggcttaagatgcagaaaagtaatgtggagtgtccttttgctccacaaaatgaaatgcattccttcagttgaatattttactgtttcgtcgttcccatagagtacttgcagacagcagagggttttttctggacaacaacagcagaggttgctactagttgttgtcgaaagttctaatatttgcaattttgcaacccacaagtgttgactctttgctattataccacctcggtctatgatttgtgagtccgtctgtctatgatttgtgggaccaatggcaaagtggtgaagcccaatgatgatgatggcaaaattgcaaatcccttaaagttcggtgctgtacagaaaagacatctggtatgtaaaccaaaaggatgctatagaactttccacaagggattgacatttaccaggtttttttttcttaggcacagcccctgagtgttattcctttcttgtgctgtaaatatctagaactgtgatttttgttacagtgcatgttcataagccataagtcttgcacaggttgagaatcgagcacagatggctgtttactccttagagcctctttgaaacttaaggaatttcatgggaactgtgtaggaattttgaaaggaagacacaggattcaagaaaaaaaatcccatccgtttttcctaagagggcattaatgtttttttaaaatacttcagcatgattttgacacatgcatcgttgatgatttgtgtggtcttgttgtcatcactgggaacaactttgcctatttaccataaatgcatgctggtgtactgatgcagagaatgtttgatttgtaaaactgtcgaatttttgttttggaattttgttccatcaaattattgagcttatgataaatcagatggacttttgaggcattgatttaatggtcctgtaagtggtctagtaagtctgtaatgtattgcattgcagggataaatgcgtttgatcaaacaccaccagaagaatggtttcaaatgaatgctgttcttcgtgtaagcctggggaacttcttgttctttgcaatattttctctcgtgatgattggtgtgaaagaccagaatgaccggcgagatgcctggcaccatggtggctggattgcaaagattgctgtatgggctgttctcattgttcttatgttctgtgtgccgaacattgtcattactatttacgaggtactttcgaagtttggatctggcttctttcttctagtacaggttgtgatgcttttagacttcacaaataattggaatgactcatgggttgagaaagaagagcggaaatgggaaatagctttgctggtagtgactgtggtttgctatctttctacattggccttctctggtgtgctcttcatgtggtttaatccatccggtcatgactgtggtctcaatgtgttctttatcgtcatgacactcatccttgcttttgcgtttgcaatagttgctttacatcctcaggtccatggaagcgttatgcctgcttctgtcatttctgtttactgcgcatacctgtgctacacgagtctctcgagtgaaccggatgactatgagtgcaatgggcttcacaggcattctaagcaggtttcaatgagtgctcttatactcgggatgctcactacggtgctctctgttgtgtactcagcagtccgtgctggatcctcgactacattcctttcaccgccatcatctcctagatctggagccaaaaacccgctactcggtgacgaggaggacggcaaaggcgatggcaaagaaagcgaaccgcgacccgtgagctactcctacaccttcttccacctcatcttcgcccttgcaagcatgtattcagccatgctcctgaccggctggacgagcgctgcatcagagagctccgagctgatggatgttggatggacgaccgtctgggtgcgcatctgcacggaatgggtcaccgccgggttgtacatctggaccctcatcgccccactgctcttcccagaccgtgatttctcctaggcacccacgcacccatagcctatgagttgtttggtggtgttagttgcgattgtgaatatgaataagccgaagctgggagctggtagggatctggtattgtctctgtatgctatctggcatgcctaatgtgatggcactggttagtacctgtttgtatggccttgtatagaatatatttcgaccgagtgtaggttgtggactttaaaagcagaaaaacaaaactgagcagaaaaacaaaactaagggtaaaatgaggaacactagcaaaactgaggataccagcttaaaaaccctatatcttaaggggtaagtacaaaaaataaagagacgtattttggttaagtaatatctcgattctctaagtctagatatgttccattcatacaattcatataaggtcttgttcggttaattcccttacccatggattggatgggattgaaaaaaataagaa

SEQ ID NO: 9780 - DNA, 2517 bp, Zea Mays
gtagatccacgagacaggcataggcaccgtcgcacagagctgtgacttttttttaagcaccacagagctgggactttgagagggaggactcagcgagctccaaagccgacgaggataaagaggatcccggctccgcacgcgggagcgagaggatcgccggcgcaggatgtggtgcgcatcgtgcttggcgtccgcctgcgcgggctgcacctgcaacctctgcacgtcggcggcatcggccgtgtcccgccgctccgcgcgcctcgcttactgcggcctcttcgccgcctcccttatcctctccttcttgctccgccagttcgccgcgccgctcctcaagcatatcccatgattcactaaatttctccatgtcctgaaggcttaagatgcagaaaagtaatgtggagtgtccttttgctccacaaaatgaaatgcattccttcagttgaatattttactgtttcgtcgttcccatagagtacttgcagacagcagagggttttttctggacaacaacagcagaggttgctactagttgttgtcgaaagttctaatatttgcaattttgcaacccacaagtgttgactctttgctattataccacctcggtctatgatttgtgagtccgtctgtctatgatttgtgggaccaatggcaaagtggtgaagcccaatgatgatgatggcaaaattgcaaatcccttaaagttcggtgctgtacagaaaagacatctgggataaatgcgtttgatcaaacaccaccagaagaatggtttcaaatgaatgctgttcttcgtgtaagcctggggaacttcttgttctttgcaatattttctctcgtgatgattggtgtgaaagaccagaatgaccggcgagatgcctggcaccatggtggctggattgcaaagattgctgtatgggctgttctcattgttcttatgttctgtgtgccgaacattgtcattactatttacgaggtactttcgaagtttggatctggcttctttcttctagtacaggttgtgatgcttttagacttcacaaataattggaatgactcatgggttgagaaagaagagcggaaatgggaaatagctttgctggtagtgactgtggtttgctatctttctacattggccttctctggtgtgctcttcatgtggtttaatccatccggtcatgactgtggtctcaatgtgttctttatcgtcatgacactcatccttgcttttgcgtttgcaatagttgctttacatcctcaggtccatggaagcgttatgcctgcttctgtcatttctgtttactgcgcatacctgtgctacacgagtctctcgagtgaaccggatgactatgagtgcaatgggcttcacaggcattctaagcaggtttcaatgagtgctcttatactcgggatgctcactacggtgctctctgttgtgtactcagcagtccgtgctggatcctcgactacattcctttcaccgccatcatctcctagatctggagccaaaaacccgctactcggtgacgaggaggacggcaaaggcgatggcaaagaaagcgaaccgcgacccgtgagctactcctacaccttcttccacctcatcttcgcccttgcaagcatgtattcagccatgctcctgaccggctggacgagcgctgcatcagagagctccgagctgatggatgttggatggacgaccgtctgggtgcgcatctgcacggaatgggtcaccgccgggttgtacatctggaccctcatcgccccactgctcttcccagaccgtgatttctcctaggcacccacgcacccatagcctatgagttgtttggtggtgttagttgcgattgtgaatatgaataagccgaagctgggagctggtagggatctggtattgtctctgtatgctatctggcatgcctaatgtgatggcactggttagtacctgtttgtatggccttgtatagaatatatttcgaccgagtgtaggttgtggactttaaagtcatatagctatacttgacctgatgtcaagtcgcggttgtgtgtaatgacgacaattatcatgtgtaagaatacgtctattgctcgtaatgttgtaataactacgactgtagcttgtgtttagggcatctacaacctactacataaatacataaataacatatatcttagggtttttaaagttggtgctctcagttttgctaatgtcctcatttttattcttagtcgtgttttttttctcagttttgtccttctagtgttatagagcagaaaaacaaaactgagcagaaaaacaaaactaagggtaaaatgaggaacactagcaaaactgaggataccagcttaaaaaccctatatcttaaggggtaagtacaaaaaataaagagacgtattttggttaagtaatatctcgattctctaagtctagatatgttccattcatacaattcatataaggtcttgttcggttaattcccttacccatggattggatgggattgaaaaaaataagaa

SEQ ID NO: 9781 - DNA, 2259 bp, Zea Mays
cccatttgtagatccacgagacaggcataggcaccgtcgcacagagctgtgacttttttttaagcaccacagagctgggactttgagagggaggactcagcgagctccaaagccgacgaggataaagaggatcccggctccgcacgcgggagcgagaggatcgccggcgcaggatgtggtgcgcatcgtgcttggcgtccgcctgcgcgggctgcacctgcaacctctgcacgtcggcggcatcggccgtgtcccgccgctccgcgcgcctcgcttactgcggcctcttcgccgcctcccttatcctctccttcttgctccgccagttcgccgcgccgctcctcaagcatatcccatgattcactaaatttctccatgtcctgaaggcttaagatgcagaaaagtaatgtggagtgtccttttgctccacaaaatgaaatgcattccttcagttgaatattttactgtttcgtcgttcccatagagtacttgcagacagcagagggttttttctggacaacaacagcagaggttgctactagttgttgtcgaaagttctaatatttgcaattttgcaacccacaagtgttgactctttgctattataccacctcggtctatgatttgtgagtccgtctgtctatgatttgtgggaccaatggcaaagtggtgaagcccaatgatgatgatggcaaaattgcaaatcccttaaagttcggtgctgtacagaaaagacatctgggataaatgcgtttgatcaaacaccaccagaagaatggtttcaaatgaatgctgttcttcgtgtaagcctggggaacttcttgttctttgcaatattttctctcgtgatgattggtgtgaaagaccagaatgaccggcgagatgcctggcaccatggtggctggattgcaaagattgctgtatgggctgttctcattgttcttatgttctgtgtgccgaacattgtcattactatttacgaggtactttcgaagtttggatctggcttctttcttctagtacaggttgtgatgcttttagacttcacaaataattggaatgactcatgggttgagaaagaagagcggaaatgggaaatagctttgctggtagtgactgtggtttgctatctttctacattggccttctctggtgtgctcttcatgtggtttaatccatccggtcatgactgtggtctcaatgtgttctttatcgtcatgacactcatccttgcttttgcgtttgcaatagttgctttacatcctcaggtccatggaagcgttatgcctgcttctgtcatttctgtttactgcgcatacctgtgctacacgagtctctcgagtgaaccggatgactatgagtgcaatgggcttcacaggcattctaagcaggtttcaatgagtgctcttatactcgggatgctcactacggtgctctctgttgtgtactcagcagtccgtgctggatcctcgactacattcctttcaccgccatcatctcctagatctggagccaaaaacccgctactcggtgacgaggaggacggcaaaggcgatggcaaagaaagcgaaccgcgacccgtgagctactcctacaccttcttccacctcatcttcgcccttgcaagcatgtattcagccatgctcctgaccggctggacgagcgctgcatcagagagctccgagctgatggatgttggatggacgaccgtctgggtgcgcatctgcacggaatgggtcaccgccgggttgtacatctggaccctcatcgccccactgctcttcccagaccgtgatttctcctaggcacccacgcacccatagcctatgagttgtttggtggtgttagttgcgattgtgaatatgaataagccgaagctgggagctggtagggatctggtattgtctctgtatgctatctggcatgcctaatgtgatggcactggttagtacctgtttgtatggccttgtatagaatatatttcgaccgagtgtaggttgtggactttaaaagcagaaaaacaaaactgagcagaaaaacaaaactaagggtaaaatgaggaacactagcaaaactgaggataccagcttaaaaaccctatatcttaaggggtaagtacaaaaaataaagagacgtattttggttaagtaatatctcgattctctaagtctagatatgttccattcatacaattcatataaggtcttgttcggttaattcccttacccatggattggatgggattgaaaaaaataagaa

SEQ ID NO: 9782 - DNA, 1309 bp, Zea Mays
atttttttgcaattaaacaacttaagagactttacgttaaacatcactatacatgccctaattacaattgcaacagtatcatccgattgaatctactttttaagcagtagaggacagaacagaacaggacccggcccttcctcgttccttcgtttctcctccccgcatttgctggtcgctgtcatacgacggcgccggaattccggtgggacagggccatcctctccgcttgtcccccagttctgcatttccctcttcgcagacattcgagttgggcctgccgccagttcttcagatggccggagcgggcgacgcggccaaggagtacgtcgccggatccgccgccggcgtcgctcaggtcgtagtcggccacccgttcgacacggtcaaggttaaactgcaagctcataataccacggctcatggaaaggtgtacaagaatgccttccactgcaccagtaggatactgcttgacgaaggaattacagggctgtacaaaggtgcgtcatcttcatttattggtatagctgttgaaagctcccttttctttggcacatattcccaagccaaacagttattacagggaagctatgaggttggtaggccacatcttcaggtaattatcccttctgctgcatgcagtggagctctgattagctgcatcctcactccaactgagctgaccaagactttttccagtgcagaatgcaagttcaagggaaggatgtaatccatggcgccaggtactccagccctctagattgtgctgtgaaaacattggaaagtgaaggggttaagggtatattccgtggtggtttggcaacattattcagagaggcgatcggcaatgctgtcttcttctgcacttatgagtacagtcgatactggatgcacaactatttggattcctcgagattttctggtagcagtcatttcgtggcggcaaaagatattgggataggggttgtaagtggtggcgttagtggaatggcattctggacagctaccctaccgttggatgtggcaaaaaccataatacagactgatccggaccctcatgtgagccgaaaccccttgcagattttgagcatggtttataagagagctgggttgggtggctgttatgctggacttggaccaactctagcaagagcattccctgccaatgcagcagcaattgttgcttgggagtacagcgctaagattctcggtataaagcgaggctagtattacgaccagaaaacagaaacaaaccaggtgggaatatgcagttgatgaggaattcaactctgcaatcagccaactcggt

SEQ ID NO: 9783 - DNA, 1285 bp, Zea Mays
atttttttgcaattaaacaacttaagagactttacgttaaacatcactatacatgccctaattacaattgcaacagtatcatccgattgaatctactttttaagcagtagaggacagaacagaacaggacccggcccttcctcgttccttcgtttctcctccccgcatttgctggtcgctgtcatacgacggcgccggaattccggtgggacagggccatcctctccgcttgtcccccagttctgcatttccctcttcgcagacattcgagttgggcctgccgccagttcttcagatggccggagcgggcgacgcggccaaggagtacgtcgccggatccgccgccggcgtcgctcaggtcgtagtcggccacccgttcgacacggtcaaggttaaactgcaagctcataataccacggctcatggaaaggtgtacaagaatgccttccactgcaccagtaggatactgcttgacgaaggaattacagggctgtacaaaggtgcgtcatcttcatttattggtatagctgttgaaagctcccttttctttggcacatattcccaagccaaacagttattacagggaagctatgaggttggtaggccacatcttcaggtaattatcccttctgctgcatgcagtggagctctgattagctgcatcctcactccaactgagctgaccaagactttttccagtgcagaatgcaagttcaagggaaggatgtaatccatggcgccaggtactccagccctctagattgtgctgtgaaaacattggaaagtgaaggggttaagggtatattccgtggtggtttggcaacattattcagagaggcgatcggcaatgctgtcttcttctgcacttatgagtacagtcgatactggatgcacaactatttggattcctcgagattttctggtagcagtcatttcgtggcggcaaaagatattgggataggggttgtaagtggtggcgttagtggaatggcattctggacagctaccctaccgttggatgtggcaaaaaccataatacagactgatccggaccctcatgtgagccgaaaccccttgcagattttgagcatggtttataagagagctgggttgggtggctgttatgctggacttggaccaactctagcaagagcattccctgccaatgcagcagcaattgttgcttgggagtacagcgctaagattctcgaccagaaaacagaaacaaaccaggtgggaatatgcagttgatgaggaattcaactctgcaatcagccaactcggt

SEQ ID NO: 9784 - DNA, 1191 bp, Zea Mays
atttttttgcaattaaacaacttaagagactttacgttaaacatcactatacatgccctaattacaattgcaacagtatcatccgattgaatctactttttaagcagtagaggacagaacagaacaggacccggcccttcctcgttccttcgtttctcctccccgcatttgctggtcgctgtcatacgacggcgccggaattccggtgggacagggccatcctctccgcttgtcccccagttctgcatttccctcttcgcagacattcgagttgggcctgccgccagttcttcagatggccggagcgggcgacgcggccaaggagtacgtcgccggatccgccgccggcgtcgctcaggtcgtagtcggccacccgttcgacacggtcaaggttaaactgcaagctcataataccacggctcatggaaaggtgtacaagaatgccttccactgcaccagtaggatactgcttgacgaaggaattacagggctgtacaaagggaagctatgaggttggtaggccacatcttcaggtaattatcccttctgctgcatgcagtggagctctgattagctgcatcctcactccaactgagctgaccaagtgcagaatgcaagttcaagggaaggatgtaatccatggcgccaggtactccagccctctagattgtgctgtgaaaacattggaaagtgaaggggttaagggtatattccgtggtggtttggcaacattattcagagaggcgatcggcaatgctgtcttcttctgcacttatgagtacagtcgatactggatgcacaactatttggattcctcgagattttctggtagcagtcatttcgtggcggcaaaagatattgggataggggttgtaagtggtggcgttagtggaatggcattctggacagctaccctaccgttggatgtggcaaaaaccataatacagactgatccggaccctcatgtgagccgaaaccccttgcagattttgagcatggtttataagagagctgggttgggtggctgttatgctggacttggaccaactctagcaagagcattccctgccaatgcagcagcaattgttgcttgggagtacagcgctaagattctcgaccagaaaacagaaacaaaccaggtgggaatatgcagttgatgaggaattcaactctgcaatcagccaactcggt

SEQ ID NO: 9785 - DNA, 1635 bp, Zea Mays
atttttttgcaattaaacaacttaagagactttacgttaaacatcactatacatgccctaattacaattgcaacagtatcatccgattgaatctactttttaagcagtagaggacagaacagaacaggacccggcccttcctcgttccttcgtttctcctccccgcatttgctggtcgctgtcatacgacggcgccggaattccggtgggacagggccatcctctccgcttgtcccccagttctgcatttccctcttcgcagacattcgagttgggcctgccgccagttcttcagatggccggagcgggcgacgcggccaaggagtacgtcgccggatccgccgccggcgtcgctcaggtcgtagtcggccacccgttcgacacggtcaaggttaaactgcaagctcataataccacggctcatggaaaggtgtacaagaatgccttccactgcaccagtaggatactgcttgacgaaggaattacagggctgtacaaaggtgcgtcatcttcatttattggtatagctgttgaaagctcccttttctttggcacatattcccaagccaaacagttattacagggaagctatgaggttggtaggccacatcttcaggtaattatcccttctgctgcatgcagtggagctctgattagctgcatcctcactccaactgagctgaccaagtgcagaatgcaagttcaagggaaggatgtaatccatggcgccaggtactccagccctctagattgtgctgtgaaaacattggaaagtgaagggagaggcgatcggcaatgctgtcttcttctgcacttatgagtacagtcgatactggatgcacaactatttggattcctcgagattttctggtagcagtcatttcgtggcggcaaaagatattgggataggggttgtaagtggtggcgttagtggaatggcattctggacagctaccctaccgttggatgtggcaaaaaccataatacagactgatccggaccctcatgtgagccgaaaccccttgcagattttgagcatggtttataagagagctgggttgggtggctgttatgctggacttggaccaactctagcaagagcattccctgccaatgcagcagcaattgttgcttgggagtacagcgctaagattctcggtataaagcgaggctagtattacggtactgctaatatatgaacacggaatcacttagcatttaaccctctttttgtttgttctgctccgttttggttcattgtcatatttcgccgaaatgtcatctgatgggcatttgtttgtgccattagactatagcacttcgtgcttatcccggaattggactggaaaatacactgaatcaaaacttccttttggttcattgcacgtatgcccccccccccccccccccccccacacacacacaaaatgctgaaaaagaggtgtttgaacgttgtacctgtgaaattcatgacatctttatggagtccacatggtccgcttgtattttttagttgcagcttgaaaatggtggtgcatgtaaattaaacaaactaatcacaaggttacttgagttggtgtatggactcaactgtcaccagatgcataaatgtattttaggccttccctctccccg

SEQ ID NO: 9786 - DNA, 1671 bp, Zea Mays
atttttttgcaattaaacaacttaagagactttacgttaaacatcactatacatgccctaattacaattgcaacagtatcatccgattgaatctactttttaagcagtagaggacagaacagaacaggacccggcccttcctcgttccttcgtttctcctccccgcatttgctggtcgctgtcatacgacggcgccggaattccggtgggacagggccatcctctccgcttgtcccccagttctgcatttccctcttcgcagacattcgagttgggcctgccgccagttcttcagatggccggagcgggcgacgcggccaaggagtacgtcgccggatccgccgccggcgtcgctcaggtcgtagtcggccacccgttcgacacggtcaaggttaaactgcaagctcataataccacggctcatggaaaggtgtacaagaatgccttccactgcaccagtaggatactgcttgacgaaggaattacagggctgtacaaaggtgcgtcatcttcatttattggtatagctgttgaaagctcccttttctttggcacatattcccaagccaaacagttattacagggaagctatgaggttggtaggccacatcttcaggtaattatcccttctgctgcatgcagtggagctctgattagctgcatcctcactccaactgagctgaccaagaatgcaagttcaagggaaggatgtaatccatggcgccaggtactccagccctctagattgtgctgtgaaaacattggaaagtgaaggggttaagggtatattccgtggtggtttggcaacattattcagagaggcgatcggcaatgctgtcttcttctgcacttatgagtacagtcgatactggatgcacaactatttggattcctcgagattttctggtagcagtcatttcgtggcggcaaaagatattgggataggggttgtaagtggtggcgttagtggaatggcattctggacagctaccctaccgttggatgtggcaaaaaccataatacagactgatccggaccctcatgtgagccgaaaccccttgcagattttgagcatggtttataagagagctgggttgggtggctgttatgctggacttggaccaactctagcaagagcattccctgccaatgcagcagcaattgttgcttgggagtacagcgctaagattctcggtataaagcgaggctagtattacggtactgctaatatatgaacacggaatcacttagcatttaaccctctttttgtttgttctgctccgttttggttcattgtcatatttcgccgaaatgtcatctgatgggcatttgtttgtgccattagactatagcacttcgtgcttatcccggaattggactggaaaatacactgaatcaaaacttccttttggttcattgcacgtatgcccccccccccccccccccccccacacacacacaaaatgctgaaaaagaggtgtttgaacgttgtacctgtgaaattcatgacatctttatggagtccacatggtccgcttgtattttttagttgcagcttgaaaatggtggtgcatgtaaattaaacaaactaatcacaaggttacttgagttggtgtatggactcaactgtcaccagatgcataaatgtattttaggccttccctctccccg

SEQ ID NO: 9787 - DNA, 1820 bp, Zea Mays
atttttttgcaattaaacaacttaagagactttacgttaaacatcactatacatgccctaattacaattgcaacagtatcatccgattgaatctactttttaagcagtagaggacagaacagaacaggacccggcccttcctcgttccttcgtttctcctccccgcatttgctggtcgctgtcatacgacggcgccggaattccggtgggacagggccatcctctccgcttgtcccccagttctgcatttccctcttcgcagacattcgagttgggcctgccgccagttcttcagatggccggagcgggcgacgcggccaaggagtacgtcgccggatccgccgccggcgtcgctcaggtcgtagtcggccacccgttcgacacggtcaagttctggttctattttacagttacttggtataccagtgtactgaatacacaaaacagacagttccctggatgaaatgatcttcaatctggatggaatatatggttgccattgatataaacttggttaaactgcaagctcataataccacggctcatggaaaggtgtacaagaatgccttccactgcaccagtaggatactgcttgacgaaggaattacagggctgtacaaagggaagctatgaggttggtaggccacatcttcaggtaattatcccttctgctgcatgcagtggagctctgattagctgcatcctcactccaactgagctgaccaaggtagtggcattggtgctaaattcccacttttttctaatcaatataaggacttataatgcatgattcaagtggcatttaatgatgtgatgtcaagactttttccagtgcagaatgcaagttcaagggaaggatgtaatccatggcgccaggtactccagccctctagattgtgctgtgaaaacattggaaagtgaaggggttaagggtatattccgtggtggtttggcaacattattcagagaggcgatcggcaatgctgtcttcttctgcacttatgagtacagtcgatactggatgcacaactatttggattcctcgagattttctggtagcagtcatttcgtggcggcaaaagatattgggataggggttgtaagtggtggcgttagtggaatggcattctggacagctaccctaccgttggatgtggcaaaaaccataatacagactgatccggaccctcatgtgagccgaaaccccttgcagattttgagcatggtttataagagagctgggttgggtggctgttatgctggacttggaccaactctagcaagagcattccctgccaatgcagcagcaattgttgcttgggagtacagcgctaagattctcggtataaagcgaggctagtattacggtactgctaatatatgaacacggaatcacttagcatttaaccctctttttgtttgttctgctccgttttggttcattgtcatatttcgccgaaatgtcatctgatgggcatttgtttgtgccattagactatagcacttcgtgcttatcccggaattggactggaaaatacactgaatcaaaacttccttttggttcattgcacgtatgcccccccccccccccccccccccacacacacacaaaatgctgaaaaagaggtgtttgaacgttgtacctgtgaaattcatgacatctttatggagtccacatggtccgcttgtattttttagttgcagcttgaaaatggtggtgcatgtaaattaaacaaactaatcacaaggttacttgagttggtgtatggactcaactgtcaccagatgcataaatgtattttaggccttccctctccccg

SEQ ID NO: 9788 - DNA, 1687 bp, Zea Mays
atttttttgcaattaaacaacttaagagactttacgttaaacatcactatacatgccctaattacaattgcaacagtatcatccgattgaatctactttttaagcagtagaggacagaacagaacaggacccggcccttcctcgttccttcgtttctcctccccgcatttgctggtcgctgtcatacgacggcgccggaattccggtgggacagggccatcctctccgcttgtcccccagttctgcatttccctcttcgcagacattcgagttgggcctgccgccagttcttcagatggccggagcgggcgacgcggccaaggagtacgtcgccggatccgccgccggcgtcgctcaggtcgtagtcggccacccgttcgacacggtcaaggttaaactgcaagctcataataccacggctcatggaaaggtgtacaagaatgccttccactgcaccagtaggatactgcttgacgaaggaattacagggctgtacaaaggtgcgtcatcttcatttattggtatagctgttgaaagctcccttttctttggcacatattcccaagccaaacagttattacagggaagctatgaggttggtaggccacatcttcaggtaattatcccttctgctgcatgcagtggagctctgattagctgcatcctcactccaactgagctgaccaagactttttccagtgcagaatgcaagttcaagggaaggatgtaatccatggcgccaggtactccagccctctagattgtgctgtgaaaacattggaaagtgaaggggttaagggtatattccgtggtggtttggcaacattattcagagaggcgatcggcaatgctgtcttcttctgcacttatgagtacagtcgatactggatgcacaactatttggattcctcgagattttctggtagcagtcatttcgtggcggcaaaagatattgggataggggttgtaagtggtggcgttagtggaatggcattctggacagctaccctaccgttggatgtggcaaaaaccataatacagactgatccggaccctcatgtgagccgaaaccccttgcagattttgagcatggtttataagagagctgggttgggtggctgttatgctggacttggaccaactctagcaagagcattccctgccaatgcagcagcaattgttgcttgggagtacagcgctaagattctcggtataaagcgaggctagtattacggtactgctaatatatgaacacggaatcacttagcatttaaccctctttttgtttgttctgctccgttttggttcattgtcatatttcgccgaaatgtcatctgatgggcatttgtttgtgccattagactatagcacttcgtgcttatcccggaattggactggaaaatacactgaatcaaaacttccttttggttcattgcacgtatgcccccccccccccccccccccccacacacacacaaaatgctgaaaaagaggtgtttgaacgttgtacctgtgaaattcatgacatctttatggagtccacatggtccgcttgtattttttagttgcagcttgaaaatggtggtgcatgtaaattaaacaaactaatcacaaggttacttgagttggtgtatggactcaactgtcaccagatgcataaatgtattttaggccttccctctccccg

SEQ ID NO: 9789 - DNA, 2830 bp, Zea Mays
aacaaaaaattcggcaccggcaccgcaggcacggcacaccacggccagaccagaccaccagagtgcctccaccctcgaggcctccagtgtccactgcctactcgccccacgccacccaaatcccgtcgggacgacgaagaagccaagccggtgcgccgtataaatctaaccaatcgccatccgcccaccccccaaatcccaccacccttttccccttccaaccctcgggatctctccggcccgccatggaagtgttctactacctcgtgttcggcgcgctcgccgccatcgtggcggcgctggagctcgccaagtccggcaaggaccgcgtcgccacctccccggccttcaactcatttaagaacaactacatcctcgtttactccctcatgatgtctggggactggctgcaggggccctacgtgtactacctctacagccagtacggcttcgacaagggcgacattggccgcctcttcatcgccggcttcggttcctccatgctcttcggcaccatcgtcggatccctcgcggataagcaggggcggaagagggcgtgtgtcacgtactgcatcacctacatcctcagctgcatcaccaagcactctccccagtacaaagttcttatgattgggcgtgtccttggtggcattgccacttcgctgctcttctcagcgtttgagtcgtggctcgtggcagagcacaacaaggtagctgcccagatgcttctctccatgcacggtgacattgatacctcggagatgacacgcttcaactttaatcctaatcaactcatcgttttccccatgaaaacaccttctattagttatgttttggacctgttttgcttttgtctttctgtacatctgttgccggtactgactacataggttgactgaagctaacaaaagataaaatacttgggaggtttgacttctagagtggcagtacactgtataaaatgacttccaaggtatagaaaatcgaacatacctaaattaaaatacagttatggtgataatttttagaggaaggttttgatattagagtgtaatgcattgcaaaacacagtgcataaggaattcaggataactatattgcagtcttcctgtcacttatcagtagtacagctattttcttttgttggatttgaagcccttgtcagcagatctggactatctggtgttcccatgcttgaccagaacaagccagtaactaaaactgtggtccagtccaattatatttttcaggatgatggacgtccttgtcgataattagcacatttatgtaccaatatgtacaagtatcatgagaagtccattgcctgcatgtcaatgcattgcgctgttctttttgcctatatcaacgttgctcttttttatttttctaatgataaagccattgatggctttgttttctcattcccttttgttcttgctgacaatgggcaattttacactgatattgtacagaaaggatttgatccacaatggttgtcgataacattctccaaggctatatttcttggcaatggtctagtggccattgttgctggcctatttgcaaattttcttgctgataacatgggttttggtcctgtggctccatttgatgccgctgcttgcttcctagcaataggaatggcaattatcttatcatcatggggtgagaactacggagattcgtctgacagcaaggacttgataacccagttcaagggtgcagctaaagccattgcttcagacgagaagattgcattgcttggagccatacagtcattgtttgagggatcaatgtatactttcgttttcctgtggactcctgctctgagcccaaaggatgaggaaattcctcacggcttcatatttgctaccttcatgctttcctcgatgctgggtagctcaattgcttctcgtttgttagctaggaagctgaaggttgaaggttatatgcaaatcgtgttttcagtatcagcctttactcttttcctccccgttgtcaccaatttcctagtacctccctccggggagaaaggcggcagcatttcgttaggaggctgcttacagcttcttggtttctgtacctttgagtcatgtgttggtatattttggccatcaatcatgaagatgagatctcaatatattcccgaggaggcaagaagcacaatcatgaatttcttccgtataccgctcaacctgtttgtttgcgtggtactatacaatgtgaatgcattcccaataactgtcatgttcggcatgtgctccattttccttctcatggcagcagtcttgcagaggcgcttaatggctgtctctgatcttcacagatcgacaaaggctgtaatgatgactgcggaagatgagcctctaaacccttagagatcatcataaaaaggaatcggaagttaaaatggccccaatcctcgacttattcccatggggttgctgaataagattgatatctaaaagttgtaacgactgtaacagaacacggtttttactgtgttataggattggtgctagtgcagtttccggttgtcatggtagagaacatgatgtggctcctgactattgtgccacacacggcagagtatagctcggcatagcctccccacgttttccccatgtttttcttctcgtgttttctgataggattgatatttgtattcaagtgaagtatcatatggaaacccgcatcgtccattttggatgcaaacgctgagtaaagtgagaaagggctcattagagaccgactccttttgtctaacgggtcatctttttttaactgaatcatctcatcaaaacgcctttcttttctggttttgtccaag

SEQ ID NO: 9790 - DNA, 3203 bp, Zea Mays
ggctccctccctcctcccctctcccctgtcccctctctctttctcaccgtccacgcgcgactgcgcgggacactggtcaacgccccggtggcaggcggctccgttggggggtgagtctagctccgtctgttgcgccggaataacgcggcgggtgctacctccggccctcgggttccatggggaggaacggtagcgtgaggcgctcggcgttttcgggcgccgcgggtgctgccgcggggccgccgtccttctctgtgaatcccgccgactaccggttgatggaggaggtggggtacggtgcgcacgccgtcgtgtaccgcgcgatcttcctcccgactaagggtgttgtcgcggtcaagtgcctggatctcgatcagctcaataacaacatcgatgaaatacaaagggaggctcaaataatgagcttgatagaccatcctaatgtcatcagggcttactgctcatttgttgtggagcacagcctctgggtgataatgccattcatgacagagggttcttgtttacacttaatgaagatctcataccaggaaggttttgatgagccgatcattggctccattctcaaggaaactcttaaggctctggattaccttcaccggcagggtcaaatacatcgtgatgtcaaggctggtaatatccttatcgatggtgctggggtagtgaagcttggagactttggtgtttctgcttgtatgtttgatagaggtgataggcaaagatctaggaatacatttgtaggaacaccatgctggatggctccagaagtgctccaacctggcactggatataatttcaaagctgacatatggtcatttggaatcactgctcttgaactagcacatggccatgctccattttctaaataccctcctatgaaggttcttctcatgaccctccagaatgcaccacctggtcttgattatgaacgtgacaaaagattctcaaagttgtgaccagtcatttaaagaaatggttgcaatgtgcttggtcaaagatcaaacaaagagaccaacagctgagaagttgcttaagcattcatttttcaaaaatgcaaagcctccagagttgactattaagagtatcttatctggtttacctcctctctgggaccgtgtaaaggctctccagcttaaagatgaagcacaattggctttgaagaaaatgccttcttctgaacaggaggccctctccctgagtgaatatcaacgcggcgttagtgcatggaacttcgatatcgaggatctcaaggctcaagcatcattaattcatgatgacgagcctcctgaaataaaagaagatgaggacattgcaagaaacattgaggttgaaaaggttgaagcaaaatgcaatggaatatctgtatgtaactgtcaccttttggcccttcaacaggacttgtcttcacggaaccatttgggaaagtcatttgcaaatgagtgcaattccaggcagcgagcctttgtcaccactttaaaatcggatggaaacagacccaccacgaatgaagcttttgattttgattttgattttagcgaggctgccactacaagaagggctgatggacatgaaagaaacataagagagaatgattcattgccctctacagcaaagcgagatccagagtcgaatcattggacaagtgacgttgggcagagacaactgtcttctggtgggagcaatagctcaacagctgaaaggggctatggttttgagagggatgcagttgtgcaaacaatacctgaaaaacaaagaagtgaggcgagaaaaacagcaagccttagtggtccactttcactgccaactcgtgcttctgcaaatagtctgtcagctcctattcgatcttcaggaggttttgtagattcatcaggtgacaagtccaaacgaagtgtagtagagattaaaggccgcttttcagtgacatctgagaatgtcgatcttgcaaaggttcaggaaggtccacttagtagcctctcacggaaatcaccagagggttcactgctaaaaaaatctgccagcactggtgattgtttgattaatactaagctgatgcgtaacgctaatcagctgaaggaattctgcaatagttctgtatcatcttcagtattaattccccaccttaacaaccttgtgcaacagaccatgtttcagcaggatgtaatcatgaacctacttagtaacttgcaacaggatgagaaagttgatagaacacagcctggaatatcttctcaagtccgaacgatggagaatggtaaagtggctgatacagctaactctgagaaggaacggtcattacttgttaaaatttcagaattacagtctaggatgataacactgactgatgaactaattgcagctaagacaaaacatgttcagttgcagcaagagctaaatgctttgtactaccgagaagaaattgaggatgttagggatgaggatatcgaagaaacatagtgtatgaattatctgcctctccctgagacagatcaattacccgcctctccctgaggtcaggggagaacaagagaaggaaagcggcagggagaactagcgatggaaagtggcgatgccgcaaatatttgctggatctagagaccagctgcggttctacggaatttgttctttgaaggttgccgtgcccctggcctgctgccatccagtgtgtataaccgtcttagttcgttttttttttgtggccacaagattgaggcgtggtcatgcagctatttcggccatgcctatcattgggagtagctgtagtccgtaggctaccgggtggttatctatgcagaatttcagaagactgcaaaataaactgtattttatctagcaataggatgtatattggcgcattcgttgatatgtatcatatagggctattcgcaaacatccaaacagagttgtttgcacatatctaataaagtatgcatttactgcatttatcactgccatgtactaaatgattgttttaaaggcattatacattacatgatctgggtaaatcttctctataattggatcttcatgctattttccagcggtgtttctatctcattacatattttacctcctatttcaaatttcactatgcaaataatactatttacaatacaaagcaatgttataaacgattggaaagcaatgttataatactatttagtgatctttctttctttttcttttcc

SEQ ID NO: 9791 - DNA, 3034 bp, Zea Mays
ggctccctccctcctcccctctcccctgtcccctctctctttctcaccgtccacgcgcgactgcgcgggacactggtcaacgccccggtggcaggcggctccgttggggggtgagtctagctccgtctgttgcgccggaataacgcggcgggtgctacctccggccctcgggttccatggggaggaacggtagcgtgaggcgctcggcgttttcgggcgccgcgggtgctgccgcggggccgccgtccttctctgtgaatcccgccgactaccggttgatggaggaggtggggtacggtgcgcacgccgtcgtgtaccgcgcgatcttcctcccgactaagggtgttgtcgcggtcaagtgcctggatctcgatcagctcaataacaacatcgatgaaatacaaagggaggctcaaataatgagcttgatagaccatcctaatgtcatcagggcttactgctcatttgttgtggagcacagcctctgggtgataatgccattcatgacagagggttcttgtttacacttaatgaagatctcataccaggaaggttttgatgagccgatcattggctccattctcaaggaaactcttaaggctctggattaccttcaccggcagggtcaaatacatcgtgatgtcaaggctggtaatatccttatcgatggtgctggggtagtgaagcttggagactttggtgtttctgcttgtatgtttgatagaggtgataggcaaagatctaggaatacatttgtaggaacaccatgctggatggctccagaagtgctccaacctggcactggatataatttcaaagctgacatatggtcatttggaatcactgctcttgaactagcacatggccatgctccattttctaaataccctcctatgaaggttcttctcatgaccctccagaatgcaccacctggtcttgattatgaacgtgacaaaagattctcaaagcctccagagttgactattaagagtatcttatctggtttacctcctctctgggaccgtgtaaaggctctccagcttaaagatgaagcacaattggctttgaagaaaatgccttcttctgaacaggaggccctctccctgagtgaatatcaacgcggcgttagtgcatggaacttcgatatcgaggatctcaaggctcaagcatcattaattcatgatgacgagcctcctgaaataaaagaagatgaggacattgcaagaaacattgaggttgaaaaggacttgtcttcacggaaccatttgggaaagtcatttgcaaatgagtgcaattccaggcagcgagcctttgtcaccactttaaaatcggatggaaacagacccaccacgaatgaagcttttgattttgattttgattttagcgaggctgccactacaagaagggctgatggacatgaaagaaacataagagagaatgattcattgccctctacagcaaagcgagatccagagtcgaatcattggacaagtgacgttgggcagagacaactgtcttctggtgggagcaatagctcaacagctgaaaggggctatggttttgagagggatgcagttgtgcaaacaatacctgaaaaacaaagaagtgaggcgagaaaaacagcaagccttagtggtccactttcactgccaactcgtgcttctgcaaatagtctgtcagctcctattcgatcttcaggaggttttgtagattcatcaggtgacaagtccaaacgaagtgtagtagagattaaaggccgcttttcagtgacatctgagaatgtcgatcttgcaaaggttcaggaaggtccacttagtagcctctcacggaaatcaccagagggttcactgctaaaaaaatctgccagcactggtgattgtttgattaatactaagctgatgcgtaacgctaatcagctgaaggaattctgcaatagttctgtatcatcttcagtattaattccccaccttaacaaccttgtgcaacagaccatgtttcagcaggatgtaatcatgaacctacttagtaacttgcaacaggatgagaaagttgatagaacacagcctggaatatcttctcaagtccgaacgatggagaatggtaaagtggctgatacagctaactctgagaaggaacggtcattacttgttaaaatttcagaattacagtctaggatgataacactgactgatgaactaattgcagctaagacaaaacatgttcagttgcagcaagagctaaatgctttgtactaccgagaagaaattgaggatgttagggatgaggatatcgaagaaacatagtgtatgaattatctgcctctccctgagacagatcaattacccgcctctccctgaggtcaggggagaacaagagaaggaaagcggcagggagaactagcgatggaaagtggcgatgccgcaaatatttgctggatctagagaccagctgcggttctacggaatttgttctttgaaggttgccgtgcccctggcctgctgccatccagtgtgtataaccgtcttagttcgttttttttttgtggccacaagattgaggcgtggtcatgcagctatttcggccatgcctatcattgggagtagctgtagtccgtaggctaccgggtggttatctatgcagaatttcagaagactgcaaaataaactgtattttatctagcaataggatgtatattggcgcattcgttgatatgtatcatatagggctattcgcaaacatccaaacagagttgtttgcacatatctaataaagtatgcatttactgcatttatcactgccatgtactaaatgattgttttaaaggcattatacattacatgatctgggtaaatcttctctataattggatcttcatgctattttccagcggtgtttctatctcattacatattttacctcctatttcaaatttcactatgcaaataatactatttacaatacaaagcaatgttataaacgattggaaagcaatgttataatactatttagtgatctttctttctttttcttttcc

SEQ ID NO: 9792 - DNA, 3049 bp, Zea Mays
ggctccctccctcctcccctctcccctgtcccctctctctttctcaccgtccacgcgcgactgcgcgggacactggtcaacgccccggtggcaggcggctccgttggggggtgagtctagctccgtctgttgcgccggaataacgcggcgggtgctacctccggccctcgggttccatggggaggaacggtagcgtgaggcgctcggcgttttcgggcgccgcgggtgctgccgcggggccgccgtccttctctgtgaatcccgccgactaccggttgatggaggaggtggggtacggtgcgcacgccgtcgtgtaccgcgcgatcttcctcccgactaagggtgttgtcgcggtcaagtgcctggatctcgatcagctcaataacaacatcgatgaaatacaaagggaggctcaaataatgagcttgatagaccatcctaatgtcatcagggcttactgctcatttgttgtggagcacagcctctgggtgataatgccattcatgacagagggttcttgtttacacttaatgaagatctcataccaggaaggttttgatgagccgatcattggctccattctcaaggaaactcttaaggctctggattaccttcaccggcagggtcaaatacatcgtgatgtcaaggctggtaatatccttatcgatggtgctggggtagtgaagcttggagactttggtgtttctgcttgtatgtttgatagaggtgataggcaaagatctaggaatacatttgtaggaacaccatgctggatggctccagaagtgctccaacctggcactggatataatttcaaagctgacatatggtcatttggaatcactgctcttgaactagcacatggccatgctccattttctaaataccctcctatgaaggttcttctcatgaccctccagaatgcaccacctggtcttgattatgaacgtgacaaaagattctcaaagtcatttaaagaaatggttgcaatgtgcttggtcaaagatcaaacaaagagaccaacagctgagaagttgcttaagcattcatttttcaaaaatgcaaagcctccagagttgactattaagagtatcttatctggtttacctcctctctgggaccgtgtaaaggctctccagcttaaagatgaagcacaattggctttgaagaaaatgccttcttctgaacaggaggccctctccctgagtgaatatcaacgcggcgttagtgcatggaacttcgatatcgaggatctcaaggctcaagcatcattaattcatgatgacgagcctcctgaaataaaagaagatgaggacattgcaagaaacattgaggttgaaaaggacttgtcttcacggaaccatttgggaaagtcatttgcaaatgagtgcaattccagcgaggctgccactacaagaagggctgatggacatgaaagaaacataagagagaatgattcattgccctctacagcaaagcgagatccagagtcgaatcattggacaagtgacgttgggcagagacaactgtcttctggtgggagcaatagctcaacagctgaaaggggctatggttttgagagggatgcagttgtgcaaacaatacctgaaaaacaaagaagtgaggcgagaaaaacagcaagccttagtggtccactttcactgccaactcgtgcttctgcaaatagtctgtcagctcctattcgatcttcaggaggttttgtagattcatcaggtgacaagtccaaacgaagtgtagtagagattaaaggccgcttttcagtgacatctgagaatgtcgatcttgcaaaggttcaggaaggtccacttagtagcctctcacggaaatcaccagagggttcactgctaaaaaaatctgccagcactggtgattgtttgattaatactaagctgatgcgtaacgctaatcagctgaaggaattctgcaatagttctgtatcatcttcagtattaattccccaccttaacaaccttgtgcaacagaccatgtttcagcaggatgtaatcatgaacctacttagtaacttgcaacaggatgagaaagttgatagaacacagcctggaatatcttctcaagtccgaacgatggagaatggtaaagtggctgatacagctaactctgagaaggaacggtcattacttgttaaaatttcagaattacagtctaggatgataacactgactgatgaactaattgcagctaagacaaaacatgttcagttgcagcaagagctaaatgctttgtactaccgagaagaaattgaggatgttagggatgaggatatcgaagaaacatagtgtatgaattatctgcctctccctgagacagatcaattacccgcctctccctgaggtcaggggagaacaagagaaggaaagcggcagggagaactagcgatggaaagtggcgatgccgcaaatatttgctggatctagagaccagctgcggttctacggaatttgttctttgaaggttgccgtgcccctggcctgctgccatccagtgtgtataaccgtcttagttcgttttttttttgtggccacaagattgaggcgtggtcatgcagctatttcggccatgcctatcattgggagtagctgtagtccgtaggctaccgggtggttatctatgcagaatttcagaagactgcaaaataaactgtattttatctagcaataggatgtatattggcgcattcgttgatatgtatcatatagggctattcgcaaacatccaaacagagttgtttgcacatatctaataaagtatgcatttactgcatttatcactgccatgtactaaatgattgttttaaaggcattatacattacatgatctgggtaaatcttctctataattggatcttcatgctattttccagcggtgtttctatctcattacatattttacctcctatttcaaatttcactatgcaaataatactatttacaatacaaagcaatgttataaacgattggaaagcaatgttataatactatttagtgatctttctttctttttcttttcc

SEQ ID NO: 9793 - DNA, 3096 bp, Zea Mays
ggctccctccctcctcccctctcccctgtcccctctctctttctcaccgtccacgcgcgactgcgcgggacactggtcaacgccccggtggcaggcggctccgttggggggtgagtctagctccgtctgttgcgccggaataacgcggcgggtgctacctccggccctcgggttccatggggaggaacggtagcgtgaggcgctcggcgttttcgggcgccgcgggtgctgccgcggggccgccgtccttctctgtgaatcccgccgactaccggttgatggaggaggtggggtacggtgcgcacgccgtcgtgtaccgcgcgatcttcctcccgactaagggtgttgtcgcggtcaagtgcctggatctcgatcagctcaataacaacatcgatgaaatacaaagggaggctcaaataatgagcttgatagaccatcctaatgtcatcagggcttactgctcatttgttgtggagcacagcctctgggtgataatgccattcatgacagagggttcttgtttacacttaatgaagatctcataccaggaaggttttgatgagccgatcattggctccattctcaaggaaactcttaaggctctggattaccttcaccggcagggtcaaatacatcgtgatgtcaaggctggtaatatccttatcgatggtgctggggtagtgaagcttggagactttggtgtttctgcttgtatgtttgatagaggtgataggcaaagatctaggaatacatttgtaggaacaccatgctggatggctccagaagtgctccaacctggcactggatataatttcaaagctgacatatggtcatttggaatcactgctcttgaactagcacatggccatgctccattttctaaataccctcctatgaaggttcttctcatgaccctccagaatgcaccacctggtcttgattatgaacgtgacaaaagattctcaaagtcatttaaagaaatggttgcaatgtgcttggtcaaagatcaaacaaagagaccaacagctgagaagttgcttaagcattcatttttcaaaaatgcaaagcctccagagttgactattaagagtatcttatctggtttacctcctctctgggaccgtgtaaaggctctccagcttaaagatgaagcacaattggctttgaagaaaatgccttcttctgaacaggaggccctctccctgagtgaatatcaacgcggcgttagtgcatggaacttcgatatcgaggatctcaaggctcaagcatcattaattcatgatgacgagcctcctgaaataaaagaagatgaggacattgcaagaaacattgaggacttgtcttcacggaaccatttgggaaagtcatttgcaaatgagtgcaattccaggcagcgagcctttgtcaccactttaaaatcggatggaaacagacccaccacgaatgaagcttttgattttgattttgattttagcgaggctgccactacaagaagggctgatggacatgaaagaaacataagagagaatgattcattgccctctacagcaaagcgagatccagagtcgaatcattggacaagtgacgttgggcagagacaactgtcttctggtgggagcaatagctcaacagctgaaaggggctatggttttgagagggatgcagttgtgcaaacaatacctgaaaaacaaagaagtgaggcgagaaaaacagcaagccttagtggtccactttcactgccaactcgtgcttctgcaaatagtctgtcagctcctattcgatcttcaggaggttttgtagattcatcaggtgacaagtccaaacgaagtgtagtagagattaaaggccgcttttcagtgacatctgagaatgtcgatcttgcaaaggttcaggaaggtccacttagtagcctctcacggaaatcaccagagggttcactgctaaaaaaatctgccagcactggtgattgtttgattaatactaagctgatgcgtaacgctaatcagctgaaggaattctgcaatagttctgtatcatcttcagtattaattccccaccttaacaaccttgtgcaacagaccatgtttcagcaggatgtaatcatgaacctacttagtaacttgcaacaggatgagaaagttgatagaacacagcctggaatatcttctcaagtccgaacgatggagaatggtaaagtggctgatacagctaactctgagaaggaacggtcattacttgttaaaatttcagaattacagtctaggatgataacactgactgatgaactaattgcagctaagacaaaacatgttcagttgcagcaagagctaaatgctttgtactaccgagaagaaattgaggatgttagggatgaggatatcgaagaaacatagtgtatgaattatctgcctctccctgaggtcaggggagaacaagagaaggaaagcggcagggagaactagcgatggaaagtggcgatgccgcaaatatttgctggatctagagaccagctgcggttctacggaatttgttctttgaaggttgccgtgcccctggcctgctgccatccagtgtgtataaccgtcttagttcgttttttttttgtggccacaagattgaggcgtggtcatgcagctatttcggccatgcctatcattgggagtagctgtagtccgtaggctaccgggtggttatctatgcagaatttcagaagactgcaaaataaactgtattttatctagcaataggatgtatattggcgcattcgttgatatgtatcatatagggctattcgcaaacatccaaacagagttgtttgcacatatctaataaagtatgcatttactgcatttatcactgccatgtactaaatgattgttttaaaggcattatacattacatgatctgggtaaatcttctctataattggatcttcatgctattttccagcggtgtttctatctcattacatattttacctcctatttcaaatttcactatgcaaataatactatttacaatacaaagcaatgttataaacgattggaaagcaatgttataatactatttagtgatctttctttctttttcttttcc

SEQ ID NO: 9794 - DNA, 3134 bp, Zea Mays
ggctccctccctcctcccctctcccctgtcccctctctctttctcaccgtccacgcgcgactgcgcgggacactggtcaacgccccggtggcaggcggctccgttggggggtgagtctagctccgtctgttgcgccggaataacgcggcgggtgctacctccggccctcgggttccatggggaggaacggtagcgtgaggcgctcggcgttttcgggcgccgcgggtgctgccgcggggccgccgtccttctctgtgaatcccgccgactaccggttgatggaggaggtggggtacggtgcgcacgccgtcgtgtaccgcgcgatcttcctcccgactaagggtgttgtcgcggtcaagtgcctggatctcgatcagctcaataacaacatcgatgaaatacaaagggaggctcaaataatgagcttgatagaccatcctaatgtcatcagggcttactgctcatttgttgtggagcacagcctctgggtgataatgccattcatgacagagggttcttgtttacacttaatgaagatctcataccaggaaggttttgatgagccgatcattggctccattctcaaggaaactcttaaggctctggattaccttcaccggcagggtcaaatacatcgtgatgtcaaggctggtaatatccttatcgatggtgctggggtagtgaagcttggagactttggtgtttctgcttgtatgtttgatagaggtgataggcaaagatctaggaatacatttgtaggaacaccatgctggatggctccagaagtgctccaacctggcactggatataatttcaaagctgacatatggtcatttggaatcactgctcttgaactagcacatggccatgctccattttctaaataccctcctatgaaggttcttctcatgaccctccagaatgcaccacctggtcttgattatgaacgtgacaaaagattctcaaagttgtgaccagtcatttaaagaaatggttgcaatgtgcttggtcaaagatcaaacaaagagaccaacagctgagaagttgcttaagcattcatttttcaaaaatgcaaagcctccagagttgactattaagagtatcttatctggtttacctcctctctgggaccgtgtaaaggctctccagcttaaagatgaagcacaattggctttgaagaaaatgccttcttctgaacaggaggccctctccctgagtgaatatcaacgcggcgttagtgcatggaacttcgatatcgaggatctcaaggctcaagcatcattaattcatgatgacgagcctcctgaaataaaagaagatgaggacattgcaagaaacattgaggacttgtcttcacggaaccatttgggaaagtcatttgcaaatgagtgcaattccaggcagcgagcctttgtcaccactttaaaatcggatggaaacagacccaccacgaatgaagcttttgattttgattttgattttagcgaggctgccactacaagaagggctgatggacatgaaagaaacataagagagaatgattcattgccctctacagcaaagcgagatccagagtcgaatcattggacaagtgacgttgggcagagacaactgtcttctggtgggagcaatagctcaacagctgaaaggggctatggttttgagagggatgcagttgtgcaaacaatacctgaaaaacaaagaagtgaggcgagaaaaacagcaagccttagtggtccactttcactgccaactcgtgcttctgcaaatagtctgtcagctcctattcgatcttcaggaggttttgtagattcatcaggtgacaagtccaaacgaagtgtagtagagattaaaggccgcttttcagtgacatctgagaatgtcgatcttgcaaaggttcaggaaggtccacttagtagcctctcacggaaatcaccagagggttcactgctaaaaaaatctgccagcactggtgattgtttgattaatactaagctgatgcgtaacgctaatcagctgaaggaattctgcaatagttctgtatcatcttcagtattaattccccaccttaacaaccttgtgcaacagaccatgtttcagcaggatgtaatcatgaacctacttagtaacttgcaacaggatgagaaagttgatagaacacagcctggaatatcttctcaagtccgaacgatggagaatggtaaagtggctgatacagctaactctgagaaggaacggtcattacttgttaaaatttcagaattacagtctaggatgataacactgactgatgaactaattgcagctaagacaaaacatgttcagttgcagcaagagctaaatgctttgtactaccgagaagaaattgaggatgttagggatgaggatatcgaagaaacatagtgtatgaattatctgcctctccctgagacagatcaattacccgcctctccctgaggtcaggggagaacaagagaaggaaagcggcagggagaactagcgatggaaagtggcgatgccgcaaatatttgctggatctagagaccagctgcggttctacggaatttgttctttgaaggttgccgtgcccctggcctgctgccatccagtgtgtataaccgtcttagttcgttttttttttgtggccacaagattgaggcgtggtcatgcagctatttcggccatgcctatcattgggagtagctgtagtccgtaggctaccgggtggttatctatgcagaatttcagaagactgcaaaataaactgtattttatctagcaataggatgtatattggcgcattcgttgatatgtatcatatagggctattcgcaaacatccaaacagagttgtttgcacatatctaataaagtatgcatttactgcatttatcactgccatgtactaaatgattgttttaaaggcattatacattacatgatctgggtaaatcttctctataattggatcttcatgctattttccagcggtgtttctatctcattacatattttacctcctatttcaaatttcactatgcaaataatactatttacaatacaaagcaatgttataaacgattggaaagcaatgttataatactatttagtgatctttctttctttttcttttcc

SEQ ID NO: 9795 - DNA, 1704 bp, Zea Mays
agcaacaagattggtgtaatgatggcctgcttccacttctctctttcttatgtgtatctggcaggtgatgaaagttttcatcattacattttgattgggagaatcttcgctctctctctctctctctctctctctctcctctctatatagcacgttctctatctcttttcttcttcgtattcattgttcctcctctccatctctctactatgcctgcacggactgttgttacggtgctcacatggttttgtagagcatggtatttaaacaaggctggtgtaaactttatatggagatttgaatggtttgtactagtttttggccaacctccaacatttttgaagtgttgagagcatcttcaagagtctttctaaagcccactctctaaatcgttaattagagagccatttgcacaaaaaactttttcacactccaatagttttttttgtctgagacttacgctctctagagtatttcttattttctatctaatggttagccaaaaattcatagtaaaagatggatatattcgaatgagtaattaaataagttgttggagggtaaggatatagaaagtctcttggagttgttctaagaagtaacccggtatgagttttatttcggtcttatatttcaatgtattatctttgagctacaccaagcaaaattatttgatgtgccttgtacttcatttcttcgagaaaaggcaattcatttgtcacaaacactactacttggtattattgtctgtgtgactgcgatattcatagttcaatctcttaggtctattattattttgtgctgctacttgatctttctagatagataaagtacgtacgctctagacaaggggtcttaggtttcaggctcttagctttagctatgctcttgctgcagagacgacgtcctcgaccgagaatctattactgattttttattttcaatataacgcaccgcgctaattacatactgactgcgtcattgttcgatatgatctgaagtattcatcattcagttgctgtcggttatattaattttctttaagacaggtttgcatttcatgccaaatagtaactacttcaaaaatataccgtgtgcttcgtcagtttgttacttcaatcgtcagttaaaaaatgctacatagtttgatgagacacggtggtgggagacagagacagaggcatcaaagactggaggcagcacacacgagggcattgtaaagcccacacgtccggccaggcagaggcgcctaggtaatcgattgcaaaatgattcggtccgtcgagccgggcgctcccgcgagtgtctgcatgcgcgcggccgtgtcagtgccaccgcacggaaggcgacgcgaggtctcgcatctgcatcgcacacacaccaaggtgccctaccccggcggcatctacgacgagccctggagactttttcagcggtctcgagatgcgaggcatgcggttccgcctccgacctccgtgacggacatcgtcattggagtaactccaccgcagcggcagcggcagcggcggcagcagtctctacgtttgtcgccatcgaacgcccggccggtccagccatcaatgccgcttcttggtttttggttgcgcgtaaaaaagctgttatttactagagaaaatctattcaatgccatcaaaagctataacaataccttcaatgccataaaaaatatgtgttccctttgat

SEQ ID NO: 9796 - DNA, 3241 bp, Zea Mays
gagagtggaacaggaccctattcatcagctcgggcaacaactgtagtggagccgaagctggcaaatgctaaccaaacgctcaaaactacacgggcctgcctaaacgctgcaaccctgtctttccttcttccatttccacaagacccttgcgtgctctctctctctcctcttggcgacgactgggtggcaggtgcccaggtcttcttgggacccttcgccggcgacaagcaccaccaggttcagtcatgagtgggcttctcatgagcttccctaagtgatgcttcatatgttttctaacatgtaacatctcccgatgttatccatgtactggatatatccttagaagtcagagatgcagaagtctgatcatcatgagcagaagctaacttcaccaagaggaaacaagcaactcatcaatattctcaaagcaaaaggatgttgatgatgccatcaaggattcagaaaagctgagcacacatactatcagaattgaagatgagaaatctgatttgctagggtctgaaatttattctggaaagcttacattagataacaaaacaaaaagttcatcaaatgaacagtctggatcaggatctagtagcaattgctttgatgctaggctcagcactgaagccctaatatggggttctaacatccttaagcttgaggatattgtatctgtatcatataattctggtctccggtatttcaccgtgcatgcttgtcctcttgaaaaaatatccagtggactatcctgctttatgaagcctagaagaacccaaacggacttgaagttcatacttgtcatcttgaatcctcgatctggacatggtagatctagcaaagtttttcatggaaaagtggaacccatatttaagcttgcaggtttcaagatggaagtggtaaaaactacacatgctgggcatgcaaaatctcttgtatcaactattgattttagtacctgtcctgatggtattgtatgtgtgggtggtgatggaattgtaaatgaggtcctcaatggtcttctatgcagagatgatcaaaatatgtctgcctctgtaccaataggtataatacctgctgggtctgataactcacttatttggacagtcttgggtgtcaaggatccaatttctgcagcattgtcaattgtcaggggaggtcttacacctattgatgttttttctgttgaatggattcaaagtgggactatgcattatggtacaaccgtatcatattttggttttgttagcgatgttcttgagctctcagagaagtatcagaagcattttggtcctttacgatactttgtagctggttttctcaaattcctgtgtttgccaaagtacagttttgaattggaatatcttccagtatcagatgttaatggcgccgagcataaaattttggtaggacaagaaaaggttgacgcgtctgatctatatgatgatgtaattcggagatcaagagcagaatgtttaccacgcgcctcaagtttatctagcattgattcaataatgtctacaggcatcatgtctggggcagagctggaggtttgtagtcctcgtgcaaataatgaaccttctgaggttgttcgtggacttgatccgaaatcaaagcgcttatcgttaggaagagctagtacatttaaagaaccagaagaagtgctccatccccactcccatggtacatctactcccagctggcgtagatctaagtcaaaatcaaggactgaaaaggcaaagccaggcttgtctgctacacacgatgcaaaatcttctaaggttaatgcagacaaagaggacacatcatccacaatttctgatcctggacctgtggctgtatgggattcaggaccaaagtgggacgatgaacctaaatgggataatcaacctaactgggaacccgagacttcaattgagctccatagccctcgcgaggatattgagcttggtctgactaaggagctggtacctagtttagatgaaaggtggacagttaggaaaggacgctatcttggtgtactggtgtgcaaccattcatgcaagactgtgcagagtctgagctctcaggttgttgctcccaaggctgaatatgatgacaattgtttggacctgctgttagttggtggaagtggaagactgagattactgaggtttttggtgcttttgcagtttggaaagcacatatctcttccaaatgtagaatatgtaaaggtgaaatctgtgaggctcaaagcaggcccaaatacacacgacggatgtggtatcgatggcgaactactccatgtcaaggggcaagttcgctgtagtttgttgcctcaacaatgtcaattgatgggcaggccagtgaaaaaccctgtacagtagctgtaaatacactatgcggactgtctgcagctctgaggtcagcccagaatcttgcacctgtggtgtgtacaagcggcgaaccatggattttcgtctgcatccacatgtcagtaattatattcagaagtgagaacatgaacatcctagctggcactcagctccagagatgtacatttgtggttgacgagcagaaggtgctgagtgggtgctgtttcatccatatgtaaagccaaagcctatctcggacagcagcttgttgcgcacctcttgcttttgcctttttctcgtccgatagaatgcatctactatacagccatcctgatgagtgtacttggttgctccagaacatagtgtccacctccaccagccgggtgtctttggaggttccctgatgccggccacttgatactcattgtagggacaacaccccagtgcccgtgtccttgatcagtctgttgtgtttgcgaagtgtgaataagatataggactgtttgattcccggtacagcgcagggtttcagcagaaagggctggatggatgatgttttgtggcgatgctgcctcgttgagtctttaaaacgggtgtaactcttcttcttttgtgagtcgtgatgatgtatgaaccgtgtactgatttgtaaaccttgcctggcaggcatacaactgtttctgaggtgtggtattctctgccggggaataagcagcgtagcttctcctttcgtacgctgccagcaaagcagcgctcgtgctaggaaggaaacacacggctgttcaaggcccaaggtacccagatatgctgccacccgagcttttaaaatccagaacagctgataaatggctgaatttgttgtatttattaaatgcagatgtgag

SEQ ID NO: 9797 - DNA, 3108 bp, Zea Mays
cttccatttccacaagacccttgcgtgctctctctctctcctcttggcgacgactgggtggcaggtgcccaggtcttcttgggacccttcgccggcgacaagcaccaccaggttcagtcatgagtgggcttctcatgagcttccctaagtgatgcttcatatgttttctaacatgtaacatctcccgatgttatccatgtactggatatatccttagaagtcagagatgcagaagtctgatcatcatgagcagaagctaacttcaccaagaggaaacaagcaactcatcaatattctcaaagcaaaaggatgttgatgatgccatcaaggattcagaaaagctgagcacacatactatcagaattgaagatgagaaatctgatttgctagggtctgaaatttattctggaaagcttacattagataacaaaacaaaaagttcatcaaatgaacagtctggatcaggatctagtagcaattgctttgatgctaggctcagcactgaagccctaatatggggttctaacatccttaagcttgaggatattgtatctgtatcatataattctggtctccggtatttcaccgtgcatgcttgtcctcttgaaaaaatatccagtggactatcctgctttatgaagcctagaagaacccaaacggacttgaagttcgtatcctcttctccgcacgaggcctttcggtgggttaatagttttgcggaccagcaatgttacgtaaacctgttgcctcaccccatggcatctagcaagaagcattcttctgaactcattcagtttgatgccatgtttgatccttatgttaaatgtcggtctccaccaaagatacttgtcatcttgaatcctcgatctggacatggtagatctagcaaagtttttcatggaaaagtggaacccatatttaagtatcttaggaactttggtattgtatgtgtgggtggtgatggaattgtaaatgaggtcctcaatggtcttctatgcagagatgatcaaaatatgtctgcctctgtaccaataggtataatacctgctgggtctgataactcacttatttggacagtcttgggtgtcaaggatccaatttctgcagcattgtcaattgtcaggggaggtcttacacctattgatgttttttctgttgaatggattcaaagtgggactatgcattatggtacaaccgtatcatattttggttttgttagcgatgttcttgagctctcagagaagtatcagaagcattttggtcctttacgatactttgtagctggttttctcaaattcctgtgtttgccaaagtacagttttgaattggaatatcttccagtatcagatgttaatggcgccgagcataaaattttggtaggacaagaaaaggttgacgcgtctgatctatatgatgatgtaattcggagatcaagagcagaatgtttaccacgcgcctcaagtttatctagcattgattcaataatgtctacaggcatcatgtctggggcagagctggaggtttgtagtcctcgtgcaaataatgaaccttctgaggttgttcgtggacttgatccgaaatcaaagcgcttatcgttaggaagagctagtacatttaaagaaccagaagaagtgctccatccccactcccatggtacatctactcccagctggcgtagatctaagtcaaaatcaaggactgaaaaggcaaagccaggcttgtctgctacacacgatgcaaaatcttctaaggttaatgcagacaaagaggacacatcatccacaatttctgatcctggacctgtggctgtatgggattcaggaccaaagtgggacgatgaacctaaatgggataatcaacctaactgggaacccgagacttcaattgagctccatagccctcgcgaggatattgagcttggtctgactaaggagctggtacctagtttagatgaaaggtggacagttaggaaaggacgctatcttggtgtactggtgtgcaaccattcatgcaagactgtgcagagtctgagctctcaggttgttgctcccaaggctgaatatgatgacaattgtttggacctgctgttagttggtggaagtggaagactgagattactgaggtttttggtgcttttgcagtttggaaagcacatatctcttccaaatgtagaatatgtaaaggtgaaatctgtgaggctcaaagcaggcccaaatacacacgacggatgtggtatcgatggcgaactactccatgtcaaggggcaagttcgctgtagtttgttgcctcaacaatgtcaattgatgggcaggccagtgaaaaaccctgtacagtagctgtaaatacactatgcggactgtctgcagctctgaggtcagcccagaatcttgcacctgtggtgtgtacaagcggcgaaccatggattttcgtctgcatccacatgtcagtaattatattcagaagtgagaacatgaacatcctagctggcactcagctccagagatgtacatttgtggttgacgagcagaaggtgctgagtgggtgctgtttcatccatatgtaaagccaaagcctatctcggacagcagcttgttgcgcacctcttgcttttgcctttttctcgtccgatagaatgcatctactatacagccatcctgatgagtgtacttggttgctccagaacatagtgtccacctccaccagccgggtgtctttggaggttccctgatgccggccacttgatactcattgtagggacaacaccccagtgcccgtgtccttgatcagtctgttgtgtttgcgaagtgtgaataagatataggactgtttgattcccggtacagcgcagggtttcagcagaaagggctggatggatgatgttttgtggcgatgctgcctcgttgagtctttaaaacgggtgtaactcttcttcttttgtgagtcgtgatgatgtatgaaccgtgtactgatttgtaaaccttgcctggcaggcatacaactgtttctgaggtgtggtattctctgccggggaataagcagcgtagcttctcctttcgtacgctgccagcaaagcagcgctcgtgctagtatgaacaacttacaccaggc

SEQ ID NO: 9798 - DNA, 2462 bp, Zea Mays
cttccatttccacaagacccttgcgtgctctctctctctcctcttggcgacgactgggtggcaggtgcccaggtcttcttgggacccttcgccggcgacaagcaccaccaggttcagtcatgagtgggcttctcatgagcttccctaagtgatgcttcatatgttttctaacatgtaacatctcccgatgttatccatgtactggatatatccttagaagtcagagatgcagaagtctgatcatcatgagcagaagctaacttcaccaagagggttaatccataagatacttcgtcgtacaaatagcaggcgttctcccactgcagctgaccaacaaccttctcctgtatctccagaaacaagcaactcatcaatattctcaaagcaaaaggatgttgatgatgccatcaaggattcagaaaagctgagcacacatactatcagaattgaagatgagaaatctgatttgctagggtctgaaatttattctggaaagcttacattagataacaaaacaaaaagttcatcaaatgaacagtctggatcaggatctagtagcaattgctttgatgctaggctcagcactgaagccctaatatggggttctaacatccttaagcttgaggatattgtatctgtatcatataattctggtctccggtatttcaccgtgcatgcttgtcctcttgaaaaaatatccagtggactatcctgctttatgaagcctagaagaacccaaacggacttgaagttcgtatcctcttctccgcacgaggcctttcggtgggttaatagttttgcggaccagcaatgttacgtaaacctgttgcctcaccccatggcatctagcaagaagcattcttctgaactcattcagtttgatgccatgtttgatccttatgttaaatgtcggtctccaccaaagatacttgtcatcttgaatcctcgatctggacatggtagatctagcaaagtttttcatggaaaagtggaacccatatttaagcttgcaggtttcaagatggaagtggtaaaaactacacatgctgggcatgcaaaatctcttgtatcaactattgattttagtacctgtcctgatggtattgtatgtgtgggtggtgatggaattgtaaatgaggtcctcaatggtcttctatgcagagatgatcaaaatatgtctgcctctgtaccaataggtataatacctgctgggtctgataactcacttatttggacagtcttgggtgtcaaggatccaatttctgcagcattgtcaattgtcaggggaggtcttacacctattgatgttttttctgttgaatggattcaaagtgggactatgcattatggtacaaccgtatcatattttggttttgttagcgatgttcttgagctctcagagaagtatcagaagcattttggtcctttacgatactttgtagctggttttctcaaattcctgtgtttgccaaagtacagttttgaattggaatatcttccagtatcagatgttaatggcgccgagcataaaattttggtaggacaagaaaaggttgacgcgtctgatctatatgatgatgtaattcggagatcaagagcagaatgtttaccacgcgcctcaagtttatctagcattgattcaataatgtctacaggcatcatgtctggggcagagctggaggtttgtagtcctcgtgcaaataatgaaccttctgaggttgttcgtggacttgatccgaaatcaaagcgcttatcgttaggaagagctagtacatttaaagaaccagaagaagtgctccatccccactcccatggtacatctactcccagctggcgtagatctaagtcaaaatcaaggactgaaaaggcaaagccaggcttgtctgctacacacgatgcaaaatcttctaaggttaatgcagacaaagaggacacatcatccacaatttctgatcctggacctgtggctgtatgggattcaggaccaaagtgggacgatgaacctaaatgggataatcaacctaactgggaacccgagacttcaattgagctccatagccctcgcgaggatattgagcttggtctgactaaggagctggtacctagtttagatgaaaggtggacagttaggaaaggacgctatcttggtgtactggtgtgcaaccattcatgcaagactgtgcagagtctgagctctcaggttgttgctcccaaggctgaatatgatgacaattgtttggacctgctgttagttggtggaagtggaagactgagattactgaggtttttggtgcttttgcagtttggaaagcacatatctcttccaaatgtagaatatgtaaaggcatacaactgtttctgaggtgtggtattctctgccggggaataagcagcgtagcttctcctttcgtacgctgccagcaaagcagcgctcgtgctagtatgaacaacttacaccaggc

SEQ ID NO: 9799 - DNA, 3272 bp, Zea Mays
gtctttccttcttccatttccacaagacccttgcgtgctctctctctctcctcttggcgacgactgggtggcaggtgcccaggtcttcttgggacccttcgccggcgacaagcaccaccaggttcagtcatgagtgggcttctcatgagcttccctaagtgatgcttcatatgttttctaacatgtaacatctcccgatgttatccatgtactggatatatccttagaagtcagagatgcagaagtctgatcatcatgagcagaagctaacttcaccaagagggttaatccataagatacttcgtcgtacaaatagcaggcgttctcccactgcagctgaccaacaaccttctcctgtatctccagaaacaagcaactcatcaatattctcaaagcaaaaggatgttgatgatgccatcaaggattcagaaaagctgagcacacatactatcagaattgaagatgagaaatctgatttgctagggtctgaaatttattctggaaagcttacattagataacaaaacaaaaagttcatcaaatgaacagtctggatcaggatctagtagcaattgctttgatgctaggctcagcactgaagccctaatatggggttctaacatccttaagcttgaggatattgtatctgtatcatataattctggtctccggtatttcaccgtgcatgcttgtcctcttgaaaaaatatccagtggactatcctgctttatgaagcctagaagaacccaaacggacttgaagttcgtatcctcttctccgcacgaggcctttcggtgggttaatagttttgcggaccagcaatgttacgtaaacctgttgcctcaccccatggcatctagcaagaagcattcttctgaactcattcagtttgatgccatgtttgatccttatgttaaatgtcggtctccaccaaagatacttgtcatcttgaatcctcgatctggacatggtagatctagcaaagtttttcatggaaaagtggaacccatatttaaggtttcaagatggaagtggtaaaaactacacatgctgggcatgcaaaatctcttgtatcaactattgattttagtacctgtcctgatggtattgtatgtgtgggtggtgatggaattgtaaatgaggtcctcaatggtcttctatgcagagatgatcaaaatatgtctgcctctgtaccaataggtataatacctgctgggtctgataactcacttatttggacagtcttgggtgtcaaggatccaatttctgcagcattgtcaattgtcaggggaggtcttacacctattgatgttttttctgttgaatggattcaaagtgggactatgcattatggtacaaccgtatcatattttggttttgttagcgatgttcttgagctctcagagaagtatcagaagcattttggtcctttacgatactttgtagctggttttctcaaattcctgtgtttgccaaagtacagttttgaattggaatatcttccagtatcagatgttaatggcgccgagcataaaattttggtaggacaagaaaaggttgacgcgtctgatctatatgatgatgtaattcggagatcaagagcagaatgtttaccacgcgcctcaagtttatctagcattgattcaataatgtctacaggcatcatgtctggggcagagctggaggtttgtagtcctcgtgcaaataatgaaccttctgaggttgttcgtggacttgatccgaaatcaaagcgcttatcgttaggaagagctagtacatttaaagaaccagaagaagtgctccatccccactcccatggtacatctactcccagctggcgtagatctaagtcaaaatcaaggactgaaaaggcaaagccaggcttgtctgctacacacgatgcaaaatcttctaaggttaatgcagacaaagaggacacatcatccacaatttctgatcctggacctgtggctgtatgggattcaggaccaaagtgggacgatgaacctaaatgggataatcaacctaactgggaacccgagacttcaattgagctccatagccctcgcgaggatattgagcttggtctgactaaggagctggtacctagtttagatgaaaggtggacagttaggaaaggacgctatcttggtgtactggtgtgcaaccattcatgcaagactgtgcagagtctgagctctcaggttgttgctcccaaggctgaatatgatgacaattgtttggacctgctgttagttggtggaagtggaagactgagattactgaggtttttggtgcttttgcagtttggaaagcacatatctcttccaaatgtagaatatgtaaaggtgaaatctgtgaggctcaaagcaggcccaaatacacacgacggatgtggtatcgatggcgaactactccatgtcaaggggcaagttcgctgtagtttgttgcctcaacaatgtcaattgatgggcaggccagtgaaaaaccctgtacagtagctgtaaatacactatgcggactgtctgcagctctgaggtcagcccagaatcttgcacctgtggtgtgtacaagcggcgaaccatggattttcgtctgcatccacatgtcagtaattatattcagaagtgagaacatgaacatcctagctggcactcagctccagagatgtacatttgtggttgacgagcagaaggtgctgagtgggtgctgtttcatccatatgtaaagccaaagcctatctcggacagcagcttgttgcgcacctcttgcttttgcctttttctcgtccgatagaatgcatctactatacagccatcctgatgagtgtacttggttgctccagaacatagtgtccacctccaccagccgggtgtctttggaggttccctgatgccggccacttgatactcattgtagggacaacaccccagtgcccgtgtccttgatcagtctgttgtgtttgcgaagtgtgaataagatataggactgtttgattcccggtacagcgcagggtttcagcagaaagggctggatggatgatgttttgtggcgatgctgcctcgttgagtctttaaaacgggtgtaactcttcttcttttgtgagtcgtgatgatgtatgaaccgtgtactgatttgtaaaccttgcctggcaggcatacaactgtttctgaggtgtggtattctctgccggggaataagcagcgtagcttctcctttcgtacgctgccagcaaagcagcgctcgtgctagtatgaacaacttacaccaggc

SEQ ID NO: 9800 - DNA, 3077 bp, Zea Mays
ccctgtctttccttcttccatttccacaagacccttgcgtgctctctctctctcctcttggcgacgactgggtggcaggtgcccaggtcttcttgggacccttcgccggcgacaagcaccaccagaagtcagagatgcagaagtctgatcatcatgagcagaagctaacttcaccaagagggttaatccataagatacttcgtcgtacaaatagcaggcgttctcccactgcagctgaccaacaaccttctcctgtatctccagaaacaagcaactcatcaatattctcaaagcaaaaggatgttgatgatgccatcaaggattcagaaaagctgagcacacatactatcagaattgaagatgagaaatctgatttgctagggtctgaaatttattctggaaagcttacattagataacaaaacaaaaagttcatcaaatgaacagtctggatcaggatctagtagcaattgctttgatgctaggctcagcactgaagccctaatatggggttctaacatccttaagcttgaggatattgtatctgtatcatataattctggtctccggtatttcaccgtgcatgcttgtcctcttgaaaaaatatccagtggactatcctgctttatgaagcctagaagaacccaaacggacttgaagttcgtatcctcttctccgcacgaggcctttcggtgggttaatagttttgcggaccagcaatgttacgtaaacctgttgcctcaccccatggcatctagcaagaagcattcttctgaactcattcagtttgatgccatgtttgatccttatgttaaatgtcggtctccaccaaagatacttgtcatcttgaatcctcgatctggacatggtagatctagcaaagtttttcatggaaaagtggaacccatatttaagcttgcaggtttcaagatggaagtggtaaaaactacacatgctgggcatgcaaaatctcttgtatcaactattgattttagtacctgtcctgatggtattgtatgtgtgggtggtgatggaattgtaaatgaggtcctcaatggtcttctatgcagagatgatcaaaatatgtctgcctctgtaccaataggtataatacctgctgggtctgataactcacttatttggacagtcttgggtgtcaaggatccaatttctgcagcattgtcaattgtcaggttcttgagctctcagagaagtatcagaagcattttggtcctttacgatactttgtagctggttttctcaaattcctgtgtttgccaaagtacagttttgaattggaatatcttccagtatcagatgttaatggcgccgagcataaaattttggtaggacaagaaaaggttgacgcgtctgatctatatgatgatgtaattcggagatcaagagcagaatgtttaccacgcgcctcaagtttatctagcattgattcaataatgtctacaggcatcatgtctggggcagagctggaggtttgtagtcctcgtgcaaataatgaaccttctgaggttgttcgtggacttgatccgaaatcaaagcgcttatcgttaggaagagctagtacatttaaagaaccagaagaagtgctccatccccactcccatggtacatctactcccagctggcgtagatctaagtcaaaatcaaggactgaaaaggcaaagccaggcttgtctgctacacacgatgcaaaatcttctaaggttaatgcagacaaagaggacacatcatccacaatttctgatcctggacctgtggctgtatgggattcaggaccaaagtgggacgatgaacctaaatgggataatcaacctaactgggaacccgagacttcaattgagctccatagccctcgcgaggatattgagcttggtctgactaaggagctggtacctagtttagatgaaaggtggacagttaggaaaggacgctatcttggtgtactggtgtgcaaccattcatgcaagactgtgcagagtctgagctctcaggttgttgctcccaaggctgaatatgatgacaattgtttggacctgctgttagttggtggaagtggaagactgagattactgaggtttttggtgcttttgcagtttggaaagcacatatctcttccaaatgtagaatatgtaaaggtgaaatctgtgaggctcaaagcaggcccaaatacacacgacggatgtggtatcgatggcgaactactccatgtcaaggggcaagttcgctgtagtttgttgcctcaacaatgtcaattgatgggcaggccagtgaaaaaccctgtacagtagctgtaaatacactatgcggactgtctgcagctctgaggtcagcccagaatcttgcacctgtggtgtgtacaagcggcgaaccatggattttcgtctgcatccacatgtcagtaattatattcagaagtgagaacatgaacatcctagctggcactcagctccagagatgtacatttgtggttgacgagcagaaggtgctgagtgggtgctgtttcatccatatgtaaagccaaagcctatctcggacagcagcttgttgcgcacctcttgcttttgcctttttctcgtccgatagaatgcatctactatacagccatcctgatgagtgtacttggttgctccagaacatagtgtccacctccaccagccgggtgtctttggaggttccctgatgccggccacttgatactcattgtagggacaacaccccagtgcccgtgtccttgatcagtctgttgtgtttgcgaagtgtgaataagatataggactgtttgattcccggtacagcgcagggtttcagcagaaagggctggatggatgatgttttgtggcgatgctgcctcgttgagtctttaaaacgggtgtaactcttcttcttttgtgagtcgtgatgatgtatgaaccgtgtactgatttgtaaaccttgcctggcaggcatacaactgtttctgaggtgtggtattctctgccggggaataagcagcgtagcttctcctttcgtacgctgccagcaaagcagcgctcgtgctagtatgaacaacttacaccaggc

SEQ ID NO: 9801 - DNA, 3198 bp, Zea Mays
gcaaccctgtctttccttcttccatttccacaagacccttgcgtgctctctctctctcctcttggcgacgactgggtggcaggtgcccaggtcttcttgggacccttcgccggcgacaagcaccaccaggttcagtcatgagtgggcttctcatgagcttccctaagtgatgcttcatatgttttctaacatgtaacatctcccgatgttatccatgtactggatatatccttagaagtcagagatgcagaagtctgatcatcatgagcagaagctaacttcaccaagagggttaatccataagatacttcgtcgtacaaatagcaggcgttctcccactgcagctgaccaacaaccttctcctgtatctccagaaacaagcaactcatcaatattctcaaagcaaaaggatgttgatgatgccatcaaggattcagaaaagctgagcacacatactatcagaattgaagatgagaaatctgatttgctagggtctgaaatttattctggaaagcttacattagataacaaaacaaaaagttcatcaaatgaacagtctggatcaggatctagtagcaattgctttgatgctaggctcagcactgaagccctaatatggggttctaacatccttaagcttgaggatattgtatctgtatcatataattctggtctccggtatttcaccgtgcatgcttgtcctcttgaaaaaatatccagtggactatcctgctttatgaagcctagaagaacccaaacggacttgaagttcgtatcctcttctccgcacgaggcctttcggtgggttaatagttttgcggaccagcaatgttacgtaaacctgttgcctcaccccatggcatctagcaagaagcattcttctgaactcattcagtttgatgccatgtttgatccttatgttaaatgtcggtctccaccaaagatacttgtcatcttgaatcctcgatctggacatggtagatctagcaaagtttttcatggaaaagtggaacccatatttaagcttgcaggtttcaagatggaagtggtaaaaactacacatgctgggcatgcaaaatctcttgtatcaactattgattttagtacctgtcctgatggtattgtatgtgtgggtggtgatggaattgtaaatgaggtcctcaatggtcttctatgcagagatgatcaaaatatgtctgcctctgtaccaatagggaggtcttacacctattgatgttttttctgttgaatggattcaaagtgggactatgcattatggtacaaccgtatcatattttggttttgttagcgatgttcttgagctctcagagaagtatcagaagcattttggtcctttacgatactttgtagctggttttctcaaattcctgtgtttgccaaagtacagttttgaattggaatatcttccagtatcagatgttaatggcgccgagcataaaattttggtaggacaagaaaaggttgacgcgtctgatctatatgatgatgtaattcggagatcaagagcagaatgtttaccacgcgcctcaagtttatctagcattgattcaataatgtctacaggcatcatgtctggggcagagctggaggtttgtagtcctcgtgcaaataatgaaccttctgaggttgttcgtggacttgatccgaaatcaaagcgcttatcgttaggaagagctagtacatttaaagaaccagaagaagtgctccatccccactcccatggtacatctactcccagctggcgtagatctaagtcaaaatcaaggactgaaaaggcaaagccaggcttgtctgctacacacgatgcaaaatcttctaaggttaatgcagacaaagaggacacatcatccacaatttctgatcctggacctgtggctgtatgggattcaggaccaaagtgggacgatgaacctaaatgggataatcaacctaactgggaacccgagacttcaattgagctccatagccctcgcgaggatattgagcttggtctgactaaggagctggtacctagtttagatgaaaggtggacagttaggaaaggacgctatcttggtgtactggtgtgcaaccattcatgcaagactgtgcagagtctgagctctcaggttgttgctcccaaggctgaatatgatgacaattgtttggacctgctgttagttggtggaagtggaagactgagattactgaggtttttggtgcttttgcagtttggaaagcacatatctcttccaaatgtagaatatgtaaaggtgaaatctgtgaggctcaaagcaggcccaaatacacacgacggatgtggtatcgatggcgaactactccatgtcaaggggcaagttcgctgtagtttgttgcctcaacaatgtcaattgatgggcaggccagtgaaaaaccctgtacagtagctgtaaatacactatgcggactgtctgcagctctgaggtcagcccagaatcttgcacctgtggtgtgtacaagcggcgaaccatggattttcgtctgcatccacatgtcagtaattatattcagaagtgagaacatgaacatcctagctggcactcagctccagagatgtacatttgtggttgacgagcagaaggtgctgagtgggtgctgtttcatccatatgtaaagccaaagcctatctcggacagcagcttgttgcgcacctcttgcttttgcctttttctcgtccgatagaatgcatctactatacagccatcctgatgagtgtacttggttgctccagaacatagtgtccacctccaccagccgggtgtctttggaggttccctgatgccggccacttgatactcattgtagggacaacaccccagtgcccgtgtccttgatcagtctgttgtgtttgcgaagtgtgaataagatataggactgtttgattcccggtacagcgcagggtttcagcagaaagggctggatggatgatgttttgtggcgatgctgcctcgttgagtctttaaaacgggtgtaactcttcttcttttgtgagtcgtgatgatgtatgaaccgtgtactgatttgtaaaccttgcctggcaggcatacaactgtttctgaggtgtggtattctctgccggggaataagcagcgtagcttctcctttcgtacgctgccagcaaagcagcgctcgtgctagtatgaacaacttacaccaggc

SEQ ID NO: 9802 - DNA, 3084 bp, Zea Mays
cacgggcctgcctaaacgctgcaaccctgtctttccttcttccatttccacaagacccttgcgtgctctctctctctcctcttggcgacgactgggtggcaggtgcccaggtcttcttgggacccttcgccggcgacaagcaccaccaggttcagtcatgagtgggcttctcatgagcttccctaagtgatgcttcatatgttttctaacatgtaacatctcccgatgttatccatgtactggatatatccttagaagtcagagatgcagaagtctgatcatcatgagcagaagctaacttcaccaagagggttaatccataagatacttcgtcgtacaaatagcaggcgttctcccactgcagctgaccaacaaccttctcctgtatctccagaaacaagcaactcatcaatattctcaaagcaaaaggatgttgatgatgccatcaaggattcagaaaagctgagcacacatactatcagaattgaagatgagaaatctgatttgctagggtctgaaatttattctggaaagcttacattagataacaaaacaaaaagttcatcaaatgaacagtctggatcaggatctagtagcaattgctttgatgctaggctcagcactgaagccctaatatggggttctaacatccttaagcttgaggatattgtatctgtatcatataattctggtctccggtatttcaccgtgcatgcttgtcctcttgaaaaaatatccagtggactatcctgctttatgaagcctagaagaacccaaacggacttgaagttcgtatcctcttctccgcacgaggcctttcgcttgcaggtttcaagatggaagtggtaaaaactacacatgctgggcatgcaaaatctcttgtatcaactattgattttagtacctgtcctgatggtattgtatgtgtgggtggtgatggaattgtaaatgaggtcctcaatggtcttctatgcagagatgatcaaaatatgtctgcctctgtaccaataggtataatacctgctgggtctgataactcacttatttggacagtcttgggtgtcaaggatccaatttctgcagcattgtcaattgtcaggggaggtcttacacctattgatgttttttctgttgaatggattcaaagtgggactatgcattatggtacaaccgtatcatattttggttttgttagcgatgttcttgagctctcagagaagtatcagaagcattttggtcctttacgatactttgtagctggttttctcaaattcctgtgtttgccaaagtacagttttgaattggaatatcttccagtatcagatgttaatggcgccgagcataaaattttggtaggacaagaaaaggttgacgcgtctgatctatatgatgatgtaattcggagatcaagagcagaatgtttaccacgcgcctcaagtttatctagcattgattcaataatgtctacaggcatcatgtctggggcagagctggaggtttgtagtcctcgtgcaaataatgaaccttctgaggttgttcgtggacttgatccgaaatcaaagcgcttatcgttaggaagagctagtacatttaaagaaccagaagaagtgctccatccccactcccatggtacatctactcccagctggcgtagatctaagtcaaaatcaaggactgaaaaggcaaagccaggcttgtctgctacacacgatgcaaaatcttctaaggttaatgcagacaaagaggacacatcatccacaatttctgatcctggacctgtggctgtatgggattcaggaccaaagtgggacgatgaacctaaatgggataatcaacctaactgggaacccgagacttcaattgagctccatagccctcgcgaggatattgagcttggtctgactaaggagctggtacctagtttagatgaaaggtggacagttaggaaaggacgctatcttggtgtactggtgtgcaaccattcatgcaagactgtgcagagtctgagctctcaggttgttgctcccaaggctgaatatgatgacaattgtttggacctgctgttagttggtggaagtggaagactgagattactgaggtttttggtgcttttgcagtttggaaagcacatatctcttccaaatgtagaatatgtaaaggtgaaatctgtgaggctcaaagcaggcccaaatacacacgacggatgtggtatcgatggcgaactactccatgtcaaggggcaagttcgctgtagtttgttgcctcaacaatgtcaattgatgggcaggccagtgaaaaaccctgtacagtagctgtaaatacactatgcggactgtctgcagctctgaggtcagcccagaatcttgcacctgtggtgtgtacaagcggcgaaccatggattttcgtctgcatccacatgtcagtaattatattcagaagtgagaacatgaacatcctagctggcactcagctccagagatgtacatttgtggttgacgagcagaaggtgctgagtgggtgctgtttcatccatatgtaaagccaaagcctatctcggacagcagcttgttgcgcacctcttgcttttgcctttttctcgtccgatagaatgcatctactatacagccatcctgatgagtgtacttggttgctccagaacatagtgtccacctccaccagccgggtgtctttggaggttccctgatgccggccacttgatactcattgtagggacaacaccccagtgcccgtgtccttgatcagtctgttgtgtttgcgaagtgtgaataagatataggactgtttgattcccggtacagcgcagggtttcagcagaaagggctggatggatgatgttttgtggcgatgctgcctcgttgagtctttaaaacgggtgtaactcttcttcttttgtgagtcgtgatgatgtatgaaccgtgtactgatttgtaaaccttgcctggcaggcatacaactgtttctgaggtgtggtattctctgccggggaataagcagcgtagcttctcctttcgtacgctgccagcaaagcagcgctcgtgctagtatgaacaacttacaccaggc

SEQ ID NO: 9803 - DNA, 3128 bp, Zea Mays
ctcaaaactacacgggcctgcctaaacgctgcaaccctgtctttccttcttccatttccacaagacccttgcgtgctctctctctctcctcttggcgacgactgggtggcaggtgcccaggtcttcttgggacccttcgccggcgacaagcaccaccaggttcagtcatgagtgggcttctcatgagcttccctaagtgatgcttcatatgttttctaacatgtaacatctcccgatgttatccatgtactggatatatccttagaagtcagagatgcagaagtctgatcatcatgagcagaagctaacttcaccaagagggttaatccataagatacttcgtcgtacaaatagcaggcgttctcccactgcagctgaccaacaaccttctcctgtatctccagaaacaagcaactcatcaatattctcaaagcaaaaggatgttgatgatgccatcaaggattcagaaaagctgagcacacatactatcagaattgaagatgagaaatctgatttgctagggtctgaaatttattctggaaagcttacattagataacaaaacaaaaagttcatcaaatgaacagtctggatcaggatctagtagcaattgctttgatgctaggctcagcactgaagccctaatatggggttctaacatccttaagcttgaggatattgtatctgtatcatataattctggtctccggtatttcaccgtgcatgcttgtcctcttgaaaaaatatccagtggactatcctgctttatgaagcctagaagaacccaaacggacttgaagttcgtatcctcttctccgcacgaggcctttcggtgggttaatagttttgcggaccagcaatgttacgtaaacctgttgcctcaccccatggcatctagcaagaagcattcttctgaactcattcagtttgatgccatgtttgatccttatgttaaatgtcggtctccaccaaagatacttgtcatcttgaatcctcgatctggacatggtagatctagcaaagtttttcatggaaaagtggaacccatatttaagcttgcaggtttcaagatggaagtggtaaaaactacacatgctgggcatgcaaaatctcttgtatcaactattgattttagtacctgtcctgatggtattgtatgtgtgggtggtgatggaattgtaaatgaggtcctcaatggtcttctatgcagagatgatcaaaatatgtctgcctctgtaccaatagttcttgagctctcagagaagtatcagaagcattttggtcctttacgatactttgtagctggttttctcaaattcctgtgtttgccaaagtacagttttgaattggaatatcttccagtatcagatgttaatggcgccgagcataaaattttggtaggacaagaaaaggttgacgcgtctgatctatatgatgatgtaattcggagatcaagagcagaatgtttaccacgcgcctcaagtttatctagcattgattcaataatgtctacaggcatcatgtctggggcagagctggaggtttgtagtcctcgtgcaaataatgaaccttctgaggttgttcgtggacttgatccgaaatcaaagcgcttatcgttaggaagagctagtacatttaaagaaccagaagaagtgctccatccccactcccatggtacatctactcccagctggcgtagatctaagtcaaaatcaaggactgaaaaggcaaagccaggcttgtctgctacacacgatgcaaaatcttctaaggttaatgcagacaaagaggacacatcatccacaatttctgatcctggacctgtggctgtatgggattcaggaccaaagtgggacgatgaacctaaatgggataatcaacctaactgggaacccgagacttcaattgagctccatagccctcgcgaggatattgagcttggtctgactaaggagctggtacctagtttagatgaaaggtggacagttaggaaaggacgctatcttggtgtactggtgtgcaaccattcatgcaagactgtgcagagtctgagctctcaggttgttgctcccaaggctgaatatgatgacaattgtttggacctgctgttagttggtggaagtggaagactgagattactgaggtttttggtgcttttgcagtttggaaagcacatatctcttccaaatgtagaatatgtaaaggtgaaatctgtgaggctcaaagcaggcccaaatacacacgacggatgtggtatcgatggcgaactactccatgtcaaggggcaagttcgctgtagtttgttgcctcaacaatgtcaattgatgggcaggccagtgaaaaaccctgtacagtagctgtaaatacactatgcggactgtctgcagctctgaggtcagcccagaatcttgcacctgtggtgtgtacaagcggcgaaccatggattttcgtctgcatccacatgtcagtaattatattcagaagtgagaacatgaacatcctagctggcactcagctccagagatgtacatttgtggttgacgagcagaaggtgctgagtgggtgctgtttcatccatatgtaaagccaaagcctatctcggacagcagcttgttgcgcacctcttgcttttgcctttttctcgtccgatagaatgcatctactatacagccatcctgatgagtgtacttggttgctccagaacatagtgtccacctccaccagccgggtgtctttggaggttccctgatgccggccacttgatactcattgtagggacaacaccccagtgcccgtgtccttgatcagtctgttgtgtttgcgaagtgtgaataagatataggactgtttgattcccggtacagcgcagggtttcagcagaaagggctggatggatgatgttttgtggcgatgctgcctcgttgagtctttaaaacgggtgtaactcttcttcttttgtgagtcgtgatgatgtatgaaccgtgtactgatttgtaaaccttgcctggcaggcatacaactgtttctgaggtgtggtattctctgccggggaataagcagcgtagcttctcctttcgtacgctgccagcaaagcagcgctcgtgctagtatgaacaacttacaccaggc

SEQ ID NO: 9804 - DNA, 3051 bp, Zea Mays
aaacgctcaaaactacacgggcctgcctaaacgctgcaaccctgtctttccttcttccatttccacaagacccttgcgtgctctctctctctcctcttggcgacgactgggtggcaggtgcccaggtcttcttgggacccttcgccggcgacaagcaccaccaggttcagtcatgagtgggcttctcatgagcttccctaagtgatgcttcatatgttttctaacatgtaacatctcccgatgttatccatgtactggatatatccttagaagtcagagatgcagaagtctgatcatcatgagcagaagctaacttcaccaagagggttaatccataagatacttcgtcgtacaaatagcaggcgttctcccactgcagctgaccaacaaccttctcctgtatctccagaaacaagcaactcatcaatattctcaaagcaaaaggatgttgatgatgccatcaaggattcagaaaagctgagcacacatactatcagaattgaagatgagaaatctgatttgctagggtctgaaatttattctggaaagcttacattagataacaaaacaaaaagttcatcaaatgaacagtctggatcaggatctagtagcaattgctttgatgctaggctcagcactgaagccctaatatggggttctaacatccttaagcttgaggatattgtatctgtatcatataattctggtctccggtatttcaccgtgcatgcttgtcctcttgaaaaaatatccagtggactatcctgctttatgaagcctagaagaacccaaacggacttgaagttcatacttgtcatcttgaatcctcgatctggacatggtagatctagcaaagtttttcatggaaaagtggaacccatatttaagcttgcaggtttcaagatggaagtggtaaaaactacacatgctgggcatgcaaaatctcttgtatcaactattgattttagtacctgtcctgatggtattgtatgtgtgggtggtgatggaattgtaaatgaggtcctcaatggtcttctatgcagagatgatcaaaatatgtctgcctctgtaccaataggtataatacctgctgggtctgataactcacttatttggacagtcttgggtgtcaaggatccaatttctgcagcattgtcaattgtcaggttcttgagctctcagagaagtatcagaagcattttggtcctttacgatactttgtagctggttttctcaaattcctgtgtttgccaaagtacagttttgaattggaatatcttccagtatcagatgttaatggcgccgagcataaaattttggtaggacaagaaaaggttgacgcgtctgatctatatgatgatgtaattcggagatcaagagcagaatgtttaccacgcgcctcaagtttatctagcattgattcaataatgtctacaggcatcatgtctggggcagagctggaggtttgtagtcctcgtgcaaataatgaaccttctgaggttgttcgtggacttgatccgaaatcaaagcgcttatcgttaggaagagctagtacatttaaagaaccagaagaagtgctccatccccactcccatggtacatctactcccagctggcgtagatctaagtcaaaatcaaggactgaaaaggcaaagccaggcttgtctgctacacacgatgcaaaatcttctaaggttaatgcagacaaagaggacacatcatccacaatttctgatcctggacctgtggctgtatgggattcaggaccaaagtgggacgatgaacctaaatgggataatcaacctaactgggaacccgagacttcaattgagctccatagccctcgcgaggatattgagcttggtctgactaaggagctggtacctagtttagatgaaaggtggacagttaggaaaggacgctatcttggtgtactggtgtgcaaccattcatgcaagactgtgcagagtctgagctctcaggttgttgctcccaaggctgaatatgatgacaattgtttggacctgctgttagttggtggaagtggaagactgagattactgaggtttttggtgcttttgcagtttggaaagcacatatctcttccaaatgtagaatatgtaaaggtgaaatctgtgaggctcaaagcaggcccaaatacacacgacggatgtggtatcgatggcgaactactccatgtcaaggggcaagttcgctgtagtttgttgcctcaacaatgtcaattgatgggcaggccagtgaaaaaccctgtacagtagctgtaaatacactatgcggactgtctgcagctctgaggtcagcccagaatcttgcacctgtggtgtgtacaagcggcgaaccatggattttcgtctgcatccacatgtcagtaattatattcagaagtgagaacatgaacatcctagctggcactcagctccagagatgtacatttgtggttgacgagcagaaggtgctgagtgggtgctgtttcatccatatgtaaagccaaagcctatctcggacagcagcttgttgcgcacctcttgcttttgcctttttctcgtccgatagaatgcatctactatacagccatcctgatgagtgtacttggttgctccagaacatagtgtccacctccaccagccgggtgtctttggaggttccctgatgccggccacttgatactcattgtagggacaacaccccagtgcccgtgtccttgatcagtctgttgtgtttgcgaagtgtgaataagatataggactgtttgattcccggtacagcgcagggtttcagcagaaagggctggatggatgatgttttgtggcgatgctgcctcgttgagtctttaaaacgggtgtaactcttcttcttttgtgagtcgtgatgatgtatgaaccgtgtactgatttgtaaaccttgcctggcaggcatacaactgtttctgaggtgtggtattctctgccggggaataagcagcgtagcttctcctttcgtacgctgccagcaaagcagcgctcgtgctagtatgaacaacttacaccaggc

SEQ ID NO: 9805 - DNA, 3146 bp, Zea Mays
attcatcagctcgggcaacaactgtagtggagccgaagctggcaaatgctaaccaaacgctcaaaactacacgggcctgcctaaacgctgcaaccctgtctttccttcttccatttccacaagacccttgcgtgctctctctctctcctcttggcgacgactgggtggcaggtgcccaggtcttcttgggacccttcgccggcgacaagcaccaccaggttcagtcatgagtgggcttctcatgagcttccctaagtgatgcttcatatgttttctaacatgtaacatctcccgatgttatccatgtactggatatatccttagaagtcagagatgcagaagtctgatcatcatgagcagaagctaacttcaccaagagggttaatccataagatacttcgtcgtacaaatagcaggcgttctcccactgcagctgaccaacaaccttctcctgtatctccagaaacaagcaactcatcaatattctcaaagcaaaaggatgttgatgatgccatcaaggattcagaaaagctgagcacacatactatcagaattgaagatgagaaatctgatttgctagggtctgaaatttattctggaaagcttacattagataacaaaacaaaaagttcatcaaatgaacagtctggatcaggatctagtagcaattgctttgatgctaggctcagcactgaagccctaatatggggttctaacatccttaagcttgaggatattgtatctgtatcatataattctggtctccggtatttcaccgtgcatgcttgtcctcttgaaaaaatatccagtggactatcctgctttatgaagcctagaagaacccaaacggacttgaagttcgtatcctcttctccgcacgaggcctttcggtttcaagatggaagtggtaaaaactacacatgctgggcatgcaaaatctcttgtatcaactattgattttagtacctgtcctgatggtattgtatgtgtgggtggtgatggaattgtaaatgaggtcctcaatggtcttctatgcagagatgatcaaaatatgtctgcctctgtaccaataggtataatacctgctgggtctgataactcacttatttggacagtcttgggtgtcaaggatccaatttctgcagcattgtcaattgtcaggggaggtcttacacctattgatgttttttctgttgaatggattcaaagtgggactatgcattatggtacaaccgtatcatattttggttttgttagcgatgttcttgagctctcagagaagtatcagaagcattttggtcctttacgatactttgtagctggttttctcaaattcctgtgtttgccaaagtacagttttgaattggaatatcttccagtatcagatgttaatggcgccgagcataaaattttggtaggacaagaaaaggttgacgcgtctgatctatatgatgatgtaattcggagatcaagagcagaatgtttaccacgcgcctcaagtttatctagcattgattcaataatgtctacaggcatcatgtctggggcagagctggaggtttgtagtcctcgtgcaaataatgaaccttctgaggttgttcgtggacttgatccgaaatcaaagcgcttatcgttaggaagagctagtacatttaaagaaccagaagaagtgctccatccccactcccatggtacatctactcccagctggcgtagatctaagtcaaaatcaaggactgaaaaggcaaagccaggcttgtctgctacacacgatgcaaaatcttctaaggttaatgcagacaaagaggacacatcatccacaatttctgatcctggacctgtggctgtatgggattcaggaccaaagtgggacgatgaacctaaatgggataatcaacctaactgggaacccgagacttcaattgagctccatagccctcgcgaggatattgagcttggtctgactaaggagctggtacctagtttagatgaaaggtggacagttaggaaaggacgctatcttggtgtactggtgtgcaaccattcatgcaagactgtgcagagtctgagctctcaggttgttgctcccaaggctgaatatgatgacaattgtttggacctgctgttagttggtggaagtggaagactgagattactgaggtttttggtgcttttgcagtttggaaagcacatatctcttccaaatgtagaatatgtaaaggtgaaatctgtgaggctcaaagcaggcccaaatacacacgacggatgtggtatcgatggcgaactactccatgtcaaggggcaagttcgctgtagtttgttgcctcaacaatgtcaattgatgggcaggccagtgaaaaaccctgtacagtagctgtaaatacactatgcggactgtctgcagctctgaggtcagcccagaatcttgcacctgtggtgtgtacaagcggcgaaccatggattttcgtctgcatccacatgtcagtaattatattcagaagtgagaacatgaacatcctagctggcactcagctccagagatgtacatttgtggttgacgagcagaaggtgctgagtgggtgctgtttcatccatatgtaaagccaaagcctatctcggacagcagcttgttgcgcacctcttgcttttgcctttttctcgtccgatagaatgcatctactatacagccatcctgatgagtgtacttggttgctccagaacatagtgtccacctccaccagccgggtgtctttggaggttccctgatgccggccacttgatactcattgtagggacaacaccccagtgcccgtgtccttgatcagtctgttgtgtttgcgaagtgtgaataagatataggactgtttgattcccggtacagcgcagggtttcagcagaaagggctggatggatgatgttttgtggcgatgctgcctcgttgagtctttaaaacgggtgtaactcttcttcttttgtgagtcgtgatgatgtatgaaccgtgtactgatttgtaaaccttgcctggcaggcatacaactgtttctgaggtgtggtattctctgccggggaataagcagcgtagcttctcctttcgtacgctgccagcaaagcagcgctcgtgctagtatgaacaacttacaccaggc

SEQ ID NO: 9806 - DNA, 579 bp, Zea Mays
aagaagcttcctttcctctaataacgccaacttaatctgtgattaacttctccctttggtgaaggggaagatgaagggccagagagagagagagagagagagagagagagagagagagagagagagagagagagagagagagagagagaactgggaaggtattcatcagttccttcaggggcaagctctaattattcggcgagcttaggagtcacgtctcggcatgtgattcggtatcggaggcttgaagaggacaaagccacgaagggaaaaaaaaagatacatacatgcttagatggtctccactctccagcaacacacgggaccatacgtgtttagctggaccatcatcgatcaccgtgtctcaccggcacgcagtaggtgtgctgcgacctgcatgcgatggtggaccatgcatagtcgctatcctctccggtcaggtgtgtaaagatgtgttgttttaaattatattatgacgtgacattggtgtctgaagagtcgaaatcgctactgattgctgttagagcttagagtctgaagggtgtagttagcggaagtgtaaaaattaatgtttggcta

SEQ ID NO: 9807 - DNA, 5424 bp, Zea Mays
atgacgatggagatgttgtctgagatcctagcgaagttggaagatttgagcgctcagtggccgagtggcgcagccgtgctgagccatcgttcatcgactccatcctcctgtacatatcgccgacaccgtggattctggacgagagtgccgcacctccatggtctccaacaacgagtcagcgatggcaggtggtctccttgccatcgcccacgtgttacccaccctgggctacacgcctacaccacaagtcatcaactccgcggttctcattacctcctccgagcacgccgaggtgatgcaccccaactgtttgacgccgagcctgcatcctcgccgccaactccgacgactgcgagctcgaggtcgcgatctccaccaccagcatggacatcatccccgctgtacccgtcgccggctctaacaaccaagaaccaccctcagcctctgctccctcacaagtcacagcacgtcaaccttgctgaagcctatgcctctaccaagcttgtccaggtgatgcccgctaggtgtttgatgccgggtcatggatgcagcctgtgtgttccaatgccagtacgcaagtcatccaccgtactgactttacctgcagttctgccctgtcttggcaccatcccttgcaatgcacacaaggtgtccgaggtaatgcctgtcagcccctatgttctcttagtgactgttagtgagtcacatggcatttcccaacatgtcatcaatgaggtgggcgagttagtcagtgatcaacacactatacagtgaatttctgccatggattaggaagtttaaccccaaagcgtccatggctttttatgcactgaagtttctgtgctttgccatgacctacaacagcaacagtcaccttctttcaagggtcattgcatagaaagcaaatctaagctgctatcattgctattggttatttctagagtggctgtgcatcgactgttaattgactggcaaagcaaccatggccaccacctggtctagtggagatttggagcagtaacacagtggttactccaaccaacaccatggcaaatgttaaattgctgtcaagttattatacatctccaatgcaaaacggaagcgctccagttatgtgttttttgtgggcctgcaaggtcagagagattgctacttgtgaaacatattcatggcaaaatctgcaaataccagaggcatccagagaactgtgaactgtttgtcatagtagacaccttaatggatgctgtgaaatgtttcaatcaaacaactatgccgttctttggtgcctgatatattgcaacttaaaagccagaggcctattctttactctgctaaggactgtcacctgaactgatgatgttcaattcaagtgatcagttcttttttcagtggcattacaagagaagctgcagctgtcatggagtgtgccaggcacaaccgaattttggtattgccctaactcatctcagatactgtgacacaaatgctggtattttgcttgattttgttggcagctttgagcatcatgaatgcaagtgtctgggaatcgcttatgtaagaggagaatcaattaccgaaaattcagagcaacaaaagggtctcgcacatgatgggatatccatgctgtgtgtttcagattggtcagcttcagtgctcatatattatgatccattgagaggtctagtgttggcctgagaagtgacacatatcatgagaaggcgtgctcctcaccgacaaggactaaaaatagtatatgctaaatggaacatcgagatataatttttttctcgaacgcgcaggagagctgcacatcattatattaaggagaaaaggtccaaaatggacaaaaaccgacacaatagtgatcatctgttacacaaagaaaaggcgaccacacacaccactctactccggccagatggcagcaaggcccttggcaccatttgacccaagtaacatacagcaacatttgacccaagtttactgctgggacaagcatatgccacccaatatatggtggttaacctggaaggattctcggatcttcagaaaagggttgtggaaaactaactaaaccaagttagcactttaattgattttgtagtgcagacccagttgtccaactaagttttatttcactcctttagatgggtggtggagtactcaagtatacctagttttggaattcctctctagtctaacaagcatttgggtttgagtaaatgatatttatctattctatgttttgttttgttttttgacactttggttcatgtcttgttctggtgtttttcagctttcattctgttagagtgttatttacgttgctgtgtatatctcccttgtaatgggccttggcctacaacactcaactatatatatacactcccaagcctggttagggttagggtttcactctccaactcattcagtacatctcaataaacgatataattatcagaaaaaggtttgtgcttaacttaggaaaaaagaacaaggaaaataggctactaatttatctgaagtaacagaaagggatgtgagttctatagagtttatgtagagatatatcattgttttcaacgtttttggtagatttgcaaatcagtgtaatacaattaagaatgctactgagtaactcctaacatttaatactctttctgagatgctgattaacgacattgaggtgagtggattattatcctattatattgaacaatccttctgtcagcgtactcagcttgcaccatatcacatccaacattatttaggccagtaaccaaattctcataggacatgtattgcttccttcttttgtaaagcagcttatgtagtctttggtacataatgcaagttatgtcgggtgaagcaaggataaactatttgaaggatatatccttttgactatgattgaaagggtgggctgtattgtttgatgtgacctgtgtataacataaaataaggaggatgactatgtgaaacttaagtataatagtttctggactttgattcttatccagcaagttgagtgactagagatcctgtgcttacttgtgatctcttcaagacatcactactattttcattagaatcaattgtacattcactctaatataatgttgctcactgcttccagaattctgtttctgaatgccaagcatgtggtacaaaatttaggagcatatgacctgtaaagagtcaatccagataataatgatcagatgcaattattctcttcgatatgacgacgtgtttactatgattcattcatatttgatattgcattccgttctaaggaaaagagcttacacttcatttgtttcaatccaaatgtttatttcaggtgaaaaatcttaaggctggcatctgctgtttgagatttttttggctcatatcataactatgctattttactcctgtaggcccaacttggtgagaatcttcccgttctgggctatgcagtaatggtcaaaaggttttctttaatggttatatatcatgctcgctctgattggcagtcatcgtcatggctgagcggaagagaatccattctcctgagatgtgatacttttgttgagtttggctttttgaaaaggggaatcaaactgattcctcaaaagctaccttgtactcaactgagtttcaagtatttggaaaacttgccgttctattatcgtttcctatttgaactcagtttggagttgcactgggaggatttgtgtgctttgggcttggagaacatgataccagtggctgttacctattgcttaaagtatctggacgggtcaaacaaaatggatattatctggaagagttctaatgccctgcgggtttggtttgctcactgaatcattaagcatgcatgactgtcttccagagtagtgcaccagtaactaagcagcatattcaggtgaactggacttctgactggcactgtgacattttggtcgctttgtgtttggtctgtaaggacagtctcactcaagtgtgtgctttaggtgatggtaccttttgtgaaaccatggggaacctttgcagtaaaaccatgatagcattgaagaatggcgttttaacccaaccagaagggaggtcactgctcagatctgatggtcacatgggcaggatatcctcatttggctacggccaaattttgtgagtcgtttgaaacttcagaggtgtcaaatacagcaaccacttggagattaaagccgatgtttgagtttggtgaattgctttggtccagctcaaatatacctgtgcagttgtgcgtcagtgtctgtttagttcccacgccaatggtcagctctgcaatttgctcacctttctggaaaatgctgggtgatgtacatcaacatttctatgtcagattggtatggttgtgctgtaaccactgccatcctggttagtggtgccagatattgcagtgtaaacaactactacatatgttctgatggcatcaggagacctgtatcatcgggcgtacaactcccacacagacacagcagggccagccaaattggctggctcactttgattgtggggcgttgaagcattgttgtcaacagttggtcctagcttcacttgctggataggtgctgattcaaaaggtcgttgtagtgcagcatatagtagctttgtacaaccgcacaagggcagggattatggaggggcccaacagttggcaaagcttaacatgtcgagccaatgacagctcccgaccttggacaagaacaatcttggaggtttgctgcggcagaaatggtcctcccaggcacacagcgcaaagccagtgcagtgctgtcgttttcttccgggaaagaagcttcctttcctctaataacgccaacttaatctgtgattaacttctccctttggtgaaggggaagatgaagggccagagagagagagagagagagagagagagagagagagagagagagagagagagagagagagagagagagaactgggaaggtattcatcagttccttcaggggcaagctctaattattcggcgagcttaggagtcacgtctcggcatgtgattcggtatcggaggtacgagaggcttgtggtggctaaccatggcttgaagaggacaaagccacgaagggaaaaaaaaagatacatacatgcttagatggtctccactctccagcaacacacgggaccatacgtgtttagctggaccatcatcgatcaccgtgtctcaccggcacgcagtaggtgtgctgcgacctgcatgcgatggtggaccatgcatagtcgctatcctctccggtcaggtgtgtaaagatgtgttgttttaaattatattatgacgtgacattggtgtctgaagagtcgaaatcgctactgattgctgttagagcttagagtctgaagggtgtagttagcggaagtgtaaaaattaatgtttggcta

SEQ ID NO: 9808 - DNA, 5398 bp, Zea Mays
atgacgatggagatgttgtctgagatcctagcgaagttggaagatttgagcgctcagtggccgagtggcgcagccgtgctgagccatcgttcatcgactccatcctcctgtacatatcgccgacaccgtggattctggacgagagtgccgcacctccatggtctccaacaacgagtcagcgatggcaggtggtctccttgccatcgcccacgtgttacccaccctgggctacacgcctacaccacaagtcatcaactccgcggttctcattacctcctccgagcacgccgaggtgatgcaccccaactgtttgacgccgagcctgcatcctcgccgccaactccgacgactgcgagctcgaggtcgcgatctccaccaccagcatggacatcatccccgctgtacccgtcgccggctctaacaaccaagaaccaccctcagcctctgctccctcacaagtcacagcacgtcaaccttgctgaagcctatgcctctaccaagcttgtccaggtgatgcccgctaggtgtttgatgccgggtcatggatgcagcctgtgtgttccaatgccagtacgcaagtcatccaccgtactgactttacctgcagttctgccctgtcttggcaccatcccttgcaatgcacacaaggtgtccgaggtaatgcctgtcagcccctatgttctcttagtgactgttagtgagtcacatggcatttcccaacatgtcatcaatgaggtgggcgagttagtcagtgatcaacacactatacagtgaatttctgccatggattaggaagtttaaccccaaagcgtccatggctttttatgcactgaagtttctgtgctttgccatgacctacaacagcaacagtcaccttctttcaagggtcattgcatagaaagcaaatctaagctgctatcattgctattggttatttctagagtggctgtgcatcgactgttaattgactggcaaagcaaccatggccaccacctggtctagtggagatttggagcagtaacacagtggttactccaaccaacaccatggcaaatgttaaattgctgtcaagttattatacatctccaatgcaaaacggaagcgctccagttatgtgttttttgtgggcctgcaaggtcagagagattgctacttgtgaaacatattcatggcaaaatctgcaaataccagaggcatccagagaactgtgaactgtttgtcatagtagacaccttaatggatgctgtgaaatgtttcaatcaaacaactatgccgttctttggtgcctgatatattgcaacttaaaagccagaggcctattctttactctgctaaggactgtcacctgaactgatgatgttcaattcaagtgatcagttcttttttcagtggcattacaagagaagctgcagctgtcatggagtgtgccaggcacaaccgaattttggtattgccctaactcatctcagatactgtgacacaaatgctggtattttgcttgattttgttggcagctttgagcatcatgaatgcaagtgtctgggaatcgcttatgtaagaggagaatcaattaccgaaaattcagagcaacaaaagggtctcgcacatgatgggatatccatgctgtgtgtttcagattggtcagcttcagtgctcatatattatgatccattgagaggtctagtgttggcctgagaagtgacacatatcatgagaaggcgtgctcctcaccgacaaggactaaaaatagtatatgctaaatggaacatcgagatataatttttttctcgaacgcgcaggagagctgcacatcattatattaaggagaaaaggtccaaaatggacaaaaaccgacacaatagtgatcatctgttacacaaagaaaaggcgaccacacacaccactctactccggccagatggcagcaaggcccttggcaccatttgacccaagtttactgctgggacaagcatatgccacccaatatatggtggttaacctggaaggattctcggatcttcagaaaagggttgtggaaaactaactaaaccaagttagcactttaattgattttgtagtgcagacccagttgtccaactaagttttatttcactcctttagatgggtggtggagtactcaagtatacctagttttggaattcctctctagtctaacaagcatttgggtttgagtaaatgatatttatctattctatgttttgttttgttttttgacactttggttcatgtcttgttctggtgtttttcagctttcattctgttagagtgttatttacgttgctgtgtatatctcccttgtaatgggccttggcctacaacactcaactatatatatacactcccaagcctggttagggttagggtttcactctccaactcattcagtacatctcaataaacgatataattatcagaaaaaggtttgtgcttaacttaggaaaaaagaacaaggaaaataggctactaatttatctgaagtaacagaaagggatgtgagttctatagagtttatgtagagatatatcattgttttcaacgtttttggtagatttgcaaatcagtgtaatacaattaagaatgctactgagtaactcctaacatttaatactctttctgagatgctgattaacgacattgaggtgagtggattattatcctattatattgaacaatccttctgtcagcgtactcagcttgcaccatatcacatccaacattatttaggccagtaaccaaattctcataggacatgtattgcttccttcttttgtaaagcagcttatgtagtctttggtacataatgcaagttatgtcgggtgaagcaaggataaactatttgaaggatatatccttttgactatgattgaaagggtgggctgtattgtttgatgtgacctgtgtataacataaaataaggaggatgactatgtgaaacttaagtataatagtttctggactttgattcttatccagcaagttgagtgactagagatcctgtgcttacttgtgatctcttcaagacatcactactattttcattagaatcaattgtacattcactctaatataatgttgctcactgcttccagaattctgtttctgaatgccaagcatgtggtacaaaatttaggagcatatgacctgtaaagagtcaatccagataataatgatcagatgcaattattctcttcgatatgacgacgtgtttactatgattcattcatatttgatattgcattccgttctaaggaaaagagcttacacttcatttgtttcaatccaaatgtttatttcaggtgaaaaatcttaaggctggcatctgctgtttgagatttttttggctcatatcataactatgctattttactcctgtaggcccaacttggtgagaatcttcccgttctgggctatgcagtaatggtcaaaaggttttctttaatggttatatatcatgctcgctctgattggcagtcatcgtcatggctgagcggaagagaatccattctcctgagatgtgatacttttgttgagtttggctttttgaaaaggggaatcaaactgattcctcaaaagctaccttgtactcaactgagtttcaagtatttggaaaacttgccgttctattatcgtttcctatttgaactcagtttggagttgcactgggaggatttgtgtgctttgggcttggagaacatgataccagtggctgttacctattgcttaaagtatctggacgggtcaaacaaaatggatattatctggaagagttctaatgccctgcgggtttggtttgctcactgaatcattaagcatgcatgactgtcttccagagtagtgcaccagtaactaagcagcatattcaggtgaactggacttctgactggcactgtgacattttggtcgctttgtgtttggtctgtaaggacagtctcactcaagtgtgtgctttaggtgatggtaccttttgtgaaaccatggggaacctttgcagtaaaaccatgatagcattgaagaatggcgttttaacccaaccagaagggaggtcactgctcagatctgatggtcacatgggcaggatatcctcatttggctacggccaaattttgtgagtcgtttgaaacttcagaggtgtcaaatacagcaaccacttggagattaaagccgatgtttgagtttggtgaattgctttggtccagctcaaatatacctgtgcagttgtgcgtcagtgtctgtttagttcccacgccaatggtcagctctgcaatttgctcacctttctggaaaatgctgggtgatgtacatcaacatttctatgtcagattggtatggttgtgctgtaaccactgccatcctggttagtggtgccagatattgcagtgtaaacaactactacatatgttctgatggcatcaggagacctgtatcatcgggcgtacaactcccacacagacacagcagggccagccaaattggctggctcactttgattgtggggcgttgaagcattgttgtcaacagttggtcctagcttcacttgctggataggtgctgattcaaaaggtcgttgtagtgcagcatatagtagctttgtacaaccgcacaagggcagggattatggaggggcccaacagttggcaaagcttaacatgtcgagccaatgacagctcccgaccttggacaagaacaatcttggaggtttgctgcggcagaaatggtcctcccaggcacacagcgcaaagccagtgcagtgctgtcgttttcttccgggaaagaagcttcctttcctctaataacgccaacttaatctgtgattaacttctccctttggtgaaggggaagatgaagggccagagagagagagagagagagagagagagagagagagagagagagagagagagagagagagagagagagaactgggaaggtattcatcagttccttcaggggcaagctctaattattcggcgagcttaggagtcacgtctcggcatgtgattcggtatcggaggtacgagaggcttgtggtggctaaccatggcttgaagaggacaaagccacgaagggaaaaaaaaagatacatacatgcttagatggtctccactctccagcaacacacgggaccatacgtgtttagctggaccatcatcgatcaccgtgtctcaccggcacgcagtaggtgtgctgcgacctgcatgcgatggtggaccatgcatagtcgctatcctctccggtcaggtgtgtaaagatgtgttgttttaaattatattatgacgtgacattggtgtctgaagagtcgaaatcgctactgattgctgttagagcttagagtctgaagggtgtagttagcggaagtgtaaaaattaatgtttggcta

SEQ ID NO: 9809 - DNA, 1201 bp, Zea Mays
atttagtagtaaatagacacactcaataccatatccaattttccctggaggtgcaattattggatgctctgcaggatttctaaatgttcccaaaataaaaggaacccatacagctatgaaatcaggtatgcttgcggcggaagcaactttcaagtccctcgttgaaggatcttcgatggaactgtactgggagaacctcaagaagtcatggatatgggaagaacttcataaagctaggaattatagaccagcatttgaatacggattaattccgggtatggttttgtctgcactggaacgctacatattcaaagggaagtcaccttatacattgaagcatgggagacccgatcatgaagcaacagacacggccaatctgcatgcgcctattcaatatcctaaaccagatggacatataacatttgatgtcccaacatctttatacaggagcaatacaaaccatgagcatgatcagccgcctcatctccgcttgagggatcctacagtacccgaacgagtaaatgttgcactgtatgcagcgccagaatcacgctattgcccagcccgggtttacgaatatatctctgatgagaaaggtgacccaaagcttcatataaatgcacagaattgtcttcattgcaaggcttgcgacatcaaagatccaaagcagaacatcgagtggacagttccagaaggtggaggtggtcctggttacacagtaatgtagaatgctcaatgatgaaaatatgttgccttcaaaaataataacggctcattcaccactggtgtcaaactggaccaaatccctggctaattgggttggaagttacaccagacatctagcaatgagcaacttccttaaagcagtagacaggatgtcaggatgttcctagagctatgtaccgatcaggatcagtcagggaaagaagcgtgcatcacatggatgtggtgactgtaaaactattgggaagatgcaatttgtcgaccaataacaggcgctgtaagagagatctgtcccaaacgaaagatcgtaaggtgagatggagaatggcccagagctgggaatgtattaaaatagacagagtagataggccaagccccttatatatgggtatataggtaaatacatgaggactaatccaaaaccctagcgaggttgctaacacgccgtaatcttcaactttaacctgtacagacaaca

SEQ ID NO: 9810 - DNA, 1529 bp, Zea Mays
attgtgttcctgaattatgtcaattcatctacatcattatacggacaaatggacaataagccatatatgctgtttgggagattgaagaaggaaagcacaatccaggttctgttattcatactgttggatggcctttggatactaaaacatatggaggatcattcctgtaccaccttgatgatagacagttggcaattggtctggttgttgcgttgaattatcgaaatccgtttctgagtccctatgatgaattccagaaatttaagcagcaccctgctgttagaaaacttttggaaggtggaacagctattcagtatggtgcacgtactctcaatgaaggtggtttccagtcaataccatatccaattttccctggaggtgcaattattggatgctctgcaggatttctaaatgttcccaaaataaaaggaacccatacagctatgaaatcaggtatgcttgcggcggaagcaactttcaagtccctcgttgaaggatcttcgatggaactgtactgggagaacctcaagaagtcatggatatgggaagaacttcataaagctaggaattatagaccagcatttgaatacggattaattccgggtatggttttgtctgcactggaacgctacatattcaaagggaagtcaccttatacattgaagcatgggagacccgatcatgaagcaacagacacggccaatctgcatgcgcctattcaatatcctaaaccagatggacatataacatttgatgtcccaacatctttatacaggagcaatacaaaccatgagcatgatcagccgcctcatctccgcttgagggatcctacagtacccgaacgagtaaatgttgcactgtatgcagcgccagaatcacgctattgcccagcccgggtttacgaatatatctctgatgagaaaggtgacccaaagcttcatataaatgcacagaattgtcttcattgcaaggcttgcgacatcaaagatccaaagcagaacatcgagtggacagttccagaaggtggaggtggtcctggttacacagtaatgtagaatgctcaatgatgaaaatatgttgccttcaaaaataataacggctcattcaccactggtgtcaaactggaccaaatccctggctaattgggttggaagttacaccagacatctagcaatgagcaacttccttaaagcagtagacaggatgtcaggatgttcctagagctatgtaccgatcaggatcagtcagggaaagaagcgtgcatcacatggatgtggtgactgtaaaactattgggaagatgcaatttgtcgaccaataacaggcgctgtaagagagatctgtcccaaacgaaagatcgtaaggtgagatggagaatggcccagagctgggaatgtattaaaatagacagagtagataggccaagccccttatatatgggtatataggtaaatacatgaggactaatccaaaaccctagcgaggttgctaacacgccgtaatcttcaactttaacctgtacagacaaca

SEQ ID NO: 9811 - DNA, 2347 bp, Zea Mays
aaaaaactcaacaaactgccattcccctgcggccctgccccatactcccgtgtcttcccggccttcttcggatggccagacccctccttctccaaaaatcccagaataccttgggctcccgagcaggagagagcaatgcaacgagccatccggatagccgcggctgcgacaaggcgagcgctgtcgtcgtcggcggcgagggcatcaccccctcctccccgcggacccctggctcctggctggggcgccactaggtggctctgcagcgggcgggaggcgctgagctacgacgtggtgatcgtgggcgcagggcccgcggggctcgccgcggcgatccggctgaagcagctctgccgcgctgctgacaccgacctctccgtatgcgtcctggagaagggctccgaagtcggtgctcatgtgctgtcggggaatgtgtttgagccccgagccttggacgagctcattcccaagtggaggcaagaggattctccaatcagagttcctgtttcatctgacaagttctggctgttaacgaagaaccaagcttggacactaccatctccatttgacaacaaaggaaactacgtgatcagcttgagccaattggtgcgttggatggccacaaaagctgaagagttgggtgttgaagtgtatccagatactttatgatgaaaatcaaatagttacaggagtcgcaaccaatgatgttggtattgctaaggatggtaccaaaagggaaacttttcaacctggtgtagaactaagagggcgaataacactgcttgctgagggttgccgcggttcgttatcagagaaaataataagaaatcacaagctcagagagagagggcaagggcaacatcagacatatgctcttggaattaaggaggtttgggagattgaagaaggaaagcacaatccaggttctgttattcatactgttggatggcctttggatactaaaacatatggaggatcattcctgtaccaccttgatgatagacagttggcaattggtctggttgttgcgttgaattatcgaaatccgtttctgagtccctatgatgaattccagaaatttaagcagcaccctgctgttagaaaacttttggaaggtggaacagctattcagtatggtgcacgtactctcaatgaaggtggtttccagtcaataccatatccaattttccctggaggtgcaattattggatgctctgcaggatttctaaatgttcccaaaataaaaggaacccatacagctatgaaatcaggtatgcttgcggcggaagcaactttcaagtccctcgttgaaggatcttcgatggaactgtactgggagaacctcaagaagtcatggatatgggaagaacttcataaagctaggaattatagaccagcatttgaatacggattaattccgggtatggttttgtctgcactggaacgctacatattcaaagggaagtcaccttatacattgaagcatgggagacccgatcatgaagcaacagacacggccaatctgcatgcgcctattcaatatcctaaaccagatggacatataacatttgatgtcccaacatctttatacaggagcaatacaaaccatgagcatgatcagccgcctcatctccgcttgagggatcctacagtacccgaacgagtaaatgttgcactgtatgcagcgccagaatcacgctattgcccagcccgggtttacgaatatatctctgatgagaaaggtgacccaaagcttcatataaatgcacagaattgtcttcattgcaaggcttgcgacatcaaagatccaaagcagaacatcgagtggacagttccagaaggtggaggtggtcctggttacacagtaatgtagaatgctcaatgatgaaaatatgttgccttcaaaaataataacggctcattcaccactggtgtcaaactggaccaaatccctggctaattgggttggaagttacaccagacatctagcaatgagcaacttccttaaagcagtagacaggatgtcaggatgttcctagagctatgtaccgatcaggatcagtcagggaaagaagcgtgcatcacatggatgtggtgactgtaaaactattgggaagatgcaatttgtcgaccaataacaggcgctgtaagagagatctgtcccaaacgaaagatcgtaaggtgagatggagaatggcccagagctgggaatgtattaaaatagacagagtagataggccaagccccttatatatgggtatataggtaaatacatgaggactaatccaaaaccctagcgaggttgctaacacgccgtaatcttcaactttaacctgtacagacaaca

SEQ ID NO: 9812 - DNA, 1769 bp, Zea Mays
aattgatgtccccaggccgcctccatccaacaccaagccacagccactggtcaccggtacactctgatccgaacaatggacgcgacgcaactgaaccgatcgatggacgccacgccgacgcggctcttccttggcgcgctcctcttcctcgtccccgccgcgctcctcctcctgctccgcgcgcggggcaggcgccgcctccccccgggcccgccgtccctgccgctgctcggcagcgtggtgtggctcaccaactcgcccgccgagatcgagcccctgctgcggcgcctcttcgagcgttacggccccgtcgtggcgctccgcgtcggggcgcgcttgtccgtcttcgtcgcggaccgccgcatcgcgcacgaggcgctcgttgaccgcggcgcgacgctggcggaccgcccggcgctcgcgtcggtcaagttcctcgacgagagcgacaacaccatcacccgcgccagctacgggcccgtgtggcgcctgctgcgccgcaatctcgtcgccgagacgctgcacccgtcgcgggtgaagctcttcgcgccggcccgtgcatgggtgcgccgcgtgctcgtcgagaagctcggggaggccgggcccgacgccgcgccgccccgcgtagtggagacgttccagtacgcgataaactgcctcctcgtgctcatgtgcttcggcgagcgccttgacgagcccgccgtgcgcgcgatcgcttctgcgcagcgggaggcactcatctaccgctccaagaacatgcaggtcttcgccttcctccctgccgtcaccaagcacctcttccgcgctcggctagataaagcgcgggcgctgcggcggcgcgtcaaggagctcttcgttccgcttatcaacgcgcgccgggagtacaagaagcggggagaggaaccgagaagggaaaccacgttcgagcactcgtacgtggacacgctgctcgacatcaagcttcacgaggacggcgatcgcccgctcaccgacgatgagattatcctcctatgctccgagttcctcgacgccggtacggacaccacgtccacagggctgcagtggatcatggccgagcttgtgaaaaacccagccatccaggagaagctctacagcgagatcaaggccgccacagacgacaacaaggaaggggtgtcagaggaggacgtccacagtatgccatacctcaaggcggtgatcctcgagggtctccggaagcacccgccggcccacttcgtgctgccgcacaaggcggcggaggaaatggagatcggcgggtacctgatccccaagggcacagttgtgaacttcatggtggccgagatgggccgggacgagcaggagtggaagaacccgatgcagttctcgccagagcggttcctccccggcggcgatggcgagggcgtggacgtgacgggcaccaaggcgatcaggatgatgccattcggcgtgggccggaggatctgcgcggggcttggtatcgccatgctgcacctggagtacttcgttgccaacatggtgcgggagtacgagtggaaggaggtgcccggcgacgaggtagacttcgctgagaagaacgagttcactgtcgtcatgaagaagccgctgcgcccgcgccttgtgcctaggagcatgtagggtggcgtacctataaccgtggagaactggaaaattgtatgtccagctggagagcgattgaaactggagaatgtcgtgcagcggttgaagactactactgcaagagctccaagcagcagactgctgctgag

SEQ ID NO: 9813 - DNA, 3528 bp, Zea Mays
ctcgaactttccaccgttcacattaatagcttttcctcttctttccccatccaccctcgcaccctcaccgaaaggagaaggcttcagccttcaagcgcacacagccacgcaaatcccctcttcatcaacctcgactcgagtccgcgcgcgtccccgaatcgagaggagatgagtcgtccgcatgacggtcacaggtccttctttcccatggggaatcccttcaggatgattctcccaagaggagcccgcctgtcaccgaagctcactgagctgctcacttcgtatgaggatggcctggcctcgagcttgaggaaggtcaagccagaggccacctcagaggtgttcacactatcatggatgaagctcgcagtggagtgcttatcagagctgcacaccaatatagccaccctgattactgagcttgagttgcccttatcagactgggatgagaagtgggtggacatttacctgaacagcagtgtgaagctgctggacatctgcattgccctgagctcggagctctctcggttggatcaagggcagctgcttgtgcgatatctcctgaatgtgttggactctgggagcgacatgccatcccaggagcagatcaggagagctgaggtgtcgcttaaggaatggatagagcgagcaagtgaaaggtctccgaggcttgatagttgcttggcagcgctacaggagctttctggaaacctttgcctgatgaaggttaggcattctgctaaagggaaagtgctcatgcgagcattgtatggaatcgaggctgttaccgtcttaatctgcagtgtacttgtagctgtactgtcgggtaccttcaagccactggttgactttgatgtccctgagaaatttggttggtctacggccttcattgatcttcagaaggccataagcggtgaacttagcaggcaactgtccagaggtagtgttgcagcgttaaaagagctggaggatgttgatgtatgtgctagacagctgcatacattgacttgcactgctcagcttgaagaggagaatgccagcctggctcattcatttagccgttcaaaggaagtggtcctgacagatactacagcccagggaagaggccatgtggataatctcaagttggctgatgatagtagctgtcagcatgaagtgatcatgctgcaaagtattactacagaaggaggaattggtacagctgatatcaaggaggataccgagaccattggccatacaagggaagtgatggcgcctgagaaaataattgacagaggacaccaagatgataacacaaagcaggacactggtgttgtcactgatatcagttgcttggaaaggagagaggaactgctgaactgcatctcccagatgtcgaaaagcgctgaaaggctccagttggggttggactcgctgtcgaagcgggtggataacttcttccatattgtgcttacagggcgtgatgcactactttgtaatctcaggttttcaaacggcggcaaggttgctgcagagatttcaatcatgccggtgtcatctcctctacccgttcaagaaaaagatgccaaaagaatctatttccatcagccatgacgtcgataggtactgagagagagtgaggtttccttgctctccagctcggtatagaccacaggtgaccgacgacgacgaggcaaagcagagcaagaagatttggccatggctgctacgcaactcctactcctcgccgccctcctcctcctgcctctcgccgccatcctgctcgggaagcggcacgggccccgcaagggcaagaacggcgcccggctcccgccgggcccaccgggtctgccgttcctcggcaacctgctgttgctgaggcgctactcgtccgacgtggaggcgctgctccggcgcctcgtcgcgcgttacggccccgtcgtgtccctgcgggcagggccgagcctgtcggtcttcatcgctgaccgccgcgtcgcgcacgcggccctggtcgagagcggggccgcgctcgccgaccgccccgcggtcacgcgcgcgctcctgggggagagcggcaacaccatctcgcggtccagctacgggcccgtgtggcgcctcctgcgccgcaacctcgtctccgagacgctgcacccgtcgcgggtgaagctgttcgcgccggcgcgcgcgtgggtgcgccgcgtgctcgctgagaagctcgggcgggaggccgaggaggcgcaggcgagggcccaggcgccgccccccgcgatggaggcgttccggtacgccatgttctgcctcctcgtgctcatgtgcttcggcgagcggctggacgagcccgcggtgcgcgccatcgcgtccgcgcagtacggctggctcatgttcgtggccaagaacacgagcctgctcgcgttctggccggcactggctaggatcctcttgcgcggccgcctccaggaggggcttaccgctcgacagcggcagaaggagctcttcgtgccattgatccatgcgcgccgagtgctcaagcagcgggtcaagaaccaaggcggtgccgcggccgcggtggcgccaggagaggagacgacgacgttcgagcactcgtacgtggacacgctgctcgacatcaggcttcccgaggagggggaccgcgcgctcactgacgacgaggtgtccaacctctgctccgaattcctcaccgcaggcaccgacacgacgtccaccgcgctgcagtggatcatggccgagctggtgaagaacccggacgcgcaggagaagctctacagcgagatcagggcaacgtgcagcgacgaccaaccggaggtcggcgaggaggacacgcacaggatgccgtacctcaaggccgtcgtgctcgagggactgcgccggcacccccctgcgcatttcgtgctgtcgcacaaggcggcggaggatacggaggtgggcgggtacctgatccccaagggcgcgacggtgaacttcacggtggcggagatgggctgggacgagcgggagtgggacaggcccatggagttcgtgccggagcggttcctgtcaggcggcgacggtgagggcgtcgacgtgactggcagcagagagatcaagatgatgcccttcggcgccgggcggcggatttgcgccgggctcggcatcgccatgcttcacttggagtacttcgtcgccaacttggtcagggaattcgaatggaaagaggtgcccggcgacgaggtggatttgtctgagacgcgcgagttcaccaccgtcatgaagaaaccgctccgcgcgcagctggtgcgcagaacaacttgtgtatgaatgccgattaatggcccatcaccgcgtctgtagaaggccaaaaaaacatccttctggctcttggctcttctctcatcaagggtcaccaaaccgcttgataaattcggctaaccggtaattggcgtcggccggtaatttgaaaacttttaatgtcaatttttgtactatggattatttgaagacttgctactgaaaccaaatttcaaaatacacaacggatttcaaacttaaaat

SEQ ID NO: 9814 - DNA, 2176 bp, Zea Mays
ctcgaactttccaccgttcacattaatagcttttcctcttctttccccatccaccctcgcaccctcaccgaaaggagaaggcttcagccttcaagcgcacacagccacgcaaatcccctcttcatcaacctcgactcgagtccgcgcgcgtccccgaatcgagatttcaatcatgccggtgtcatctcctctacccgttcaagaaaaagatgccaaaagaatctatttccatcagccatgacgtcgataggtactgagagagagtgaggtttccttgctctccagctcggtatagaccacaggtgaccgacgacgacgaggcaaagcagagcaagaagatttggccatggctgctacgcaactcctactcctcgccgccctcctcctcctgcctctcgccgccatcctgctcgggaagcggcacgggccccgcaagggcaagaacggcgcccggctcccgccgggcccaccgggtctgccgttcctcggcaacctgctgttgctgaggcgctactcgtccgacgtggaggcgctgctccggcgcctcgtcgcgcgttacggccccgtcgtgtccctgcgggcagggccgagcctgtcggtcttcatcgctgaccgccgcgtcgcgcacgcggccctggtcgagagcggggccgcgctcgccgaccgccccgcggtcacgcgcgcgctcctgggggagagcggcaacaccatctcgcggtccagctacgggcccgtgtggcgcctcctgcgccgcaacctcgtctccgagacgctgcacccgtcgcgggtgaagctgttcgcgccggcgcgcgcgtgggtgcgccgcgtgctcgctgagaagctcgggcgggaggccgaggaggcgcaggcgagggcccaggcgccgccccccgcgatggaggcgttccggtacgccatgttctgcctcctcgtgctcatgtgcttcggcgagcggctggacgagcccgcggtgcgcgccatcgcgtccgcgcagtacggctggctcatgttcgtggccaagaacacgagcctgctcgcgttctggccggcactggctaggatcctcttgcgcggccgcctccaggaggggcttaccgctcgacagcggcagaaggagctcttcgtgccattgatccatgcgcgccgagtgctcaagcagcgggtcaagaaccaaggcggtgccgcggccgcggtggcgccaggagaggagacgacgacgttcgagcactcgtacgtggacacgctgctcgacatcaggcttcccgaggagggggaccgcgcgctcactgacgacgaggtgtccaacctctgctccgaattcctcaccgcaggcaccgacacgacgtccaccgcgctgcagtggatcatggccgagctggtgaagaacccggacgcgcaggagaagctctacagcgagatcagggcaacgtgcagcgacgaccaaccggaggtcggcgaggaggacacgcacaggatgccgtacctcaaggccgtcgtgctcgagggactgcgccggcacccccctgcgcatttcgtgctgtcgcacaaggcggcggaggatacggaggtgggcgggtacctgatccccaagggcgcgacggtgaacttcacggtggcggagatgggctgggacgagcgggagtgggacaggcccatggagttcgtgccggagcggttcctgtcaggcggcgacggtgagggcgtcgacgtgactggcagcagagagatcaagatgatgcccttcggcgccgggcggcggatttgcgccgggctcggcatcgccatgcttcacttggagtacttcgtcgccaacttggtcagggaattcgaatggaaagaggtgcccggcgacgaggtggatttgtctgagacgcgcgagttcaccaccgtcatgaagaaaccgctccgcgcgcagctggtgcgcagaacaacttgtgtatgaatgccgattaatggcccatcaccgcgtctgtagaaggccaaaaaaacatccttctggctcttggctcttctctcatcaagggtcaccaaaccgcttgataaattcggctaaccggtaattggcgtcggccggtaatttgaaaacttttaatgtcaatttttgtactatggattatttgaagacttgctactgaaaccaaatttcaaaatacacaacggatttcaaacttaaaat

SEQ ID NO: 9815 - DNA, 1666 bp, Zea Mays
ctcgaactttccaccgttcacattaatagcttttcctcttctttccccatccaccctcgcaccctcaccgaaaggagaaggcttcagccttcaagcgcacacagccacgcaaatcccctcttcatcaacctcgactcgagtccgcgcgcgtccccgaatcgagaggagatgagtcgtccgcatgacggtcacaggtccttctttcccatggggaatcccttcaggatgattctcccaagaggagcccgcctgtcaccgaagctcactgagctgctcacttcgtatgaggatggcctggcctcgagcttgaggaaggtcaagccagaggccacctcagaggtgttcacactatcatggatgaagctcgcagtggagtgcttatcagagctgcacaccaatatagccaccctgattactgagcttgagttgcccttatcagactgggatgagaagtgggtggacatttacctgaacagcagtgtgaagctgctggacatctgcattgccctgagctcggagctctctcggttggatcaagggcagctgcttgtgcgatatctcctgaatgtgttggactctgggagcgacatgccatcccaggagcagatcaggagagctgaggtgtcgcttaaggaatggatagagcgagcaagtgaaaggtctccgaggcttgatagttgcttggcagcgctacaggagctttctggaaacctttgcctgatgaaggttaggcattctgctaaagggaaagtgctcatgcgagcattgtatggaatcgaggctgttaccgtcttaatctgcagtgtacttgtagctgtactgtcgggtaccttcaagccactggttgactttgatgtccctgagaaatttggttggtctacggccttcattgatcttcagaaggccataagcggtgaacttagcaggcaactgtccagaggtagtgttgcagcgttaaaagagctggaggatgttgatgtatgtgctagacagctgcatacattgacttgcactgctcagcttgaagaggagaatgccagcctggctcattcatttagccgttcaaaggaagtggtcctgacagatactacagcccagggaagaggccatgtggataatctcaagttggctgatgatagtagctgtcagcatgaagtgatcatgctgcaaagtattactacagaaggaggaattggtacagctgatatcaaggaggataccgagaccattggccatacaagggaagtgatggcgcctgagaaaataattgacagaggacaccaagatgataacacaaagcaggacactggtgttgtcactgatatcagttgcttggaaaggagagaggaactgctgaactgcatctcccagatgtcgaaaagcgctgaaaggctccagttggggttggactcgctgtcgaagcgggtggataacttcttccatattgtgcttacagggcgtgatgcactactttgtaatctcaggttttcaaacggcggcaaggttgctgcagagccgctgtttgcaacaaggaggaatgcatacgatttttgcaggaatcgaactgcctctagtagacccttgtacagtgagagtacagttgtactcgtggttgctgcgaaatctgattaccatgctctataccacttgcctgatgaaagtttag

SEQ ID NO: 9816 - DNA, 5068 bp, Zea Mays
ttttagtaactcatgccttaactaaaatactaaatagacactgatcctgaacatggcacaactgtattggctggtcactctcataagcttttgcttttggcaaacacatgcctggaacaagcagtactacttcgttgacatataaataccttgagcaagttggtgttgattttgatgataaaaatagctgggagtatcttttcaagttatattggttggatctgaaagggaagcatttactaacgattgaagagctaaaaagtgcaaagaactattggactgttcctactactgctggtaggagagagaaagaggagtcatctgatgaactatatgatgcaagcaatgaccaagatgctacgtttgacatttcctcaaagaaacaaagacagaataactcttcaggaaaaagaggacaaaaacgtaaaaaagatggtggcattacttcaaggaagcgtggaatctcaattaatagtgctggaagcttaccgaatggatcaacaggtgaagggatgtccttggcaggtgacacaaaatgggcatcatctgagttattggaattcattggtcacatgagaaatggtgatagttcttatatttcccagtttgatgtccaggttcttttgctcgaatatataaagcaaaataacctctctgatcctcgcagaaaaagtcagattatctgtgatgcaaggcttagcaatttgtttagaaaaccacgtgttggtcattttgagatgttaaagcttttggagatgcattatcttgtgaaacaggttccaacattgaatgcagatagtgaaagagcatttgattcatactcggcccaagtaaatcatggaggatataatgagttgtccgataaattaggttctgataagaggaggaaggctcatatgaagattgaaagagaatcgacaattaatccagaggattatgctgccattgacatgcacaatatcaatctgatttacttgcgccgcagtgttatggaggatcttattgatgaggttgctgttttctctgacaaaattgctggggcttttgtgaggataagaatttccggtcttggcaacaagcaagatatgtaccgactggtgaaagttctcggtacacataaagttgcagagcgatacactgttggtaagaagacaacagattatgctcttgagatatctaatttagaaaaaaaagagattatcacaatggacacgatctcaaatcaggatttcacagaggaggaatgcaagcggttacgccagagtatgaagtttggtctaactgcccggttaaaagtgagggatgtctatgataaagctaaaatcttccaatctctgcaatttaaagattggttggaaaatgagaaacagaggctgagccgtcttcgtgatcgtgctagtgaaaccggacgccgaaaagaattgagagagtgtgtagaaaagttgcagcttctgaacactcctgaagaaacagagcgcatgattaatgaagctcctgaagtacatgttgatccccagatggatccaagttatgaatccgctgaagaacccgattataagaaagctgttgattggaccatgcatcggaacggaccagatctattatttccaggaagaaaagggacaaaattgaattctgtggagaatcatacacaaaatagtctggatgcaagcggtcacattagcagtctacctacagaggatgtggaccatagattaggtgctggaagtaacattaatttaaacaatatggcaccagagcctgcatcacttggagttttatcaaatgacactgagccagaaaaagtttggcactacaaagaccctaatggaaatgttcagggaccgtttactcttttgcagttatccaattgggcaagttttttcccacgtgacctgagaatatggcttacatttgagagtgaggagaactcactactgttgactgaagtgctcccaaagcagcagaaagattttattcagccttcaacagttactaccagtgataaatcaatatgggcaggctctggtcaagatagaattaactcaaatgcaaataactcttcctcccctagcttgtctgctgagtgctatgatccaacaaaatatctaaagcctctaggtggaacgtcaccatcaagatctctgaaagattctcatgctttgcatgaggtccagaatcaggttaacgattcatccacaattctttcttcagctggttcatatgtaccaaccagttctcatgatgaaagggtctcaagagacagggttgatgagtggaacagtagtcaggacaatggtggcatttggaatccaaccatgaatcatagtcggaagagtaatgcacagcaacatcctgacggttttacagggaaggaccaaatgctaactgaatctaaatgtagttcacatatggtctcagttcttaccccacaacaatctgagagagaccctgccacttctcttagtactacaagtcgtccggagtgcaaaaccatgtgccggcaggaaggttcttcatggagttcagctacaaatgctggagttcatgaccttcagttaactattgctttaacaaagccagagacatgttctccaacaaatcctgttgaagacagagattcgagttctgcttctgcggtgtcttgtcagtcaggggctcctgcctgcattccccaacccgatccaacatctacatgtaattcaagtaagattgaggcaaccatggatctgcataaaacatgccagcctgacacatcaaatgaatcattcggccggcttcctgaacctcaaagtggctcactcttttccttgaaaactctaaatcttgagtccgagcaccctagttctacgccaaaactggaggggaaggaaacttccatgaaccagtcaggatcaacatcagtagcacatgagaatttagctacaaagacacgtgtccgcccacctaccagtaaaattgatagcttgcaaccacttaaggaaagatcatgtccaacagaaagggactcaatcactcaattagagcatctgtttgaagagaatgtggtaaagagaaataacgaagtggtcaatcctgtatctgatgctgaagggattgctgtatcagatgtgttggaatcgttaacagaacaagattgtgaaaaatacagtacacatggagcagattgtgaaaaatacagtacacatggagcagcgcctttacaaaatttggtgccagcttcagccgaggaagaacaaccacaatgctccagtcctattgcattgtccccttggggggaaccaagttactatcagggtgaagctgttgattctgctctatggggcgtccaggatggtaatgacatgtggtcaatgccttcaccaacacctggtctccagccttcatcagctgatggaaaaaacgcttcatgcatcatagaggaggcgagagcggaccatggagatggtgcatttgtcgaaacattaccaagacaaggggacgaaaagacggaacatgcaaactcaagtgtctcaggttctggagtgccagaacaggtaaaaccaaaagcaagcactgcatcaggtccatctctagatgggagcacaaaagctttgggttggcaactgctgggctcatctctagaggggagtgcaaaagcttcaggctggaaaccgccagctttatcgattgaagggattgctaatgcctcaggttcgcaagcattgtatcctacgcaagggagcacaaaatcttcaggttgtcagcgatcaagttcatccccagatgggagtagaaaagcctcaggttggcaacagtcaagtacatcaccggtggggagtggaaaagctcatggctggcaacgatcaggttcttttacccagggtggtacaaaagctgcaggctggcaaccctctggttcttctacagatcggagtgcaaaagttgatggctggcaacgaacaagttcatctccggagggaaacagaaaagcttcaggctggcattcatcaggtcgtgagagctcaaagatcacatatggtgccagtgaaaaccgtaaatcattttctagccaccaagcgacgacaccaacagggagacactctttggcaaggaggcagggaagcagcgacaagggtgctgctggttgggaagagagtctaggaaacacttgggaagcatcaaagagacaacagagaaacagcgacaagaatgcaggctgcggagaggctctcggaagcaacaggacctggcacccatcgtctggtaaccccagtcggagcagccaggggaatcaccaacatgacaggcattctcacggcagtgattcgcggcggggtagctcaaactaccctcggaggtccgaccatcgtcatgaccatggcagtggtggttcgtcaagaccctcgtcaagagggcagccccagaggggggtttgtaaatactacgagaatggccactgctggaagggctcgaaatgccagtacctgcaccgatgactgccgtgaccgtgggaagcggaacgccctcacatttttgtatagcagcatatggtctcgtcgtagtcagtaaaaggaggaactgtgtcggcgggaccactagttcgtagtagtacatatccttcagagcaggagcatgactaaagattctccgctttggtgcaggaatgcgccccttttgttcagttaaacggaggtgtgggcatttgcaaacatggattttctccataagccagggtgttgtgcaatcgtacggaataactactgaagagctgcacgtccgattgagaatgacactacggaagaggcgcatgcaaatcgtccgaatgcctacagaagagcggctatcggctggcggtagacatgtgaacggagtgctgtccccaaactgacgcggctaatgggacgaaacctacatcaaacccatccaaacccattgcaaataacttatttttttaacccaacctaatataataatttaactgaataacccacccggaccaatagccagtggttaaacccattatctaaatccatagaagattcatgtttattaaagtggattcgctaccatattccgactttaaaat

SEQ ID NO: 9817 - DNA, 5092 bp, Zea Mays
aaaatgtcataatattttgatttcattcatttggacgaactagaaactgtgattttttagtaactcatgccttaactaaaatactaaatagacactgatcctgaacatggcacaactgtattggctggtcactctcataagcttttgcttttggcaaacacatgcctggaacaagcagtactacttcgttgacatataaataccttgagcaagttggtgttgattttgatgataaaaatagctgggagtatcttttcaagttatattggttggatctgaaagggaagcatttactaacgattgaagagctaaaaagtgcaaagaactattggactgttcctactactgctggtaggagagagaaagaggagtcatctgatgaactatatgatgcaagcaatgaccaagatgctacgtttgacatttcctcaaagaaacaaagacagaataactcttcaggaaaaagaggacaaaaacgtaaaaaagatggtggcattacttcaaggaagcgtggaatctcaattaatagtgctggaagcttaccgaatggatcaacaggtgaagggatgtccttggcaggtgacacaaaatgggcatcatctgagttattggaattcattggtcacatgagaaatggtgatagttcttatatttcccagtttgatgtccaggttcttttgctcgaatatataaagcaaaataacctctctgatcctcgcagaaaaagtcagattatctgtgatgcaaggcttagcaatttgtttagaaaaccacgtgttggtcattttgagatgttaaagcttttggagatgcattatcttgtgaaacaggttccaacattgaatgcagatagtgaaagagcatttgattcatactcggcccaagtaaatcatggaggatataatgagttgtccgataaattaggttctgataagaggaggaaggctcatatgaagattgaaagagaatcgacaattaatccagaggattatgctgccattgacatgcacaatatcaatctgatttacttgcgccgcagtgttatggaggatcttattgatgaggttgctgttttctctgacaaaattgctggggcttttgtgaggataagaatttccggtcttggcaacaagcaagatatgtaccgactggtgaaagttctcggtacacataaagttgcagagcgatacactgttggtaagaagacaacagattatgctcttgagatatctaatttagaaaaaaaagagattatcacaatggacacgatctcaaatcaggatttcacagaggaggaatgcaagcggttacgccagagtatgaagtttggtctaactgcccggttaaaagtgagggatgtctatgataaagctaaaatcttccaatctctgcaatttaaagattggttggaaaatgagaaacagaggctgagccgtcttcgtgatcgtgctagtgaaaccggacgccgaaaagaattgagagagtgtgtagaaaagttgcagcttctgaacactcctgaagaaacagagcgcatgattaatgaagctcctgaagtacatgttgatccccagatggatccaagttatgaatccgctgaagaacccgattataagaaagctgttgattggaccatgcatcggaacggaccagatctattatttccaggaagaaaagggacaaaattgaattctgtggagaatcatacacaaaatagtctggatgcaagcggtcacattagcagtctacctacagaggatgtggaccatagattaggtgctggaagtaacattaatttaaacaatatggcaccagagcctgcatcacttggagttttatcaaatgacactgagccagaaaaagtttggcactacaaagaccctaatggaaatgttcagggaccgtttactcttttgcagttatccaattgggcaagttttttcccacgtgacctgagaatatggcttacatttgagagtgaggagaactcactactgttgactgaagtgctcccaaagcagcagaaagattttattcagccttcaacagttactaccagtgataaatcaatatgggcaggctctggtcaagatagaattaactcaaatgcaaataactcttcctcccctagcttgtctgctgagtgctatgatccaacaaaatatctaaagcctctaggtggaacgtcaccatcaagatctctgaaagattctcatgctttgcatgaggtccagaatcaggttaacgattcatccacaattctttcttcagctggttcatatgtaccaaccagttctcatgatgaaagggtctcaagagacagggttgatgagtggaacagtagtcaggacaatggtggcatttggaatccaaccatgaatcatagtcggaagagtaatgcacagcaacatcctgacggttttacagggaaggaccaaatgctaactgaatctaaatgtagttcacatatggtctcagttcttaccccacaacaatctgagagagaccctgccacttctcttagtactacaagtcgtccggagtgcaaaaccatgtgccggcaggaaggttcttcatggagttcagctacaaatgctggagttcatgaccttcagttaactattgctttaacaaagccagagacatgttctccaacaaatcctgttgaagacagagattcgagttctgcttctgcggtgtcttgtcagtcaggggctcctgcctgcattccccaacccgatccaacatctacatgtaattcaagtaagattgaggcaaccatggatctgcataaaacatgccagcctgacacatcaaatgaatcattcggccggcttcctgaacctcaaagtggctcactcttttccttgaaaactctaaatcttgagtccgagcaccctagttctacgccaaaactggaggggaaggaaacttccatgaaccagtcaggatcaacatcagtagcacatgagaatttagctacaaagacacgtgtccgcccacctaccagtaaaattgatagcttgcaaccacttaaggaaagatcatgtccaacagaaagggactcaatcactcaattagagcatctgtttgaagagaatgtggtaaagagaaataacgaagtggtcaatcctgtatctgatgctgaagggattgctgtatcagatgtgttggaatcgttaacagaacaagattgtgaaaaatacagtacacatggagcagattgtgaaaaatacagtacacatggagcagcgcctttacaaaatttggtgccagcttcagccgaggaagaacaaccacaatgctccagtcctattgcattgtccccttggggggaaccaagttactatcagggtgaagctgttgattctgctctatggggcgtccaggatggtaatgacatgtggtcaatgccttcaccaacacctggtctccagccttcatcagaggaggcgagagcggaccatggagatggtgcatttgtcgaaacattaccaagacaaggggacgaaaagacggaacatgcaaactcaagtgtctcaggttctggagtgccagaacaggtaaaaccaaaagcaagcactgcatcaggtccatctctagatgggagcacaaaagctttgggttggcaactgctgggctcatctctagaggggagtgcaaaagcttcaggctggaaaccgccagctttatcgattgaagggattgctaatgcctcaggttcgcaagcattgtatcctacgcaagggagcacaaaatcttcaggttgtcagcgatcaagttcatccccagatgggagtagaaaagcctcaggttggcaacagtcaagtacatcaccggtggggagtggaaaagctcatggctggcaacgatcaggttcttttacccagggtggtacaaaagctgcaggctggcaaccctctggttcttctacagatcggagtgcaaaagttgatggctggcaacgaacaagttcatctccggagggaaacagaaaagcttcaggctggcattcatcaggtcgtgagagctcaaagatcacatatggtgccagtgaaaaccgtaaatcattttctagccaccaagcgacgacaccaacagggagacactctttggcaaggaggcagggaagcagcgacaagggtgctgctggttgggaagagagtctaggaaacacttgggaagcatcaaagagacaacagagaaacagcgacaagaatgcaggctgcggagaggctctcggaagcaacaggacctggcacccatcgtctggtaaccccagtcggagcagccaggggaatcaccaacatgacaggcattctcacggcagtgattcgcggcggggtagctcaaactaccctcggaggtccgaccatcgtcatgaccatggcagtggtggttcgtcaagaccctcgtcaagagggcagccccagaggggggtttgtaaatactacgagaatggccactgctggaagggctcgaaatgccagtacctgcaccgatgactgccgtgaccgtgggaagcggaacgccctcacatttttgtatagcagcatatggtctcgtcgtagtcagtaaaaggaggaactgtgtcggcgggaccactagttcgtagtagtacatatccttcagagcaggagcatgactaaagattctccgctttggtgcaggaatgcgccccttttgttcagttaaacggaggtgtgggcatttgcaaacatggattttctccataagccagggtgttgtgcaatcgtacggaataactactgaagagctgcacgtccgattgagaatgacactacggaagaggcgcatgcaaatcgtccgaatgcctacagaagagcggctatcggctggcggtagacatgtgaacggagtgctgtccccaaactgacgcggctaatgggacgaaacctacatcaaacccatccaaacccattgcaaataacttatttttttaacccaacctaatataataatttaactgaataacccacccggaccaatagccagtggttaaacccattatctaaatccatagaagattcatgtttattaaagtggattcgctaccatattccgactttaaaat

SEQ ID NO: 9818 - DNA, 5985 bp, Zea Mays
aaaagaaaggactgcagcccgcgcccgccacgcctttctctcttccgtgcagctgcagactgccgtgccggtgcggtgcgccccgctcccgtccggccggaccccaaaaaaaaaccacccagaccgctgcgattttttacgggaaaggcttccccctgtttacggctttacgccaagcccgccagctcgcccgttgcattcccgtttcgagcttccgccctccctcctgtgtactatctctttccctctgcccaccgctcgcagtcgtacaccaaccacttcatttcggggccgtgagagagaggccgcgcggcggcgacgaggcccggagcgagggtggaggacgacttagggtttttggtcggctgatccatggacagggggacgggcccgggcgccgaggtgctctcccccggcgaggccgagtggcccccagagctccgcctcccgccgccgcctcctcccgtgccggagcccccagggccgcatccgcccgcccctgactccgcttcgatgcgaatgcccgcacctcatctacacctgcagcttcctcccgcggcggcggcgaggaaggacccgtctccgcctcgccacggggagggcttcgatgaccagctgttcctcggatcgctcatgggggctgcggccccgctccagcatcagcaccaccaccagcagcagcccgccgccgcggcaccggtgaagaggaagagagggaggccgccgaagaacagggacggtgcggcgccggtgcctgcgccggtcaagccggtgagcaagaaggatgaggaggtggtgtgcttcatctgcttcgatgggggcaacctcgtggtttgcgaccgaaggggttgcccgaaggtgtaccatcctgcgtgcatcaagcgagatgaatccttctttcggtgtcgggtcaagtgggattgtggttggcacatatgcagcagctgcgaaaaggcagtacaatacatgtgttatacttgtacgtactctgtctgcaaagggtgcgtcaaacaaggcaaattctttggcgttagagggagcaagggtttctgtgacacatgttatggtactatattattgatagaatccaaagacgatggtgcaaaggttggtgttgattttgatgataaaaatagctgggagtatcttttcaagttatattggttggatctgaaagggaagcatttactaacgattgaagagctaaaaagtgcaaagaactattggactgttcctactactgctggtaggagagagaaagaggagtcatctgatgaactatatgatgcaagcaatgaccaagatgctacgtttgacatttcctcaaagaaacaaagacagaataactcttcaggaaaaagaggacaaaaacgtaaaaaagatggtggcattacttcaaggaagcgtggaatctcaattaatagtgctggaagcttaccgaatggatcaacaggtgaagggatgtccttggcaggtgacacaaaatgggcatcatctgagttattggaattcattggtcacatgagaaatggtgatagttcttatatttcccagtttgatgtccaggttcttttgctcgaatatataaagcaaaataacctctctgatcctcgcagaaaaagtcagattatctgtgatgcaaggcttagcaatttgtttagaaaaccacgtgttggtcattttgagatgttaaagcttttggagatgcattatcttgtgaaacaggttccaacattgaatgcagatagtgaaagagcatttgattcatactcggcccaagtaaatcatggaggatataatgagttgtccgataaattaggttctgataagaggaggaaggctcatatgaagattgaaagagaatcgacaattaatccagaggattatgctgccattgacatgcacaatatcaatctgatttacttgcgccgcagtgttatggaggatcttattgatgaggttgctgttttctctgacaaaattgctggggcttttgtgaggataagaatttccggtcttggcaacaagcaagatatgtaccgactggtgaaagttctcggtacacataaagttgcagagcgatacactgttggtaagaagacaacagattatgctcttgagatatctaatttagaaaaaaaagagattatcacaatggacacgatctcaaatcaggatttcacagaggaggaatgcaagcggttacgccagagtatgaagtttggtctaactgcccggttaaaagtgggatgtctatgataaagctaaaatcttccaatctctgcaatttaaagattggttggaaaatgagaaacagaggctgagccgtcttcgtgatcgtgctagtgaaaccggacgccgaaaagaattgagagagtgtgtagaaaagttgcagcttctgaacactcctgaagaaacagagcgcatgattaatgaagctcctgaagtacatgttgatccccagatggatccaagttatgaatccgctgaagaacccgattataagaaagctgttgattggaccatgcatcggaacggaccagatctattatttccaggaagaaaagggacaaaattgaattctgtggagaatcatacacaaaatagtctggatgcaagcggtcacattagcagtctacctacagaggatgtggaccatagattaggtgctggaagtaacattaatttaaacaatatggcaccagagcctgcatcacttggagttttatcaaatgacactgagccagaaaaagtttggcactacaaagaccctaatggaaatgttcagggaccgtttactcttttgcagttatccaattgggcaagttttttcccacgtgacctgagaatatggcttacatttgagagtgaggagaactcactactgttgactgaagtgctcccaaagcagcagaaagattttattcagccttcaacagttactaccagtgataaatcaatatgggcaggctctggtcaagatagaattaactcaaatgcaaataactcttcctcccctagcttgtctgctgagtgctatgatccaacaaaatatctaaagcctctaggtggaacgtcaccatcaagatctctgaaagattctcatgctttgcatgaggtccagaatcaggttaacgattcatccacaattctttcttcagctggttcatatgtaccaaccagttctcatgatgaaagggtctcaagagacagggttgatgagtggaacagtagtcaggacaatggtggcatttggaatccaaccatgaatcatagtcggaagagtaatgcacagcaacatcctgacggttttacagggaaggaccaaatgctaactgaatctaaatgtagttcacatatggtctcagttcttaccccacaacaatctgagagagaccctgccacttctcttagtactacaagtcgtccggagtgcaaaaccatgtgccggcaggaaggttcttcatggagttcagctacaaatgctggagttcatgaccttcagttaactattgctttaacaaagccagagacatgttctccaacaaatcctgttgaagacagagattcgagttctgcttctgcggtgtcttgtcagtcaggggctcctgcctgcattccccaacccgatccaacatctacatgtaattcaagtaagattgaggcaaccatggatctgcataaaacatgccagcctgacacatcaaatgaatcattcggccggcttcctgaacctcaaagtggctcactcttttccttgaaaactctaaatcttgagtccgagcaccctagttctacgccaaaactggaggggaaggaaacttccatgaaccagtcaggatcaacatcagtagcacatgagaatttagctacaaagacacgtgtccgcccacctaccagtaaaattgatagcttgcaaccacttaaggaaagatcatgtccaacagaaagggactcaatcactcaattagagcatctgtttgaagagaatgtggtaaagagaaataacgaagtggtcaatcctgtatctgatgctgaagggattgctgtatcagatgtgttggaatcgttaacagaacaagattgtgaaaaatacagtacacatggagcagattgtgaaaaatacagtacacatggagcagcgcctttacaaaatttggtgccagcttcagccgaggaagaacaaccacaatgctccagtcctattgcattgtccccttggggggaaccaagttactatcagggtgaagctgttgattctgctctatggggcgtccaggatggtaatgacatgtggtcaatgccttcaccaacacctggtctccagccttcatcagaggaggcgagagcggaccatggagatggtgcatttgtcgaaacattaccaagacaaggggacgaaaagacggaacatgcaaactcaagtgtctcaggttctggagtgccagaacaggtaaaaccaaaagcaagcactgcatcaggtccatctctagatgggagcacaaaagctttgggttggcaactgctgggctcatctctagaggggagtgcaaaagcttcaggctggaaaccgccagctttatcgattgaagggattgctaatgcctcaggttcgcaagcattgtatcctacgcaagggagcacaaaatcttcaggttgtcagcgatcaagttcatccccagatgggagtagaaaagcctcaggttggcaacagtcaagtacatcaccggtggggagtggaaaagctcatggctggcaacgatcaggttcttttacccagggtggtacaaaagctgcaggctggcaaccctctggttcttctacagatcggagtgcaaaagttgatggctggcaacgaacaagttcatctccggagggaaacagaaaagcttcaggctggcattcatcaggtcgtgagagctcaaagatcacatatggtgccagtgaaaaccgtaaatcattttctagccaccaagcgacgacaccaacagggagacactctttggcaaggaggcagggaagcagcgacaagggtgctgctggttgggaagagagtctaggaaacacttgggaagcatcaaagagacaacagagaaacagcgacaagaatgcaggctgcggagaggctctcggaagcaacaggacctggcacccatcgtctggtaaccccagtcggagcagccaggggaatcaccaacatgacaggcattctcacggcagtgattcgcggcggggtagctcaaactaccctcggaggtccgaccatcgtcatgaccatggcagtggtggttcgtcaagaccctcgtcaagagggcagccccagaggggggtttgtaaatactacgagaatggccactgctggaagggctcgaaatgccagtacctgcaccgatgactgccgtgaccgtgggaagcggaacgccctcacatttttgtatagcagcatatggtctcgtcgtagtcagtaaaaggaggaactgtgtcggcgggaccactagttcgtagtagtacatatccttcagagcaggagcatgactaaagattctccgctttggtgcaggaatgcgccccttttgttcagttaaacggaggtgtgggcatttgcaaacatggattttctccataagccagggtgttgtgcaatcgtacggaataactactgaagagctgcacgtccgattgagaatgacactacggaagaggcgcatgcaaatcgtccgaatgcctacagaagagcggctatcggctggcggtagacatgtgaacggagtgctgtccccaaactgacgcggctaatgggacgaaacctacatcaaacccatccaaacccattgcaaataacttatttttttaacccaacctaatataataatttaactgaataacccacccggaccaatagccagtggttaaacccattatctaaatccatagaagattcatgtttattaaagtggattcgctaccatattccgactttaaaat

SEQ ID NO: 9819 - DNA, 5892 bp, Zea Mays
aaaagaaaggactgcagcccgcgcccgccacgcctttctctcttccgtgcagctgcagactgccgtgccggtgcggtgcgccccgctcccgtccggccggaccccaaaaaaaaaccacccagaccgctgcgattttttacgggaaaggcttccccctgtttacggctttacgccaagcccgccagctcgcccgttgcattcccgtttcgagcttccgccctccctcctgtgtactatctctttccctctgcccaccgctcgcagtcgtacaccaaccacttcatttcggggccgtgagagagaggccgcgcggcggcgacgaggcccggagcgagggtggaggacgacttagggtttttggtcggctgatccatggacagggggacgggcccgggcgccgaggtgctctcccccggcgaggccgagtggcccccagagctccgcctcccgccgccgcctcctcccgtgccggagcccccagggccgcatccgcccgcccctgactccgcttcgatgcgaatgcccgcacctcatctacacctgcagcttcctcccgcggcggcggcgaggaaggacccgtctccgcctcgccacggggagggcttcgatgaccagctgttcctcggatcgctcatgggggctgcggccccgctccagcatcagcaccaccaccagcagcagcccgccgccgcggcaccggtgaagaggaagagagggaggccgccgaagaacagggacggtgcggcgccggtgcctgcgccggtcaagccggtgagcaagaaggatgaggaggtggtgtgcttcatctgcttcgatgggggcaacctcgtggtttgcgaccgaaggggttgcccgaaggtgtaccatcctgcgtgcatcaagcgagatgaatccttctttcggtgtcgggtcaagtgggattgtggttggcacatatgcagcagctgcgaaaaggcagtacaatacatgtgttatacttgtacgtactctgtctgcaaagggtgcgtcaaacaaggcaaattctttggcgttagagggagcaagggtttctgtgacacatgttatggtactatattattgatagaatccaaagacgatggtgcaaaggttggtgttgattttgatgataaaaatagctgggagtatcttttcaagttatattggttggatctgaaagggaagcatttactaacgattgaagagctaaaaagtgcaaagaactattggactgttcctactactgctggtaggagagagaaagaggagtcatctgatgaactatatgatgcaagcaatgaccaagatgctacgtttgacatttcctcaaagaaacaaagacagaataactcttcaggaaaaagaggacaaaaacgtaaaaaagatggtggcattacttcaaggaagcgtggaatctcaattaatagtgctggaagcttaccgaatggatcaacaggtgaagggatgtccttggcaggtgacacaaaatgggcatcatctgagttattggaattcattggtcacatgagaaatggtgatagttcttatatttcccagtttgatgtccaggttcttttgctcgaatatataaagcaaaataacctctctgatcctcgcagaaaaagtcagattatctgtgatgcaaggcttagcaatttgtttagaaaaccacgtgttggtcattttgagatgttaaagcttttggagatgcattatcttgtgaaacaggttccaacattgaatgcagatagtgaaagagcatttgattcatactcggcccaagtaaatcatggaggatataatgagttgtccgataaattaggttctgataagaggaggaaggctcatatgaagattgaaagagaatcgacaattaatccagaggattatgctgccattgacatgcacaatatcaatctgatttacttgcgccgcagtgttatggaggatcttattgatgaggttgctgttttctctgacaaaattgctggggcttttgtgaggataagaatttccggtcttggcaacaagcaagatatgtaccgactggtgaaagttctcggtacacataaagttgcagagcgatacactgttggaggaatgcaagcggttacgccagagtatgaagtttggtctaactgcccggttaaaagtgagggatgtctatgataaagctaaaatcttccaatctctgcaatttaaagattggttggaaaatgagaaacagaggctgagccgtcttcgtgatcgtgctagtgaaaccggacgccgaaaagaattgagagagtgtgtagaaaagttgcagcttctgaacactcctgaagaaacagagcgcatgattaatgaagctcctgaagtacatgttgatccccagatggatccaagttatgaatccgctgaagaacccgattataagaaagctgttgattggaccatgcatcggaacggaccagatctattatttccaggaagaaaagggacaaaattgaattctgtggagaatcatacacaaaatagtctggatgcaagcggtcacattagcagtctacctacagaggatgtggaccatagattaggtgctggaagtaacattaatttaaacaatatggcaccagagcctgcatcacttggagttttatcaaatgacactgagccagaaaaagtttggcactacaaagaccctaatggaaatgttcagggaccgtttactcttttgcagttatccaattgggcaagttttttcccacgtgacctgagaatatggcttacatttgagagtgaggagaactcactactgttgactgaagtgctcccaaagcagcagaaagattttattcagccttcaacagttactaccagtgataaatcaatatgggcaggctctggtcaagatagaattaactcaaatgcaaataactcttcctcccctagcttgtctgctgagtgctatgatccaacaaaatatctaaagcctctaggtggaacgtcaccatcaagatctctgaaagattctcatgctttgcatgaggtccagaatcaggttaacgattcatccacaattctttcttcagctggttcatatgtaccaaccagttctcatgatgaaagggtctcaagagacagggttgatgagtggaacagtagtcaggacaatggtggcatttggaatccaaccatgaatcatagtcggaagagtaatgcacagcaacatcctgacggttttacagggaaggaccaaatgctaactgaatctaaatgtagttcacatatggtctcagttcttaccccacaacaatctgagagagaccctgccacttctcttagtactacaagtcgtccggagtgcaaaaccatgtgccggcaggaaggttcttcatggagttcagctacaaatgctggagttcatgaccttcagttaactattgctttaacaaagccagagacatgttctccaacaaatcctgttgaagacagagattcgagttctgcttctgcggtgtcttgtcagtcaggggctcctgcctgcattccccaacccgatccaacatctacatgtaattcaagtaagattgaggcaaccatggatctgcataaaacatgccagcctgacacatcaaatgaatcattcggccggcttcctgaacctcaaagtggctcactcttttccttgaaaactctaaatcttgagtccgagcaccctagttctacgccaaaactggaggggaaggaaacttccatgaaccagtcaggatcaacatcagtagcacatgagaatttagctacaaagacacgtgtccgcccacctaccagtaaaattgatagcttgcaaccacttaaggaaagatcatgtccaacagaaagggactcaatcactcaattagagcatctgtttgaagagaatgtggtaaagagaaataacgaagtggtcaatcctgtatctgatgctgaagggattgctgtatcagatgtgttggaatcgttaacagaacaagattgtgaaaaatacagtacacatggagcagattgtgaaaaatacagtacacatggagcagcgcctttacaaaatttggtgccagcttcagccgaggaagaacaaccacaatgctccagtcctattgcattgtccccttggggggaaccaagttactatcagggtgaagctgttgattctgctctatggggcgtccaggatggtaatgacatgtggtcaatgccttcaccaacacctggtctccagccttcatcagaggaggcgagagcggaccatggagatggtgcatttgtcgaaacattaccaagacaaggggacgaaaagacggaacatgcaaactcaagtgtctcaggttctggagtgccagaacaggtaaaaccaaaagcaagcactgcatcaggtccatctctagatgggagcacaaaagctttgggttggcaactgctgggctcatctctagaggggagtgcaaaagcttcaggctggaaaccgccagctttatcgattgaagggattgctaatgcctcaggttcgcaagcattgtatcctacgcaagggagcacaaaatcttcaggttgtcagcgatcaagttcatccccagatgggagtagaaaagcctcaggttggcaacagtcaagtacatcaccggtggggagtggaaaagctcatggctggcaacgatcaggttcttttacccagggtggtacaaaagctgcaggctggcaaccctctggttcttctacagatcggagtgcaaaagttgatggctggcaacgaacaagttcatctccggagggaaacagaaaagcttcaggctggcattcatcaggtcgtgagagctcaaagatcacatatggtgccagtgaaaaccgtaaatcattttctagccaccaagcgacgacaccaacagggagacactctttggcaaggaggcagggaagcagcgacaagggtgctgctggttgggaagagagtctaggaaacacttgggaagcatcaaagagacaacagagaaacagcgacaagaatgcaggctgcggagaggctctcggaagcaacaggacctggcacccatcgtctggtaaccccagtcggagcagccaggggaatcaccaacatgacaggcattctcacggcagtgattcgcggcggggtagctcaaactaccctcggaggtccgaccatcgtcatgaccatggcagtggtggttcgtcaagaccctcgtcaagagggcagccccagaggggggtttgtaaatactacgagaatggccactgctggaagggctcgaaatgccagtacctgcaccgatgactgccgtgaccgtgggaagcggaacgccctcacatttttgtatagcagcatatggtctcgtcgtagtcagtaaaaggaggaactgtgtcggcgggaccactagttcgtagtagtacatatccttcagagcaggagcatgactaaagattctccgctttggtgcaggaatgcgccccttttgttcagttaaacggaggtgtgggcatttgcaaacatggattttctccataagccagggtgttgtgcaatcgtacggaataactactgaagagctgcacgtccgattgagaatgacactacggaagaggcgcatgcaaatcgtccgaatgcctacagaagagcggctatcggctggcggtagacatgtgaacggagtgctgtccccaaactgacgcggctaatgggacgaaacctacatcaaacccatccaaacccattgcaaataacttatttttttaacccaacctaatataataatttaactgaataacccacccggaccaatagccagtggttaaacccattatctaaatccatagaagattcatgtttattaaagtggattcgctaccatattccgactttaaaat

SEQ ID NO: 9820 - DNA, 6091 bp, Zea Mays
aaaagaaaggactgcagcccgcgcccgccacgcctttctctcttccgtgcagctgcagactgccgtgccggtgcggtgcgccccgctcccgtccggccggaccccaaaaaaaaaccacccagaccgctgcgattttttacgggaaaggcttccccctgtttacggctttacgccaagcccgccagctcgcccgttgcattcccgtttcgagcttccgccctccctcctgtgtactatctctttccctctgcccaccgctcgcagtcgtacaccaaccacttcatttcggggccgtgagagagaggccgcgcggcggcgacgaggcccggagcgagggtggaggacgacttagggtttttggtcggctgatccatggacagggggacgggcccgggcgccgaggtgctctcccccggcgaggccgagtggcccccagagctccgcctcccgccgccgcctcctcccgtgccggagcccccagggccgcatccgcccgcccctgactccgcttcgatgcgaatgcccgcacctcatctacacctgcagcttcctcccgcggcggcggcgaggaaggacccgtctccgcctcgccacggggagggcttcgatgaccagctgttcctcggatcgctcatgggggctgcggccccgctccagcatcagcaccaccaccagcagcagcccgccgccgcggcaccggtgaagaggaagagagggaggccgccgaagaacagggacggtgcggcgccggtgcctgcgccggtcaagccggtgagcaagaaggatgaggaggtggtgtgcttcatctgcttcgatgggggcaacctcgtggtttgcgaccgaaggggttgcccgaaggtgtaccatcctgcgtgcatcaagcgagatgaatccttctttcggtgtcgggtcaagtgggattgtggttggcacatatgcagcagctgcgaaaaggcagtacaatacatgtgttatacttgtacgtactctgtctgcaaagggtgcgtcaaacaaggcaaattctttggcgttagagggagcaagggtttctgtgacacatgttatggtactatattattgatagaatccaaagacgatggtgcaaagctcttcttcacgagaccagaattttcaatcaggataagtaggtggccagagaggttgtgatggattttattcaaatttatcttcgtacacaacaggtctacgaggttggtgttgattttgatgataaaaatagctgggagtatcttttcaagttatattggttggatctgaaagggaagcatttactaacgattgaagagctaaaaagtgcaaagaactattggactgttcctactactgctggtaggagagagaaagaggagtcatctgatgaactatatgatgcaagcaatgaccaagatgctacgtttgacatttcctcaaagaaacaaagacagaataactcttcaggaaaaagaggacaaaaacgtaaaaaagatggtggcattacttcaaggaagcgtggaatctcaattaatagtgctggaagcttaccgaatggatcaacaggtgaagggatgtccttggcaggtgacacaaaatgggcatcatctgagttattggaattcattggtcacatgagaaatggtgatagttcttatatttcccagtttgatgtccaggttcttttgctcgaatatataaagcaaaataacctctctgatcctcgcagaaaaagtcagattatctgtgatgcaaggcttagcaatttgtttagaaaaccacgtgttggtcattttgagatgttaaagcttttggagatgcattatcttgtgaaacaggttccaacattgaatgcagatagtgaaagagcatttgattcatactcggcccaagtaaatcatggaggatataatgagttgtccgataaattaggttctgataagaggaggaaggctcatatgaagattgaaagagaatcgacaattaatccagaggattatgctgccattgacatgcacaatatcaatctgatttacttgcgccgcagtgttatggaggatcttattgatgaggttgctgttttctctgacaaaattgctggggcttttgtgaggataagaatttccggtcttggcaacaagcaagatatgtaccgactggtgaaagttctcggtacacataaagttgcagagcgatacactgttggtaagaagacaacagattatgctcttgagatatctaatttagaaaaaaaagagattatcacaatggacacgatctcaaatcaggatttcacagaggaggaatgcaagcggttacgccagagtatgaagtttggtctaactgcccggttaaaagtgagggatgtctatgataaagctaaaatcttccaatctctgcaatttaaagattggttggaaaatgagaaacagaggctgagccgtcttcgtgatcgtgctagtgaaaccggacgccgaaaagaattgagagagtgtgtagaaaagttgcagcttctgaacactcctgaagaaacagagcgcatgattaatgaagctcctgaagtacatgttgatccccagatggatccaagttatgaatccgctgaagaacccgattataagaaagctgttgattggaccatgcatcggaacggaccagatctattatttccaggaagaaaagggacaaaattgaattctgtggagaatcatacacaaaatagtctggatgcaagcggtcacattagcagtctacctacagaggatgtggaccatagattaggtgctggaagtaacattaatttaaacaatatggcaccagagcctgcatcacttggagttttatcaaatgacactgagccagaaaaagtttggcactacaaagaccctaatggaaatgttcagggaccgtttactcttttgcagttatccaattgggcaagttttttcccacgtgacctgagaatatggcttacatttgagagtgaggagaactcactactgttgactgaagtgctcccaaagcagcagaaagattttattcagccttcaacagttactaccagtgataaatcaatatgggcaggctctggtcaagatagaattaactcaaatgcaaataactcttcctcccctagcttgtctgctgagtgctatgatccaacaaaatatctaaagcctctaggtggaacgtcaccatcaagatctctgaaagattctcatgctttgcatgaggtccagaatcaggttaacgattcatccacaattctttcttcagctggttcatatgtaccaaccagttctcatgatgaaagggtctcaagagacagggttgatgagtggaacagtagtcaggacaatggtggcatttggaatccaaccatgaatcatagtcggaagagtaatgcacagcaacatcctgacggttttacagggaaggaccaaatgctaactgaatctaaatgtagttcacatatggtctcagttcttaccccacaacaatctgagagagaccctgccacttctcttagtactacaagtcgtccggagtgcaaaaccatgtgccggcaggaaggttcttcatggagttcagctacaaatgctggagttcatgaccttcagttaactattgctttaacaaagccagagacatgttctccaacaaatcctgttgaagacagagattcgagttctgcttctgcggtgtcttgtcagtcaggggctcctgcctgcattccccaacccgatccaacatctacatgtaattcaagtaagattgaggcaaccatggatctgcataaaacatgccagcctgacacatcaaatgaatcattcggccggcttcctgaacctcaaagtggctcactcttttccttgaaaactctaaatcttgagtccgagcaccctagttctacgccaaaactggaggggaaggaaacttccatgaaccagtcaggatcaacatcagtagcacatgagaatttagctacaaagacacgtgtccgcccacctaccagtaaaattgatagcttgcaaccacttaaggaaagatcatgtccaacagaaagggactcaatcactcaattagagcatctgtttgaagagaatgtggtaaagagaaataacgaagtggtcaatcctgtatctgatgctgaagggattgctgtatcagatgtgttggaatcgttaacagaacaagattgtgaaaaatacagtacacatggagcagattgtgaaaaatacagtacacatggagcagcgcctttacaaaatttggtgccagcttcagccgaggaagaacaaccacaatgctccagtcctattgcattgtccccttggggggaaccaagttactatcagggtgaagctgttgattctgctctatggggcgtccaggatggtaatgacatgtggtcaatgccttcaccaacacctggtctccagccttcatcagaggaggcgagagcggaccatggagatggtgcatttgtcgaaacattaccaagacaaggggacgaaaagacggaacatgcaaactcaagtgtctcaggttctggagtgccagaacaggtaaaaccaaaagcaagcactgcatcaggtccatctctagatgggagcacaaaagctttgggttggcaactgctgggctcatctctagaggggagtgcaaaagcttcaggctggaaaccgccagctttatcgattgaagggattgctaatgcctcaggttcgcaagcattgtatcctacgcaagggagcacaaaatcttcaggttgtcagcgatcaagttcatccccagatgggagtagaaaagcctcaggttggcaacagtcaagtacatcaccggtggggagtggaaaagctcatggctggcaacgatcaggttcttttacccagggtggtacaaaagctgcaggctggcaaccctctggttcttctacagatcggagtgcaaaagttgatggctggcaacgaacaagttcatctccggagggaaacagaaaagcttcaggctggcattcatcaggtcgtgagagctcaaagatcacatatggtgccagtgaaaaccgtaaatcattttctagccaccaagcgacgacaccaacagggagacactctttggcaaggaggcagggaagcagcgacaagggtgctgctggttgggaagagagtctaggaaacacttgggaagcatcaaagagacaacagagaaacagcgacaagaatgcaggctgcggagaggctctcggaagcaacaggacctggcacccatcgtctggtaaccccagtcggagcagccaggggaatcaccaacatgacaggcattctcacggcagtgattcgcggcggggtagctcaaactaccctcggaggtccgaccatcgtcatgaccatggcagtggtggttcgtcaagaccctcgtcaagagggcagccccagaggggggtttgtaaatactacgagaatggccactgctggaagggctcgaaatgccagtacctgcaccgatgactgccgtgaccgtgggaagcggaacgccctcacatttttgtatagcagcatatggtctcgtcgtagtcagtaaaaggaggaactgtgtcggcgggaccactagttcgtagtagtacatatccttcagagcaggagcatgactaaagattctccgctttggtgcaggaatgcgccccttttgttcagttaaacggaggtgtgggcatttgcaaacatggattttctccataagccagggtgttgtgcaatcgtacggaataactactgaagagctgcacgtccgattgagaatgacactacggaagaggcgcatgcaaatcgtccgaatgcctacagaagagcggctatcggctggcggtagacatgtgaacggagtgctgtccccaaactgacgcggctaatgggacgaaacctacatcaaacccatccaaacccattgcaaataacttatttttttaacccaacctaatataataatttaactgaataacccacccggaccaatagccagtggttaaacccattatctaaatccatagaagattcatgtttattaaagtggattcgctaccatattccgactttaaaat

SEQ ID NO: 9821 - DNA, 6035 bp, Zea Mays
cgcccgtccaatcgcctcgccaagggaccagccccgcgccgcgcagaaaaagaaaggactgcagcccgcgcccgccacgcctttctctcttccgtgcagctgcagactgccgtgccggtgcggtgcgccccgctcccgtccggccggaccccaaaaaaaaaccacccagaccgctgcgattttttacgggaaaggcttccccctgtttacggctttacgccaagcccgccagctcgcccgttgcattcccgtttcgagcttccgccctccctcctgtgtactatctctttccctctgcccaccgctcgcagtcgtacaccaaccacttcatttcggggccgtgagagagaggccgcgcggcggcgacgaggcccggagcgagggtggaggacgacttagggtttttggtcggctgatccatggacagggggacgggcccgggcgccgaggtgctctcccccggcgaggccgagtggcccccagagctccgcctcccgccgccgcctcctcccgtgccggagcccccagggccgcatccgcccgcccctgactccgcttcgatgcgaatgcccgcacctcatctacacctgcagcttcctcccgcggcggcggcgaggaaggacccgtctccgcctcgccacggggagggcttcgatgaccagctgttcctcggatcgctcatgggggctgcggccccgctccagcatcagcaccaccaccagcagcagcccgccgccgcggcaccggtgaagaggaagagagggaggccgccgaagaacagggacggtgcggcgccggtgcctgcgccggtcaagccggtgagcaagaaggatgaggaggtggtgtgcttcatctgcttcgatgggggcaacctcgtggtttgcgaccgaaggggttgcccgaaggtgtaccatcctgcgtgcatcaagcgagatgaatccttctttcggtgtcgggtcaagtgggattgtggttggcacatatgcagcagctgcgaaaaggcagtacaatacatgtgttatacttgtacgtactctgtctgcaaagggtgcgtcaaacaaggcaaattctttggcgttagagggagcaagggtttctgtgacacatgttatggtactatattattgatagaatccaaagacgatggtgcaaaggttggtgttgattttgatgataaaaatagctgggagtatcttttcaagttatattggttggatctgaaagggaagcatttactaacgattgaagagctaaaaagtgcaaagaactattggactgttcctactactgctggtaggagagagaaagaggagtcatctgatgaactatatgatgcaagcaatgaccaagatgctacgtttgacatttcctcaaagaaacaaagacagaataactcttcaggaaaaagaggacaaaaacgtaaaaaagatggtggcattacttcaaggaagcgtggaatctcaattaatagtgctggaagcttaccgaatggatcaacaggtgaagggatgtccttggcaggtgacacaaaatgggcatcatctgagttattggaattcattggtcacatgagaaatggtgatagttcttatatttcccagtttgatgtccaggttcttttgctcgaatatataaagcaaaataacctctctgatcctcgcagaaaaagtcagattatctgtgatgcaaggcttagcaatttgtttagaaaaccacgtgttggtcattttgagatgttaaagcttttggagatgcattatcttgtgaaacaggttccaacattgaatgcagatagtgaaagagcatttgattcatactcggcccaagtaaatcatggaggatataatgagttgtccgataaattaggttctgataagaggaggaaggctcatatgaagattgaaagagaatcgacaattaatccagaggattatgctgccattgacatgcacaatatcaatctgatttacttgcgccgcagtgttatggaggatcttattgatgaggttgctgttttctctgacaaaattgctggggcttttgtgaggataagaatttccggtcttggcaacaagcaagatatgtaccgactggtgaaagttctcggtacacataaagttgcagagcgatacactgttggtaagaagacaacagattatgctcttgagatatctaatttagaaaaaaaagagattatcacaatggacacgatctcaaatcaggatttcacagaggaggaatgcaagcggttacgccagagtatgaagtttggtctaactgcccggttaaaagtgagggatgtctatgataaagctaaaatcttccaatctctgcaatttaaagattggttggaaaatgagaaacagaggctgagccgtcttcgtgatcgtgctagtgaaaccggacgccgaaaagaaattgagagagtgtgtagaaaagttgcagcttctgaacactcctgaagaaacagagcgcatgattaatgaagctcctgaagtacatgttgatccccagatggatccaagttatgaatccgctgaagaacccgattataagaaagctgttgattggaccatgcatcggaacggaccagatctattatttccaggaagaaaagggacaaaattgaattctgtggagaatcatacacaaaatagtctggatgcaagcggtcacattagcagtctacctacagaggatgtggaccatagattaggtgctggaagtaacattaatttaaacaatatggcaccagagcctgcatcacttggagttttatcaaatgacactgagccagaaaaagtttggcactacaaagaccctaatggaaatgttcagggaccgtttactcttttgcagttatccaattgggcaagttttttcccacgtgacctgagaatatggcttacatttgagagtgaggagaactcactactgttgactgaagtgctcccaaagcagcagaaagattttattcagccttcaacagttactaccagtgataaatcaatatgggcaggctctggtcaagatagaattaactcaaatgcaaataactcttcctcccctagcttgtctgctgagtgctatgatccaacaaaatatctaaagcctctaggtggaacgtcaccatcaagatctctgaaagattctcatgctttgcatgaggtccagaatcaggttaacgattcatccacaattctttcttcagctggttcatatgtaccaaccagttctcatgatgaaagggtctcaagagacagggttgatgagtggaacagtagtcaggacaatggtggcatttggaatccaaccatgaatcatagtcggaagagtaatgcacagcaacatcctgacggttttacagggaaggaccaaatgctaactgaatctaaatgtagttcacatatggtctcagttcttaccccacaacaatctgagagagaccctgccacttctcttagtactacaagtcgtccggagtgcaaaaccatgtgccggcaggaaggttcttcatggagttcagctacaaatgctggagttcatgaccttcagttaactattgctttaacaaagccagagacatgttctccaacaaatcctgttgaagacagagattcgagttctgcttctgcggtgtcttgtcagtcaggggctcctgcctgcattccccaacccgatccaacatctacatgtaattcaagtaagattgaggcaaccatggatctgcataaaacatgccagcctgacacatcaaatgaatcattcggccggcttcctgaacctcaaagtggctcactcttttccttgaaaactctaaatcttgagtccgagcaccctagttctacgccaaaactggaggggaaggaaacttccatgaaccagtcaggatcaacatcagtagcacatgagaatttagctacaaagacacgtgtccgcccacctaccagtaaaattgatagcttgcaaccacttaaggaaagatcatgtccaacagaaagggactcaatcactcaattagagcatctgtttgaagagaatgtggtaaagagaaataacgaagtggtcaatcctgtatctgatgctgaagggattgctgtatcagatgtgttggaatcgttaacagaacaagattgtgaaaaatacagtacacatggagcagattgtgaaaaatacagtacacatggagcagcgcctttacaaaatttggtgccagcttcagccgaggaagaacaaccacaatgctccagtcctattgcattgtccccttggggggaaccaagttactatcagggtgaagctgttgattctgctctatggggcgtccaggatggtaatgacatgtggtcaatgccttcaccaacacctggtctccagccttcatcagaggaggcgagagcggaccatggagatggtgcatttgtcgaaacattaccaagacaaggggacgaaaagacggaacatgcaaactcaagtgtctcaggttctggagtgccagaacaggtaaaaccaaaagcaagcactgcatcaggtccatctctagatgggagcacaaaagctttgggttggcaactgctgggctcatctctagaggggagtgcaaaagcttcaggctggaaaccgccagctttatcgattgaagggattgctaatgcctcaggttcgcaagcattgtatcctacgcaagggagcacaaaatcttcaggttgtcagcgatcaagttcatccccagatgggagtagaaaagcctcaggttggcaacagtcaagtacatcaccggtggggagtggaaaagctcatggctggcaacgatcaggttcttttacccagggtggtacaaaagctgcaggctggcaaccctctggttcttctacagatcggagtgcaaaagttgatggctggcaacgaacaagttcatctccggagggaaacagaaaagcttcaggctggcattcatcaggtcgtgagagctcaaagatcacatatggtgccagtgaaaaccgtaaatcattttctagccaccaagcgacgacaccaacagggagacactctttggcaaggaggcagggaagcagcgacaagggtgctgctggttgggaagagagtctaggaaacacttgggaagcatcaaagagacaacagagaaacagcgacaagaatgcaggctgcggagaggctctcggaagcaacaggacctggcacccatcgtctggtaaccccagtcggagcagccaggggaatcaccaacatgacaggcattctcacggcagtgattcgcggcggggtagctcaaactaccctcggaggtccgaccatcgtcatgaccatggcagtggtggttcgtcaagaccctcgtcaagagggcagccccagaggggggtttgtaaatactacgagaatggccactgctggaagggctcgaaatgccagtacctgcaccgatgactgccgtgaccgtgggaagcggaacgccctcacatttttgtatagcagcatatggtctcgtcgtagtcagtaaaaggaggaactgtgtcggcgggaccactagttcgtagtagtacatatccttcagagcaggagcatgactaaagattctccgctttggtgcaggaatgcgccccttttgttcagttaaacggaggtgtgggcatttgcaaacatggattttctccataagccagggtgttgtgcaatcgtacggaataactactgaagagctgcacgtccgattgagaatgacactacggaagaggcgcatgcaaatcgtccgaatgcctacagaagagcggctatcggctggcggtagacatgtgaacggagtgctgtccccaaactgacgcggctaatgggacgaaacctacatcaaacccatccaaacccattgcaaataacttatttttttaacccaacctaatataataatttaactgaataacccacccggaccaatagccagtggttaaacccattatctaaatccatagaagattcatgtttattaaagtggattcgctaccatattccgactttaaaat

SEQ ID NO: 9822 - DNA, 6252 bp, Zea Mays
cgcgttccgcagaaaccggagaacgggcgcgacaaaaggtcgccgggaaccgcggtgataatcaaggccaaaaactgcccaactccgcagcccgcactggtcaaaaggtgcgcacccacccatgatgccacgcacggcaccggcaccggcggcacgccgtcaccgcctcctcgacccactgcttgagcgggcgtgagcccaataactgcagcgaccaaccacggcgccccgtcgtctacaggctacaggcgaggcaacacgcctttcagtctttggccttctcccccgggctcctcccgtctccgcccgtccaatcgcctcgccaagggaccagccccgcgccgcgcagaaaaagaaaggactgcagcccgcgcccgccacgcctttctctcttccgtgcagctgcagactgccgtgccggtgcggtgcgccccgctcccgtccggccggaccccaaaaaaaaaccacccagaccgctgcgattttttacgggaaaggcttccccctgtttacggctttacgccaagcccgccagctcgcccgttgcattcccgtttcgagcttccgccctccctcctgtgtactatctctttccctctgcccaccgctcgcagtcgtacaccaaccacttcatttcggggccgtgagagagaggccgcgcggcggcgacgaggcccggagcgagggtggaggacgacttagggtttttggtcggctgatccatggacagggggacgggcccgggcgccgaggtgctctcccccggcgaggccgagtggcccccagagctccgcctcccgccgccgcctcctcccgtgccggagcccccagggccgcatccgcccgcccctgactccgcttcgatgcgaatgcccgcacctcatctacacctgcagcttcctcccgcggcggcggcgaggaaggacccgtctccgcctcgccacggggagggcttcgatgaccagctgttcctcggatcgctcatgggggctgcggccccgctccagcatcagcaccaccaccagcagcagcccgccgccgcggcaccggtgaagaggaagagagggaggccgccgaagaacagggacggtgcggcgccggtgcctgcgccggtcaagccggtgagcaagaaggatgaggaggtggtgtgcttcatctgcttcgatgggggcaacctcgtggtttgcgaccgaaggggttgcccgaaggtgtaccatcctgcgtgcatcaagcgagatgaatccttctttcggtgtcgggtcaagtgggattgtggttggcacatatgcagcagctgcgaaaaggcagtacaatacatgtgttatacttgtacgtactctgtctgcaaagggtgcgtcaaacaaggcaaattctttggcgttagagggagcaagggtttctgtgacacatgttatggtactatattattgatagaatccaaagacgatggtgcaaaggttggtgttgattttgatgataaaaatagctgggagtatcttttcaagttatattggttggatctgaaagggaagcatttactaacgattgaagagctaaaaagtgcaaagaactattggactgttcctactactgctggtaggagagagaaagaggagtcatctgatgaactatatgatgcaagcaatgaccaagatgctacgtttgacatttcctcaaagaaacaaagacagaataactcttcaggaaaaagaggacaaaaacgtaaaaaagatggtggcattacttcaaggaagcgtggaatctcaattaatagtgctggaagcttaccgaatggatcaacaggtgaagggatgtccttggcaggtgacacaaaatgggcatcatctgagttattggaattcattggtcacatgagaaatgaaaaagtcagattatctgtgatgcaaggcttagcaatttgtttagaaaaccacgtgttggtcattttgagatgttaaagcttttggagatgcattatcttgtgaaacaggttccaacattgaatgcagatagtgaaagagcatttgattcatactcggcccaagtaaatcatggaggatataatgagttgtccgataaattaggttctgataagaggaggaaggctcatatgaagattgaaagagaatcgacaattaatccagaggattatgctgccattgacatgcacaatatcaatctgatttacttgcgccgcagtgttatggaggatcttattgatgaggttgctgttttctctgacaaaattgctggggcttttgtgaggataagaatttccggtcttggcaacaagcaagatatgtaccgactggtgaaagttctcggtacacataaagttgcagagcgatacactgttggtaagaagacaacagattatgctcttgagatatctaatttagaaaaaaaagagattatcacaatggacacgatctcaaatcaggatttcacagaggaggaatgcaagcggttacgccagagtatgaagtttggtctaactgcccggttaaaagtgagggatgtctatgataaagctaaaatcttccaatctctgcaatttaaagattggttggaaaatgagaaacagaggctgagccgtcttcgtgatcgtgctagtgaaaccggacgccgaaaagaattgagagagtgtgtagaaaagttgcagcttctgaacactcctgaagaaacagagcgcatgattaatgaagctcctgaagtacatgttgatccccagatggatccaagttatgaatccgctgaagaacccgattataagaaagctgttgattggaccatgcatcggaacggaccagatctattatttccaggaagaaaagggacaaaattgaattctgtggagaatcatacacaaaatagtctggatgcaagcggtcacattagcagtctacctacagaggatgtggaccatagattaggtgctggaagtaacattaatttaaacaatatggcaccagagcctgcatcacttggagttttatcaaatgacactgagccagaaaaagtttggcactacaaagaccctaatggaaatgttcagggaccgtttactcttttgcagttatccaattgggcaagttttttcccacgtgacctgagaatatggcttacatttgagagtgaggagaactcactactgttgactgaagtgctcccaaagcagcagaaagattttattcagccttcaacagttactaccagtgataaatcaatatgggcaggctctggtcaagatagaattaactcaaatgcaaataactcttcctcccctagcttgtctgctgagtgctatgatccaacaaaatatctaaagcctctaggtggaacgtcaccatcaagatctctgaaagattctcatgctttgcatgaggtccagaatcaggttaacgattcatccacaattctttcttcagctggttcatatgtaccaaccagttctcatgatgaaagggtctcaagagacagggttgatgagtggaacagtagtcaggacaatggtggcatttggaatccaaccatgaatcatagtcggaagagtaatgcacagcaacatcctgacggttttacagggaaggaccaaatgctaactgaatctaaatgtagttcacatatggtctcagttcttaccccacaacaatctgagagagaccctgccacttctcttagtactacaagtcgtccggagtgcaaaaccatgtgccggcaggaaggttcttcatggagttcagctacaaatgctggagttcatgaccttcagttaactattgctttaacaaagccagagacatgttctccaacaaatcctgttgaagacagagattcgagttctgcttctgcggtgtcttgtcagtcaggggctcctgcctgcattccccaacccgatccaacatctacatgtaattcaagtaagattgaggcaaccatggatctgcataaaacatgccagcctgacacatcaaatgaatcattcggccggcttcctgaacctcaaagtggctcactcttttccttgaaaactctaaatcttgagtccgagcaccctagttctacgccaaaactggaggggaaggaaacttccatgaaccagtcaggatcaacatcagtagcacatgagaatttagctacaaagacacgtgtccgcccacctaccagtaaaattgatagcttgcaaccacttaaggaaagatcatgtccaacagaaagggactcaatcactcaattagagcatctgtttgaagagaatgtggtaaagagaaataacgaagtggtcaatcctgtatctgatgctgaagggattgctgtatcagatgtgttggaatcgttaacagaacaagattgtgaaaaatacagtacacatggagcagattgtgaaaaatacagtacacatggagcagcgcctttacaaaatttggtgccagcttcagccgaggaagaacaaccacaatgctccagtcctattgcattgtccccttggggggaaccaagttactatcagggtgaagctgttgattctgctctatggggcgtccaggatggtaatgacatgtggtcaatgccttcaccaacacctggtctccagccttcatcagaggaggcgagagcggaccatggagatggtgcatttgtcgaaacattaccaagacaaggggacgaaaagacggaacatgcaaactcaagtgtctcaggttctggagtgccagaacaggtaaaaccaaaagcaagcactgcatcaggtccatctctagatgggagcacaaaagctttgggttggcaactgctgggctcatctctagaggggagtgcaaaagcttcaggctggaaaccgccagctttatcgattgaagggattgctaatgcctcaggttcgcaagcattgtatcctacgcaagggagcacaaaatcttcaggttgtcagcgatcaagttcatccccagatgggagtagaaaagcctcaggttggcaacagtcaagtacatcaccggtggggagtggaaaagctcatggctggcaacgatcaggttcttttacccagggtggtacaaaagctgcaggctggcaaccctctggttcttctacagatcggagtgcaaaagttgatggctggcaacgaacaagttcatctccggagggaaacagaaaagcttcaggctggcattcatcaggtcgtgagagctcaaagatcacatatggtgccagtgaaaaccgtaaatcattttctagccaccaagcgacgacaccaacagggagacactctttggcaaggaggcagggaagcagcgacaagggtgctgctggttgggaagagagtctaggaaacacttgggaagcatcaaagagacaacagagaaacagcgacaagaatgcaggctgcggagaggctctcggaagcaacaggacctggcacccatcgtctggtaaccccagtcggagcagccaggggaatcaccaacatgacaggcattctcacggcagtgattcgcggcggggtagctcaaactaccctcggaggtccgaccatcgtcatgaccatggcagtggtggttcgtcaagaccctcgtcaagagggcagccccagaggggggtttgtaaatactacgagaatggccactgctggaagggctcgaaatgccagtacctgcaccgatgactgccgtgaccgtgggaagcggaacgccctcacatttttgtatagcagcatatggtctcgtcgtagtcagtaaaaggaggaactgtgtcggcgggaccactagttcgtagtagtacatatccttcagagcaggagcatgactaaagattctccgctttggtgcaggaatgcgccccttttgttcagttaaacggaggtgtgggcatttgcaaacatggattttctccataagccagggtgttgtgcaatcgtacggaataactactgaagagctgcacgtccgattgagaatgacactacggaagaggcgcatgcaaatcgtccgaatgcctacagaagagcggctatcggctggcggtagacatgtgaacggagtgctgtccccaaactgacgcggctaatgggacgaaacctacatcaaacccatccaaacccattgcaaataacttatttttttaacccaacctaatataataatttaactgaataacccacccggaccaatagccagtggttaaacccattatctaaatccatagaagattcatgtttattaaagtggattcgctaccatattccgactttaaaat

SEQ ID NO: 9823 - DNA, 1154 bp, Zea Mays
attttattcaaatttatcttcgtacacaacaggtctacgaggttggtgttgattttgatgataaaaatagctgggagtatcttttcaagttatattggttggatctgaaagggaagcatttactaacgattgaagagctaaaaagtgcaaagaactattggactgttcctactactgctggtaggagagagaaagaggagtcatctgatgaactatatgatgcaagcaatgaccaagatgctacgtttgacatttcctcaaagaaacaaagacagaataactcttcaggaaaaagaggacaaaaacgtaaaaaagatggtggcattacttcaaggaagcgtggaatctcaattaatagtgctggaagcttaccgaatggatcaacaggtgaagggatgtccttggcaggtgacacaaaatgggcatcatctgagttattggaattcattggtcacatgagaaatggtgatagttcttatatttcccagtttgatgtccaggttcttttgctcgaatatataaagcaaaataacctctctgatcctcgcagaaaaagtcagattatctgtgatgcaaggcttagcaatttgtttagaaaaccacgtgttggtcattttgagatgttaaagcttttggagatgcattatcttgtgaaacaggttccaacattgaatgcagatagtgaaagagcatttgattcatactcggcccaagtaaatcatggaggatataatgagttgtccgataaattaggttctgataagaggaggaaggctcatatgaagattgaaagagaatcgacaattaatccagaggattatgctgccattgacatgcacaatatcaatctgatttacttgcgccgcagtgttatggaggatcttattgatgaggttgctgttttctctgacaaaattgctggggcttttgtgaggataagaatttccggtcttggcaacaagcaagatatgtaccgactggtgaaagttctcggtacacataaagttgcagagcgatacactgttggtaagaagacaacagattatgctcttgagatatctaatttagaaaaaaaagagattatcacaatggacacgatctcaaatcaggatttcacagagctgaatacctttaggatgtggtatattgtttaa

SEQ ID NO: 9824 - DNA, 2220 bp, Zea Mays
aaaagaaaggactgcagcccgcgcccgccacgcctttctctcttccgtgcagctgcagactgccgtgccggtgcggtgcgccccgctcccgtccggccggaccccaaaaaaaaaccacccagaccgctgcgattttttacgggaaaggcttccccctgtttacggctttacgccaagcccgccagctcgcccgttgcattcccgtttcgagcttccgccctccctcctgtgtactatctctttccctctgcccaccgctcgcagtcgtacaccaaccacttcatttcggggccgtgagagagaggccgcgcggcggcgacgaggcccggagcgagggtggaggacgacttagggtttttggtcggctgatccatggacagggggacgggcccgggcgccgaggtgctctcccccggcgaggccgagtggcccccagagctccgcctcccgccgccgcctcctcccgtgccggagcccccagggccgcatccgcccgcccctgactccgcttcgatgcgaatgcccgcacctcatctacacctgcagcttcctcccgcggcggcggcgaggaaggacccgtctccgcctcgccacggggagggcttcgatgaccagctgttcctcggatcgctcatgggggctgcggccccgctccagcatcagcaccaccaccagcagcagcccgccgccgcggcaccggtgaagaggaagagagggaggccgccgaagaacagggacggtgcggcgccggtgcctgcgccggtcaagccggtgagcaagaaggatgaggaggtggtgtgcttcatctgcttcgatgggggcaacctcgtggtttgcgaccgaaggggttgcccgaaggtgtaccatcctgcgtgcatcaagcgagatgaatccttctttcggtgtcgggtcaagtgggattgtggttggcacatatgcagcagctgcgaaaaggcagtacaatacatgtgttatacttgtacgtactctgtctgcaaagggtgcgtcaaacaaggcaaattctttggcgttagagggagcaagggtttctgtgacacatgttatggtactatattattgatagaatccaaagacgatggtgcaaaggttggtgttgattttgatgataaaaatagctgggagtatcttttcaagttatattggttggatctgaaagggaagcatttactaacgattgaagagctaaaaagtgcaaagaactattggactgttcctactactgctggtaggagagagaaagaggagtcatctgatgaactatatgatgcaagcaatgaccaagatgctacgtttgacatttcctcaaagaaacaaagacagaataactcttcaggaaaaagaggacaaaaacgtaaaaaagatggtggcattacttcaaggaagcgtggaatctcaattaatagtgctggaagcttaccgaatggatcaacaggtgaagggatgtccttggcaggtgacacaaaatgggcatcatctgagttattggaattcattggtcacatgagaaatggtgatagttcttatatttcccagtttgatgtccaggttcttttgctcgaatatataaagcaaaataacctctctgatcctcgcagaaaaagtcagattatctgtgatgcaaggcttagcaatttgtttagaaaaccacgtgttggtcattttgagatgttaaagcttttggagatgcattatcttgtgaaacaggttccaacattgaatgcagatagtgaaagagcatttgattcatactcggcccaagtaaatcatggaggatataatgagttgtccgataaattaggttctgataagaggaggaaggctcatatgaagattgaaagagaatcgacaattaatccagaggattatgctgccattgacatgcacaatatcaatctgatttacttgcgccgcagtgttatggaggatcttattgatgaggttgctgttttctctgacaaaattgctggggcttttgtgaggataagaatttccggtcttggcaacaagcaagatatgtaccgactggtgaaagttctcggtacacataaagttgcagagcgatacactgttggtaagaagacaacagattatgctcttgagatatctaatttagaaaaaaaagagattatcacaatggacacgatctcaaatcaggatttcacagagctgaatacctttaggatgtggtatattgtttaa

SEQ ID NO: 9825 - DNA, 1050 bp, Zea Mays
gtggacatccaactgtgtgcaatggttctaaaattgtttttgcaaatggatctcaagacccatggcgccacgcttctaagcagaaatcatcagacgaattgccatcatacctaattgagtgcaagaactgcggacactgcagtgatctctctggatgccctcaagctccttcaaacattgaaggtgattcatccaagtgctcacctcccgaagctctgaacaaagtaaggaaggagattgtcgatcacattgacctgtggctatcagaatgccaagagcaaggacatgacaaggagccatggctgggaagcagatggagcatagctgctatttgatcaatctgtgaagctataagcatgtgctgctagagtaaccaaggcaaatatgctttctttttcttgcagcactgtggtttatcgtttcggcaaacaatgtgggctgctgagtaagaggacatatctggtgcacataaaaaattggtgcacatggtgcatatattaaattatcaccactcattttagatctaacgtctttagttgatcattcaatttacaaataacaccttccaggcttccaccactacacaccaccacgttggagggtgcttttagcaaaatataccaaacaactagaaacgttagatctaaaatgagtggtgatgatttaatatgtgcagcatgtgcaccaatcttccatgtgcattagatatgttctcgctgagtaatccacctgtggcgaataaataaagcagtcagttctcagtctgtcatgatttcagggcctgtttggaatgcgggagtttttatttttcctattcctactctccttttttttcttctgtaaaattgaacagctctttacaaaatccctgcgtgattcctacgaattcctgcgtttcaaatatgccctcaaaatgtgagcgatgtacacacggatggcaagtttgtcgatatacatatatgcatctgtcgcatgccctttagcatgagaaacgattgcgatgtttctctgcccttggtgctaattttctgaataaaatctgaaagcatg

SEQ ID NO: 9826 - DNA, 1080 bp, Zea Mays
attactcccagatctctccaatagtcttgtccccaccaagccgactccgcccaggttctaaaattgtttttgcaaatggatctcaagacccatggcgccacgcttctaagcagaaatcatcagacgaattgccatcatacctaattgagtgcaagaactgcggacactgcagtgatctctctggatgccctcaagctccttcaaacattgaaggtgattcatccaagtgctcacctcccgaagctctgaacaaagtaaggaaggagattgtcgatcacattgacctgtggctatcagaatgccaagagcaaggacatgacaaggagccatggctgggaagcagatggagcatagctgctatttgatcaatctgtgaagctataagcatgtgctgctagagtaaccaaggcaaatatgctttctttttcttgcagcactgtggtttatcgtttcggcaaacaatgtgggctgctgagtaagaggacatatctggtgcacataaaaaattggtgcacatggtgcatatattaaattatcaccactcattttagatctaacgtctttagttgatcattcaatttacaaataacaccttccaggcttccaccactacacaccaccacgttggagggtgcttttagcaaaatataccaaacaactagaaacgttagatctaaaatgagtggtgatgatttaatatgtgcagcatgtgcaccaatcttccatgtgcattagatatgttctcgctgagtaatccacctgtggcgaataaataaagcagtcagttctcagtctgtcatgatttcagggcctgtttggaatgcgggagtttttatttttcctattcctactctccttttttttcttctgtaaaattgaacagctctttacaaaatccctgcgtgattcctacgaattcctgcgtttcaaatatgccctcaaaatgtgagcgatgtacacacggatggcaagtttgtcgatatacatatatgcatctgtcgcatgccctttagcatgagaaacgattgcgatgtttctctgcccttggtgctaattttctgaataaaatctgaaagcatg

SEQ ID NO: 9827 - DNA, 1343 bp, Zea Mays
ctgttttctaaagatctttgttgcaagaaacatttgctagttacgtgaaagattattacattggaaaatttggggcgtcagtagcatcatatgatcagcaatatttgaagaacacaactcctgctgaatcctactatggtggtaccaagtttgcagtgaggttgcatatttccaggtggcaccaaaaaacgatagtgttcgttccccaaagatcgacacgaggtaccatttggacttgtgcagaaatgttttcggcgaaggagtctaccctgatgtctttatgacaaacttatactatggaggcacaggaattgcaggttctaaaattgtttttgcaaatggatctcaagacccatggcgccacgcttctaagcagaaatcatcagacgaattgccatcatacctaattgagtgcaagaactgcggacactgcagtgatctctctggatgccctcaagctccttcaaacattgaaggtgattcatccaagtgctcacctcccgaagctctgaacaaagtaaggaaggagattgtcgatcacattgacctgtggctatcagaatgccaagagcaaggacatgacaaggagccatggctgggaagcagatggagcatagctgctatttgatcaatctgtgaagctataagcatgtgctgctagagtaaccaaggcaaatatgctttctttttcttgcagcactgtggtttatcgtttcggcaaacaatgtgggctgctgagtaagaggacatatctggtgcacataaaaaattggtgcacatggtgcatatattaaattatcaccactcattttagatctaacgtctttagttgatcattcaatttacaaataacaccttccaggcttccaccactacacaccaccacgttggagggtgcttttagcaaaatataccaaacaactagaaacgttagatctaaaatgagtggtgatgatttaatatgtgcagcatgtgcaccaatcttccatgtgcattagatatgttctcgctgagtaatccacctgtggcgaataaataaagcagtcagttctcagtctgtcatgatttcagggcctgtttggaatgcgggagtttttatttttcctattcctactctccttttttttcttctgtaaaattgaacagctctttacaaaatccctgcgtgattcctacgaattcctgcgtttcaaatatgccctcaaaatgtgagcgatgtacacacggatggcaagtttgtcgatatacatatatgcatctgtcgcatgccctttagcatgagaaacgattgcgatgtttctctgcccttggtgctaattttctgaataaaatctgaaagcatg

SEQ ID NO: 9828 - DNA, 1913 bp, Zea Mays
ggttattggacttgctcgctgcacctcatccccttgcccctgcgttttggaccatcggcaattcaaacagcggtactacgaatttctcgactactaccgagctccaaatggcccgatcttcctatacatctgtggagaatctacgtgcaatgggattggcaataactacttagctgaaaccttaaatgccaagtataatcgctctggggcaaacagttcttggtttgtttttggagggtcatatgctggagcactcagtgcttggttcaggttgaagtttcctcacttgacatgtggaagccttgcaagttcaggggttgttcttgctgtatacaactttaccgattttgacaaacagattgggatctctgctggtcctgaatgcaaggcagcacttcaagaaataacaggacttgttgatggacagcttcagtctggccgtaactcggttaaggagttgtttggagcgacaaagttagaaaatgatggtgacttcctctacttactggcagatgctgctgctattgcgttccaatatggtaatcctgatgtcttgtgctccccactagctgaagcaaagaagaatgggacagatttggtggaaacatttgctagttacgtgaaagattattacattggaaaatttggggcgtcagtagcatcatatgatcagcaatatttgaagaacacaactcctgctgaatcctactatggtggtaccaagtttgcagtgaggttgcatatttccaggtggcaccaaaaaacgatagtgttcgttccccaaagatcgacacgaggtaccatttggacttgtgcagaaatgttttcggcgaaggagtctaccctgatgtctttatgacaaacttatactatggaggcacaggaattgcaggttctaaaattgtttttgcaaatggatctcaagacccatggcgccacgcttctaagcagaaatcatcagacgaattgccatcatacctaattgagtgcaagaactgcggacactgcagtgatctctctggatgccctcaagctccttcaaacattgaaggtgattcatccaagtgctcacctcccgaagctctgaacaaagtaaggaaggagattgtcgatcacattgacctgtggctatcagaatgccaagagacatgacaaggagccatggctgggaagcagatggagcatagctgctatttgatcaatctgtgaagctataagcatgtgctgctagagtaaccaaggcaaatatgctttctttttcttgcagcactgtggtttatcgtttcggcaaacaatgtgggctgctgagtaagaggacatatctggtgcacataaaaaattggtgcacatggtgcatatattaaattatcaccactcattttagatctaacgtctttagttgatcattcaatttacaaataacaccttccaggcttccaccactacacaccaccacgttggagggtgcttttagcaaaatataccaaacaactagaaacgttagatctaaaatgagtggtgatgatttaatatgtgcagcatgtgcaccaatcttccatgtgcattagatatgttctcgctgagtaatccacctgtggcgaataaataaagcagtcagttctcagtctgtcatgatttcagggcctgtttggaatgcgggagtttttatttttcctattcctactctccttttttttcttctgtaaaattgaacagctctttacaaaatccctgcgtgattcctacgaattcctgcgtttcaaatatgccctcaaaatgtgagcgatgtacacacggatggcaagtttgtcgatatacatatatgcatctgtcgcatgccctttagcatgagaaacgattgcgatgtttctctgcccttggtgctaattttctgaataaaatctgaaagcatg

SEQ ID NO: 9829 - DNA, 2219 bp, Zea Mays
caaagattcgccagcatctctccttccacaaattccaagcactgaccatcggcaattcaaacagcggtactacgaatttctcgactactaccgagctccaaatggcccgatcttcctatacatctgtggagaatctacgtgcaatgggattggcaataactacttagctgtggtggcaaagaaatttggtgctgcattggtttctcctgagcatcgatactatggaaagagttctccttttaacagtttgacaacagaaaatctacagttcttgtcatcaaagcaggctttatttgatcttgctgttttccgccaatattatcaggaaaccttaaatgccaagtataatcgctctggggcaaacagttcttggtttgtttttggagggtcatatgctggagcactcagtgcttggttcaggttgaagtttcctcacttgacatgtggaagccttgcaagttcaggggttgttcttgctgtatacaactttaccgattttgacaaacagattgggatctctgctggtcctgaatgcaaggcagcacttcaagaaataacaggacttgttgatggacagcttcagtctggccgtaactcggttaaggagttgtttggagcgacaaagttagaaaatgatggtgacttcctctacttactggcagatgctgctgctattgcgttccaatatggtaatcctgatgtcttgtgctccccactagctgaagcaaagaagaatgggacagatttggtggaaacatttgctagttacgtgaaagattattacattggaaaatttggggcgtcagtagcatcatatgatcagcaatatttgaagaacacaactcctgctgaatcctgtaaatgccaatcccaatattcaatgttaccaaatatcatgatttaagagtttgaatgaaactatgtgcatggctattgttaatgtgttattgagcactgtttctattttattgaccacgcttttgactattggttctatttagcatatagactatggtggtaccaagtttgcagtgaggttgcatatttccaggtggcaccaaaaaacgatagtgttcgttccccaaagatcgacacgaggtaccatttggacttgtgcagaaatgttttcggcgaaggagtctaccctgatgtctttatgacaaacttatactatggaggcacaggaattgcaggttctaaaattgtttttgcaaatggatctcaagacccatggcgccacgcttctaagcagaaatcatcagacgaattgccatcatacctaattgagtgcaagaactgcggacactgcagtgatctctctggatgccctcaagctccttcaaacattgaaggtgattcatccaagtgctcacctcccgaagctctgaacaaagtaaggaaggagattgtcgatcacattgacctgtggctatcagaatgccaagagcaaggacatgacaaggagccatggctgggaagcagatggagcatagctgctatttgatcaatctgtgaagctataagcatgtgctgctagagtaaccaaggcaaatatgctttctttttcttgcagcactgtggtttatcgtttcggcaaacaatgtgggctgctgagtaagaggacatatctggtgcacataaaaaattggtgcacatggtgcatatattaaattatcaccactcattttagatctaacgtctttagttgatcattcaatttacaaataacaccttccaggcttccaccactacacaccaccacgttggagggtgcttttagcaaaatataccaaacaactagaaacgttagatctaaaatgagtggtgatgatttaatatgtgcagcatgtgcaccaatcttccatgtgcattagatatgttctcgctgagtaatccacctgtggcgaataaataaagcagtcagttctcagtctgtcatgatttcagggcctgtttggaatgcgggagtttttatttttcctattcctactctccttttttttcttctgtaaaattgaacagctctttacaaaatccctgcgtgattcctacgaattcctgcgtttcaaatatgccctcaaaatgtgagcgatgtacacacggatggcaagtttgtcgatatacatatatgcatctgtcgcatgccctttagcatgagaaacgattgcgatgtttctctgcccttggtgctaattttctgaataaaatctgaaagcatg

SEQ ID NO: 9830 - DNA, 3458 bp, Zea Mays
ctcctctcgggcaaagcaaaaaccttttggagatttatcacgatctgaggatccatggcgaaggactacccagcttctccgaaagctcagcagctccaggaatccaagaagcagcgcctgacatacatcctcgtcgtaagcgcgctctgcatcgccttctacgtccttggcgcatggcagaacaccacgcttccaaagcccataggcaactcggcgatcacccgggttggctgcgatcccactgccgccacggcacagtcctctggctctgtgccgtcgtttgggccaggctccggcgaggtgcttgacttcgacgcacaccaccggctcaccatcaacaacacggacggcgatggggaactgcagcagttcccggcgtgccctctcaacttcagtgagtacacgccgtgtgaggaccgtaggcgcgggcgccggttcgaccgaaacatgctagtgtatcgggagcgccactgtcctggcaaggacgagcaggtccgatgcctcatcccagcaccgcctgggtacaggacccccttcaagtggcctcgtagcagggactacgcctatttcaacaacatcccccacaaggagctcagcattgagaaggcggtgcagaactggatccaggttgagggcgacaagttcaagttccccggtggtggcactatgttcccgcgtggtgctgatgcctacatagatgacatcaataagctcatctcgttatcagatgggaagatcaggacggctgttgacacaggttgcggggttgctagttggggagcttacttgctgaagagaaacatcatcgccatgtcatttgcgccgagagacacgcacgaagctcaggtgcaattcgcgctggaaagaggtgtccctgccatcattggcgtcatggcgaagcagcggttgccttacccatctagggcgttcgatatggcacattgctcgcgctgtctgattccttgggatgaacacgatggactgtaccttgctgaagtcgataggattctgaggccaggaggatactggatcctctcgggacctccgatcaattggaagacacaccacagggggtgggagaggacgaaggacgacctcaagcgggagcaggacaagatcgaggatgttgcgaggagcctttgctggaacaaggtggttgagaagggggatctgtccatctggcagaagcccaagaatcaccttgagtgtgccaacattaagaagacatataagacaccccatatctgcaagagtgacaatcctgatgctgcctggtacacacagatggaagcctgtgttactccactgcctgaagtgagcaaccagggagaagtggctgggggagcggtggagaaatggccagagagggcgttcttggttccccccaggatcaaaaggggcatgattccaggactggacgccaagaagtttgacgaggacaagaagctttgggagaagagggtggcctactacaagcgcaccataccaattgcagagaacaggtacagaaatgtgatggacatgaacgccaacatgggtgggttcgctgcttctctagtgaagtaccccgtgtgggtgatgaatgtcgtccctgttaactccgaccgggacaccctcggggcaatatacgagcgagggttcatcggcacgtaccaggactggtgcgaagctttctcgacgtatccaagaacatatgacctcctgcatgctgacaatctgtttagcatctaccaagacaggtgcgatataactggcatcctcttggagatggacagaatattaaggcccgagggcacagctatcatccgcgacacagtcgacgtgctcacgaaggtccaggcaataaccaagcggatgcggtgggagagccgcatcatggaccacgaggacggccccttcaacccggagaaggtcctcatggcggtcaagacgtactggaccgccgaagccgaggaggagcactagcacacgagtgacaccgagctcacttgaaagcgtgaaccaagcctgttctacacttctactaccggtcgagagggatggcgtcagcgttttgcgtctcagtgtagtatgtatgtcccttttcaccttttctctagttctttgtagctagctacaatcagatgggaaggtaagggagagttttgagacggggggggggggggttggttggtcctctagttgagatacaggaagcggttttgtagcaggggaaggtttcgctggtcttgcgtaggttcctggccctgtttcacgaggggttgaactaggttttagtttgtaatgcgatggcaccgggcaggcattgttaatcgtatattggggtgaccataatagtaacaggtatttatttaaaaaaaagtcaaacaaattataatttgaaaccgaaggagtaatagtttacaagaatagagctagcacaagtacttctgcagagcatggtattagcagagtaagtgttgacgtataaggaaatgaaaagaaaatagagaaaagctacatcatcatcctctctagatctttacacttgatatccacgatcatcacaaatttttcgccatcgtcaacagctagatgcatcgtcctcccaccctggcccatgtctctctcgccacagagcttcaagcagaaacgggagagatccggagagggaggacgagccacaccaaaggctggttaatcaagtagtaaaacaagcagcagcgaccgcctcgacggacggacggacggaccgtgtcgtcaggcgcggaagcagccaacgaagcgcggcaggtggaggtggtgctggtgctggtgctgcgcggcggcggcggcggcgccgtcgaggtcgacgaggtggtgggcgcaggcgccgtggaggtcccggccgatgaggcgctcgagctggacgaagcggtcgacgcggcaggggatggcgagggcgccctggtgccggaagccgtactcgcgctcggcctcctccagcagcgcgccgaagagcgggtgcttgaggtggcccagcggcaccgcgaaccggcgctgctcctccccctccaggcccacgcgcaccgtcacgcaccccttgggcgctgctgccgccgccgccgccgttgccgttgccgtcatgtgctgctggtgctttccgggcatgacggtcgccagatcggtggagctctcgatcggtgtcgcttgcttggttggtcgctgctcggttgcaagaagaacaaggggaagggacggactcgaggggctggtggttagaggcaggaagagaagggccacgggtcggagctggagatggcgaggcggaagacggtgaggggggagtcgcgtagggaggtgggcacgttggacatggccgcctactcctccactagtatgtctcttcgcaacaacgacgacgaagacgattcgggtctgccttgccttgtgtggactggagtcagtcggtttgctgtttgtgaggagagctagctgcg

SEQ ID NO: 9831 - DNA, 2688 bp, Zea Mays
aaatttactgccggtgttcagactagttagttctgatctcaccaaacggatccatggcgaaggactacccagcttctccgaaagctcagcagctccaggaatccaagaagcagcgcctgacatacatcctcgtcgtaagcgcgctctgcatcgccttctacgtccttggcgcatggcagaacaccacgcttccaaagcccataggcaactcggcgatcacccgggttggctgcgatcccactgccgccacggcacagtcctctggctctgtgccgtcgtttgggccaggctccggcgaggtgcttgacttcgacgcacaccaccggctcaccatcaacaacacggacggcgatggggaactgcagcagttcccggcgtgccctctcaacttcagtgagtacacgccgtgtgaggaccgtaggcgcgggcgccggttcgaccgaaacatgctagtgtatcgggagcgccactgtcctggcaaggacgagcaggtccgatgcctcatcccagcaccgcctgggtacaggacccccttcaagtggcctcgtagcagggactacgcctatttcaacaacatcccccacaaggagctcagcattgagaaggcggtgcagaactggatccaggttgagggcgacaagttcaagttccccggtggtggcactatgttcccgcgtggtgctgatgcctacatagatgacatcaataagctcatctcgttatcagatgggaagatcaggacggctgttgacacaggttgcggggttgctagttggggagcttacttgctgaagagaaacatcatcgccatgtcatttgcgccgagagacacgcacgaagctcaggtgcaattcgcgctggaaagaggtgtccctgccatcattggcgtcatggcgaagcagcggttgccttacccatctagggcgttcgatatggcacattgctcgcgctgtctgattccttgggatgaacacgatggactgtaccttgctgaagtcgataggattctgaggccaggaggatactggatcctctcgggacctccgatcaattggaagacacaccacagggggtgggagaggacgaaggacgacctcaagcgggagcaggacaagatcgaggatgttgcgaggagcctttgctggaacaaggtggttgagaagggggatctgtccatctggcagaagcccaagaatcaccttgagtgtgccaacattaagaagacatataagacaccccatatctgcaagagtgacaatcctgatgctgcctggtacacacagatggaagcctgtgttactccactgcctgaagtgagcaaccagggagaagtggctgggggagcggtggagaaatggccagagagggcgttcttggttccccccaggatcaaaaggggcatgattccaggactggacgccaagaagtttgacgaggacaagaagctttgggagaagagggtggcctactacaagcgcaccataccaattgcagagaacaggtacagaaatgtgatggacatgaacgccaacatgggtgggttcgctgcttctctagtgaagtaccccgtgtgggtgatgaatgtcgtccctgttaactccgaccgggacaccctcggggcaatatacgagcgagggttcatcggcacgtaccaggactggtgcgaagctttctcgacgtatccaagaacatatgacctcctgcatgctgacaatctgtttagcatctaccaagacaggtgcgatataactggcatcctcttggagatggacagaatattaaggcccgagggcacagctatcatccgcgacacagtcgacgtgctcacgaaggtccaggcaataaccaagcggatgcggtgggagagccgcatcatggaccacgaggacggccccttcaacccggagaaggtcctcatggcggtcaagacgtactggaccgccgaagccgaggaggagcactagcacacgagtgacaccgagctcacttgaaagcgtgaaccaagcctgttctacacttctactaccggtcgagagggatggcgtcagcgttttgcgtctcagtgtagtatgtatgtcccttttcaccttttctctagttctttgtagctagctacaatcagatgggaaggtaagggagagttttgagacggggggggggggggttggttggtcctctagttgagatacaggaagcggttttgtagcaggggaaggtttcgctggtcttgcgtaggttcctggccctgtttcacgaggggttgaactaggttttagtttgtaatgcgatggcaccgggcaggcattgttaatcgtatattggggtgaccataatagtaacaggtatttatttagttttcatctgaaaaaaaaaagtgcttggaaatttgaactgtcggtgcatttctgatgcaaccagattctggttgttccgttgtggaagtagcagtcgacggtccctactgtggctatcactagacagaagacatccatatgggttttggcttattgcttccctgcactggcttggcccatgaacatgttcagctgggttgtctttgtacaatctcgcacatactcgtcaacgggcagcagcccaagaggaattgacgaaacgccaggcgctacgtattttcagtgtcatgataataataatagcagcagcagcaatagcaataataataataat

SEQ ID NO: 9832 - DNA, 2686 bp, Zea Mays
cttttttttctctgcctgcttcttcgaacttgtttttatgggttaggatccatggcgaaggactacccagcttctccgaaagctcagcagctccaggaatccaagaagcagcgcctgacatacatcctcgtcgtaagcgcgctctgcatcgccttctacgtccttggcgcatggcagaacaccacgcttccaaagcccataggcaactcggcgatcacccgggttggctgcgatcccactgccgccacggcacagtcctctggctctgtgccgtcgtttgggccaggctccggcgaggtgcttgacttcgacgcacaccaccggctcaccatcaacaacacggacggcgatggggaactgcagcagttcccggcgtgccctctcaacttcagtgagtacacgccgtgtgaggaccgtaggcgcgggcgccggttcgaccgaaacatgctagtgtatcgggagcgccactgtcctggcaaggacgagcaggtccgatgcctcatcccagcaccgcctgggtacaggacccccttcaagtggcctcgtagcagggactacgcctatttcaacaacatcccccacaaggagctcagcattgagaaggcggtgcagaactggatccaggttgagggcgacaagttcaagttccccggtggtggcactatgttcccgcgtggtgctgatgcctacatagatgacatcaataagctcatctcgttatcagatgggaagatcaggacggctgttgacacaggttgcggggttgctagttggggagcttacttgctgaagagaaacatcatcgccatgtcatttgcgccgagagacacgcacgaagctcaggtgcaattcgcgctggaaagaggtgtccctgccatcattggcgtcatggcgaagcagcggttgccttacccatctagggcgttcgatatggcacattgctcgcgctgtctgattccttgggatgaacacgatggactgtaccttgctgaagtcgataggattctgaggccaggaggatactggatcctctcgggacctccgatcaattggaagacacaccacagggggtgggagaggacgaaggacgacctcaagcgggagcaggacaagatcgaggatgttgcgaggagcctttgctggaacaaggtggttgagaagggggatctgtccatctggcagaagcccaagaatcaccttgagtgtgccaacattaagaagacatataagacaccccatatctgcaagagtgacaatcctgatgctgcctggtacacacagatggaagcctgtgttactccactgcctgaagtgagcaaccagggagaagtggctgggggagcggtggagaaatggccagagagggcgttcttggttccccccaggatcaaaaggggcatgattccaggactggacgccaagaagtttgacgaggacaagaagctttgggagaagagggtggcctactacaagcgcaccataccaattgcagagaacaggtacagaaatgtgatggacatgaacgccaacatgggtgggttcgctgcttctctagtgaagtaccccgtgtgggtgatgaatgtcgtccctgttaactccgaccgggacaccctcggggcaatatacgagcgagggttcatcggcacgtaccaggactggtgcgaagctttctcgacgtatccaagaacatatgacctcctgcatgctgacaatctgtttagcatctaccaagacaggtgcgatataactggcatcctcttggagatggacagaatattaaggcccgagggcacagctatcatccgcgacacagtcgacgtgctcacgaaggtccaggcaataaccaagcggatgcggtgggagagccgcatcatggaccacgaggacggccccttcaacccggagaaggtcctcatggcggtcaagacgtactggaccgccgaagccgaggaggagcactagcacacgagtgacaccgagctcacttgaaagcgtgaaccaagcctgttctacacttctactaccggtcgagagggatggcgtcagcgttttgcgtctcagtgtagtatgtatgtcccttttcaccttttctctagttctttgtagctagctacaatcagatgggaaggtaagggagagttttgagacggggggggggggggttggttggtcctctagttgagatacaggaagcggttttgtagcaggggaaggtttcgctggtcttgcgtaggttcctggccctgtttcacgaggggttgaactaggttttagtttgtaatgcgatggcaccgggcaggcattgttaatcgtatattggggtgaccataatagtaacaggtatttatttagttttcatctgaaaaaaaaaagtgcttggaaatttgaactgtcggtgcatttctgatgcaaccagattctggttgttccgttgtggaagtagcagtcgacggtccctactgtggctatcactagacagaagacatccatatgggttttggcttattgcttccctgcactggcttggcccatgaacatgttcagctgggttgtctttgtacaatctcgcacatactcgtcaacgggcagcagcccaagaggaattgacgaaacgccaggcgctacgtattttcagtgtcatgataataataatagcagcagcagcaatagcaataataataataat

SEQ ID NO: 9833 - DNA, 2852 bp, Zea Mays
caacacccccgctttctttatttatgaaaggttagctagggcgccgctgacaacatagctcgcataaataggcaggacccgtggtgctactctcctgtccccttccggccttttccccccttctggagcttggggggaggcactctgcaccttcgtcttcgtcttggcgtcctccagcgctctgccttcctgagctggcttcttgtccgcaggatccatggcgaaggactacccagcttctccgaaagctcagcagctccaggaatccaagaagcagcgcctgacatacatcctcgtcgtaagcgcgctctgcatcgccttctacgtccttggcgcatggcagaacaccacgcttccaaagcccataggcaactcggcgatcacccgggttggctgcgatcccactgccgccacggcacagtcctctggctctgtgccgtcgtttgggccaggctccggcgaggtgcttgacttcgacgcacaccaccggctcaccatcaacaacacggacggcgatggggaactgcagcagttcccggcgtgccctctcaacttcagtgagtacacgccgtgtgaggaccgtaggcgcgggcgccggttcgaccgaaacatgctagtgtatcgggagcgccactgtcctggcaaggacgagcaggtccgatgcctcatcccagcaccgcctgggtacaggacccccttcaagtggcctcgtagcagggactacgcctatttcaacaacatcccccacaaggagctcagcattgagaaggcggtgcagaactggatccaggttgagggcgacaagttcaagttccccggtggtggcactatgttcccgcgtggtgctgatgcctacatagatgacatcaataagctcatctcgttatcagatgggaagatcaggacggctgttgacacaggttgcggggttgctagttggggagcttacttgctgaagagaaacatcatcgccatgtcatttgcgccgagagacacgcacgaagctcaggtgcaattcgcgctggaaagaggtgtccctgccatcattggcgtcatggcgaagcagcggttgccttacccatctagggcgttcgatatggcacattgctcgcgctgtctgattccttgggatgaacacgatggactgtaccttgctgaagtcgataggattctgaggccaggaggatactggatcctctcgggacctccgatcaattggaagacacaccacagggggtgggagaggacgaaggacgacctcaagcgggagcaggacaagatcgaggatgttgcgaggagcctttgctggaacaaggtggttgagaagggggatctgtccatctggcagaagcccaagaatcaccttgagtgtgccaacattaagaagacatataagacaccccatatctgcaagagtgacaatcctgatgctgcctggtacacacagatggaagcctgtgttactccactgcctgaagtgagcaaccagggagaagtggctgggggagcggtggagaaatggccagagagggcgttcttggttccccccaggatcaaaaggggcatgattccaggactggacgccaagaagtttgacgaggacaagaagctttgggagaagagggtggcctactacaagcgcaccataccaattgcagagaacaggtacagaaatgtgatggacatgaacgccaacatgggtgggttcgctgcttctctagtgaagtaccccgtgtgggtgatgaatgtcgtccctgttaactccgaccgggacaccctcggggcaatatacgagcgagggttcatcggcacgtaccaggactggtgcgaagctttctcgacgtatccaagaacatatgacctcctgcatgctgacaatctgtttagcatctaccaagacaggtgcgatataactggcatcctcttggagatggacagaatattaaggcccgagggcacagctatcatccgcgacacagtcgacgtgctcacgaaggtccaggcaataaccaagcggatgcggtgggagagccgcatcatggaccacgaggacggccccttcaacccggagaaggtcctcatggcggtcaagacgtactggaccgccgaagccgaggaggagcactagcacacgagtgacaccgagctcacttgaaagcgtgaaccaagcctgttctacacttctactaccggtcgagagggatggcgtcagcgttttgcgtctcagtgtagtatgtatgtcccttttcaccttttctctagttctttgtagctagctacaatcagatgggaaggtaagggagagttttgagacggggggggggggggttggttggtcctctagttgagatacaggaagcggttttgtagcaggggaaggtttcgctggtcttgcgtaggttcctggccctgtttcacgaggggttgaactaggttttagtttgtaatgcgatggcaccgggcaggcattgttaatcgtatattggggtgaccataatagtaacaggtatttatttagttttcatctgaaaaaaaaaagtgcttggaaatttgaactgtcggtgcatttctgatgcaaccagattctggttgttccgttgtggaagtagcagtcgacggtccctactgtggctatcactagacagaagacatccatatgggttttggcttattgcttccctgcactggcttggcccatgaacatgttcagctgggttgtctttgtacaatctcgcacatactcgtcaacgggcagcagcccaagaggaattgacgaaacgccaggcgctacgtattttcagtgtcatgataataataatagcagcagcagcaatagcaataataataataat

SEQ ID NO: 9834 - DNA, 2851 bp, Zea Mays
catctttccgggtgtggcctccattcaacacccccgctttctttatttatgaaagagctcgcataaataggcaggacccgtggtgctactctcctgtccccttccggccttttccccccttctggagcttggggggaggcactctgcaccttcgtcttcgtcttggcgtcctccagcgctctgccttcctgagctggcttcttgtccgcaggatccatggcgaaggactacccagcttctccgaaagctcagcagctccaggaatccaagaagcagcgcctgacatacatcctcgtcgtaagcgcgctctgcatcgccttctacgtccttggcgcatggcagaacaccacgcttccaaagcccataggcaactcggcgatcacccgggttggctgcgatcccactgccgccacggcacagtcctctggctctgtgccgtcgtttgggccaggctccggcgaggtgcttgacttcgacgcacaccaccggctcaccatcaacaacacggacggcgatggggaactgcagcagttcccggcgtgccctctcaacttcagtgagtacacgccgtgtgaggaccgtaggcgcgggcgccggttcgaccgaaacatgctagtgtatcgggagcgccactgtcctggcaaggacgagcaggtccgatgcctcatcccagcaccgcctgggtacaggacccccttcaagtggcctcgtagcagggactacgcctatttcaacaacatcccccacaaggagctcagcattgagaaggcggtgcagaactggatccaggttgagggcgacaagttcaagttccccggtggtggcactatgttcccgcgtggtgctgatgcctacatagatgacatcaataagctcatctcgttatcagatgggaagatcaggacggctgttgacacaggttgcggggttgctagttggggagcttacttgctgaagagaaacatcatcgccatgtcatttgcgccgagagacacgcacgaagctcaggtgcaattcgcgctggaaagaggtgtccctgccatcattggcgtcatggcgaagcagcggttgccttacccatctagggcgttcgatatggcacattgctcgcgctgtctgattccttgggatgaacacgatggactgtaccttgctgaagtcgataggattctgaggccaggaggatactggatcctctcgggacctccgatcaattggaagacacaccacagggggtgggagaggacgaaggacgacctcaagcgggagcaggacaagatcgaggatgttgcgaggagcctttgctggaacaaggtggttgagaagggggatctgtccatctggcagaagcccaagaatcaccttgagtgtgccaacattaagaagacatataagacaccccatatctgcaagagtgacaatcctgatgctgcctggtacacacagatggaagcctgtgttactccactgcctgaagtgagcaaccagggagaagtggctgggggagcggtggagaaatggccagagagggcgttcttggttccccccaggatcaaaaggggcatgattccaggactggacgccaagaagtttgacgaggacaagaagctttgggagaagagggtggcctactacaagcgcaccataccaattgcagagaacaggtacagaaatgtgatggacatgaacgccaacatgggtgggttcgctgcttctctagtgaagtaccccgtgtgggtgatgaatgtcgtccctgttaactccgaccgggacaccctcggggcaatatacgagcgagggttcatcggcacgtaccaggactggtgcgaagctttctcgacgtatccaagaacatatgacctcctgcatgctgacaatctgtttagcatctaccaagacaggtgcgatataactggcatcctcttggagatggacagaatattaaggcccgagggcacagctatcatccgcgacacagtcgacgtgctcacgaaggtccaggcaataaccaagcggatgcggtgggagagccgcatcatggaccacgaggacggccccttcaacccggagaaggtcctcatggcggtcaagacgtactggaccgccgaagccgaggaggagcactagcacacgagtgacaccgagctcacttgaaagcgtgaaccaagcctgttctacacttctactaccggtcgagagggatggcgtcagcgttttgcgtctcagtgtagtatgtatgtcccttttcaccttttctctagttctttgtagctagctacaatcagatgggaaggtaagggagagttttgagacggggggggggggggttggttggtcctctagttgagatacaggaagcggttttgtagcaggggaaggtttcgctggtcttgcgtaggttcctggccctgtttcacgaggggttgaactaggttttagtttgtaatgcgatggcaccgggcaggcattgttaatcgtatattggggtgaccataatagtaacaggtatttatttagttttcatctgaaaaaaaaaagtgcttggaaatttgaactgtcggtgcatttctgatgcaaccagattctggttgttccgttgtggaagtagcagtcgacggtccctactgtggctatcactagacagaagacatccatatgggttttggcttattgcttccctgcactggcttggcccatgaacatgttcagctgggttgtctttgtacaatctcgcacatactcgtcaacgggcagcagcccaagaggaattgacgaaacgccaggcgctacgtattttcagtgtcatgataataataatagcagcagcagcaatagcaataataataataat

SEQ ID NO: 9835 - DNA, 2770 bp, Zea Mays
cccggatactgttttttttttcgtttttctaccggcgccggaaagctctaggcgctgttgcgtggatcatatctcctccggtctcctcgtcgtcctcttcgaatctatctgcagttgagcacctgatcaggatccatggcgaaggactacccagcttctccgaaagctcagcagctccaggaatccaagaagcagcgcctgacatacatcctcgtcgtaagcgcgctctgcatcgccttctacgtccttggcgcatggcagaacaccacgcttccaaagcccataggcaactcggcgatcacccgggttggctgcgatcccactgccgccacggcacagtcctctggctctgtgccgtcgtttgggccaggctccggcgaggtgcttgacttcgacgcacaccaccggctcaccatcaacaacacggacggcgatggggaactgcagcagttcccggcgtgccctctcaacttcagtgagtacacgccgtgtgaggaccgtaggcgcgggcgccggttcgaccgaaacatgctagtgtatcgggagcgccactgtcctggcaaggacgagcaggtccgatgcctcatcccagcaccgcctgggtacaggacccccttcaagtggcctcgtagcagggactacgcctatttcaacaacatcccccacaaggagctcagcattgagaaggcggtgcagaactggatccaggttgagggcgacaagttcaagttccccggtggtggcactatgttcccgcgtggtgctgatgcctacatagatgacatcaataagctcatctcgttatcagatgggaagatcaggacggctgttgacacaggttgcggggttgctagttggggagcttacttgctgaagagaaacatcatcgccatgtcatttgcgccgagagacacgcacgaagctcaggtgcaattcgcgctggaaagaggtgtccctgccatcattggcgtcatggcgaagcagcggttgccttacccatctagggcgttcgatatggcacattgctcgcgctgtctgattccttgggatgaacacgatggactgtaccttgctgaagtcgataggattctgaggccaggaggatactggatcctctcgggacctccgatcaattggaagacacaccacagggggtgggagaggacgaaggacgacctcaagcgggagcaggacaagatcgaggatgttgcgaggagcctttgctggaacaaggtggttgagaagggggatctgtccatctggcagaagcccaagaatcaccttgagtgtgccaacattaagaagacatataagacaccccatatctgcaagagtgacaatcctgatgctgcctggtacacacagatggaagcctgtgttactccactgcctgaagtgagcaaccagggagaagtggctgggggagcggtggagaaatggccagagagggcgttcttggttccccccaggatcaaaaggggcatgattccaggactggacgccaagaagtttgacgaggacaagaagctttgggagaagagggtggcctactacaagcgcaccataccaattgcagagaacaggtacagaaatgtgatggacatgaacgccaacatgggtgggttcgctgcttctctagtgaagtaccccgtgtgggtgatgaatgtcgtccctgttaactccgaccgggacaccctcggggcaatatacgagcgagggttcatcggcacgtaccaggactggtgcgaagctttctcgacgtatccaagaacatatgacctcctgcatgctgacaatctgtttagcatctaccaagacaggtgcgatataactggcatcctcttggagatggacagaatattaaggcccgagggcacagctatcatccgcgacacagtcgacgtgctcacgaaggtccaggcaataaccaagcggatgcggtgggagagccgcatcatggaccacgaggacggccccttcaacccggagaaggtcctcatggcggtcaagacgtactggaccgccgaagccgaggaggagcactagcacacgagtgacaccgagctcacttgaaagcgtgaaccaagcctgttctacacttctactaccggtcgagagggatggcgtcagcgttttgcgtctcagtgtagtatgtatgtcccttttcaccttttctctagttctttgtagctagctacaatcagatgggaaggtaagggagagttttgagacggggggggggggggttggttggtcctctagttgagatacaggaagcggttttgtagcaggggaaggtttcgctggtcttgcgtaggttcctggccctgtttcacgaggggttgaactaggttttagtttgtaatgcgatggcaccgggcaggcattgttaatcgtatattggggtgaccataatagtaacaggtatttatttagttttcatctgaaaaaaaaaagtgcttggaaatttgaactgtcggtgcatttctgatgcaaccagattctggttgttccgttgtggaagtagcagtcgacggtccctactgtggctatcactagacagaagacatccatatgggttttggcttattgcttccctgcactggcttggcccatgaacatgttcagctgggttgtctttgtacaatctcgcacatactcgtcaacgggcagcagcccaagaggaattgacgaaacgccaggcgctacgtattttcagtgtcatgataataataatagcagcagcagcaatagcaataataataataat

SEQ ID NO: 9836 - DNA, 2953 bp, Zea Mays
cgaagtatttcgaacgatccccggaggcccggatactgttttttttttcgtttttctaccggcgccggaaagctctaggcgctgttgcgtggatcatatctcctccggtctcctcgtcgtcctcttcgaatctatctgcagttgagcacctgatcagagctcgcataaataggcaggacccgtggtgctactctcctgtccccttccggccttttccccccttctggagcttggggggaggcactctgcaccttcgtcttcgtcttggcgtcctccagcgctctgccttcctgagctggcttcttgtccgcaggatccatggcgaaggactacccagcttctccgaaagctcagcagctccaggaatccaagaagcagcgcctgacatacatcctcgtcgtaagcgcgctctgcatcgccttctacgtccttggcgcatggcagaacaccacgcttccaaagcccataggcaactcggcgatcacccgggttggctgcgatcccactgccgccacggcacagtcctctggctctgtgccgtcgtttgggccaggctccggcgaggtgcttgacttcgacgcacaccaccggctcaccatcaacaacacggacggcgatggggaactgcagcagttcccggcgtgccctctcaacttcagtgagtacacgccgtgtgaggaccgtaggcgcgggcgccggttcgaccgaaacatgctagtgtatcgggagcgccactgtcctggcaaggacgagcaggtccgatgcctcatcccagcaccgcctgggtacaggacccccttcaagtggcctcgtagcagggactacgcctatttcaacaacatcccccacaaggagctcagcattgagaaggcggtgcagaactggatccaggttgagggcgacaagttcaagttccccggtggtggcactatgttcccgcgtggtgctgatgcctacatagatgacatcaataagctcatctcgttatcagatgggaagatcaggacggctgttgacacaggttgcggggttgctagttggggagcttacttgctgaagagaaacatcatcgccatgtcatttgcgccgagagacacgcacgaagctcaggtgcaattcgcgctggaaagaggtgtccctgccatcattggcgtcatggcgaagcagcggttgccttacccatctagggcgttcgatatggcacattgctcgcgctgtctgattccttgggatgaacacgatggactgtaccttgctgaagtcgataggattctgaggccaggaggatactggatcctctcgggacctccgatcaattggaagacacaccacagggggtgggagaggacgaaggacgacctcaagcgggagcaggacaagatcgaggatgttgcgaggagcctttgctggaacaaggtggttgagaagggggatctgtccatctggcagaagcccaagaatcaccttgagtgtgccaacattaagaagacatataagacaccccatatctgcaagagtgacaatcctgatgctgcctggtacacacagatggaagcctgtgttactccactgcctgaagtgagcaaccagggagaagtggctgggggagcggtggagaaatggccagagagggcgttcttggttccccccaggatcaaaaggggcatgattccaggactggacgccaagaagtttgacgaggacaagaagctttgggagaagagggtggcctactacaagcgcaccataccaattgcagagaacaggtacagaaatgtgatggacatgaacgccaacatgggtgggttcgctgcttctctagtgaagtaccccgtgtgggtgatgaatgtcgtccctgttaactccgaccgggacaccctcggggcaatatacgagcgagggttcatcggcacgtaccaggactggtgcgaagctttctcgacgtatccaagaacatatgacctcctgcatgctgacaatctgtttagcatctaccaagacaggtgcgatataactggcatcctcttggagatggacagaatattaaggcccgagggcacagctatcatccgcgacacagtcgacgtgctcacgaaggtccaggcaataaccaagcggatgcggtgggagagccgcatcatggaccacgaggacggccccttcaacccggagaaggtcctcatggcggtcaagacgtactggaccgccgaagccgaggaggagcactagcacacgagtgacaccgagctcacttgaaagcgtgaaccaagcctgttctacacttctactaccggtcgagagggatggcgtcagcgttttgcgtctcagtgtagtatgtatgtcccttttcaccttttctctagttctttgtagctagctacaatcagatgggaaggtaagggagagttttgagacggggggggggggggttggttggtcctctagttgagatacaggaagcggttttgtagcaggggaaggtttcgctggtcttgcgtaggttcctggccctgtttcacgaggggttgaactaggttttagtttgtaatgcgatggcaccgggcaggcattgttaatcgtatattggggtgaccataatagtaacaggtatttatttagttttcatctgaaaaaaaaaagtgcttggaaatttgaactgtcggtgcatttctgatgcaaccagattctggttgttccgttgtggaagtagcagtcgacggtccctactgtggctatcactagacagaagacatccatatgggttttggcttattgcttccctgcactggcttggcccatgaacatgttcagctgggttgtctttgtacaatctcgcacatactcgtcaacgggcagcagcccaagaggaattgacgaaacgccaggcgctacgtattttcagtgtcatgataataataatagcagcagcagcaatagcaataataataataat

SEQ ID NO: 9837 - DNA, 1723 bp, Zea Mays
ataaatttttttggcaaattttggtccttttgcagagcagattgcagatcatttaacataaatggctgactcagaggacattcagcccctagtctgtgacaatggaactggaatggtcaaggctggctttgctggagatgatgctccccgtgctgttttcccaagtatagttggtcgtccacgccacactggtgtcatggttgggatgggacagaaggatgcttatgttggtgatgaggcccaatccaagaggggtatcctgactttgaagtatcccatcgagcatggaatcgtaagcaactgggatgacatggaaaagatctggcatcacaccttctataatgagcttcgtgtagcaccagaagagcacccagttcttcttacagaggctcctcttaaccctaaggctaacagggaaaagatgacacaaatcatgtttgaaactttcagtgttcctgctatgtatgttgctattcaagctgtcctttccctttatgctagtggccgtaccactggtattgtcctggattctggagacggtgtcagccacactgtcccaatctatgaaggctatgccctcccgcatgccattcttcgtctcgatcttgctggtagggacctcactgattccctcatgaagatcctgactgagaggggttactctttcacaaccactgctgagcgggaaattgtccgtgacatcaaggaaaagcttgcatatgtcgcgctcgactacgaacaagaactcgagaccgccaagagcagctcatcagttgagaagagctatgaactgcctgatggacaagtgatcacaataggcgcagagcgcttcagatgcccggaggttctcttccagccatccttcattggtatggaagctccaggaatccacgagacgacctacaactccatcatgaagtgtgacgttgatatcaggaaggacctgtatggcaacattgtcctcagtggtggatccaccatgttccctggcatcgccgaccgcatgagcaaggagatcactgcgctcgcgccaagcagcatgaagatcaaggtcgtcgctccaccagagaggaagtacagtgtctggatcggaggatcaatccttgcatccctgagcacatttcagcagatgtggatctcaagggctgagtatgaggagtctggtccagctattgtccacaggaagtgcttctagacgtcacctagccttaattctcctctggaaataccttcgtttgatgacatatctatgggtggttgctctgctatagctcgcagtttttgtgtttgccaatatatccggtaacattgtggagtcagccgtccactgtatgaagtatgtagtttggttatatatatattgattgtattatttactcgattctatgggttcttggatacctggaatgtgcatgatatttttaaatttttgtaacaatgtgtactccgtaacaaagttcgcgtttgaaacatcgtttctgctgctttaatgtaggtttgttcattctccgactgatttgggcactggcgtgttgcttctccaattttttgtgtggtgcttatgttctcacaaccacaagcatggaagaaaatgactggattgagggagattaaatctaggagtctacttcttctaaccgaacaagccataagatttttttttaggagcgagaggattgagcaggctaaaatccctttatataataggattttagctcctcaa

SEQ ID NO: 9838 - DNA, 1643 bp, Zea Mays
gtcatgcagtggggttcgctggttctattaggtgttggatccgtagtaggagtaaggttcgccaaagttgctgagactttggtgacctgtggatgctttgatcctgtgtttatttcaagattgcagatcatttaacataaatggctgactcagaggacattcagcccctagtctgtgacaatggaactggaatggtcaaggctggctttgctggagatgatgctccccgtgctgttttcccaagtatagttggtcgtccacgccacactggtgtcatggttgggatgggacagaaggatgcttatgttggtgatgaggcccaatccaagaggggtatcctgactttgaagtatcccatcgagcatggaatcgtaagcaactgggatgacatggaaaagatctggcatcacaccttctataatgagcttcgtgtagcaccagaagagcacccagttcttcttacagaggctcctcttaaccctaaggctaacagggaaaagatgacacaaatcatgtttgaaactttcagtgttcctgctatgtatgttgctattcaagctgtcctttccctttatgctagtggccgtaccactggtattgtcctggattctggagacggtgtcagccacactgtcccaatctatgaaggctatgccctcccgcatgccattcttcgtctcgatcttgctggtagggacctcactgattccctcatgaagatcctgactgagaggggttactctttcacaaccactgctgagcgggaaattgtccgtgacatcaaggaaaagcttgcatatgtcgcgctcgactacgaacaagaactcgagaccgccaagagcagctcatcagttgagaagagctatgaactgcctgatggacaagtgatcacaataggcgcagagcgcttcagatgcccggaggttctcttccagccatccttcattggtatggaagctccaggaatccacgagacgacctacaactccatcatgaagtgtgacgttgatatcaggaaggacctgtatggcaacattgtcctcagtggtggatccaccatgttccctggcatcgccgaccgcatgagcaaggagatcactgcgctcgcgccaagcagcatgaagatcaaggtcgtcgctccaccagagaggaagtacagtgtctggatcggaggatcaatccttgcatccctgagcacatttcagcagatgtggatctcaagggctgagtatgaggagtctggtccagctattgtccacaggaagtgcttctagacgtcacctagccttaattctcctctggaaataccttcgtttgatgacatatctatgggtggttgctctgctatagctcgcagtttttgtgtttgccaatatatccggtaacattgtggagtcagccgtccactgtatgaagtttgttcattctccgactgatttgggcactggcgtgttgcttctccaattttttgtgtggtgcttatgttctcacaaccacaagcatggaagaaaatgactggattgagggagattaaatctaggagtctacttcttctaaccgaacaagccataagatttttttttaggagcgagaggattgagcaggctaaaatccctttatataataggattttagctcctcaa

SEQ ID NO: 9839 - DNA, 1789 bp, Zea Mays
caagtgggcaaattattccgcgttggcagccgccctcctccccaaggaccccaactttccagtgcggcaccggcctcctttacacctcattgccagtttcccaccgccaggcgccagccactctcacggttgccaccctagcacgcgctcgccgtcgccacgctctatatctcgcgcctctcgccttccactctttctatacccgcccgctcgcctccctggtacgcttcgtgccgccgccgcaacctcctcctccccgtcacagattgcagatcatttaacataaatggctgactcagaggacattcagcccctagtctgtgacaatggaactggaatggtcaaggctggctttgctggagatgatgctccccgtgctgttttcccaagtatagttggtcgtccacgccacactggtgtcatggttgggatgggacagaaggatgcttatgttggtgatgaggcccaatccaagaggggtatcctgactttgaagtatcccatcgagcatggaatcgtaagcaactgggatgacatggaaaagatctggcatcacaccttctataatgagcttcgtgtagcaccagaagagcacccagttcttcttacagaggctcctcttaaccctaaggctaacagggaaaagatgacacaaatcatgtttgaaactttcagtgttcctgctatgtatgttgctattcaagctgtcctttccctttatgctagtggccgtaccactggtattgtcctggattctggagacggtgtcagccacactgtcccaatctatgaaggctatgccctcccgcatgccattcttcgtctcgatcttgctggtagggacctcactgattccctcatgaagatcctgactgagaggggttactctttcacaaccactgctgagcgggaaattgtccgtgacatcaaggaaaagcttgcatatgtcgcgctcgactacgaacaagaactcgagaccgccaagagcagctcatcagttgagaagagctatgaactgcctgatggacaagtgatcacaataggcgcagagcgcttcagatgcccggaggttctcttccagccatccttcattggtatggaagctccaggaatccacgagacgacctacaactccatcatgaagtgtgacgttgatatcaggaaggacctgtatggcaacattgtcctcagtggtggatccaccatgttccctggcatcgccgaccgcatgagcaaggagatcactgcgctcgcgccaagcagcatgaagatcaaggtcgtcgctccaccagagaggaagtacagtgtctggatcggaggatcaatccttgcatccctgagcacatttcagcagatgtggatctcaagggctgagtatgaggagtctggtccagctattgtccacaggaagtgcttctagacgtcacctagccttaattctcctctggaaataccttcgtttgatgacatatctatgggtggttgctctgctatagctcgcagtttttgtgtttgccaatatatccggtaacattgtggagtcagccgtccactgtatgaagtttgttcattctccgactgatttgggcactggcgtgttgcttctccaattttttgtgtggtgcttatgttctcacaaccacaagcatggaagaaaatgactggattgagggagattaaatctaggagtctacttcttctaaccgaacaagccataagatttttttttaggagcgagaggattgagcaggctaaaatccctttatataataggattttagctcctcaa

SEQ ID NO: 9840 - DNA, 1791 bp, Zea Mays
actgcgcgtgttgccacttgccactgagcttcgtgtcgacatctcaagctgctcgacccatgtgtgggcatctcggtcatttcgcgaaggccgcgcatcctataaatgagaccccttcctcctcccctgccgttgttgttggcttcgtggtccgtgtttaacgggcgtagagagagaaagagaacagagcgagagagggggaggacgaagccctccgcgtcgtctcctgctgttccatcccacatctattctgcctcggcttgcaccttcgacctcgctgaaagttctgacctcaaactgaaaggggcctgtgaagcgtttccttgcggcagtgcaatggaggtatttggcaaatctgtgattgctgagcccagcaatgtgattttcttgtccgcaatccttaacacagaaggatcaaaccctagtcacaagtgtgacaagaggtgccagaacgagaacatttttgggaacatgtaccgttgcaaactgactggaaccactcacatctgtgacaaaaactgtaaccagagaatcctctatgacaaccataactcgctctgccgagtgagtgggcagttttttccgctctctccattggagcagcaagcagtgaggggtatccgcaggaagcacgaagtggacagcaatgaaggctgctcctttaagcgcaggcgtggtgcacagctgcatccttcccccttcgagaggtcctactcagctgtgtctccaatcccgagccaggttggagatggcatggacctgagctagagctaacgagacttccttttcttcagccaaccacctaattccgttgtctaccctttttccctttggttacaggatggaactataagagattccttctttgtagacttttatgaagggatataagactccttagatgcaccgaataaatgtctatgtagtttctattctgtttcatgggaccttgttgtaactcgtgaactttgattgagcacctattcggatttagtagcacgttcagaaaatcattcgctgcttatcttttttcacacttccgagttagttattttgtgtgtttttttactttgtgttcaactaagtttccttctaattttgattctttaatgcaatttattataattgaggtgtacatttgtccatcaatgtaaatatgtgaaagattctttggcactgtaatccaggcacagggaactgactgcctttgctgactgaagtttttgtacagttgttactagtgttttgcttgtcaagttcctaatcaagcttgaatcatttacggtgaacatctctggttctattttcatcgtcgggtaacaagaaactaatcagggagtctcttcccatttcttgcagtggaggaatgtttagctacagccgcgcagcatgctttccagagcataaattggtggaagagaagtttgatgctaccactttgccagaagaaccgagccagacacaataacatcaaactgagtctgagatactgcactttacaaattctttcgatattggcagattgaagaccaacaagatttgaagagcagcaagatcagcttgcacctgcagtttgaagaaatcctttcaaagaagactgcttgcggcaatcttgccttcactccacaagcatgtgctgtgttatgcgtaccatgtaatgattgtagtacttgacaactgataccaaagtagtggatgcttttctttcgcatgaagtcatgttgatttttgtacgttctaacagcgtctccatcaatatcctattgaatctcccatacttctatacctata

SEQ ID NO: 9841 - DNA, 987 bp, Zea Mays
gtcttttggtattcgctttgacacgcagacttcagggcgccagccttctgcgaactgtctctacccttgacgaaggaaaaggcagccttctcaccgtcggacccggcgatgcagcggcttgcttctattgctgtcgttgtccaagggggcggcggtgaacaagttcgccgtgctgtccatggccgcgggattcctggctatagtggtgggggaattagggcgattgcggaccatggcagtgctgcttcggctttacacaagcttgtcatcaattgcggttgcattctctgtgacgtgcattatccggtcagagttgttcttgaaggttatgaagcaaaacacagaggccatcacaagctacgaaatgcttgatgcggttcgtgttgctcttggtatcctgctgcaaatggtggttatagctacaactaccagactcctgcagaatatgtctcctcccaagagagcttcatgaatgctatgacattttagctttgtttcaagtagtaagggatacaaacttcgagttaaaaatattggccaagtgcgatagtcttgtaccgaagatgctactggtgtacaactgtcaggaaatcgtggtttacttgtttcctcttttgtttttgttttacttcttcccttttctggatctggaaaattcgtagtcgttggcgagctttgcaagctaaaggctaacggagcatatgtgtttttaattccgtcttcatgtttgtgtccatgtttctgctgcgctggaagttgctactcaggctatttctttcatgtcctgaattcaactcgggggacctcttcggcgcgattgcatcttgctgaaagcccaagataaccacaaaagaatgccaataattctgtcggtatctttgattgccatgtctgttttggaaataagactctgaatatgatctgtagctactcagcgtttcctgtgttcatgccttttggatcctatttctaaaatctggatctccg

SEQ ID NO: 9842 - DNA, 1128 bp, Zea Mays
gtcttttggtattcgctttgacacgcagacttcagggcgccagccttctgcgaactgtctctacccttgacgaaggaaaaggcagccttctcaccgtcggacccggcgatgcagcggcacgtcgcctccggccggccgtcgggcacggacggctccgacttttcttaccgcatggtcgtcgaatcccagggtcgccgagggcagatcccgcctcgcgcgcctcatcctcgtgcaggcgctgcacctagtggccggaggcttgcttctattgctgtcgttgtccaagggggcggcggtgaacaagttcgccgtgctgtccatggccgcgggattcctggctatagtggtgggggaattagggcgattgcggaccatggcagtgctgcttcggctttacacaagcttgtcatcaattgcggttgcattctctgtgacgtgcattatccggtcagagttgttcttgaaggttatgaagcaaaacacagaggccatcacaagctacgaaatgcttgatgcggttcgtgttgctcttggtatcctgctgcaaatggtggttatagctacaactaccagactcctgcagaatatgtctcctcccaagagagcttcatgaatgctatgacattttagctttgtttcaagtagtaagggatacaaacttcgagttaaaaatattggccaagtgcgatagtcttgtaccgaagatgctactggtgtacaactgtcaggaaatcgtggtttacttgtttcctcttttgtttttgttttacttcttcccttttctggatctggaaaattcgtagtcgttggcgagctttgcaagctaaaggctaacggagcatatgtgtttttaattccgtcttcatgtttgtgtccatgtttctgctgcgctggaagttgctactcaggctatttctttcatgtcctgaattcaactcgggggacctcttcggcgcgattgcatcttgctgaaagcccaagataaccacaaaagaatgccaataattctgtcggtatctttgattgccatgtctgttttggaaataagactctgaatatgatctgtagctactcagcgtttcctgtgttcatgccttttggatcctatttctaaaatctggatctccg

SEQ ID NO: 9843 - DNA, 1115 bp, Zea Mays
gtcttttggtattcgctttgacacgcagacttcagggcgccagccttctgcgaactgtctctacccttgacgaaggaaaaggcagccttctcaccgtcggacccggcgatgcagcggcacgtcgcctccggccggccgtcgggcacggacggctccgacttttcttaccgcatgagggtcgccgagggcagatcccgcctcgcgcgcctcatcctcgtgcaggcgctgcacctagtggccggaggcttgcttctattgctgtcgttgtccaagggggcggcggtgaacaagttcgccgtgctgtccatggccgcgggattcctggctatagtggtgggggaattagggcgattgcggaccatggcagtgctgcttcggctttacacaagcttgtcatcaattgcggttgcattctctgtgacgtgcattatccggtcagagttgttcttgaaggttatgaagcaaaacacagaggccatcacaagctacgaaatgcttgatgcggttcgtgttgctcttggtatcctgctgcaaatggtggttatagctacaactaccagactcctgcagaatatgtctcctcccaagagagcttcatgaatgctatgacattttagctttgtttcaagtagtaagggatacaaacttcgagttaaaaatattggccaagtgcgatagtcttgtaccgaagatgctactggtgtacaactgtcaggaaatcgtggtttacttgtttcctcttttgtttttgttttacttcttcccttttctggatctggaaaattcgtagtcgttggcgagctttgcaagctaaaggctaacggagcatatgtgtttttaattccgtcttcatgtttgtgtccatgtttctgctgcgctggaagttgctactcaggctatttctttcatgtcctgaattcaactcgggggacctcttcggcgcgattgcatcttgctgaaagcccaagataaccacaaaagaatgccaataattctgtcggtatctttgattgccatgtctgttttggaaataagactctgaatatgatctgtagctactcagcgtttcctgtgttcatgccttttggatcctatttctaaaatctggatctccg

SEQ ID NO: 9844 - DNA, 1012 bp, Zea Mays
gtcttttggtattcgctttgacacgcagacttcagggcgccagccttctgcgaactgtctctacccttgacgaaggaaaaggcagccttctcaccgtcggacccggcgatgcagcggcacgtcgcctccggccggccgtcgggcacggacggctccgacttttcttaccgcatggtcgtcgaatcccggtaccagagggtcgccgagggcagatcccgcctcgcgcgcctcatcctcgtgcagggcgattgcggaccatggcagtgctgcttcggctttacacaagcttgtcatcaattgcggttgcattctctgtgacgtgcattatccggtcagagttgttcttgaaggttatgaagcaaaacacagaggccatcacaagctacgaaatgcttgatgcggttcgtgttgctcttggtatcctgctgcaaatggtggttatagctacaactaccagactcctgcagaatatgtctcctcccaagagagcttcatgaatgctatgacattttagctttgtttcaagtagtaagggatacaaacttcgagttaaaaatattggccaagtgcgatagtcttgtaccgaagatgctactggtgtacaactgtcaggaaatcgtggtttacttgtttcctcttttgtttttgttttacttcttcccttttctggatctggaaaattcgtagtcgttggcgagctttgcaagctaaaggctaacggagcatatgtgtttttaattccgtcttcatgtttgtgtccatgtttctgctgcgctggaagttgctactcaggctatttctttcatgtcctgaattcaactcgggggacctcttcggcgcgattgcatcttgctgaaagcccaagataaccacaaaagaatgccaataattctgtcggtatctttgattgccatgtctgttttggaaataagactctgaatatgatctgtagctactcagcgtttcctgtgttcatgccttttggatcctatttctaaaatctggatctccg

SEQ ID NO: 9845 - DNA, 794 bp, Zea Mays
cttgcacggagttctgcgttctcagggcgattgcggaccatggcagtgctgcttcggctttacacaagcttgtcatcaattgcggttgcattctctgtgacgtgcattatccggtcagagttgttcttgaaggttatgaagcaaaacacagaggccatcacaagctacgaaatgcttgatgcggttcgtgttgctcttggtatcctgctgcaaatggtggttatagctacaactaccagactcctgcagaatatgtctcctcccaagagagcttcatgaatgctatgacattttagctttgtttcaagtagtaagggatacaaacttcgagttaaaaatattggccaagtgcgatagtcttgtaccgaagatgctactggtgtacaactgtcaggaaatcgtggtttacttgtttcctcttttgtttttgttttacttcttcccttttctggatctggaaaattcgtagtcgttggcgagctttgcaagctaaaggctaacggagcatatgtgtttttaattccgtcttcatgtttgtgtccatgtttctgctgcgctggaagttgctactcaggctatttctttcatgtcctgaattcaactcgggggacctcttcggcgcgattgcatcttgctgaaagcccaagataaccacaaaagaatgccaataattctgtcggtatctttgattgccatgtctgttttggaaataagactctgaatatgatctgtagctactcagcgtttcctgtgttcatgccttttggatcctatttctaaaatctggatctccg

SEQ ID NO: 9846 - DNA, 1217 bp, Zea Mays
gtccaaacagcaccagggaacagggtcccatggggtggtggtctggaggggaactgatttggtcaccagcctgagcccctgactgtgcagtgtccacaaagatcccgggctgctccttcctcccagaggaagcgtacaaacctggaggggaactgcccgtctcctcggctgacccgtccacctccttcttttcccctcgtgtccgccgctacacgcgccgccggaaccctagcctccaccgccacaggcagcagggatggagaaaggagcctcggaggcgtcgcccccttgcgctcgctgcggcaagcccgctcagcttcaatgccccaagtgtgtcgaacttaagttaccgcgtgagaatgcagctttctggaaacttgaggatggtgacattgtaaatgttgatgtaactgtatactataaaggtgttcatggtgatttgaatgagacatattttgttggaaatgttgatgaagcttccaaacaccttgtacgttgtacctatgagtgcttggagaaagctattgcgatagttaaacctggagttcggttccgagaggtcggagaagtcataaacagacatgtttcaatgtcaggtgaaatcttattgtggccatggcataggggaactgtttcactgcgccccaaacattcctcattattcaagaaacaaggccgttggtatcatgaaagctgggcagacatttacaattgaaccaatggtcaatgcaggggtttggaatgatcgtctgtggcctgacgattggactgcagtgactgcagatggtaaacggagtgctcaatttgaacatacacttttggtgacagaaacaggatgtgaagttttgacggcacggttaccctcatcaccggacgtttttccatggttgaagaagccgtgatggggaacgccaccaacagcaagtgatactgttacactgggtcagcaaaaagttttgttctgctctatcagtcggccaaagctgaaattttcaaatattctagatcagagtgattagcatgctactgctgaacagtcgcagcaattgtctatcgtgcggaactatttctgggagtgtgtattgttaagtcggttttcttcgagttatacgagacgtatggcttcttgagatgtgtcaccaatatgattatgccatcagtttacttttgatttcacagaacacaatttccatcatttcgagtaggttattttttat

SEQ ID NO: 9847 - DNA, 1497 bp, Zea Mays
ccaaagtccaaacagcaccagggaacagggtcccatggggtggtggtctggaggggaactgatttggtcaccagcctgagcccctgactgtgcagtgtccacaaagatcccgggctgctccttcctcccagaggaagcgtacaaacctggaggggaactgcccgtctcctcggctgacccgtccacctccttcttttcccctcgtgtccgccgctacacgcgccgccggaaccctagcctccaccgccacaggcagcagggatggagaaaggagcctcggaggcgtcgcccccttgcgctcgctgcggcaagcccgctcagcttcaatgccccaagtgtgtcgaacttaagttaccgcgtgagaatgcagctttctgtccattgagaccacatccaatatcaaagatgcgtgtggtgccagatgaaattgagaagcctgattgggcgcttgatggaattcccaagatagaaccagatagtgatttgcagaaaagagtagagattaagacccctgatctcatagaaaggatgagagtaacatgtcgaattgcaagagaggttttagatgcagctgctcgtgtaattaaaccaggaattacaacagatgaaattgatagagtcgtccatgaagagacaattgctagaggtggatacccatctccattgaattactatttcttccccaagtcatgttgcacgtctgtcaacgaagtcatttgccatggaattccagatgccaggaaacttgaggatggtgacattgtaaatgttgatgtaactgtatactataaaggtgttcatgttaaacctggagttcggttccgagaggtcggagaagtcataaacagacatgtttcaatgtcaggtttatctgtggtgaaatcttattgtggccatggcataggggaactgtttcactgcgccccaaacattcctcattattcaagaaacaaggccgttggtatcatgaaagctgggcagacatttacaattgaaccaatggtcaatgcaggggtttggaatgatcgtctgtggcctgacgattggactgcagtgactgcagatggtaaacggagtgctcaatttgaacatacacttttggtgacagaaacaggatgtgaagttttgacggcacggttaccctcatcaccggacgtttttccatggttgaagaagccgtgatggggaacgccaccaacagcaagtgatactgttacactgggtcagcaaaaagttttgttctgctctatcagtcggccaaagctgaaattttcaaatattctagatcagagtgattagcatgctactgctgaacagtcgcagcaattgtctatcgtgcggaactatttctgggagtgtgtattgttaagtcggttttcttcgagttatacgagacgtatggcttcttgagatgtgtcaccaatatgattatgccatcagtttacttttgatttcacagaacacaatttccatcatttcgagtaggttattttttat

SEQ ID NO: 9848 - DNA, 1653 bp, Zea Mays
ccaaagtccaaacagcaccagggaacagggtcccatggggtggtggtctggaggggaactgatttggtcaccagcctgagcccctgactgtgcagtgtccacaaagatcccgggctgctccttcctcccagaggaagcgtacaaacctggaggggaactgcccgtctcctcggctgacccgtccacctccttcttttcccctcgtgtccgccgctacacgcgccgccggaaccctagcctccaccgccacaggcagcagggatggagaaaggagcctcggaggcgtcgcccccttgcgctcgctgcggcaagcccgctcagcttcaatgccccaagtgtgtcgaacttaagttaccgcgtgagaatgcagctttctgcacacaggattgttttagggcagcatggagctctcacaaatctgttcacccaaagcctggtgcaccggcatcccagcagtctccagaaggttggaaatattgtctgagaaaagggcgggaacgtgcattgcaacttcctcgttttgattggacaggtccattgagaccacatccaatatcaaagatgcgtgtggtgccagatgaaattgagaagcctgattgggcgcttgatggaattcccaagatagaaccagatagtgatttgcagaaaagagtagagattaagacccctgatctcatagaaaggatgagagtaacatgtcgaattgcaagagaggttttagatgcagctgctcgtgtaattaaaccaggaattacaacagatgaaattgatagagtcgtccatgaagagacaattgctagaggtggatacccatctccattgaattactatttcttccccaagtcatgttgcacgtctgtcaacgaagtcatttgccatggaattccagatgccaggaaacttgaggatggtgacattgtaaatgttgatgtaactgtatactataaaggtgttcatgttaaacctggagttcggttccgagaggtcggagaagtcataaacagacatgtttcaatgtcaggtttatctgtggtgaaatcttattgtggccatggcataggggaactgtttcactgcgccccaaacattcctcattattcaagaaacaaggccgttggtatcatgaaagctgggcagacatttacaattgaaccaatggtcaatgcaggggtttggaatgatcgtctgtggcctgacgattggactgcagtgactgcagatggtaaacggagtgctcaatttgaacatacacttttggtgacagaaacaggatgtgaagttttgacggcacggttaccctcatcaccggacgtttttccatggttgaagaagccgtgatggggaacgccaccaacagcaagtgatactgttacactgggtcagcaaaaagttttgttctgctctatcagtcggccaaagctgaaattttcaaatattctagatcagagtgattagcatgctactgctgaacagtcgcagcaattgtctatcgtgcggaactatttctgggagtgtgtattgttaagtcggttttcttcgagttatacgagacgtatggcttcttgagatgtgtcaccaatatgattatgccatcagtttacttttgatttcacagaacacaatttccatcatttcgagtaggttattttttat

SEQ ID NO: 9849 - DNA, 2208 bp, Zea Mays
aaatataaagagttattatcggagaaccattcttattaagcattgatttcctgtcattacttagaactggaagaaaatcgtcctccaattccctctgttttgcaagttggaaactgaaacttgtgtcagttttgggggccagggttcaacatgctcgcctatgtctcagccatcctcatcccttttattttctagagcatgtctatctccatggaatatccccaccgcctactcttcttcttatcccaagagctaccgtattctttttctctcatacggatagagatagctggaaggagaatttcctcacgtatctctccctctgttctgtgcaaccggccacgtactgaagctcttcctcacgccacctctgcatctcattcacgtcatttatttcccacgtattcagctcctggaaacttccttcacaagatgcgttgaacaccctgggaatcacccacgccacccatctcaccactgcaccactgcgcgcttcgtactgctggccgggctgctccagcaccaggaacgctcgctcctgctcgtcgacgttagattttcccagacgcgcgagctccccagcaactccaacacgttgctcgcctcgctcagtcttcaagccatcgtgccgctggttctagccaaagtcgggcgcgttctttccttcgccaggcagcgcctccagtcgtcgtttcttttccacggctgcacgctcaccgactcaagcgcttggccatggagctcggtttcgtgtgtgcctgtgctgggtcgccgggtcacgtgctcgtctgttttgatgctgtgcacgttccggcttgtggaactcgccggcgttgtcagctactactagacctcacagtgcatcggcgctctcgatatcgtcctgagttcactccgcgtgctgcgacgtctcgctcacctcctcgccaagtcgtcgtcgccctcacggttatcgggtcgattcgatcagggtaagctgatctattattcccgttagttaaatctagtaaaactagaaaaatcgtgattgttgtgtttagtgagttatagatgtctagtgctttcgtaggattgtttcgatgtcttgccgctaaatatttgattctttttttttgtatcatccggttactttatgctcatacatgtgcattatgcatctcatgaggtacgataattaatcaagtaagacgaaggaaaagagttaagtcgacaccaagcgcgagctaatccgcaggatgatgccgatgaacgaaccggaagatagataatctgaacgagtgccaagccaatggatgctcgtcaagtggtcgcctaacaaacactaacctagtgttacctaggcaagccccggtgcatgcaaccccttccttgtatttttaaattatttttacacactttaagtctagtgaatgtgcattaagtttataggagttgcttgaaaaccctttgatgcattggctaccttgatatccatcccttttatagatacttctggtgaagtatcaaaatatgatttacaaaaaaatgcttagccctgcttataggcagatagagtttgtcctttgcacttatgcctagctcaggatgatcctgaggaaggatgacttctacctgcacggatattttcattgggagcatggtgggatcttactgcaaggttccctataatgctcttttcatccttaggaacacaaaacaatcctaagggtggaagtacttaaatcgggacttgggctaggaacaggtgatgttccgtccgggtcaattaaggattggatgcgtatgtaggcctgtatgatcaaggactatcttaactggccatatgccctagaaatgggacagggtaagcttgaacccggctattccatacgtgaaaagacaaccgcgcactgggcgtgggagatggtgggagtagcgtgtaccctcctggctagaggctggatggaggagtactgtgctcccgggtagcgcggaccggttcacgttgtggaggatctgtgggaacggttgacatatgcaagggttaagtgctacatatgtcgtgtggttagagatcctcagctgagtaaatcgattcggatcgccgttatatccccggagagtggagacttgatcgctgccctgcaacctaagtcaggatgtgaacctcatgaataaaaatgatgttgtattgatgagatggtgaaattagaccagatgcaaacgaag

SEQ ID NO: 9850 - DNA, 1255 bp, Zea Mays
atcctccggctcctgccagacctaggctatttcccgatcagacctgttatttcccgatcagacctattcctctctcggcctcccaccgccaccggcggcgacgagtaactcgcccgctgaccccagcaggcagccatgggagggcacggcgggttgaacatcctgccgcagaagcggtggaacgtctataacttcgacaaccgtgagaaggtgcaaaaagacgaggccgccgccgcccgggaggagcagctccagcgcgaggcggaacgccgccgcgagtcggatctacgcctcgctgcactacgccgtaaccgcggcctggtccaggcggagacgccccccgctcctccatctcaccccgccggccccgctgatccggcggacgcccttccttccccggcggacgcccttccttccccggcaacggatggagaccacatcaacctcttctcaggtggatcaggcgtcgccactgatttcgatgcgctcgcctcggccagtggtgggaggggcgcggctcgggagcgggagcctgatgccgaccctaaccctaagaagcggaagaagaaggaagaggagagaggccaaggagaaggaacgcgagcgagccatccttgttgctgcagggaggaaggagagacaggtggatcgggggcgccagtcaagatgggctcggtgatgtaaggattttcatggtataatgtccaagaatactaaggaattaaggataagtcatcgaaccgggcatggcctgactaccttaccatgcagatgcatgtggctgcaaaaattacaccgttcagttgccaaaggatagttgtgagcagtccaagagcatcatgatatcagtaacaagaagattgtatcatttgttggaaatcaatttatttggatctttttttgtaaaatattccgtgtaatatactgagaatgcaatgaagtcatgaagctagcagtacatgtaacacaggtgttgcttgctgtttgtaaagctatttacttggattgccccgcccttcccccctttttttgaaatttcttcaatggcagataacttcaacttgcctgagtatcgttaggagcatcccgaaccatctccctgcaaagttgtattgcatgctactggcacgattgttgttttttttttgcatgatacagaaaccaaacaacaatcacttttccagtgattcgtgtaaatacatcatgtggatcaaaatacatgctattgtactccgcacccccacccccacccccg

SEQ ID NO: 9851 - DNA, 1051 bp, Zea Mays
ctcgctgcatcctccggctcctgccagacctaggctatttcccgatcagacctgttatttcccgatcagacctattcctctctcggcctcccaccgccaccggcggcgacgagtaactcgcccgctgaccccagcaggcagccatgggagggcacggcgggttgaacatcctgccgcagaagcggtggaacgtctataacttcgacaaccgtgagaaggtgcaaaaagacgaggccgccgccgcccgggaggagcagctccagcgcgaggcggaacgccgccgcgagtcggatctacgcctcgctgcactacgccgtaaccgcggcctggtccaggcggagacgccccccgctcctccatctcaccccgccggccccgctgatccggcggacgcccttccttccccggcggacgcccttccttccccggcaacggatggagaccacatcaacctcttctcagatgggctcggtgatgtaaggattttcatggtataatgtccaagaatactaaggaattaaggataagtcatcgaaccgggcatggcctgactaccttaccatgcagatgcatgtggctgcaaaaattacaccgttcagttgccaaaggatagttgtgagcagtccaagagcatcatgatatcagtaacaagaagattgtatcatttgttggaaatcaatttatttggatctttttttgtaaaatattccgtgtaatatactgagaatgcaatgaagtcatgaagctagcagtacatgtaacacaggtgttgcttgctgtttgtaaagctatttacttggattgccccgcccttcccccctttttttgaaatttcttcaatggcagataacttcaacttgcctgagtatcgttaggagcatcccgaaccatctccctgcaaagttgtattgcatgctactggcacgattgttgttttttttttgcatgatacagaaaccaaacaacaatcacttttccagtgattcgtgtaaatacatcatgtggatcaaaatacatgctattgtactccgcacccccacccccacccccg

SEQ ID NO: 9852 - DNA, 1185 bp, Zea Mays
cctagacaagtccagtcctctccctcccctcaacatagcgccgcgactcgtgcccaccatgtcgccgcaccgccgctgtgaacggatccgtgcatcccgtacaccggccttggcttcctccccccttccctcaacctagctccaccactcgcgcccacctccgtccgcaggtggcgcaggggaggagccggccatcctcagggtggcgctgggctccggcaagctgcgcatcgaggggtcgctgggctccgccgctcccgcccccgtgcgctcgccgacacggtcagtagttccactcggagaaaggaacgtttccccccttcctgtctcaccagatccatttccccgctgttgtttcgcccgtggctttcactttcactcgatttagattccatttccgttcgttcgttcctgtttcccttgctcgttcgttcgattggagcttgcccctgcctggatctggcctagccgagcccggttgttctgaatcccgattcggttcggctcccttgctctgtcgtcgcttccgaggcgtgctcggatctcgttagagtagagggcctcgcggctcgcttcgagtggtgcatcaacttcagcctagatggacgataccttgccactgctggagaggaccacgtgatccatgtgtgggaggtgtccaagggagaccgaaagggcgagttactcggggaagcttcggtggcaaaggagaatggtggtggttgcagtccatttctcgcgattgttgggaatgattcactggagatggctgcattgtcgttcacctacactgaagggggctatgtggacaagaagagaaggccgaggaagcagaacaatcacaagtctgtagggtccgatcatctggttgttcctaagtgtgtgtttggtttcacagacaagccagtctgctcacttctggggcatgctgccgatgttcttgatctgtcatggtccaaatctcagaagaagcttcagtacaaaagtcagatagatttaagaattaggaaaaagaagtcaggccagaagaagataactggcttccagtttgctcctggaagctcctcggaagttctgattacttctgcggattcgagaatacgagttgttaacggcgatgaatttgtccaccgccgccgcaaaggaaggaaagagagctagaagaaggagaagcacaaaagtcac

SEQ ID NO: 9853 - DNA, 527 bp, Zea Mays
gcctgatccattgctgtcttgctgatgcgccatgagtcagacttgtgtcacctttgtgttgagtgttgacggaggggctagttgtccctcctcgcagaactctgcgttcaagaagagtcgtgaaggaaggattgcagctgcaggccccgcgacaagccgacgccaaccgaccacgccaccgaacgcagaaaggacgcaggactttattccggaaccggaagagggtggttggatgcggcgtgccagcacggggtcacggtcgaagccgtcggcgtcgggctgacggggtgggcggtggtggcactacgcctggtacagtgatgccattcatcttttgtccgattccgtttcgagcgaatgatgcgactcggtccttcaggcgttacatgatgcttggcgcagcagcggagggtgataagaatgggtacgagtggctctttgtcagccattccccgtagggataggggggtcaggggtgagattgagagataaatggagtttatttctgtcttgtttgtttgtgtcgg

SEQ ID NO: 9854 - DNA, 2630 bp, Zea Mays
ctcatcgtcgagcacccctcaacccacgcaccaactctcgccattgccagtcaagctcgctataagcagccagatattcaggaccaccgatcacgatcccaaaaacagcggctctgtgtcgcgacgtcgacggcgatggacgctccggccatgttcgcgcgcaagcaagtccccgatgacttcggcctccggaacatcggcgaagctgaggacgaaggagccggggcccaggcccaggcccagctgcaccgcgacgagaagcagcacaagccggccgtgctgaagaaggtgaaggagaaggtgaagaagatcaagaacaccctcgccggccacggccacggccacgacggtgagcacggcggcggcgagcgcatgggagacgcggacgccggcagcgacagcagcgaggaggcggaggaggacgcggcggagagggaggccgcgctggagaagggcggctacatggaagatgtcgaggacaagcccctcgtcatggagccggagcccaaccccgagctgcacggcgcgccgatgtacgagtcggcgagggcacccgccgtgcaggacctcatcgccgagtacgatcagccggcgtggacaccggcggtgcaggaggtggagggcgacggctccgcacctagggtgcggctcggtgatatcggcggccccgtcgtcgaggatccagccgcgccgcgctccacgacgcccaccgcgcgaggtacgacgcccgtggtgcggcagtttgagaccatgagcttatccgacgacccgacgcacgtgggcgcgggcaagaaaggcgccaaagcagaggagtggaaagacaaggccgcggacacggtgcgcggtgcggacggtggcggtggcggtggcgctagctacacggacactctcaagaacgcggctgccggcaccacggagtacggcaagaagctagcgagcacggtgtatgagaaggttgccggcgtcaccacggctgtgggcgtggggaagcgcggcgacgaacgcacggaggcaacgccggcgtcgaacacccgcacggaggagcgcggagcggcccccgaggccacggatgcgacgagaggcgcagggtacaccgacaagatcaagtcggcggccgcgggcaccactgggtacggcaggcagctggcgtccaccgtctacgagaaggtcgccggtgtcggcactgccgtcgcgcccaacctccgtccgcaggagggctcggccaaggcggaaggcgcacacagcgaggcgacgccggtatcggacaccggcgttgaggagtggaaaggcgccccggctgccacggacgcggccaacggcgcgtcggggccggcgggctatactcacaaggtcaagtccgcggctgcgggcaccacggagtacggcaagcagctggcgagcacagtgtacgagaaggtcgccggcgtcggcaccgccgtggcgggcaaggtgcagcaggccacacagtcgcccagcacggcgacgccgggagccgacgcgcagcaggacacggacgccgccgcgacggccacccccggcgccggcgggcagtccaaaggaacgaccgtcacggggtacatcgccgagaagctccgtccgggcgacgaggaccgcgcgctcagcgaggcgatctccggcgccgtgcagcgccgcaaggaggacgtcgggggcacggtagcgcagcgcgtgccggcgccaggccaggtggtgaccaaagcgcgcgaggccgtcgcgtcgctcaccggcgggaagcgggtctcggagaccgtgcaacccaccacagcaacagggaaagatgtgaaggaagtctatgcggcggaggcgcctgtgatccatggggaggagatcggcggcccgaagctgaacaccaataccatgtgagctgctcatggagagcgcgggtgatctctgagtattgtgtcaggtttgtgtacacagtacacgtgaatggtgtggtttgcgctgtggagtagagtaggagctggaataataagcgtgctggttgcgttcgccgtggtgcgctttggttttacgtgtgcgtgtgattgtggatctacgagtagttgtacgtatacatatatgtatatgtgtatctaactatgtatacgtatacgttgaaggaaaattgttctgttttttttacgaacgtgaaccatgcacctctttcattaagaatttagtgtgtgtataaatcttcgcctattactaagcaactaggaatcaaacaccctataaggcttactcgctatttcatctatcgtaccgtttctaggttgccagccagttaataagaactagtcggttgctcgtagatttttttattgattttctctattcgatatcgtggtaaagaaaaggtcatgtagacgtataaattatccaaaaaatctcaagatttttttattgattttctctattcttcgtataatattttttttatttgacgtataatattttttttatttgactaaccgagttgacatcggtaaagaaaaggttatgtagacaggcgatgtcgagccataggcagtaaatcagggaccctatctctcgtcccccactttcaaggtttcgtagagcaggaagagaagaggcagtcatacctgttcgttgtcggagaaggactggag

SEQ ID NO: 9855 - DNA, 2533 bp, Zea Mays
ccataaaccacgtgtgcgtcgaggtggccctcgcctccccggcccgctcctattatatcctcctcatcgtcgagcacccctcaacccacgcaccaactctcgccattgccagtcaagctcgctataagcagccagatattcaggaccaccgatcacgatcccaaaaacagcggctctgtgtcgcgacgtcgacggcgatggacgctccggccatgttcgcgcgcaagcaagtccccgatgacttcggcctccggaacatcggcgaagctgaggacgaaggagccggggcccaggcccaggcccagctgcaccgcgacgagaagcagcacaagccggccgtgctgaagaaggtgaaggagaaggtgaagaagatcaagaacaccctcgccggccacggccacggccacgacggtgagcacggcggcggcgagcgcatgggagacgcggacgccggcagcgacagcagcgaggaggcggaggaggacgcggcggagagggaggccgcgctggagaagggcggctacatggaagatgtcgaggacaagcccctcgtcatggagccggagcccaaccccgagctgcacggcgcgccgatgtacgagtcggcgagggcacccgccgtgcaggacctcatcgccgagtacgatcagccggcgtggacaccggcggtgcaggaggtggagggcgacggctccgcacctagggtgcggctcggtgatatcggcggccccgtcgtcgaggatccagccgcgccgcgctccacgacgcccaccgcgcgagagggtgaggacataggtacgacgcccgtggtgcggcagtttgagaccatgagcttatccgacgacccgacgcacgtgggcgcgggcaagaaaggcgccaaagcagaggagtggaaagacaaggccgcggacacggtgcgcggtgcggacggtggcggtggcggtggcgctagctacacggacactctcaagaacgcggctgccggcaccacggagtacggcaagaagctagcgagcacggtgtatgagaaggttgccggcgtcaccacggctgtgggcgtggggaagcgcggcgacgaacgcacggaggcaacgccggcgtcgaacacccgcacggaggagcgcggagcggcccccgaggccacggatgcgacgagaggcgcagggtacaccgacaagatcaagtcggcggccgcgggcaccactgggtacggcaggcagctggcgtccaccgtctacgagaaggtcgccggtgtcggcactgccgtcgcgcccaacctccgtccgcaggagggctcggccaaggcggaaggcgcacacagcgaggcgacgccggtatcggacaccggcgttgaggagtggaaaggcgccccggctgccacggacgcggccaacggcgcgtcggggccggcgggctatactcacaaggtcaagtccgcggctgcgggcaccacggagtacggcaagcagctggcgagcacagtgtacgagaagctccgtccgggcgacgaggaccgcgcgctcagcgaggcgatctccggcgccgtgcagcgccgcaaggaggacgtcgggggcacggtagcgcagcgcgtgccggcgccaggccaggtggtgaccaaagcgcgcgaggccgtcgcgtcgctcaccggcgggaagcgggtctcggagaccgtgcaacccaccacagcaacagggaaagatgtgaaggaagtctatgcggcggaggcgcctgtgatccatggggaggagatcggcggcccgaagctgaacaccaataccatgtgagctgctcatggagagcgcgggtgatctctgagtattgtgtcaggtttgtgtacacagtacacgtgaatggtgtggtttgcgctgtggagtagagtaggagctggaataataagcgtgctggttgcgttcgccgtggtgcgctttggttttacgtgtgcgtgtgattgtggatctacgagtagttgtacgtatacatatatgtatatgtgtatctaactatgtatacgtatacgttgaaggaaaattgttctgttttttttacgaacgtgaaccatgcacctctttcattaagaatttagtgtgtgtataaatcttcgcctattactaagcaactaggaatcaaacaccctataaggcttactcgctatttcatctatcgtaccgtttctaggttgccagccagttaataagaactagtcggttgctcgtagatttttttattgattttctctattcgatatcgtggtaaagaaaaggtcatgtagacgtataaattatccaaaaaatctcaagatttttttattgattttctctattcttcgtataatattttttttatttgacgtataatattttttttatttgactaaccgagttgacatcggtaaagaaaaggttatgtagacaggcgatgtcgagccataggcagtaaatcagggaccctatctctcgtcccccactttcaaggtttcgtagagcaggaagagaagaggcagtcatacctgttcgttgtcggagaaggactggag

SEQ ID NO: 9856 - DNA, 4270 bp, Zea Mays
cacacggcacagaggcagcctgcagttgtgagcctgaagcaatgccgcggcacagcagtacacgcgctccagcaggcaacagcatggccgcaacctcatcttccatcccatagcaacgctgcagcagccggaggctcagattttgtaatccatcacttcctcaccagaccccaatcgccctcctccccagctgtacgccggtgtatcccaagacaattgacctccgttttatagcttctcatcacaaccttctctcactacatcccctctctctctctaccctcctaaaccccaaatcagagagatagagaaagagattgaggagaaagaggaaaaacagagctgtagagatagaaagttcggttgagttgagctctccgtcctgcttctggcttcctctctctctctctcactagatctactactgctactagtgtccagtgtccactgcctcggccttgttgctgcctgcgtgcgtgcctttgcccaaagcctgcctgctcggtgcttgcttcgcttgcagctgcagtggcctcacgctctatgcttgctctgccaccatgtggtgctggtcttcgcgctccaactaacctccaccagcacctcacgtaaccgcatcgcaccgcgatgccgaccctggtggcgtcacgcggcgcggtggcttcttccgcgcgcggcattgcaatgccgccaccggtggacgctcccgtgaaggagtagctagctggcccggcggcagtggcagcgggcgaggcgaagggagcggagaggtcgttgtctgttccgggagcgagcgcggcgccgccgacacgacatgttcaagtcgcggtggcgcggcggcggcagggccaaggccacgttcaagctgcagttccacgccacgcaggtgcccgtgcagggatgggaggcaatgatggtggtggtgacgccgcaggacgcaggccggccgacggcgcggtcggagcccgcggaggtcaccgatggcgcgtgccgctgggcggcccctatcatggatgccaccaggctccccgccggcaaggacaagatctaccagttcctcgtctatgagaccgggtcgagcaaggcggcgttgctgggggaggccacggtgaacctggcggactacgccgacgcgttgaagccgtcggcggtgacgctcccgctcaagggcagccccggcacgctgctgcactgagagcggcgacgcctcgccggtggcaaagacgccacagagaagaacgacactgcagaaccagctgagccggtttgaggacgaggacggcgagaaggctagagcggccacggatgcgatgagtcctgtgcaagatggattgttgataacaaaacctccaggcatgaggtttccatcaagaagaaatgtgcctatgtctgttgacccagtgggccatctccacaatggcagcagtttcgatgctgtctcggtgtcaggttcagatgcaagttctgggagatatacccccaaaattagtgcgaccatgcacaactcatatcttcaggatagtagcaatgctctctcaccatttgccaacaatggcactgtgaggaacccattgaccagttcgggtgactggtcaggaagctcagctcctgatgctagtacagatgggtcaacgagcaattctggtgaggcagggttaagaggggaggatgacgacgtggagaagctaagaagtgaaatagccactttaaccaggaaattggatgtctcagatatggagttgcagactctccgaaagcaaattgtgaaggagagtcggcgtgggcaagatctctccaaggagatgagtagcctcagggaggagagggatgcactcagaagagaatatgaaggactgagaggggcaaagaagatgatccatgattcaaatggctcagggaaacggctctcagatgggtatgacccatggtcacaggttgaagaactgaagcaagatctgaatcatgagaagaatctaaatgcagatcttcgtctacaactgcaaaagatgcaggaatctaactctgagctgcttctggctgtgaaagatcttgatgagatgttggagcaaaagaacagagacatttccattttgcaagaggatacacaagaggatccacaggaggcagaatatgagcatgcactgtcaaatgtgcataattctggacgcaaaattgccttatctgaaacgagttcataccaagagaaggaagatgagcttatgctggatgcactggcaaagaagcgtgatgacatctctacctctgagcttgaaaagaaaatccttgagctgagcaatgaaatcgagttgtacaagaaagatcgtgaggatattgagatgcaaatggagcaacttgcacttgattatgagattctaaagcaagagaaccatgacatatcttcgaggctggagcaaacacaactgagggagcagctaaggatgcaatatgagtgttcagctcatttggctattataagtgatcttgaggccaatgtggagagcttggataatgaactccagacacaggctaaaaagtttgaggccgacatagcagaaataatgagtgcaaaggtggaacaagagcaacgggccattaaggctgaggattctctgaggaagataagatggaataatgcaactaccgcagaacgacttcaggaggaattcaaggtgttgtcttcacaagtatcttctgctttcagtgcaaacgaacaacagcttgtgcaagcaagaaaagaggttgcggagctgcagctgcagaagagccagttagaagagttacttcagaaggcccaaggagatcttggatcagttcaggatcagcaccgggtgaaggtccagcagttaataaccctagtggatttcaagtcaaaggagatagacaggctactgatggagctcaaaagcaagagtgatgagttccataaccaaaaaagatgtgatgaggcaaagctgaatgctctgtcagaagaaatcgacctactcaattccaagatcgacaagctatccagtgagagaaatgagctattcgaaaagaatgagcagaaagaaaaggaattagctggaattagcgaaaaggacatgcaattgcaagacaaaactgctgagattacttcactaaataaagagcttgtattcctcaaggaccaagtgaagatgcatttggacgaactgcacagtttaaaacgtttgaagaacgagagggaggaaacaattggaaaactgcaaatagatattgggtcactgaaactccagtgcgacaacttgaaaacttcgctgtccaagaaagagtctgagaaagacagccttgcctctcaggttctgaagctgagaagatcccttgaaacccgggacagggcgaaggcaaatggtcaaatttcagatgtgaaggacaatcagcatgctaataacaagcgcaccaagcacaataccggctccactgggagcattgctgcactgccaggcaccaacagacagggcgaagacggtgactgcaatggtcctgacatgaggaacaccactgaccagtcagcgaaggagctggcctcaatgaaggagaggaacagggccatcgaggaggagctgaaggagctgcacgaacggtactcggagatcagcctgaggttcgcggaggtggaaggcgagcggcagcagctcgtgatgaccgttcggtcgctgaagaactccttgcggtgggcgagcgactggatgggctttttctctccgaagagagaggctccagaccagaggctcggggagaccaggccaggcgagacgggcaccccgggtatgtaccaatggggtgcctgcggtgtggtctgtccgtatcctcaagagttacagtacacagcatgtagatctcgtcacaataacattctttcgttttctttgttccgcattggcgtgtgtgcagtaatatgagttgtaatagttctttcttaccctctctggagtgtgttgtgctgtataatttccatggtgtcattgtgttgtggagaaaggaaaatgagaaggaaagagtggcctgtcagctttatctcagaaatgcttcgttgtgttccaagttcctgatcctgactgtttcatcagtgtggatttgggccttggccctagggtgaaaacatgtctgttgggtaacggacacgaattgacgaattgtgtacaaacaggagcgaaggtaggtaataatttgagaatgcacatgttgtacttctcggcctcccgattggggccaatggtaatggagaggattgatgggaccaaaatatttt

SEQ ID NO: 9857 - DNA, 4323 bp, Zea Mays
cacacggcacagaggcagcctgcagttgtgagcctgaagcaatgccgcggcacagcagtacacgcgctccagcaggcaacagcatggccgcaacctcatcttccatcccatagcaacgctgcagcagccggaggctcagattttgtaatccatcacttcctcaccagaccccaatcgccctcctccccagctgtacgccggtgtatcccaagacaattgacctccgttttatagcttctcatcacaaccttctctcactacatcccctctctctctctaccctcctaaaccccaaatcagagagatagagaaagagattgaggagaaagaggaaaaacagagctgtagagatagaaagttcggttgagttgagctctccgtcctgcttctggcttcctctctctctctctcactagatctactactgctactagtgtccagtgtccactgcctcggccttgttgctgcctgcgtgcgtgcctttgcccaaagcctgcctgctcggtgcttgcttcgcttgcagctgcagtggcctcacgctctatgcttgctctgccaccatgtggtgctggtcttcgcgctccaactaacctccaccagcacctcacgtaaccgcatcgcaccgcgatgccgaccctggtggcgtcacgcggcgcggtggcttcttccgcgcgcggcattgcaatgccgccaccggtggacgctcccgtgaaggagtagctagctggcccggcggcagtggcagcgggcgaggcgaagggagcggagaggtcgttgtctgttccgggagcgagcgcggcgccgccgacacgacatgttcaagtcgcggtggcgcggcggcggcagggccaaggccacgttcaagctgcagttccacgccacgcaggtgcccgtgcagggatgggaggcaatgatggtggtggtgacgccgcaggacgcaggccggccgacggcgcggtcggagcccgcggaggtcaccgatggcgcgtgccgctgggcggcccctatcatggatgccaccaggctccccgccggcaaggacaagatctaccagttcctcgtctatgagaccgggtcgagcaaggcggcgttgctgggggaggccacggtgaacctggcggactacgccgacgcgttgaagccgtcggcggtgacgctcccgctcaagggcagccccggcacgctgctgcacgtgaccatccagcgggtggtgggtggcgccggtgggtacggagacgacgcgagtgagagcggcgacgcctcgccggtggcaaagacgccacagagaagaacgacactgcagaaccagctgagccggtttgaggacgaggacggcgagaaggctagagcggccacggatgcgatgagtcctgtgcaagatggattgttgataacaaaacctccaggcatgaggtttccatcaagaagaaatgtgcctatgtctgttgacccagtgggccatctccacaatggcagcagtttcgatgctgtctcggtgtcaggttcagatgcaagttctgggagatatacccccaaaattagtgcgaccatgcacaactcatatcttcaggatagtagcaatgctctctcaccatttgccaacaatggcactgtgaggaacccattgaccagttcgggtgactggtcaggaagctcagctcctgatgctagtacagatgggtcaacgagcaattctggtgaggcagggttaagaggggaggatgacgacgtggagaagctaagaagtgaaatagccactttaaccaggaaattggatgtctcagatatggagttgcagactctccgaaagcaaattgtgaaggagagtcggcgtgggcaagatctctccaaggagatgagtagcctcagggaggagagggatgcactcagaagagaatatgaaggactgagaggggcaaagaagatgatccatgattcaaatggctcagggaaacggctctcagatgggtatgacccatggtcacaggttgaagaactgaagcaagatctgaatcatgagaagaatctaaatgcagatcttcgtctacaactgcaaaagatgcaggaatctaactctgagctgcttctggctgtgaaagatcttgatgagatgttggagcaaaagaacagagacatttccattttgcaagaggatacacaagaggatccacaggaggcagaatatgagcatgcactgtcaaatgtgcataattctggacgcaaaattgccttatctgaaacgagttcataccaagagaaggaagatgagcttatgctggatgcactggcaaagaagcgtgatgacatctctacctctgagcttgaaaagaaaatccttgagctgagcaatgaaatcgagttgtacaagaaagatcgtgaggatattgagatgcaaatggagcaacttgcacttgattatgagattctaaagcaagagaaccatgacatatcttcgaggctggagcaaacacaactgagggagcagctaaggatgcaatatgagtgttcagctcatttggctattataagtgatcttgaggccaatgtggagagcttggataatgaactccagacacaggctaaaaagtttgaggccgacatagcagaaataatgagtgcaaaggtggaacaagagcaacgggccattaaggctgaggattctctgaggaagataagatggaataatgcaactaccgcagaacgacttcaggaggaattcaaggtgttgtcttcacaagtatcttctgctttcagtgcaaacgaacaacagcttgtgcaagcaagaaaagaggttgcggagctgcagctgcagaagagccagttagaagagttacttcagaaggcccaaggagatcttggatcagttcaggatcagcaccgggtgaaggtccagcagttaataaccctagtggatttcaagtcaaaggagatagacaggctactgatggagctcaaaagcaagagtgatgagttccataaccaaaaaagatgtgatgaggcaaagctgaatgctctgtcagaagaaatcgacctactcaattccaagatcgacaagctatccagtgagagaaatgagctattcgaaaagaatgagcagaaagaaaaggaattagctggaattagcgaaaaggacatgcaattgcaagacaaaactgctgagattacttcactaaataaagagcttgtattcctcaaggaccaagtgaagatgcatttggacgaactgcacagtttaaaacgtttgaagaacgagagggaggaaacaattggaaaactgcaaatagatattgggtcactgaaactccagtgcgacaacttgaaaacttcgctgtccaagaaagagtctgagaaagacagccttgcctctcaggttctgaagctgagaagatcccttgaaacccgggacagggcgaaggcaaatggtcaaatttcagatgtgaaggacaatcagcatgctaataacaagcgcaccaagcacaataccggctccactgggagcattgctgcactgccaggcaccaacagacagggcgaagacggtgactgcaatggtcctgacatgaggaacaccactgaccagtcagcgaaggagctggcctcaatgaaggagaggaacagggccatcgaggaggagctgaaggagctgcacgaacggtactcggagatcagcctgaggttcgcggaggtggaaggcgagcggcagcagctcgtgatgaccgttcggtcgctgaagaactccttgcggtgggcgagcgactggatgggctttttctctccgaagagagaggctccagaccagaggctcggggagaccaggccaggcgagacgggcaccccgggtatgtaccaatggggtgcctgcggtgtggtctgtccgtatcctcaagagttacagtacacagcatgtagatctcgtcacaataacattctttcgttttctttgttccgcattggcgtgtgtgcagtaatatgagttgtaatagttctttcttaccctctctggagtgtgttgtgctgtataatttccatggtgtcattgtgttgtggagaaaggaaaatgagaaggaaagagtggcctgtcagctttatctcagaaatgcttcgttgtgttccaagttcctgatcctgactgtttcatcagtgtggatttgggccttggccctagggtgaaaacatgtctgttgggtaacggacacgaattgacgaattgtgtacaaacaggagcgaaggtaggtaataatttgagaatgcacatgttgtacttctcggcctcccgattggggccaatggtaatggagaggattgatgggaccaaaatatttt

SEQ ID NO: 9858 - DNA, 1868 bp, Zea Mays
cgcaagctagatcgccacgggacgggagtccgccttaggttgtaggctccgttcgatcataagcaacacaacacccttccgtttgcgtcgctcctccggcctcccctccctggtcggtcgatcgcgaggatgacgccggcgagcgtggtcgccgcgcccaggagcgtcggggcgttgcccttggcggcgttcccggcgcccgcgagggccggggtgcggaggaacggccggtcctcgaggcccgcggcgtgcggcggggacgaccagcagccgccgtccatggccgcgatgccggcgtcgctgcgcgccatccaggccaggaggaagcaggaggcggcgcagcgcggggtgccgcgggcgacggccacgagcgcggccgggtgcgccgtggcggccctcgtcaaggccgtggaggccgtccagggcgcggcggccgggggcgccgcggaggccgcgcgcggcgccggggacgccgtggcgtgggtgttcagcaaggtccacctccagtcgcccgacctcgccgtcgggctgctcgggatggtcgcctgctgcctcggcacgatcgtggagaaggcgctctgggcccagatcggcatcttgcatggcggcggcggcctgttcggggacagcagctacggggcgcaggaggaactcgacgaggaagaggtcaaggagatcgacagcgcccgcgcgcggcgccggaaggcggcgtacgagatggccatcgcctcaggcggcgccagctcgctcatcctgtccaactacgcgcagctcctgtacgagatcgacaaggacatcgagagggcggagatgtacttcaagcaggcggtggccgccgagccggcggacggcgaagcgatgcggaggtacggcatgttcctgtggcacgcccgcggcgacacgggcggcgcggaggacatgttcaccggcgccattgacgcggagcccgagagcagccaccaccggagcagctacgcgtggttcctatggatgaccggcggcgtcgagacctgcctcatggacaccggcaggcagagcgacggcaacgacgcggattgaaccgcgcagctagcgcccttgggatcggagacacaatccaaaagcagacaagaaaaagacgacgacgcgacgaccttacctttaccaccggcaagtgccccggccggccggcgggccggccatttagatggcgcgtctaggtatcgccgtacgtcgtgccgcatgcatgcatgcccggcggcgcaagatggctatgcagcaagcgtagtatatatcatccatgagcagcgccggccgttgtagataggtgcaagttttccagtgtgctagatgaatgcgcgtcaaggagccacagccagcccatgcagggccaggaggcgaacaataataatgttggcaaagctgctagcgcatgttagagcgtgtgatgaatagtactatagtagtatgtggaataaaatcatccgtcgtgagatagtagcaatgctgttatatataactgcgtttgtgagcaacaacaacaatatatatatctgtgtttttatatatctagatgtggtgtttgagtttgcaagtgtctaaagaactgagaaggatggtttacattgctgctgacatttgagatacacagagacaggggcaggcaaggcaggaccgcaggaacacacaacggacgatatcgaaccagaggcacctaaagcccagctccaatcttccatcggcgcggccttctcgaaatcgacgcgaagtcggttcctgaaacgcatttgaaccagaagagagagctcatcatcctgacctgtccgttcagcatcaccgtctcagtaaacgatccaacatcgctgtgcagtagtgagccagaacagcag

SEQ ID NO: 9859 - DNA, 3701 bp, Zea Mays
gaaatatgttttcctgagccacgtacagttattatatataagtgtgcgtagtttgaggctgggtggcagtagaatttatgaccaaaacgagtggtaaattttgatctggctcctatagggaaggaccaggaccgggtttgatccgatcagacggaccccgtgttggaaggcggaagcatataggaataggaacgcgagctggactcgagactcgagcggggcaaacggatcctatcgcctgtcgcgtccttgtcatcgtcgtgtgggcggtataaataccctgcaacacccaccaggccacacccaaccccaccttcattgattgattacagcccgttcatccttccttcccccgtcgaatcccaccttccttcccccgcccgttaagcagccgagtcagcagcaatggcggccgtgctgaggagagcccgtggcgcagtgcttcgcgtcgtcgtcgtcgtcgtcgccggcgacgttcgggctccggcggttcctgcaggagcagccggcgttccgccccgccgtgccgcccgaccgcttcatgcccctggccgaccggatccgggacctcggggtcggcgtcgcattcccgcggatcaacctcgacggcctcgtgccgcccgcgccggcgccggcgccggccaagcgggagccggacgcggcgctgcccgcggcgagcctcacggtggaggaggcgcgcaaggtgctgcgcgccacacagatggaggcggcccgcgcgcggattcgggagtccggcgccggcgccgtgccgtacgccgacttcctgcgcctctgctgcgacgccgccggcccggacgcgggcccctccgtcgcgcgcgcgctcgacgagtccggatccgtcatcgtgctcggaaagaccgtcttcctcaggcccgacatggaaaagattcaaagaaagggcgctgttctaaaacgataataagagatgttgccacccaaagtttgggcaattttactccgctccaagatgggagtttttcttctctcaaaaccaggagataaaaaccttaattttaactccccctgtccaaatcttagaggatacaagaatctgaatctgactccgatgaatgaacatgaggagaattcacctaaccctcttctagacaccattaatttcgaaataaagaagttagtatttcatttggtaaatatatattggcaaagtgtagtatttcaatagacaatttacagatgtagccccatcacatgccagtggtggagggtcgaattgatgaatctgttaacttgtataaacttagttaaaaataagttaagtatataagtaaaaaaaagtttattgtagagtaaaattgttaatctgaatgtttatgccactttgatttgattttaagcgtaggggaatcttctgattttgcggggagtaaaccactaaaggttcattgtttgatttttcattatatgtggcacagaaatatcttccctttgataaaacaactaagggagttctatttttttgacatcagataaaaatactttttcacctttcctgtttgtgttacatcctatgtttatcagaccatgctgttctagttactaacttactattgctaatcattttttttctcctagctgaatgcattatcgtcaccatccatttgaataataggatactgatgcagggctcaaaagttatggctaacctgctttccttttgttttgggtgaccgaaacaaagtttggtgaacacttcacatgccatgtgactcagattagtgtcatagcattctttggcagcactagaactctagaagcacctttaaccttttttttaagaaaaacttgtctagttgtgttttcggtggctacagccagacagtttggcaaattgcccccattgcggtggtggtgccgtggtgggctgttaaaaaaaaggacatttaaaaactcttttagggctagcgtggcaactccattttctattgagaaatgaactaattttccttgtgaaaatggaaattatcttcggtaagccatgggattgagttggattcttagagaggattttagttccaaactagccctcaatcctatggattctaggagaggattcgagtttccaaactagctccggtaatccaagggatctagtcagattttcggagaggatttgggtttcgaaactagccctcaatcccatggattctgggagatgattggagttaaaaatctagctcttacatgatttattacctgcatttgttctttacatgctacagtctagagtatatggtttttgtagggcatggtccagagtagttgctggaggtgtttcccatgcacgttccatgttcaattatacacaatcttatcttgcacaatccattcccacatcagcatgggcattccgcattatctccttgcgcaaactgcattctctatcgcagacagtgaagcaagagaagtttcttatttcgagaatatcataatatctgcatttagcatgagcataacattagcaatcgctctttcttttcgatggatctcctatggaaaaagaagagcagccaagtaaaccgtgggaatgtttttttgttgttgtcttgtgttcgatggcaacacccaggtcgtgaaggcaatcgagaacgcgatccccgtgcggcacgccgccgccgccgccgccgcggagatcgaccccgcgagggaggaggagctgagggccatggaggcggagaaggcggagatcgaccgcgcggcggcggcgcgggtgcggcgggagctgtggtgcgggctgacgtacctggtgatccagacggccgggttcatgcggctcaccttctgggagctgtcgtgggacgtgatggagcccatctgcttctacgtcacgtccatgtacttcatggccggctacgccttcttcctccgcaccaagaaggagccgtcgttcgaaggcttcttcgagagccggttcgcggccaagcagaagcgcgtgatgcgcgcccggggcttcgacctccgcaggtacgaggagctccggagagcctgcggcgtggcggcgccgccgctccaggcccggaccccctgcgcgagcgcgggcgcggcgcgggagagcggccattgccactcctactgccattgccattgatcttggcctcgctcggttcattcctttctttttttctttgttgttcatgcccatttggtggggatgatgattcgtgtatccatctgatgcgcgcgcggatgcaaaaaaaaaagaagcatactgaattgaggtttaaacttggaaccagggcgtccaaatgatgcataagccatgtccaactgttcgtccaaatgatgcatctgctacgtctgagtctgactagagaccatcatcactcgttcttgttatcacaattcacagtagaagtcctcgcatggtgaagttgaacgtccgtgacccatataaaatcccaaagcggtgccactaccagtccatcctttttgttttgttttcacctgatgtgacctcacccgcaccgcacgcctaaccgcctaccagtctagtctcaacttggtccttcccaaccgacaaaggcatcggcgacgagctgcgccgaagacaaggcccgtctcccgtcagcccatgaggccattccttttttccgtaaaggctggtggcctggtgctctcgccgcctttcgctcgtgaccgtgcgtggcttgcctcgctcgctg

SEQ ID NO: 9860 - DNA, 2442 bp, Zea Mays
cttcaacggacgccgctaccaccccctcctttattactgtagtccatataggggctacagtacacccccttcaccttcagcgcatccctcttcctcctcctctcccctcccgattctttctctctcccgctaaatggatgggcacgctacggcgctcgcgtcccctccggctgctagcttcccagacaagcccgcgcgctcggaatactccgaggagggagctccaggcgagtccacagagaccgcaccaccgccggagaactttgtcgtggatccgccctccgccgcgattcatttgccttgctccgggcggcgaccagcagacgccgtcgtccacgcggatccactgggcagcttcgcggagcggcgacccggtcgatccgtgcaaagacgccgccgtcggtcgtctatttccgccagttcgtcgtctgcgggactcacgtcaacgcgaaataatcgaatcggcgacagatcgacgctcaccagatctgcttctttcgagctacgacgtcgaagaatggctgacaacaactcaaacaatccttatcgaccacctgctgccagccccaatacagatgtggcagccccaagggttcgacccaacacaggcttcaacatttactaatccttcaaattcccatatgacaaatcctacctggtcccagggacctaatgacccatctggatatacctttcgtacaccatggaacccatattttggtatgacaactcctgggggtcctcctacacaaacatgtttcggtcaaccacaattggtaccacccattccatgtccaccggtgcccacccatgttcccaaccagactgaccctataccctttgaatccgaagcagaacacagcgtccaggaagttaacagccctagcaagccgtcagatacaccagggacatttaggaggacgaaggaacaaaacttcaaacctgatgaagacctgttgctttgcaaaacatggttagagattagtagtgacccagtgattagcacagggcagaggaaggagggtttgtgggctagaatagagaaaaggtacaatgaacttagaggtgagtttccattgagacttaatagggctctcagcagcaggtgggacaaaataagagctgaaacagagaaatttgccggattctacgcaagagtcctcagggaaaaccaaagtggccttacagataacgacaagacttcgaaagctgcaactttgtatgcaacatcacagaaaaagccattccatttcatgcactgctggactcgcctgaaaaacgaacccaaatgggatgccatggttcatggcagcccctggagaggcaatgcggggaccgagccagtacgtagtcttacacctacaggttctgttaatgaagtacacactgatgaaggtggttcaaaaggcaagagaccattaggacgtgactcaacgaaagcatcaaggaagaagtcaatgtccagttcatcccaatctactgactacctgtcaagaatccatgacatttagatagcaagattgaagcaaagtgaagaaaaatcagacctgaaacaacagaacattgagttcatgaaggaagttgaactgaagaagttggaggtttgaaagggaattaggcttacacctagtccctaaataattttggtggttgaattgcccaacacaaataattggactaactagtttgctctagtgtataagttatacaggtgtaaaaggtgctcacttagccaataaaaagatcaaatattggattcaaaaaaggagcaaagggccaaccgaaggcacctctggtcgggcacaccggactgtccggtgtgccaccggacagtgtccggtgcaccaccggacatgtccggtgcaccagaggactccaactcgaactcgccaccttcgggaatttccagaggcacttgcgctataattcaccggactgtccggtgtacaccggacatgtccggtgctccaaggaagggcggcctcaggaactcgccagcctcgggttttcacttcggccgctccgctataattcaccggactgtccggtgtgcaccggactgtccggtgcatctgcggagcaacggctattccaggcgccaacggctacctgcagcgcattgattgcgcgccagcgcgcgcagaggtcagacacgcccatgctggcgcaccggacaccctacagtgcatgtccggtgcgccaccggacatcaaggcggacccagaagtcagaagcttcaacggtcggaatccaacggaactggtgacgtggctggggcaccggactgtccggtgtgcaccggactgtccggtgcgccatcaaacagacggcctccaccaacggtcaagttggtggttggggctataaataccccaaccaccccaccattcattgcatccaagttttccagcttccaaccactatacaagagctagcattcat

SEQ ID NO: 9861 - DNA, 3190 bp, Zea Mays
gccgtccaagtcccatggcgaaaggatggggccatgagactgtcttcaacggacgccgctaccaccccctcctttattactgtagtccatataggggctacagtacacccccttcaccttcagcgcatccctcttcctcctcctctcccctcccgattctttctctctcccgctaaatggatgggcacgctacggcgctcgcgtcccctccggctgctagcttcccagacaagcccgcgcgctcggaatactccgaggagggagctccaggcgagtccacagagaccgcaccaccgccggagaactttgtcgtggatccgccctccgccgcgattcatttgccttgctccgggcggcgaccagcagacgccgtcgtccacgcggatccactgggcagcttcgcggagcggcgacccggtcgatccgtgcaaagacgccgccgtcggtcgtctatttccgccagttcgtcgtctgcgggactcacgtcaacgcgaaataatcgaatcggcgacagatcgacgctcaccagatctgcttctttcgagctacgacgtcgaagccaaggaggaactgcttgacgattgaaatcaagatgagcagccatgatgccaaactggtgcaaaacttggtcctcaatcttgcatcctcagtggaaagtcgtgcagtcaatattaggacctttttagaagaggctttccgtcatttgggtgacgagcattaccttctgaatgctctacttgctattcgaaaagaggtagacctgatggagcaggatgcaattgagagcaaagcaaggtctgacccagagaaggataggatggaggaacaaattaaccttgctcaggatgccaagcccgtgcctagacaaataactttcaccccccccatcctcaccagaattgtatgacgccagtgacaatgactcctacgactccgacaggtccactaggtatagcatttggaacctgtaataatggtacgtagaacctggtcgtagtagtactaatgcatccaaataaagtaggaacttgtctggtatctgtttgatgcatgcgtaaccgatgtacgaatggttgaagcttatcttacttatgtacgaacctgttgtgggatgctttatccttttgtagtcaacttatttccaatgcttcatcctgttgttcgtattgtctgaagctgatttgcaatgctttcaagtgtgacgtttacagttcaagtttgttatgtgttgtccaacttaatgtatttatgtatttcattccagaatggctgacaacaactcaaacaatccttatcgaccacctgctgccagccccaatacagatgtggcagccccaagggttcgacccaacacaggcttcaacatttactaatccttcaaattcccatatgacaaatcctacctggtcccagggacctaatgacccatctggatatacctttcgtacaccatggaacccatattttggtatgacaactcctgggggtcctcctacacaaacatgtttcggtcaaccacaattggtaccacccattccatgtccaccggtgcccacccatgttcccaaccagactgaccctataccctttgaatccgaagcagaacacagcgtccaggaagttaacagccctagcaagccgtcagatacaccagggacatttaggaggacgaaggaacaaaacttcaaacctgatgaagacctgttgctttgcaaaacatggttagagattagtagtgacccagtgattagcacagggcagaggaaggagggtttgtgggctagaatagagaaaaggtacaatgaacttagaggtgagtttccattgagacttaatagggctctcagcagcaggtgggacaaaataagagctgaaacagagaaatttgccggattctacgcaagagtcctcagggaaaaccaaagtggccttacagataacgacaagacttcgaaagctgcaactttgtatgcaacatcacagaaaaagccattccatttcatgcactgctggactcgcctgaaaaacgaacccaaatgggatgccatggttcatggcagcccctggagaggcaatgcggggaccgagccagtacgtagtcttacacctacaggttctgttaatgaagtacacactgatgaaggtggttcaaaaggcaagagaccattaggacgtgactcaacgaaagcatcaaggaagaagtcaatgtccagttcatcccaatctactgactacctgtcaagaatccatgacatttagatagcaagattgaagcaaagtgaagaaaaatcagacctgaaacaacagaacattgagttcatgaaggaagttgaactgaagaagttggaggtttgaaagggaattaggcttacacctagtccctaaataattttggtggttgaattgcccaacacaaataattggactaactagtttgctctagtgtataagttatacaggtgtaaaaggtgctcacttagccaataaaaagatcaaatattggattcaaaaaaggagcaaagggccaaccgaaggcacctctggtcgggcacaccggactgtccggtgtgccaccggacagtgtccggtgcaccaccggacatgtccggtgcaccagaggactccaactcgaactcgccaccttcgggaatttccagaggcacttgcgctataattcaccggactgtccggtgtacaccggacatgtccggtgctccaaggaagggcggcctcaggaactcgccagcctcgggttttcacttcggccgctccgctataattcaccggactgtccggtgtgcaccggactgtccggtgcatctgcggagcaacggctattccaggcgccaacggctacctgcagcgcattgattgcgcgccagcgcgcgcagaggtcagacacgcccatgctggcgcaccggacaccctacagtgcatgtccggtgcgccaccggacatcaaggcggacccagaagtcagaagcttcaacggtcggaatccaacggaactggtgacgtggctggggcaccggactgtccggtgtgcaccggactgtccggtgcgccatcaaacagacggcctccaccaacggtcaagttggtggttggggctataaataccccaaccaccccaccattcattgcatccaagttttccagcttccaaccactatacaagagctagcattcat

SEQ ID NO: 9862 - DNA, 710 bp, Zea Mays
aggcagctgactggcaatcaagtttttctaatccaccaaggaagatcatagtactgatatcacgccttctcagtgatgcacatcggtatattttgcgatgcctgagcaaccatggaaccgtctcacattgtgctgtactaacagctatttcaaagattggacactcagcatatgttgattctccactcgggccagatgcgtttcgggaatatgaaaccttacttattcaggaccatgatgagcttcttaagaagtctgagaatttagacagacataaagaaagcattcataaagaggcgagtgattttacctctgacgttgataattattctaagtggggttctggggtgcattatggctctaattctgaatccagcccaacgaaaagggatttttttatgacgaaatgggccagggtttttgttttgccctctgaaggcataattgctgactcaagcctgtcgaatcatcatgaggattcccttggctctggtttaccctccatatctactggtaaaccttttgatagtgacgagatggacataaagcttgatatattttcacttggtgatacatcaaagccagcaaatggtgaagcagcaagccccaagaagcagagcccatctggctcacgctctcctgatttgttaatggcaaacacagctgaactgacaacaatcgatcaaaatttgcaggcgaagcctgaataa

SEQ ID NO: 9863 - DNA, 3214 bp, Zea Mays
atgacagcccctgtggctcttccaaatgatcgagcagcagtctcccattctgcaagggttgacttattccgagacactagttgcaacatagaaaaggaggtgttggccagtatgggaaatgaccaagattcgactgctgctggaacaaatcctggtttcagagttggggagatcaggtttggcaatggagatgtttattctggcacattgttggggaacacaccagagggttcaggccagtatcgctggtcagatggttgcacctatgacggtgagtggacgagagggatgaggcatgggcaaggaaagacgcaatggccatctggagccacctatgagggcgagtattctcgcggctatgtatacggtgaaggcacctatacgggtccagataaaatcatctacaagggacggtggaagttgaatcgcaagcatgggcttggatatcagacatatccaaatggagacacgtttgaaggttcgtggattcagggagaaatagtaggtcacgggaagtacacatgggcaaatgaggacacttacgttggcaacatgaaaagtggcaggatgtcagggaaaggaactcttacatggaaaaatggggactcatatgagggtaactggatagatggcatgatgcatgggtatggaatctatacatggaatgaatgcgggtattacattggaacatggacaaggggactgaaggatgggaaaggtaaattctatccggaaggttgcagagttcctgttaacgatgagctgtatatcaaaaatctaagaaaccgtggtgtactgcctgatattagaaggcagaatcatggctcacgcatacttcactcttcctcggttgacatggggaacatgaaggttggtataaccaggcaatcttcagatgttttgtacaaaaggaatccaactgagcagcctcctttgaagaatgtgtctttggaaagacggtggagccttgaggtggctattgaaaagtttattggccatgaatcgattgaaagttctggtcaagaaagcttggaaaacttgagtgattctcgtatgcccatactggaaagagaatacatgcaaggcgttctaatcagtgaggtggttcttgacaggagtttttcagactcctcaaagaagacaaaacgccgccagaagaaaatggtaagggacacaaaaaggcctggagaggcgataattaagggacacagaagctatgatttaatgctcagcctgcagattggaatcagatatggtttggatcatttaaaatatgtggtgccatttgcatggtacattgaaaggtacacagttgggaagattacaccaattcaaaaacgtgaagttcatgcttcagattttggaccaacagcaagtttctggatgaatttctcaaaagaaggatctcggcttactccttcacattcagcggaagattttaaatggaaagactactgtcccatggttttcaggaatttgagagagatgttcaagattgatgctgcagactatatgatctccatatgcggaaactctgctcttaggcaactatcttcccctggaaagagtggaagtgtctttttcttgtcacaagatgatagattcatgattaagactctccgagaatctgaagtgcaggttcttttacgaatgcttccaaagtattatgatcatgtccgtacctatgagaacaccctcataaccaagttttttggcctccacagggtgaaaccttctagtggccaaatgttccggtttgttgtaatgggaaacatgttttgcactgaattgagaattcaccggaggtttgatttgaaaggctcgtctttaggccgctctactgacaaaattgaaattgacgagaacacaactctgaaggatttggatcttaattattccttttatcttgaaccttcctggcgtgaggctctactgaagcagattgaaacagatagtgattttttgagaacacagcggataatggattacagcctactgcttggtgtccattatagagctccacagcacttgcggacacgtgcatcttatcaccggagcatggcagcagatagattgaccgttgtttctgaagaagatgctcaggaggaggatgcccttagccatccagaaggattagtcctggttcaaagcagtggcgagaacagtgttgttgttggtcctcacataagaggcagccgtttgcgtgcatcggcagctggatttggcgaggtagacctgctgctgcctggtaccgccaggcttcagatccagctaggagttaacatgcctgcaagggcagagcaaatctccaaggaagacggaagcaaatcatttcgcgaggtgtacgatgtcgtgctttacctgggcatcattgacatattgcaagagtacaacaagtcaaagaaaatcgagcacgctgtcaagtccatgcaatatgactctgtctccatctctgccgtcaacccccggttctactcggagcgtttcttgaagttcatccagaccgtcttccccgagaattcatagctcatgagtcaatacttgttcgaaacatgagacctgatgattcccacggcagtccctgtctccaaaattggaacttgcatgcatcagaaaagcattagtcccttctttgatgaactgtcaggaggaatgggaatggctgacaagatgaggttcgtgagggctattgtgcagaagcaaatagatctcatctttctttggttttgtccccagcccctgcgatcagccggcccggctggcttccctcttccctgagtaggccgtaggcgtggcatactgccccccacctgcgaaaagatttataaataaaagttaacggcaggaagatttggggtcggcactcggtggcttagctggctgttgggagtccgggaagggaaaactggcagcaccagatgagcatttctcggtggagagttgtttctaagaacaggtagcggtgttgttgagtttcttaacggtagtaatggcgtcagtactcggtcgcctgaaaatctacagaggagtcattttcctggctgctgcgaactggagtggtatagtagtcgtggtttcttgtaattacgtagctgttggctgaatcgatcatggaccttagtgcccaagaagacagaagcccaatttcagtaaactaagccggaggagaaaactcatcagccagcaccgactcatccaaagtccttgtaatggg

SEQ ID NO: 9864 - DNA, 3212 bp, Zea Mays
tttggatattagcttttgcattttagtggatcggtactcccaggggttatgcatgacagcccctgtggctcttccaaatgatcgagcagcagtctcccattctgcaagggttgacttattccgagacactagttgcaacatagaaaaggaggtgttggccagtatgggaaatgaccaagattcgactgctgctggaacaaatcctggtttcagagttggggagatcaggtttggcaatggagatgtttattctggcacattgttggggaacacaccagagggttcaggccagtatcgctggtcagatggttgcacctatgacggtgagtggacgagagggatgaggcatgggcaaggaaagacgcaatggccatctggagccacctatgagggcgagtattctcgcggctatgtatacggtgaaggcacctatacgggtccagataaaatcatctacaagggacggtggaagttgaatcgcaagcatgggcttggatatcagacatatccaaatggagacacgtttgaaggttcgtggattcagggagaaatagtaggtcacgggaagtacacatgggcaaatgaggacacttacgttggcaacatgaaaagtggcaggatgtcagggaaaggaactcttacatggaaaaatggggactcatatgagggtaactggatagatggcatgatgcatgggtatggaatctatacatggaatgaatgcgggtattacattggaacatggacaaggggactgaaggatgggaaaggtaaattctatccggaaggttgcagagttcctgttaacgatgagctgtatatcaaaaatctaagaaaccgtggtgtactgcctgatattagaaggcagaatcatggctcacgcatacttcactcttcctcggttgacatggggaacatgaaggttggtataaccaggcaatcttcagatgttttgtacaaaaggaatccaactgagcagcctcctttgaagaatgtgtctttggaaagacggtggagccttgaggtggctattgaaaagtttattggccatgaatcgattgaaagttctggtcaagaaagcttggaaaacttgagtgattctcgtatgcccatactggaaagagaatacatgcaaggcgttctaatcagtgaggtggttcttgacaggagtttttcagactcctcaaagaagacaaaacgccgccagaagaaaatggtaagggacacaaaaaggcctggagaggcgataattaagggacacagaagctatgatttaatgctcagcctgcagattggaatcaggtacacagttgggaagattacaccaattcaaaaacgtgaagttcatgcttcagattttggaccaacagcaagtttctggatgaatttctcaaaagaaggatctcggcttactccttcacattcagcggaagattttaaatggaaagactactgtcccatggttttcaggaatttgagagagatgttcaagattgatgctgcagactatatgatctccatatgcggaaactctgctcttaggcaactatcttcccctggaaagagtggaagtgtctttttcttgtcacaagatgatagattcatgattaagactctccgagaatctgaagtgcaggttcttttacgaatgcttccaaagtattatgatcatgtccgtacctatgagaacaccctcataaccaagttttttggcctccacagggtgaaaccttctagtggccaaatgttccggtttgttgtaatgggaaacatgttttgcactgaattgagaattcaccggaggtttgatttgaaaggctcgtctttaggccgctctactgacaaaattgaaattgacgagaacacaactctgaaggatttggatcttaattattccttttatcttgaaccttcctggcgtgaggctctactgaagcagattgaaacagatagtgattttttgagaacacagcggataatggattacagcctactgcttggtgtccattatagagctccacagcacttgcggacacgtgcatcttatcaccggagcatggcagcagatagattgaccgttgtttctgaagaagatgctcaggaggaggatgcccttagccatccagaaggattagtcctggttcaaagcagtggcgagaacagtgttgttgttggtcctcacataagaggcagccgtttgcgtgcatcggcagctggatttggcgaggtagacctgctgctgcctggtaccgccaggcttcagatccagctaggagttaacatgcctgcaagggcagagcaaatctccaaggaagacggaagcaaatcatttcgcgaggtgtacgatgtcgtgctttacctgggcatcattgacatattgcaagagtacaacaagtcaaagaaaatcgagcacgctgtcaagtccatgcaatatgactctgtctccatctctgccgtcaacccccggttctactcggagcgtttcttgaagttcatccagaccgtcttccccgagaattcatagctcatgagtcaatacttgttcgaaacatgagacctgatgattcccacggcagtccctgtctccaaaattggaacttgcatgcatcagaaaagcattagtcccttctttgatgaactgtcaggaggaatgggaatggctgacaagatgaggttcgtgagggctattgtgcagaagcaaatagatctcatctttctttggttttgtccccagcccctgcgatcagccggcccggctggcttccctcttccctgagtaggccgtaggcgtggcatactgccccccacctgcgaaaagatttataaataaaagttaacggcaggaagatttggggtcggcactcggtggcttagctggctgttgggagtccgggaagggaaaactggcagcaccagatgagcatttctcggtggagagttgtttctaagaacaggtagcggtgttgttgagtttcttaacggtagtaatggcgtcagtactcggtcgcctgaaaatctacagaggagtcattttcctggctgctgcgaactggagtggtatagtagtcgtggtttcttgtaattacgtagctgttggctgaatcgatcatggaccttagtgcccaagaagacagaagcccaatttcagtaaactaagccggaggagaaaactcatcagccagcaccgactcatccaaagtccttgtaatggg

SEQ ID NO: 9865 - DNA, 1960 bp, Zea Mays
tgagtgtagaactgagcttttcagtgaagagaggatttagtactggatccatctagcctacaaccagctgtttacagtactggataaaacctgcgattaggctcttagcagctcaaatgccaacctgcaaagtgcttaatcctgcctcagaattcaggtttcctcaaaacagcatgggcagttggcaaagtgtttaagcttaaccctctctttcaaatctgcccaactaatttctcatggtgccatgggttgtattatcgcctcgttaattatttaataatgggattcacagctaattaaatcatggataaaagtcctgtcatgtgttagtcttgtggattgtaacctttcactatcccttagttcaattcatggataaatttttgttttaggctactcttttgctgtgttacattattaaaaaacaatttggttttggttcatttctgatatgaaagtagcctcttgctgttcttatgcttcccctaatataacttttttttgaataatttcctagctctttcaaatcaattcgcgatatgtccaggtggtaatattttgtgcataatggaagatgagatatccagcataatagcttatgctcttgccatatctgatgagcgccaccatttgatagatttaaaatttgagaacggaatggattattccaagggagagtatgctaaagcaatagagaaatcttttagttttctgtctgaaagttctttcagctcatcaccatggtcatctacaagttctgaagcaagcttatcatctctgtcttcattttcatctgatgacttttctggttatgatagctcatctttattgtccccaatgcatccagaaatgactgtgaatgggaaagtaactctcaaagacaaatattcagttactgttgtatatgacaatcaattctttgcactccgaaaaaagtgttgcccatccgagcttgcatatattacttctttaagccgctgcaagaagtggaatgctcaaggtggaaagagcaaggcctattttgtaaagacaacagatgacaggttcatcattaagcaaatcaataaaacagagtttgagtcatttattaaatttgcacctgattactttaagcatgtttaccattctctggacactggaagccaaacttgtctcgccaaaatattaggaatctatcaggttaagcaaattaagcatggcaaagaggtaaagattgacttgatggttatggaaaatcttctctttggccacaatatttcacgaatttatgacctcaaaggtgctattttttcgcgacgcatcactgactcaaacgatcatgatactgtttacctagatcaaaattatgttgaggacatgagcttttctccaatctatattggtggaagaacaaagcatcttttgcagcgtgcaatctggaatgacacgtctttcctcacttcggtgaatgttatggactattctctacttgtgggagtggacaaagagaagcatgaacttgtgtttggcatcattgattatctgaggcaatatacttaggacaaacaactggagacatgggtgaagacttctctgttccagacacatggagtcttgataatccgtctaagccatgcaaatcccttggtcagagcaatcgcaagttggcggaagtccagattggtgataacctgtcagagcacccaaatgaagttgaggggtgtgcctaatcatgtgcaagatttcctggcaattttgttgaaccctatcatgttgttgtttggctatatttcactttgtaaaatggtgtacataggaggaccttgcggtttttaggcaaattgttgggcaagtgaggtccacatgacgtgtacctatacaaatgttcattgttgatttcacaattattatagtgaaattaagaattcatatgatcatttttttggacctaccacttgtgagactgaagcagtctattctt

SEQ ID NO: 9866 - DNA, 1735 bp, Zea Mays
cgcgctgatgctgccgcagcctgcgcatatgccattgccacgattagtctggttagttagttaattaaatgacgttgtagtgaggagcaggaggacatcacacacaggcacggcagcggctgctgccaagggcaaggagcaggcgaggcttaggctttgcgaaaccgggggcggtgggcggcagcactgccgtgctcctgctggcagacgatgctttggaggtcaggaaacatgacgtcgtttccatgacagcgagcaaaggatcctgctggcggacgatgaacttacacagattacaaatagacgagaacaacatatcaggccccatacctagctgttttgccaacttaacaagcattaaacatttgtaagtgtcaagtatctttattttctgcccatccctgatgcttccgatttgtaaaattagtaaatgattctggttccaattttaccttttagttacatgaataatctctatctctactacttattaagacggtaagggtagcctgccgttctgccgttctgcgatctcagccgtccattctatcgtgtaaacaatctcagccatccgatcccgacgtccgatcccgcacagccatcaggcacgcagcgtcccggccgtttccaaaaaaccctaatctccagcaccccgccgcttgccagccgccagccatcaggcatgcagcgtcccagccgcccctgccgcttgccaccgcggtctccagcgtccccgccgcttgccagccgccagccgcggtctgcagcgccccggccgccgcttgccaccgcttgccagcttccacccgtggcctccagcgtccccgctgtttgccaccggatccgagatcctgcccttgtccttcatccttctccaatctgctcaccccctcctccgcgcgagccgcagccggccccgctcgcgtccccctcgcctataccctgtcgccccaccgcccacgcctcagccacccgccgtccagagcccaaccctagagcacccgtcgaatcccgctggccctagccccgacaccacctcgcaccgccgcatagatggagttgctggtgccggtgccatggcagtcgctggcgacgcaccgcacagatggagtctctatgggcggtgatcgattgaagcttggccaattccgcaccggagcgcttcatcaccgcgtggtcgtctctcatcgcaaacagagaactacactacgtggaggccggtaatgaaaccccccaccacttcgctctctggttctctatgctttgatccgtcgggctaggggattggggttcttaatcatcgggttttggtgctctggcaagagtccaccgtgcaagcctgggcaccgccgcgtccgtccgagaggtgggggaagcttcgggcaccgttgatctcaggaggttcggccaccggagaggagttggatagggagcattggaatggtcgccgtcgcataggatggagctgaattcctccgggcgctgcttggttgctccctagacgacaaaatcgagcacgacgccgatgaggacacgctgagccgggacgcgccgtagcacagcgcgtggcacttgccgcccttgtcgtgccgcatcgtccccgcagcggcatggcactggccgcctccgccgatcttgtgttccttgctttttttcgttttcttctttgcgcacttaccacctaggccaccgtctgcagattcggaggcatcgtactgcaacggatgcttcctcg

SEQ ID NO: 9867 - DNA, 1806 bp, Zea Mays
aaggcttcggtagtgccaattgaagtggttctctgtgatatcagtgcctcaacctgtgcagtgcctgcgattacatttcacaatggatgcttgcatagttttttttttcttagttaccgcgtcatggcatgatgactccaaacttcggaaggcaaaactgtcgatactttggagggagcaaacccagccagcttagccaataaggttgcaaaagtagctgggcctgctagtgttgctgagtctgctgtacctgctagccttggagttgctgctggacctgctgtacttgaaaacatccaaaagatggcacagcgaaatggatcttctgctgttgaaagcataagctctggtagcacagaagatgcattgaataagcgattggagcagcttgtcaattcccatcccgtgtttttatttatgaagggaaccccagagcaaccaaggtgtggtttcagccgtaaagtgattgacattttgaagcaggaaggggtgaaatttgggagctttgacattcttacagacaatgatgttcgcgaaggcatgaagaaattctccaactggcccactttccctcaactctactgcaaaggtgagctgcttggtggatgtgatattgttgttgctatgcacgaaagtggtgaattgaaggatgtttttgaggagcacaacattacccttaaaccacagggaagcaaaaatgaagaagcaggtgaacctgagtctgcaactgagaagggcagtgcagtttctgaatcaatcaagcttactgatgctcagaaaactcgtttggaaagccttattaactccagcccggtgatggtattcatcaaaggtacacctgaggaaccaaagtgtgggttcagtgggaagctggttcacatacttaagcaagagaacattcctttctccagttttgacatcctttcagatgatgaagttagacaggggctgaaggtcttctcaaactggcctagttaccctcaactgtacataaaaggtgaactggttggcggctcagacatagtgatggagatgcataagagtggtgagctgaagaagatactatctgagaaaggggttcgtcaaaaaggaaatctggaggacagattgaagtccctgatttcctctgccccggtgatgcttttcatgaagggcaccccagatgctccacgttgcggcttcagttcgaaagttgtgaacgccttgaagaaggaaggggtcagctttgggtcctttgacatcttatctgacgaggaagttcgacagggtttgaagacatactccaactggcctaccttcccccaactctactacaagtcggagctgattggtggctgtgacatcattcttgagatggagaagagcggagagctgaagtcgaccctgtcaatgtagacacctaacctagcattcttgcctcgctggcgttcctatcatattgcctgcattggatcattctactatgacgtttgtgccaatgtattcatagatccacgtttggtgcctgcagtgccacattgctagaatcgtgacatctgcagatggaataacttgagagcttgttcggtactgattgctcttttatcaccagtctatttagcggatgagagttttttttgttcgggtattgtcacgatatattgcagagtatgagtaattgtgtgtatttaaaggtatgtttggttgctgcacagctggaacagccgggaacaaccaagttttgcagcgtccatgcatattgctcaccacgcatccatgcaagatgaccgtcaaccagctgtgcatcagattgctcttccgccgctg

SEQ ID NO: 9868 - DNA, 3131 bp, Zea Mays
cgaatattcttcttcgttctcgcgtttatctgtgcagccctgcctttcttctcccgttccccgcggcctgcgcgcgcgttctctccctcacctccgcccctctctccctctctctcgctccgggcgacggctgggcgaccgccgctttatccgtgcggcccttccttttgttctcccgtcacccaaaccccccttcgagctctatctgtctcttcctctcgaggcgacgcctgggctaccgcgccgctactgcggcctcccgcgacaggtgcctagtctccatcaggtgccatgtcttcttcgggctcttcaccggcgacgtgcactgccagctctgcatgtatacacccaagtcctttactgggtccgccgccgcccctacgtacttcgttaggtttagtatgttgttaagtttgtaattctagggtctggagggaagcatagatctcaagaggggtgaaatttggtggtaatttcctgagaatttcaaggagacaagggcgtggaggttgtttctggagggatctgtgagcacagcagcagaaatttgaggttggtggtagcctgttgatccacgatggtgggtaaggagctggtggtgcaaaggaatggccctgttgacatacgtgagattgctgcaaaggccacgcttcgggaggtgcggcagagcgggcacacctacgtcgaactacggcgtgtcgggaagcgtgtcatcttcttctgcaccatctgcctcaccgagtgcttcagcgacaatgtgctgtttgaccacctcaagggaaacctgcattcacggcggtatgctgaggccaaggttacgctgtttgggcccatgccatggccgtttaatgatggtgtgctcttcttcaacaacttacgcgagaaggatccgctcctgctggactcaagctcacagagcaccagagagcttgccctggttccagagcctgaggtttcagggaatgatactgaggtgacatcaaggctgagagatggttcaacctcctctaatggtgtgaaaggtgcacgctatggtgcaaaaggccgtgctaatggtagaactgctgctgtatctgaagatcacatgctttcaaaccatggaactgatggtcctgttgttattcctggtgtattgctaaaggatgttgtttcagatttgcctgtgcatcttttgggctatgggaatatttcatacaggatctatgaagctagcaagaactgcaggaagataagcaagatctggtgtgcttgggtaggacaaggctcccatggttttgagagttgtaacacttatgagcaatctggatttgccatagtcaacttctcttatacctatgatttaggcaggaagtggtcttctgaggaacaagacctgtctgtctctgctggatctttctttgtaattgatgatgctggacaccgtggaaagcgaatgagaaaatcattctctgatcaagaagcatcttcagaagagtcaaatggtcagaacagctctttacagggcagtaggcaagctattgtgacttgttcaccggtaggtacctcaaatgatcttcaagttggtctcttatcaagcaaggcagcaaggagagagttgaggaagcagaagcgaatagcagctgagaaagtgtgtgatctttgcggcagaccaatgctctctggaaaggatgttgccaccttgctgaactgcaatacaggaaaactagcttgcagcagtagaaattcaagtggggcttaccatctatttcacacttcctgccttttacactggactattctgtgccaatacgagatgctgaacgatgaaatagctaggaaggggaagagcaaccgaggaaggaaggcaaagaatgcacctaagagaagcaaaataacgtccatagtttgcccagaatgtcagggtactggaattcacgtcaacggagatgaacttgagaagccaagcatttctttatcagagatgtttcgcttcaagatgaaagcaatcgaagctcacaaagcatggctgaagagacctgaagtgcttgaaaactgttccactgggcttcatttcccctcagaacatgtggagaactctgaggagaaggtgatgccactcaagtcacttcccttctatgccgctgatgggtagaaagatagttgatggcagctactggaggatgctgcagttgttgatgtaaataagctcgcttgacagttgtggaacagtgttgtcagatgctcacctacgtgcattatctcagttaacctgtgtccgccagatgataactaagacatttaaactggcaactggcaactacacgtacgcagtccatttcgttgggttgggttgggtttgctgcttacagcttccagtttcattgtttgtttctgattgcttatgccacgcttctggatgtgcccgccagccagacgtcttgcgctacacgtggtttgctattatttggaaaccgtagttgcgccaaccgtagtatgttaaacacattcatgtcctttcataccgtaaatgtttgagcattttcaacaatgtcttaaactggtgcttcaaattgaactcaaattgaaatatagatattccaacaatgtcttatttctaaaatttgtcaaaaaaattatagagcatcctatctagggctggacaaaatgcttgtggctcgctggctcgctcgtttcatggtcggctcggatcggctcgtttgaattttgtcacgagctgacatccttgctcggttcgttaacgagccagctcgtgagctaaacgaactacaatattccagtaaaacgaaactatgtacatattatttacagaataattgatgaacatgttatatatatgtgaggtgtctatgatctatgaattaaactaatgattaatgaactatgcctatgtgttaatttggtctatgcaaataaatttatgggttaaactgatgaacatatatgtgaattgtgaattaatgagtgatgaattgtgctaatttggtgttatattgacgtggtttgtgaaactaagtataattactattttctattgttaaattagtttaaaattaactaaaaaataattattatgtacattttattttttttctgctctggctcgcgagctaaacgagccagctcgagctcgt

SEQ ID NO: 9869 - DNA, 1045 bp, Zea Mays
gtcgattctgctccagttcactaggcctccgagtttccccgggactatgatggtgcgtgcctgcagatgcggctgtcgtacagtcccgcagctcatatattcctcttcctggtgcagtggacggactgcagcctcgcaggggctcttggtctgctgagaatcctcatatacaaggtttatgtggatggcacaacaaccatgtcgactcatgagaggaaagccagcatcaaagaattctatgctgtgatatttccttctttgctgcaactgcaaagggggatcactgatgtcgaggacaagaagcagaaggccatatgcatggagaagtacagaaagaaagatgaggatggacgggacaccttatctgatattgatgttgagagggaagaggagtgtgggatttgcatggagatgaacagcaaagttgtgttgcccaactgcacccatgctatgtgtatcagatgttaccaggactggagttcaagatcgcagtcctgcccattctgccgtgacaacctgaagaagacctgtcctggtgacctgtggatctatgttgaggaccaagatgtggttgacatggagacggtgtcgagcgagaacctcagacggctgttcatgtacataagcaagctgcctctgattgtcccagacgtcatcttcagtgtgtatgattcccacatcaaatgacttccgacgcgaccttcctgacgaccttcagccagtgcccagctccagttaatcttatgcccccatgtcctccattttcatgctttgctcaagcttttggaagtgcctgaactgatttggaaccgcaagccttccggtggtgctttagaaacttgtttagtgcctgcatgcatccttaatcatatgcagccactctgtacatatctgacttggctcagttaataggggactgtgcttgccccaaatggaggcagggccgtttgtgtctttctcatgtttccattagcgaagcaacgcaaagttctggggggcattggaaggtttctgctgcaatgttaggatggtaattggtagctag

SEQ ID NO: 9870 - DNA, 1363 bp, Zea Mays
cggccacgctcgccgcgggcacacgcggcgcgctgtgctcacccctgtctgcctgcgcgcccggcacgcccgcgcccactcacgcccggccctgccccgcgccctcatcgtctcctcccggcctcccctcaaagcccaccgccgctgcccccacgccacccaccccaccccgcccccgcccctaccgcgcggtgcccgagacccagaggccagacccctttcttcaccttccttcccatcgcaatcgcaagcccccggctccggcgctcggcggtcggccaggttcgggagatcacttcgtcgcggcgaggagggagggggtcgccgttagcgcgcggcacttggatgagaagggcagcggtggaggaggatgcggaaggcgtacagggactccatcaaggtgctcgaagctgacatccagcacgccaacacccttggacggactgcagcctcgcaggggctcttggtctgctgagaatcctcatatacaaggtttatgtggatggcacaacaaccatgtcgactcatgagaggaaagccagcatcaaagaattctatgctgtgatatttccttctttgctgcaactgcaaagggggatcactgatgtcgaggacaagaagcagaaggccatatgcatggagaagtacagaaagaaagatgaggatggacgggacaccttatctgatattgatgttgagagggaagaggagtgtgggatttgcatggagatgaacagcaaagttgtgttgcccaactgcacccatgctatgtgtatcagatgttaccaggactggagttcaagatcgcagtcctgcccattctgccgtgacaacctgaagaagacctgtcctggtgacctgtggatctatgttgaggaccaagatgtggttgacatggagacggtgtcgagcgagaacctcagacggctgttcatgtacataagcaagctgcctctgattgtcccagacgtcatcttcagtgtgtatgattcccacatcaaatgacttccgacgcgaccttcctgacgaccttcagccagtgcccagctccagttaatcttatgcccccatgtcctccattttcatgctttgctcaagcttttggaagtgcctgaactgatttggaaccgcaagccttccggtggtgctttagaaacttgtttagtgcctgcatgcatccttaatcatatgcagccactctgtacatatctgacttggctcagttaataggggactgtgcttgccccaaatggaggcagggccgtttgtgtctttctcatgtttccattagcgaagcaacgcaaagttctggggggcattggaaggtttctgctgcaatgttaggatggtaattggtagctag

SEQ ID NO: 9871 - DNA, 1343 bp, Zea Mays
cacttgtttaagccgcgacctgcgtcccagcatcagtcagtgcatcagcattcatcgccccctgcctccccttccattcgccctcctcccactccaccagctcctgcctgcctataaacccagggccgccctttgactctccttccctgtccagtggcggggccgcttcccttgcgttcgcggagagtctgtctgtctgtctagctagctagctagctgccgagagcgtgaggaggaagggggatccatggcggcggagaacgaggagaaggagacggcctgcgcggggtacaagcacgggccgccatgggtgttcaaaggcagcgcattgtaccagctgcatttggtgaaggcgtcgacggcgcgggccttcgtgccgcgggacctccgcctggttgaggccttcggctacacgctcggcggcatgttcctggcgcgctaccacgacagccctgccggcgaattcgacgagctcgtggtgatcgccggcattgtgtggaacccgccgacctcctgcgcgtgagttcgccttcgctccgcttcatgcctgcattgcattcgcatcttctgtggcctagtttaatcccttgtaggcttcttcgccgctttctcctgcctgattggcctcgatcagggaccccccaacagaaaagaacaggggcaacttgcagtatgcgaaggggaaagaaaaaaaacgaaaaccctcgtgcttgcgccagccggccataaacaagcgccttatcccccatatgattgtacttggcagcacggactgtgccttgcttctttcaattattcgtaggctggggaggggtgtccgggtgcgctgcacttgctccgcgtggccaacttgctgccctgcgcagctcagctacagcctacagccgcccgtggtttcctactttcctccgtcttcgaaatgcagcagttggatggaactctgaatagtggtgggctgccagggtgctggtgaacagcgtcgaagcctgccggcacggccgcaaggaggtaggactgccaagccatgtcgccacattctcgtcaaagaacgaggctgcttcgcttggggatagaccgttggctagaccaaacagcttcctcaacatgctggggatcgggtcgacagccttcgagcaagggaatggccgcgagattgaggtttcagagtccaagggcggctcgtctactcggcatctgtgcaacatcagcctgccatttaccggatcacataaggaccaccagtgggcgggcccagcaatcagaatgtcactcccgagtttcagcggacgtacagtggaccatcctgatcttctcaagtactcctgtcaagtagaatgcaggtg

SEQ ID NO: 9872 - DNA, 1375 bp, Zea Mays
cacttgtttaagccgcgacctgcgtcccagcatcagtcagtgcatcagcattcatcgccccctgcctccccttccattcgccctcctcccactccaccagctcctgcctgcctataaacccagggccgccctttgactctccttccctgtccagtggcggggccgcttcccttgcgttcgcggagagtctgtctgtctgtctagctagctagctagctgccgagagcgtgaggaggaagggggatccatggcggcggagaacgaggagaaggagacggcctgcgcggggtacaagcacgggccgccatgggtgttcaaaggcagcgcattgtaccagctgcatttggtgaaggcgtcgacggcgcgggccttcgtgccgcgggacctccgcctggttgaggccttcggctacacgctcggcggcatgttcctggcgcgctaccacgacagccctgccggcgaattcgacgagctcgtggtgatcgccggcattgtgtggaacccgccgacctcctgcgcgtgagttcgccttcgctccgcttcatgcctgcattgcattcgcatcttctgtggcctagtttaatcccttgtaggcttcttcgccgctttctcctgcctgattggcctcgatcagggaccccccaacagaaaagaacaggggcaacttgcagtatgcgaaggggaaagaaaaaaaacgaaaaccctcgtgcttgcgccagccggccataaacaagcgccttatcccccatatgattgtacttggcagcacggactgtgccttgcttctttcaattattcgtaggctggggaggggtgtccgggtgcgctgcacttgctccgcgtggccaacttgctgccctgcgcagctcagctacagcctacagccgcccgtggtttcctactttcctccgtcttcgaaatgcagcagttggatggaactctgaatagtggtgggctgccagggtgctggtgaacagcgtcgaagcctgccggcacggccgcaaggaggtaggactgccaagccatgtcgccacattctcgtcaaagaacgaggctgcttcgcttggggatagaccgttggctagaccaaacagcttcctcaacatgctggggatcgggtcgacagccttcgagcaagggaatggccgcgagattgaggtttcagagtccaagggcggctcgtctactcggcatctgtgcaacatcagcctgccatttaccgcaggatcacataaggaccaccagtgggcgggcccagcaatcagaatgtcactcccgagtttcaggcacgtctcgcttgctttgcgaatttcagcggacgtacagtggaccatcctgatcttctcaagtactcctgtcaagtagaatgcaggtg

SEQ ID NO: 9873 - DNA, 1372 bp, Zea Mays
cacttgtttaagccgcgacctgcgtcccagcatcagtcagtgcatcagcattcatcgccccctgcctccccttccattcgccctcctcccactccaccagctcctgcctgcctataaacccagggccgccctttgactctccttccctgtccagtggcggggccgcttcccttgcgttcgcggagagtctgtctgtctgtctagctagctagctagctgccgagagcgtgaggaggaagggggatccatggcggcggagaacgaggagaaggagacggcctgcgcggggtacaagcacgggccgccatgggtgttcaaaggcagcgcattgtaccagctgcatttggtgaaggcgtcgacggcgcgggccttcgtgccgcgggacctccgcctggttgaggccttcggctacacgctcggcggcatgttcctggcgcgctaccacgacagccctgccggcgaattcgacgagctcgtggtgatcgccggcattgtgtggaacccgccgacctcctgcgcgtgagttcgccttcgctccgcttcatgcctgcattgcattcgcatcttctgtggcctagtttaatcccttgtaggcttcttcgccgctttctcctgcctgattggcctcgatcagggaccccccaacagaaaagaacaggggcaacttgcagtatgcgaaggggaaagaaaaaaaacgaaaaccctcgtgcttgcgccagccggccataaacaagcgccttatcccccatatgattgtacttggcagcacggactgtgccttgcttctttcaattattcgtaggctggggaggggtgtccgggtgcgctgcacttgctccgcgtggccaacttgctgccctgcgcagctcagctacagcctacagccgcccgtggtttcctactttcctccgtcttcgaaatgcagcagttggatggaactctgaatagtggtgggctgccagggtgctggtgaacagcgtcgaagcctgccggcacggccgcaaggaggtaggactgccaagccatgtcgccacattctcgtcaaagaacgaggctgcttcgcttggggatagaccgttggctagaccaaacagcttcctcaacatgctggggatcgggtcgacagccttcgagcaagggaatggccgcgagattgaggtttcagagtccaagggcggctcgtctactcggcatctgtgcaacatcagcctgccatttaccggatcacataaggaccaccagtgggcgggcccagcaatcagaatgtcactcccgagtttcaggcacgtctcgcttgctttgcgaatttcagcggacgtacagtggaccatcctgatcttctcaagtactcctgtcaagtagaatgcaggtg

SEQ ID NO: 9874 - DNA, 912 bp, Zea Mays
cacttgtttaagccgcgacctgcgtcccagcatcagtcagtgcatcagcattcatcgccccctgcctccccttccattcgccctcctcccactccaccagctcctgcctgcctataaacccagggccgccctttgactctccttccctgtccagtggcggggccgcttcccttgcgttcgcggagagtctgtctgtctgtctagctagctagctagctgccgagagcgtgaggaggaagggggatccatggcggcggagaacgaggagaaggagacggcctgcgcggggtacaagcacgggccgccatgggtgttcaaaggcagcgcattgtaccagctgcatttggtgaaggcgtcgacggcgcgggccttcgtgccgcgggacctccgcctggttgaggccttcggctacacgctcggcggcatgttcctggcgcgctaccacgacagccctgccggcgaattcgacgagctcgtggtgatcgccggcattgtgtggaacccgccgacctcctgcgcgtgggctgccagggtgctggtgaacagcgtcgaagcctgccggcacggccgcaaggaggtaggactgccaagccatgtcgccacattctcgtcaaagaacgaggctgcttcgcttggggatagaccgttggctagaccaaacagcttcctcaacatgctggggatcgggtcgacagccttcgagcaagggaatggccgcgagattgaggtttcagagtccaagggcggctcgtctactcggcatctgtgcaacatcagcctgccatttaccggatcacataaggaccaccagtgggcgggcccagcaatcagaatgtcactcccgagtttcagcggacgtacagtggaccatcctgatcttctcaagtactcctgtcaagtagaatgcaggtg

SEQ ID NO: 9875 - DNA, 1060 bp, Zea Mays
cacttgtttaagccgcgacctgcgtcccagcatcagtcagtgcatcagcattcatcgccccctgcctccccttccattcgccctcctcccactccaccagctcctgcctgcctataaacccagggccgccctttgactctccttccctgtccagtggcggggccgcttcccttgcgttcgcggagagtctgtctgtctgtctagctagctagctagctgccgagagcgtgaggaggaagggggatccatggcggcggagaacgaggagaaggagacggcctgcgcggggtacaagcacgggccgccatgggtgttcaaaggcagcgcattgtaccagctgcatttggtgaaggcgtcgacggcgcgggccttcgtgccgcgggacctccgcctggttgaggccttcggctacacgctcggcggcatgttcctggcgcgctaccacgacagccctgccggcgaattcgacgagctcgtggtgatcgccggcattgtgtggaacccgccgacctcctgcgcgctggggaggggtgtccgggtgcgctgcacttgctccgcgtggccaacttgctgccctgcgcagctcagctacagcctacagccgcccgtggtttcctactttcctccgtcttcgaaatgcagcagttggatggaactctgaatagtggtgggctgccagggtgctggtgaacagcgtcgaagcctgccggcacggccgcaaggaggtaggactgccaagccatgtcgccacattctcgtcaaagaacgaggctgcttcgcttggggatagaccgttggctagaccaaacagcttcctcaacatgctggggatcgggtcgacagccttcgagcaagggaatggccgcgagattgaggtttcagagtccaagggcggctcgtctactcggcatctgtgcaacatcagcctgccatttaccggatcacataaggaccaccagtgggcgggcccagcaatcagaatgtcactcccgagtttcagcggacgtacagtggaccatcctgatcttctcaagtactcctgtcaagtagaatgcaggtg

SEQ ID NO: 9876 - DNA, 1404 bp, Zea Mays
cacttgtttaagccgcgacctgcgtcccagcatcagtcagtgcatcagcattcatcgccccctgcctccccttccattcgccctcctcccactccaccagctcctgcctgcctataaacccagggccgccctttgactctccttccctgtccagtggcggggccgcttcccttgcgttcgcggagagtctgtctgtctgtctagctagctagctagctgccgagagcgtgaggaggaagggggatccatggcggcggagaacgaggagaaggagacggcctgcgcggggtacaagcacgggccgccatgggtgttcaaaggcagcgcattgtaccagctgcatttggtgaaggcgtcgacggcgcgggccttcgtgccgcgggacctccgcctggttgaggccttcggctacacgctcggcggcatgttcctggcgcgctaccacgacagccctgccggcgaattcgacgagctcgtggtgatcgccggcattgtgtggaacccgccgacctcctgcgcgtgagttcgccttcgctccgcttcatgcctgcattgcattcgcatcttctgtggcctagtttaatcccttgtaggcttcttcgccgctttctcctgcctgattggcctcgatcagggaccccccaacagaaaagaacaggggcaacttgcagtatgcgaaggggaaagaaaaaaaacgaaaaccctcgtgcttgcgccagccggccataaacaagcgccttatcccccatatgattgtacttggcagcacggactgtgccttgcttctttcaattattcgtaggctggggaggggtgtccgggtgcgctgcacttgctccgcgtggccaacttgctgccctgcgcagctcagctacagcctacagccgcccgtggtttcctactttcctccgtcttcgaaatgcagcagttggatggaactctgaatagtggtgacttgcttgactgagctttttttcagttcttgctgcttctgatctactactgtatgagcttgttttcaggtgggctgccagggtgctggtgaacagcgtcgaagcctgccggcacggccgcaaggaggtaggactgccaagccatgtcgccacattctcgtcaaagaacgaggctgcttcgcttggggatagaccgttggctagaccaaacagcttcctcaacatgctggggatcgggtcgacagccttcgagcaagggaatggccgcgagattgaggtttcagagtccaagggcggctcgtctactcggcatctgtgcaacatcagcctgccatttaccggatcacataaggaccaccagtgggcgggcccagcaatcagaatgtcactcccgagtttcagtggaccatcctgatcttctcaagtactcctgtcaagtagaatgcaggtg

SEQ ID NO: 9877 - DNA, 1063 bp, Zea Mays
cacttgtttaagccgcgacctgcgtcccagcatcagtcagtgcatcagcattcatcgccccctgcctccccttccattcgccctcctcccactccaccagctcctgcctgcctataaacccagggccgccctttgactctccttccctgtccagtggcggggccgcttcccttgcgttcgcggagagtctgtctgtctgtctagctagctagctagctgccgagagcgtgaggaggaagggggatccatggcggcggagaacgaggagaaggagacggcctgcgcggggtacaagcacgggccgccatgggtgttcaaaggcagcgcattgtaccagctgcatttggtgaaggcgtcgacggcgcgggccttcgtgccgcgggacctccgcctggttgaggccttcggctacacgctcggcggcatgttcctggcgcgctaccacgacagccctgccggcgaattcgacgagctcgtggtgatcgccggcattgtgtggaacccgccgacctcctgcgcgctggggaggggtgtccgggtgcgctgcacttgctccgcgtggccaacttgctgccctgcgcagctcagctacagcctacagccgcccgtggtttcctactttcctccgtcttcgaaatgcagcagttggatggaactctgaatagtggtgggctgccagggtgctggtgaacagcgtcgaagcctgccggcacggccgcaaggaggtaggactgccaagccatgtcgccacattctcgtcaaagaacgaggctgcttcgcttggggatagaccgttggctagaccaaacagcttcctcaacatgctggggatcgggtcgacagccttcgagcaagggaatggccgcgagattgaggtttcagagtccaagggcggctcgtctactcggcatctgtgcaacatcagcctgccatttaccgcaggatcacataaggaccaccagtgggcgggcccagcaatcagaatgtcactcccgagtttcagcggacgtacagtggaccatcctgatcttctcaagtactcctgtcaagtagaatgcaggtg

SEQ ID NO: 9878 - DNA, 1344 bp, Zea Mays
cctttcggtattacagataaattatatgtcatcttgtagataattggttgtacatatttatatagtagactgagaaacggcaaacccagtgccggaggtctccacatgagtgggtccgggaagggataaactgtgacctggtgactttgtgcgacagctctcaccactgtaccaggcctgcccttcaatattgctttagtagactgctgaagattttatttttgacatgtacctttttgtcctgcagagtccatgttatcagaggagcttattcaaaaagttatgtctggggaagagataaagctggaagacctctctgattgtgaaatcaaacgattccgtcaagctctggcctcagcttatcagacaagtaaacgcagaagacactgctgtaccatatccagatccaaatactgaccaagaggctagcatcaacgaaatccctgaagggccagaatctcctctcccgtcattgaaacagttaacaaggacagagccatctcctttgcttgctgtccacttggttgacattctgtacagttactgcttcacacttcggctctacaacggtgattggcactcagatcctttgggtgcttgcactgtcgccctgtcgatgtcgaaagtcatgggccaggatgctaaacctgagactgtacctgaagcactcgcagcctgcatcgaggagacatgctcaccagcttacaggcatactggtggtttcaggtttgctattggactcgtggacgatatcatcgccattctctccttgggacagaacgcacttatttgtgccttatgcgacttccatcgactcattgaagttggtaagagcatgctcaaggtggagaaagtgggcaagacggagagggcacagaactctccgaagcttcgtagtgcagctaggaagctattcttcatgacttgttgggtccatgagcagccagatgaggcgtggccatctttagctcacatcgtccaggtgcagaaagcatctatggaggagttggagaccgggaattggaaggcggatagaaagagcaaaccacaatccgcggttcttatcgaggagctgtaggcatatggatgtaccactggaaactggatcgcgaggctctgtacccttgtgtatcgctcaggatgaatccaacgagagaccttgtccttgtaatgcagttagttgcttttgtgtacacttttttttgaaaaaaattgtatttgtatacgagtttgaaatcctagttgaagcgatcctgctttactttgcttgttaaattgcgggctgatttaatccatgcgttggagcttatgcggttcagatattcttatgattgcaagtttgtg

SEQ ID NO: 9879 - DNA, 1391 bp, Zea Mays
gtcgtgacatcaggcgcgcggcagagcgggctgctcgcgcgacacaggaagggtcatagtgttcaatgcactgaatccttcatgcgtgagaatgttatggacgagcttaagcagatgcaacctgaggatgaatcaaagaaaaagatgctagatatcctcaagcggctccacttggaagaagagatggcatcagatggtgaagatgagtccatgttatcagaggagcttattcaaaaagttatgtctggggaagagataaagctggaagacctctctgattgtgaaatcaaacgattccgtcaagctctggcctcaggtgagctcagtaagatgattgaaccgtggacaccttggtggaaaaaaccctcagccagatctatttcccttggcctggatggaagtcagcttatcagacaagtaaacgcagaagacactgctgtaccatatccagatccaaatactgaccaagaggctagcatcaacgaaatccctgaagggccagaatctcctctcccgtcattgaaacagttaacaaggacagagccatctcctttgcttgctgtccacttggttgacattctgtacagttactgcttcacacttcggctctacaacggtgattggcactcagatcctttgggtgcttgcactgtcgccctgtcgatgtcgaaagtcatgggccaggatgctaaacctgagactgtacctgaagcactcgcagcctgcatcgaggagacatgctcaccagcttacaggcatactggtggtttcaggtttgctattggactcgtggacgatatcatcgccattctctccttgggacagaacgcacttatttgtgccttatgcgacttccatcgactcattgaagttggtaagagcatgctcaaggtggagaaagtgggcaagacggagagggcacagaactctccgaagcttcgtagtgcagctaggaagctattcttcatgacttgttgggtccatgagcagccagatgaggcgtggccatctttagctcacatcgtccaggtgcagaaagcatctatggaggagttggagaccgggaattggaaggcggatagaaagagcaaaccacaatccgcggttcttatcgaggagctgtaggcatatggatgtaccactggaaactggatcgcgaggctctgtacccttgtgtatcgctcaggatgaatccaacgagagaccttgtccttgtaatgcagttagttgcttttgtgtacacttttttttgaaaaaaattgtatttgtatacgagtttgaaatcctagttgaagcgatcctgctttactttgcttgttaaattgcgggctgatttaatccatgcgttggagcttatgcggttcagatattcttatgattgcaagtttgtg

SEQ ID NO: 9880 - DNA, 4458 bp, Zea Mays
cggggcgtgcatatggtggcacacatgttggacgacgtatgcgatgtcgggccggatgaagatgaggtactgcagtgccccaacaagactctggtagctggtgggatcagccaccgggggccgtcgttggaggaggccttgccctgagtgtccaccggagtcgtgcaaggcttacagtcagccatgctagcgcgatcgaggatgtcgacgatgtactggtgctggtggagaaacaagccctgggaccggctctccatggtgatccccaggaagtggtgcaactcactcaggtccttcatcgcgaactcctgctagagggaggagatgatacgccacaggagttcgtgcgaggaggccgtggggacgatgttatcgacatagaggaggctgtacgtcgtgtccaggccacgatagaagacaaatagggaggtgtctgccttggtctcgaagaagcctcgtgagagcaataaggcgacaaagcgactacaccaagctcggggcacctgcttgaggccgtagagggaccagttgagcttgcaaaccatgtcgggtagggatgaaaatggtcggaacgatatttattcagttatcaatttttggtcatttttctttggttgcgaataaataggatatataatctactatacaaatttgtattcttgtttttaacattgagcttttagatattcataaaaggtaaaccacaaattcatcctatattttcttaaatgatagatgtaaaattcggtatggattcagaaacaaattcggtaatgtttcactttttgttgtagagagcaaataatgcataaaacaatttatgcaatattttattcttatttctaataatgtgcttcataacataataaaacatcaacatcaaattttatacagatctattttaaaataataaatttgttctaatagttcggattgccactttcatccctgatgttgggtgagccgggtccacagagctgaccaattgagtgtaatacaccgtctctgtcggagtgccatgaagacattcttgacgtcgagctgatgcactggccaagcctgtgagagagccggagtcagaacactcttgatggtaccaggcttcaccacggggatgaaggtcttgtcatagtccaccctgggacgttagggtgaagcccacaggacccaacgagccttgtgccgatccaaggagccatccaccttcagcttctgttgaagatccatttcccggtgacccctttggcttgtctgtgaaggatcttgctaccaggatccttcacacgcggtgtgacagctccgagccgctgtacactattcgcctgcttgcctccaattccccgacctccacgctgcatgccttgaccgctgctacctcatctatcacttggcgccaccgccttggccaccccaggcctgatgtgatgtctaagttgtctagcagttctatcatctcatgtagtcggggttcttttgagcatttgtgtcacgcctttcagttaggtcgacatgttaggctcccttttccctcctcttccagagcaacgagcaattttgatctggttcattgtgatgtttggacatcccccgttctcatcatttctggcaataaatattacttgctcattctggatgattactctcatttcttgtggacttttccgttacgcttgaagtctgatatgtttcccacactctctaacttcgcttgggtttccactcagtttggactcaccatccgggctgtccagtgtgacactgggcgagagtttgataactccgcgtcctgtgacttcttcctttcacacgacgttcagtggaggatgttgtgcccctacacttcttctcagaacagcaggattgagcgcatgattcgcaccacaaacaacgtcatgcgctccttgttgttccaggcctcccttcccgctcgctactggactggccactgctacctatctgctcaatcgcctccccaccaaggcggttcatcaccccaccccctactttgctctctttggtacctctccctcctatgatcaccttcgcgtgttcgggtgcgcttgctatcctaatctctatgccactgctctcataagcttgcatctcgctccactcgtagcgtcttccttgggtactctcctgctcataaggggtaccggtgccttgacctctccacctacagagtcctcgtctccgactttcccttctccgtctccccttccgctgcctcctcctttgagtacgacaacctccttgaggcactctgtggttccccctcttgctcccttgcttcccacacccctgtgtgcgatgtgctgtcaaggagtctcccgtgccgccatgtaggagtgggcagaaaacccgatactagaagcccgaacccaaaaccaaacccaaacccaaataacccgaacccgaaaaacttgagaaacattttgggtacgaacttccggtacccaaagtttttagcaaattttgggtcagttgtatcagtacccgaatagacatactacccgaacttccactacacaccaacgcttcacgtcacgttcaccttcagtccttgacgacctcatcctaatgggctagaccacgaccaccacagagtcacgttcacgggccacaacatcaagagtcttgtagccggccaagagtccaagacgaccaagagttttgcaactgtagcagccggctagccgccgttcgtcggccgccggtcgtcggtcgcacaagtaccagccatcaggtcgttggttgtcggccgctccagtaccagccaccaggtcaccagtcgctggccgcccaagcaccaagttgctgtccgccgctagcccgccacacccaacttgctgtccgcctacttgctccacgtggccacacctccagggctctagttcgtctccggctgtcctctagtccgcctctgacttctcgccggtctgcccgtgcgtgcggccggctgaccgacaacccaacatggcaacacgcggcagcacaccgaagaccgaattgccttgccgaagcacgacgcccacgccctggtgcctgacgttgaatcgttgtcgcttgtggtgaagccaacagaagaacaacaccaacatcggaggaatcttgcaatggtcatagtgttcaatgcactgaatccttcatgcgtgagaatgttatggacgagcttaagcagatgcaacctgaggatgaatcaaagaaaaagatgctagatatcctcaagcggctccacttggaagaagagatggcatcagatggtgaagatgagtccatgttatcagaggagcttattcaaaaagttatgtctggggaagagataaagctggaagacctctctgattgtgaaatcaaacgattccgtcaagctctggcctcaggtgagctcagtaagatgattgaaccgtggacaccttggtggaaaaaaccctcagccagatctatttcccttggcctggatggaagtcagcttatcagacaagtaaacgcagaagacactgctgtaccatatccagatccaaatactgaccaagaggctagcatcaacgaaatccctgaagggccagaatctcctctcccgtcattgaaacagttaacaaggacagagccatctcctttgcttgctgtccacttggttgacattctgtacagttactgcttcacacttcggctctacaacggtgattggcactcagatcctttgggtgcttgcactgtcgccctgtcgatgtcgaaagtcatgggccaggatgctaaacctgagactgtacctgaagcactcgcagcctgcatcgaggagacatgctcaccagcttacaggcatactggtggtttcaggtttgctattggactcgtggacgatatcatcgccattctctccttgggacagaacgcacttatttgtgccttatgcgacttccatcgactcattgaagttggtaagagcatgctcaaggtggagaaagtgggcaagacggagagggcacagaactctccgaagcttcgtagtgcagctaggaagctattcttcatgacttgttgggtccatgagcagccagatgaggcgtggccatctttagctcacatcgtccaggtgcagaaagcatctatggaggagttggagaccgggaattggaaggcggatagaaagagcaaaccacaatccgcggttcttatcgaggagctgtaggcatatggatgtaccactggaaactggatcgcgaggctctgtacccttgtgtatcgctcaggatgaatccaacgagagaccttgtccttgtaatgcagttagttgcttttgtgtacacttttttttgaaaaaaattgtatttgtatacgagtttgaaatcctagttgaagcgatcctgctttactttgcttgttaaattgcgggctgatttaatccatgcgttggagcttatgcggttcagatattcttatgattgcaagtttgtg

SEQ ID NO: 9881 - DNA, 4669 bp, Zea Mays
gtcggaagtgccttggaggtaccgcaggatccgcttcatagcagtgagatgtggctcctgcggggcgtgcatatggtggcacacatgttggacgacgtatgcgatgtcgggccggatgaagatgaggtactgcagtgccccaacaagactctggtagctggtgggatcagccaccgggggccgtcgttggaggaggccttgccctgagtgtccaccggagtcgtgcaaggcttacagtcagccatgctagcgcgatcgaggatgtcgacgatgtactggtgctggtggagaaacaagccctgggaccggctctccatggtgatccccaggaagtggtgcaactcactcaggtccttcatcgcgaactcctgctagagggaggagatgatacgccacaggagttcgtgcgaggaggccgtggggacgatgttatcgacatagaggaggctgtacgtcgtgtccaggccacgatagaagacaaatagggaggtgtctgccttggtctcgaagaagcctcgtgagagcaataaggcgacaaagcgactacaccaagctcggggcacctgcttgaggccgtagagggaccagttgagcttgcaaaccatgtcgggtagggatgaaaatggtcggaacgatatttattcagttatcaatttttggtcatttttctttggttgcgaataaataggatatataatctactatacaaatttgtattcttgtttttaacattgagcttttagatattcataaaaggtaaaccacaaattcatcctatattttcttaaatgatagatgtaaaattcggtatggattcagaaacaaattcggtaatgtttcactttttgttgtagagagcaaataatgcataaaacaatttatgcaatattttattcttatttctaataatgtgcttcataacataataaaacatcaacatcaaattttatacagatctattttaaaataataaatttgttctaatagttcggattgccactttcatccctgatgttgggtgagccgggtccacagagctgaccaattgagtgtaatacaccgtctctgtcggagtgccatgaagacattcttgacgtcgagctgatgcactggccaagcctgtgagagagccggagtcagaacactcttgatggtaccaggcttcaccacggggatgaaggtcttgtcatagtccaccctgggacgttagggtgaagcccacaggacccaacgagccttgtgccgatccaaggagccatccaccttcagcttctgttgaagatccatttcccggtgacccctttggcttgtctgtgaaggatcttgctaccaggatccttcacacgcggtgtgacagctccgagccgctgtacactattcgcctgcttgcctccaattccccgacctccacgctgcatgccttgaccgctgctacctcatctatcacttggcgccaccgccttggccaccccaggcctgatgtgatgtctaagttgtctagcagttctatcatctcatgtagtcggggttcttttgagcatttgtgtcacgcctttcagttaggtcgacatgttaggctcccttttccctcctcttccagagcaacgagcaattttgatctggttcattgtgatgtttggacatcccccgttctcatcatttctggcaataaatattacttgctcattctggatgattactctcatttcttgtggacttttccgttacgcttgaagtctgatatgtttcccacactctctaacttcgcttgggtttccactcagtttggactcaccatccgggctgtccagtgtgacactgggcgagagtttgataactccgcgtcctgtgacttcttcctttcacacgacgttcagtggaggatgttgtgcccctacacttcttctcagaacagcaggattgagcgcatgattcgcaccacaaacaacgtcatgcgctccttgttgttccaggcctcccttcccgctcgctactggactggccactgctacctatctgctcaatcgcctccccaccaaggcggttcatcaccccaccccctactttgctctctttggtacctctccctcctatgatcaccttcgcgtgttcgggtgcgcttgctatcctaatctctatgccactgctctcataagcttgcatctcgctccactcgtagcgtcttccttgggtactctcctgctcataaggggtaccggtgccttgacctctccacctacagagtcctcgtctccgactttcccttctccgtctccccttccgctgcctcctcctttgagtacgacaacctccttgaggcactctgtggttccccctcttgctcccttgcttcccacacccctgtgtgcgatgtgctgtcaaggagtctcccgtgccgccatgtaggagtgggcagaaaacccgatactagaagcccgaacccaaaaccaaacccaaacccaaataacccgaacccgaaaaacttgagaaacattttgggtacgaacttccggtacccaaagtttttagcaaattttgggtcagttgtatcagtacccgaatagacatactacccgaacttccactacacaccaacgcttcacgtcacgttcaccttcagtccttgacgacctcatcctaatgggctagaccacgaccaccacagagtcacgttcacgggccacaacatcaagagtcttgtagccggccaagagtccaagacgaccaagagttttgcaactgtagcagccggctagccgccgttcgtcggccgccggtcgtcggtcgcacaagtaccagccatcaggtcgttggttgtcggccgctccagtaccagccaccaggtcaccagtcgctggccgcccaagcaccaagttgctgtccgccgctagcccgccacacccaacttgctgtccgcctacttgctccacgtggccacacctccagggctctagttcgtctccggctgtcctctagtccgcctctgacttctcgccggtctgcccgtgcgtgcggccggctgaccgacaacccaacatggcaacacgcggcagcacaccgaagaccgaattgccttgccgaagcacgacgcccacgccctggtgcctgacgttgaatcgttgtcgcttgtggtgaagccaacagaagaacaacaccaacatcggaggaatcttgcaatgcttgcagcaggtaggatatggtaatgtcgcacgggtgtcaacagtcttccctaacgacatcttggcaccccctggcgctgataccacttgtcaggaaccacgccggagagacaaccttcagcaggttgccggcgaactcctacctcccagggtcatagtgttcaatgcactgaatccttcatgcgtgagaatgttatggacgagcttaagcagatgcaacctgaggatgaatcaaagaaaaagatgctagatatcctcaagcggctccacttggaagaagagatggcatcagatggtgaagatgagtccatgttatcagaggagcttattcaaaaagttatgtctggggaagagataaagctggaagacctctctgattgtgaaatcaaacgattccgtcaagctctggcctcaggtgagctcagtaagatgattgaaccgtggacaccttggtggaaaaaaccctcagccagatctatttcccttggcctggatggaagtcagcttatcagacaagtaaacgcagaagacactgctgtaccatatccagatccaaatactgaccaagaggctagcatcaacgaaatccctgaagggccagaatctcctctcccgtcattgaaacagttaacaaggacagagccatctcctttgcttgctgtccacttggttgacattctgtacagttactgcttcacacttcggctctacaacggtgattggcactcagatcctttgggtgcttgcactgtcgccctgtcgatgtcgaaagtcatgggccaggatgctaaacctgagactgtacctgaagcactcgcagcctgcatcgaggagacatgctcaccagcttacaggcatactggtggtttcaggtttgctattggactcgtggacgatatcatcgccattctctccttgggacagaacgcacttatttgtgccttatgcgacttccatcgactcattgaagttggtaagagcatgctcaaggtggagaaagtgggcaagacggagagggcacagaactctccgaagcttcgtagtgcagctaggaagctattcttcatgacttgttgggtccatgagcagccagatgaggcgtggccatctttagctcacatcgtccaggtgcagaaagcatctatggaggagttggagaccgggaattggaaggcggatagaaagagcaaaccacaatccgcggttcttatcgaggagctgtaggcatatggatgtaccactggaaactggatcgcgaggctctgtacccttgtgtatcgctcaggatgaatccaacgagagaccttgtccttgtaatgcagttagttgcttttgtgtacacttttttttgaaaaaaattgtatttgtatacgagtttgaaatcctagttgaagcgatcctgctttactttgcttgttaaattgcgggctgatttaatccatgcgttggagcttatgcggttcagatattcttatgattgcaagtttgtg

SEQ ID NO: 9882 - DNA, 1782 bp, Zea Mays
cttctcccgttccccgcggcctgcgcgcgcgttctctccctcacctccgcccctttctctctctctctcgctctcgctccgggcgacggctgggcgaccgccgctttatccgtgcggcccttccttttgttctcccgtccccccaaccccccttcgagctctatctgtctcttcctctcgaggcgacgcctgggctaccgcgccgctactgcggcctcccgcgacaggtgcctagtctccatcaggtgccatgtcttcttcgggctcttcaccggcgacgtgcactgccaggcttgcagcaggtaggatatggtaatgtcgcacgggtgtcaacagtcttccctaacgacatcttggcaccccctggcgctgataccacttgtcaggaaccacgccggagagacaaccttcagcaggttgccggcgaactcctacctcccagggtcatagtgttcaatgcactgaatccttcatgcgtgagaatgttatggacgagcttaagcagatgcaacctgaggatgaatcaaagaaaaagatgctagatatcctcaagcggctccacttggaagaagagatggcatcagatggtgaagatgagtccatgttatcagaggagcttattcaaaaagttatgtctggggaagagataaagctggaagacctctctgattgtgaaatcaaacgattccgtcaagctctggcctcaggtgagctcagtaagatgattgaaccgtggacaccttggtggaaaaaaccctcagccagatctatttcccttggcctggatggaagtcagcttatcagacaagtaaacgcagaagacactgctgtaccatatccagatccaaatactgaccaagaggctagcatcaacgaaatccctgaagggccagaatctcctctcccgtcattgaaacagttaacaaggacagagccatctcctttgcttgctgtccacttggttgacattctgtacagttactgcttcacacttcggctctacaacggtgattggcactcagatcctttgggtgcttgcactgtcgccctgtcgatgtcgaaagtcatgggccaggatgctaaacctgagactgtacctgaagcactcgcagcctgcatcgaggagacatgctcaccagcttacaggcatactggtggtttcaggtttgctattggactcgtggacgatatcatcgccattctctccttgggacagaacgcacttatttgtgccttatgcgacttccatcgactcattgaagttggtaagagcatgctcaaggtggagaaagtgggcaagacggagagggcacagaactctccgaagcttcgtagtgcagctaggaagctattcttcatgacttgttgggtccatgagcagccagatgaggcgtggccatctttagctcacatcgtccaggtgcagaaagcatctatggaggagttggagaccgggaattggaaggcggatagaaagagcaaaccacaatccgcggttcttatcgaggagctgtaggcatatggatgtaccactggaaactggatcgcgaggctctgtacccttgtgtatcgctcaggatgaatccaacgagagaccttgtccttgtaatgcagttagttgcttttgtgtacacttttttttgaaaaaaattgtatttgtatacgagtttgaaatcctagttgaagcgatcctgctttactttgcttgttaaattgcgggctgatttaatccatgcgttggagcttatgcggttcagatattcttatgattgcaagtttgtg

SEQ ID NO: 9883 - DNA, 1081 bp, Zea Mays
gtcgattctgctccagttcactaggcctccgagtttccccgggactatgatggtgcgtgcctgcagatgcggctgtcgtacagtcccgcagctcatatattcctcttcctggtgcagtggacggactgcagcctcgcaggggctcttggtctgctgagaatcctcatatacaaggtttatgtggatggcacaacaaccatgtcgactcatgagaggaaatccagcatcaaagaattctatgctgtgatatttccttctttgctgcaactgcaaagggggatcactgatgtcgaggacaagaagcagaaggccgtatgcatggagaagtacagaaagaaagatgaggatggacgggacaccttatctgatattgatgttgagagggaagaggagtgtgggatttgcatggagatgaacagcaaagttgtgttgcccaactgcacccatgctatgtgtatcagatgttaccaggactggagttcaagatcgcagtcctgcccattctgccgtgacaacctgaagaagacctgtcctagtgacctgtggatctatgttgaggaccaagatgtggtcgacatggagacggtgtcgagcgagaacctcagacggctgttcatgtacataagcaagctgcctctgattgtcccagacgtcatcttcagcgtgtatgattcccacatcaaatgacttccgacgcgaccttcccgacgaccttcagccagtgcccagctccagttaatcttatgcccccatgtcctccattttcatgctttgctcaagcttttggaagtgcctgaactgatttggaaccgaaagccttccggtggtgctttagaaacttgtttagtgcctgcatgcatctttaatcatatgcagccactctgtacatatctgacttggctcagttaataggggactgtgcttgccccaaatggaggcagggccgtttgtgtctttctcatgtttccattagcgaagcaacgcaaagttctgggcattggaaggtttctgctgcaatgttagaatgctctctatacttaattagtctggatctactagtaataaggtataaaagtatcag

SEQ ID NO: 9884 - DNA, 1405 bp, Zea Mays
cggccacgctcgccgcgggcacacgcggcgcgctgtgctcacccctgtctgcctgcgcgcccggcacgcccgcgcccactcacgcccggccctgccccgcgccctcatcgtctcctcccggcctcccctcaaagcccaccaccgctgcccccacgccacccaccccaccccacccccgcccctaccgcgcggtgcccgagacccagaggccagaccccggctacctttcttcacctccttcccatcgcaatcgcaagcccccggctccggcgctcggcggtcggccaggttcgggagatcacttcgtcgcggcgaggagggagggggtcgccgttagcgcgcggcacttggatgagaagggcagcggtggaggaggatgcggaaggcgtacagggactccatcaaggtgctcgaagctgacatccagcacgccaacacccttggacggactgcagcctcgcaggggctcttggtctgctgagaatcctcatatacaaggtttatgtggatggcacaacaaccatgtcgactcatgagaggaaatccagcatcaaagaattctatgctgtgatatttccttctttgctgcaactgcaaagggggatcactgatgtcgaggacaagaagcagaaggccgtatgcatggagaagtacagaaagaaagatgaggatggacgggacaccttatctgatattgatgttgagagggaagaggagtgtgggatttgcatggagatgaacagcaaagttgtgttgcccaactgcacccatgctatgtgtatcagatgttaccaggactggagttcaagatcgcagtcctgcccattctgccgtgacaacctgaagaagacctgtcctagtgacctgtggatctatgttgaggaccaagatgtggtcgacatggagacggtgtcgagcgagaacctcagacggctgttcatgtacataagcaagctgcctctgattgtcccagacgtcatcttcagcgtgtatgattcccacatcaaatgacttccgacgcgaccttcccgacgaccttcagccagtgcccagctccagttaatcttatgcccccatgtcctccattttcatgctttgctcaagcttttggaagtgcctgaactgatttggaaccgaaagccttccggtggtgctttagaaacttgtttagtgcctgcatgcatctttaatcatatgcagccactctgtacatatctgacttggctcagttaataggggactgtgcttgccccaaatggaggcagggccgtttgtgtctttctcatgtttccattagcgaagcaacgcaaagttctgggcattggaaggtttctgctgcaatgttagaatgctctctatacttaattagtctggatctactagtaataaggtataaaagtatcag

SEQ ID NO: 9885 - DNA, 637 bp, Zea Mays
gaagcaaaaatcccctctcccccttctcgtcctcctcccgactcccacccaaaaaaaaaaaaaacttcgaaggaggtttcgatcgcgaaaccgcccagggcccgccccgcaagtgcatggcagtgagcttcctggccaatgaggtgtcggacctgtgcatcggcaagccggccgtgaggtcgctcccgctctccgccgccgccggcgaccttgccgccgcgctccggagggtggcccgctctggcgcaccatcctgcgtcgcggtgactggaccagcgcgcgccgtcgtcggccgggtcggcctcgcggacgtgctctgcttcctgtgcaccgaccccgaagcgctcgcgcgccccgccgtcgtgttctccaagccggtctccgcgctcctgccgaaggacggcgctggagaggtccgccgcgtcgatccccgctcgagtactcatgtggcggtgagccggtgaagaaaaaaaccgcgcattcaggtccagctcatccgactcactggagacagtcttcccggagattgtcgcatgcagccatgcactgctgtctccttgcgagatgcttgataggattagctggattagttgctcccacccaactaataaatttgggattttttttttgggggggg

SEQ ID NO: 9886 - DNA, 2976 bp, Zea Mays
cccaccgccccattccatccatgacggtcgcccctaacccacggtgtcgactgctccaccgtaagcgcctgtttcaccgccaccgccgacttcggttggtcctcacccgcgcgtggatggcgcacgcgcctctctcctccaagtgcgccgtcgacaccaagctcccctgcctcaccgcgcgatctccagccccgccgcgctcgcaagtcttgagatcgagcagatccaccatcctgcgccctcgccccatcacgcactcaccttggccccgcatccctgcgccgccataccctcggcctcgccctcgcctcatcctcccctgcccccgcaccgcatccaacgcgtagatccagcgtcgtcgccgcgatacctgcccatgccaccgcgtgcgcaccccccgtgccgtcggcaaaccctagcgtgatccccaccctgcccccgtcctcctcacatcatcggctcccccgtcatccatatcccagtggacatctctggcgacgagaggatgacgtcgtccggggtggtggccgcccggacaacccgttgctcgccaggccgagtctcctgagacccttgagcttgctcagtgacggagggatgcttccatggaaggaattgaaatacagatcaagaaactctaggctctagcactactccagctcttctggcatctgaccggagaatttgttctcggatagcgctagctgagcaaggctggtgaggctggagacgtcaggttggctacagtgtcggggatgaacccactcagcgcgttactactcagatcaagctccactagctgggcgaggtcgccgatggaggatgggattggccccgtcaaccggttcccctgcaacgccaacttcgtgaggttcttcatgttcccaatccctgttgggatggtgccgttgaggaggttggattcgaggcccaacgtcgtgagcccgatgaggtcgtcgctggccggtggaatagacccggagatgctgttttcccctatgttcagtgcttgaatctccctcgggaggcgggcaatggagcctggcaactagccaccgagcttgttgttgtcaagggcgaggacctgcaggctgccgcagttggtaagatggtccaggaactcccagccttactcgtcgctcgccgtcagctggttgcccgacatgtacaacgactgtgggcagagcatgccgatgactcactgctcctttgtatccttatgctattgttttcatccgacaacatcaactgcaataaacataagatggagagatttctgcaccatggcaggtatccacagagtctcgaatctgaaatcgatcgtgttgtatatgttccacgatcccaacgacgtaaaatggttcaagcctattgagcggtggacaaaacatggtcgtcgtggccgcatcatggagaccgttggtactcatggtgccatgaaatgtttattcaacagcagcatgatactgtgtgcatgagcttgtacaaacacgtgtacctaaaatggccttaacaactctaccacgtataaggttgcctgacgtttcgctagatctgtaccagcaggctatccaaacgacgagaatgaaataaccttggagctagcgtggtgtgtagcctatctaaatatttttaggattagaaaattgttttgtattggtccatcttatacttttctttaacattacaccctcattcttcttggtcttagacgactcttttcagtatcaaatccaaattcatgtttaattgcgtgttgagataatgccaacttattccatgttggcatatgtactacccagtacccacaatcatcggagggtcttataagaaacattagggggtaactctacctacatctatcttatacttgaacatcacacccccattctccttggatcaaatttaaaccaacaacaaattcacttgtatgtggaggcatctattttactacttacaggtatgcatcttgactagctcgctgagggggatggcctggtggatctgttgttggtttgcttgtaggtgattagctagattgtgctgttttaagtcccgacaattcagtttctgtacatgctcgacctttgttgaatctacccttacaggtatcctcggcgtctggtggagctgcgccgcctccacgccactgtcaagcgcttcctcggcgtctgcttcggccactagctgccaatcccatacccgtccagatataagcaagctataatgtgcttttgaaatacaagcgaatattgctatagcatgctgcttgagcttagcattcctctttctttcttttgcagcataagaaacactcttacgaagctcttaccaaatctaacggttacaagattcagttcatacttgggttttgctcattgtattgtcttcaagcagggtatgaggaatagtatagatggaacaatttcttctctgttagtggcacattgtcaatggtgtgtctgacaacattctcaaccacatcatcctagagaacaatgagaacaagcctgtcacaaacagtcgtgacactcaggagatatgccttgaacaaggccttcatatcctcaagatattcgaggattatcatgtcagcaaaacatccatcctgaacgaccttgcctcagcaatgggaaacactccaaacccatacgagcaagccatgtccacttgtgtgaatgaccaagcgatgatgctatcgcatatggtgtggcatgagtctacaatttcactgtagttatgaaaactgatcagtcaatgatgatgaatcatacgaaccttttttacttcagcacgttctttaataggggacgaatttgcatgaggtgttatgaactgcaggtggaggtgagcagtgggagcgtttgcgtattaaagtgcattgcactacaatacttgtttgtggatgttgagtgtttactttagcttaatcaatcttatagttttttaattaattaatgttatctttgttgtcca

SEQ ID NO: 9887 - DNA, 2965 bp, Zea Mays
ccccaccgcgccttctcccacaatttacgcctcccccaccgccccattccatccatgacggtcgcccctaacccacggtgtcgactgctccaccgtaagcgcctgtttcaccgccaccgccgacttcggttggtcctcacccgcgcgtggatggcgcacgcgcctctctcctccaagtgcgccgtcgacaccaagctcccctgcctcaccgcgcgatctccagccccgccgcgctcgcaagtcttgagatcgagcagatccaccatcctgcgccctcgccccatcacgcactcaccttggccccgcatccctgcgccgccataccctcggcctcgccctcgcctcatcctcccctgcccccgcaccgcatccaacgcgtagatccagcgtcgtcgccgcgatacctgcccatgccaccgcgtgcgcaccccccgtgccgtcggcaaaccctagcgtgatccccaccctgcccccgtcctcctcacatcatcggctcccccgtcatccatatcccagtggacatctctggcgacgagaggatgacgtcgtccggggtggtggccgcccggacaacccgttgctcgccaggccgagtctcctgagacccttgagcttgctcagtgacggagggatgcttccatggaaggaattgaaatacagatcaagaaactctaggctctagcactactccagctcttctggcatctgaccggagaatttgttctcggatagcgctagctgagcaaggctggtgaggctggagacgtcaggttggctacagtgtcggggatgaacccactcagcgcgttactactcagatcaagctccactagctgggcgaggtcgccgatggaggatgggattggccccgtcaaccggttcccctgcaacgccaacttcgtgaggttcttcatgttcccaatccctgttgggatggtgccgttgaggaggttggattcgaggcccaacgtcgtgagcccgatgaggtcgtcgctggccggtggaatagacccggagatgctgttttcccctatgttcagtgcttgaatctccctcgggaggcgggcaatggagcctggcaactagccaccgagcttgttgttgtcaagggcgaggacctgcaggctgccgcagttggtaagatggtccaggaactcccagccttactcgtcgctcgccgtcagctggttgcccgacatgtacaacgactgtgggcagagcatgccgatgactcactgctcctttgtatccttatgctattgttttcatccgacaacatcaactgcaataaacataagatggagagatttctgcaccatggcaggttttatgttgcctctgtatatgctccaatttccttcccttcacttcctctaatagttttgaagaacagagatggcgagcaatctgccattgcagctgtaggttcgctaaaaagtatggatccaaatcggatcattctgaagaaaattgttctgaccatgtaagcttgggtgcatccatcttcacaaggcaattttacttacttagaatcctgcacccttttatgttccgtcggaggtgtttggttttctatctgtacacaatcactgtaatgttttgtggagttttacaggatatggcgacatgttggttcgcctctaagggctcccgtttagacctcagctaacatagtggctcatcgttcatgctatattatgtgcaggtatccacagagtctcgaatctgaaatcgatcgtgttgtatatgttccacgatcccaacgacgtaaaatggttcaaggcaagtatttatgcgtgccattgacatatccaatttatccattttcgacgcaacgacaatgttatttttgcagcctattgagcggtggacaaaacatggtcgtcgtggccgcatcatggagaccgttggtactcatggtgccatgaaatgtttattcaacagcagcatgatactgtgtgcatgagcttgtacaaacacgtgtacctaaaatggccttaacaactctaccacgtataaggttgcctgacgtttcgctagatctgtaccagcaggctatccaaacgacgagaatgaaataaccttggagctagcgtggtatcctcggcgtctggtggagctgcgccgcctccacgccactgtcaagcgcttcctcggcgtctgcttcggccactagctgccaatcccatacccgtccagatataagcaagctataatgtgcttttgaaatacaagcgaatattgctatagcatgctgcttgagcttagcattcctctttctttcttttgcagcataagaaacactcttacgaagctcttaccaaatctaacggttacaagattcagttcatacttgggttttgctcattgtattgtcttcaagcagggtatgaggaatagtatagatggaacaatttcttctctgttagtggcacattgtcaatggtgtgtctgacaacattctcaaccacatcatcctagagaacaatgagaacaagcctgtcacaaacagtcgtgacactcaggagatatgccttgaacaaggccttcatatcctcaagatattcgaggattatcatgtcagcaaaacatccatcctgaacgaccttgcctcagcaatgggaaacactccaaacccatacgagcaagccatgtccacttgtgtgaatgaccaagcgatgatgctatcgcatatggtgtggcatgagtctacaatttcactgtagttatgaaaactgatcagtcaatgatgatgaatcatacgaaccttttttacttcagcacgttctttaataggggacgaatttgcatgaggtgttatgaactgcaggtggaggtgagcagtgggagcgtttgcgtattaaagtgcattgcactacaatacttgtttgtggatgttgagtgtttactttagcttaatcaatcttatagttttttaattaattaatgttatctttgttgtcca

SEQ ID NO: 9888 - DNA, 2929 bp, Zea Mays
gcctcccccaccgcgccttctcccacaatttacgcctcccccaccgccccattccatccatgacggtcgcccctaacccacggtgtcgactgctccaccgtaagcgcctgtttcaccgccaccgccgacttcggttggtcctcacccgcgcgtggatggcgcacgcgcctctctcctccaagtgcgccgtcgacaccaagctcccctgcctcaccgcgcgatctccagccccgccgcgctcgcaagtcttgagatcgagcagatccaccatcctgcgccctcgccccatcacgcactcatcctcccctgcccccgcaccgcatccaacgcgtagatccagcgtcgtcgccgcgatacctgcccatgccaccgcgtgcgcaccccccgtgccgtcggcaaaccctagcgtgatccccaccctgcccccgtcctcctcacatcatcggctcccccgtcatccatatcccagtggacatctctggcgacgagaggatgacgtcgtccggggtggtggccgcccggacaacccgttgctcgccaggccgagtctcctgagacccttgagcttgctcagtgacggagggatgcttccatggaaggaattgaaatacagatcaagaaactctaggctctagcactactccagctcttctggcatctgaccggagaatttgttctcggatagcgctagctgagcaaggctggtgaggctggagacgtcaggttggctacagtgtcggggatgaacccactcagcgcgttactactcagatcaagctccactagctgggcgaggtcgccgatggaggatgggattggccccgtcaaccggttcccctgcaacgccaacttcgtgaggttcttcatgttcccaatccctgttgggatggtgccgttgaggaggttggattcgaggcccaacgtcgtgagcccgatgaggtcgtcgctggccggtggaatagacccggagatgctgttttcccctatgttcagtgcttgaatctccctcgggaggcgggcaatggagcctggcaactagccaccgagcttgttgttgtcaagggcgaggacctgcaggctgccgcagttggtaagatggtccaggaactcccagccttactcgtcgctcgccgtcagctggttgcccgacatgtacaacgactgtgggcagagcatgccgatgactcactgctcctttttttgaagaacagagatggcgagcaatctgccattgcagctgtaggttcgctaaaaagtatggatccaaatcggatcattctgaagaaaattgttctgaccatgtaagcttgggtgcatccatcttcacaaggtatccacagagtctcgaatctgaaatcgatcgtgttgtatatgttccacgatcccaacgacgtaaaatggttcaagcctattgagcggtggacaaaacatggtcgtcgtggccgcatcatggagaccgttggtactcatggtgccatgaaatgtttattcaacagcagcatgatactgtgtgcatgagcttgtacaaacacgtgtacctaaaatggccttaacaactctaccacgtataaggttgcctgacgtttcgctagatctgtaccagcaggctatccaaacgacgagaatgaaataaccttggagctagcgtggtgtgtagcctatctaaatatttttaggattagaaaattgttttgtattggtccatcttatacttttctttaacattacaccctcattcttcttggtcttagacgactcttttcagtatcaaatccaaattcatgtttaattgcgtgttgagataatgccaacttattccatgttggcatatgtactacccagtacccacaatcatcggagggtcttataagaaacattagggggtaactctacctacatctatcttatacttgaacatcacacccccattctccttggatcaaatttaaaccaacaacaaattcacttgtatgtggaggcatctattttactacttacaggtatgcatcttgactagctcgctgagggggatggcctggtggatctgttgttggtttgcttgtatcctcggcgtctggtggagctgcgccgcctccacgccactgtcaagcgcttcctcggcgtctgcttcggccactagctgccaatcccatacccgtccagatataagcaagctataatgtgcttttgaaatacaagcgaatattgctatagcatgctgcttgagcttagcattcctctttctttcttttgcagcataagaaacactcttacgaagctcttaccaaatctaacggttacaagattcagttcatacttgggttttgctcattgtattgtcttcaagcagggtatgaggaatagtatagatggaacaatttcttctctgttagtggcacattgtcaatggtgtgtctgacaacattctcaaccacatcatcctagagaacaatgagaacaagcctgtcacaaacagtcgtgacactcaggagatatgccttgaacaaggccttcatatcctcaagatattcgaggattatcatgtcagcaaaacatccatcctgaacgaccttgcctcagcaatgggaaacactccaaacccatacgagcaagccatgtccacttgtgtgaatgaccaagcgatgatgctatcgcatatggtgtggcatgagtctacaatttcactgtagttatgaaaactgatcagtcaatgatgatgaatcatacgaaccttttttacttcagcacgttctttaataggggacgaatttgcatgaggtgttatgaactgcaggtggaggtgagcagtgggagcgtttgcgtattaaagtgcattgcactacaatacttgtttgtggatgttgagtgtttactttagcttaatcaatcttatagttttttaattaattaatgttatctttgttgtcca

SEQ ID NO: 9889 - DNA, 2985 bp, Zea Mays
gcctcccccaccgcgccttctcccacaatttacgcctcccccaccgccccattccatccatgacggtcgcccctaacccacggtgtcgactgctccaccgtaagcgcctgtttcaccgccaccgccgacttcggttggtcctcacccgcgcgtggatggcgcacgcgcctctctcctccaagtgcgccgtcgacaccaagctcccctgcctcaccgcgcgatctccagccccgccgcgctcgcaagtcttgagatcgagcagatccaccatcctgcgccctcgccccatcacgcactcaccttggccccgcatccctgcgccgccataccctcggcctcgccctcgcctcatcctcccctgcccccgcaccgcatccaacgcgtagatccagcgtcgtcgccgcgatacctgcccatgccaccgcgtgcgcaccccccgtgccgtcggcaaaccctagcgtgatccccaccctgcccccgtcctcctcacatcatcggctcccccgtcatccatatcccagtggacatctctggcgacgagaggatgacgtcgtccggggtggtggccgcccggacaacccgttgctcgccaggccgagtctcctgagacccttgagcttgctcagtgacggagggatgcttccatggaaggaattgaaatacagatcaagaaactctaggctctagcactactccagctcttctggcatctgaccggagaatttgttctcggatagcgctagctgagcaaggctggtgaggctggagacgtcaggttggctacagtgtcggggatgaacccactcagcgcgttactactcagatcaagctccactagctgggcgaggtcgccgatggaggatgggattggccccgtcaaccggttcccctgcaacgccaacttcgtgaggttcttcatgttcccaatccctgttgggatggtgccgttgaggaggttggattcgaggcccaacgtcgtgagcccgatgaggtcgtcgctggccggtggaatagacccggagatgctgttttcccctatgttcagtgcttgaatctccctcgggaggcgggcaatggagcctggcaactagccaccgagcttgttgttgtcaagggcgaggacctgcaggctgccgcagttggtaagatggtccaggaactcccagccttactcgtcgctcgccgtcagctggttgcccgacatgtacaacgactgtgggcagagcatgccgatgactcactgctcctttttttgaagaacagagatggcgagcaatctgccattgcagctgtaggttcgctaaaaagtatggatccaaatcggatcattctgaagaaaattgttctgaccatgtaagcttgggtgcatccatcttcacaaggtatccacagagtctcgaatctgaaatcgatcgtgttgtatatgttccacgatcccaacgacgtaaaatggttcaagcctattgagcggtggacaaaacatggtcgtcgtggccgcatcatggagaccgttggtactcatggtgccatgaaatgtttattcaacagcagcatgatactgtgtgcatgagcttgtacaaacacgtgtacctaaaatggccttaacaactctaccacgtataaggttgcctgacgtttcgctagatctgtaccagcaggctatccaaacgacgagaatgaaataaccttggagctagcgtggtgtgtagcctatctaaatatttttaggattagaaaattgttttgtattggtccatcttatacttttctttaacattacaccctcattcttcttggtcttagacgactcttttcagtatcaaatccaaattcatgtttaattgcgtgttgagataatgccaacttattccatgttggcatatgtactacccagtacccacaatcatcggagggtcttataagaaacattagggggtaactctacctacatctatcttatacttgaacatcacacccccattctccttggatcaaatttaaaccaacaacaaattcacttgtatgtggaggcatctattttactacttacaggtatgcatcttgactagctcgctgagggggatggcctggtggatctgttgttggtttgcttgtaggtatcctcggcgtctggtggagctgcgccgcctccacgccactgtcaagcgcttcctcggcgtctgcttcggccactagctgccaatcccatacccgtccagatataagcaagctataatgtgcttttgaaatacaagcgaatattgctatagcatgctgcttgagcttagcattcctctttctttcttttgcagcataagaaacactcttacgaagctcttaccaaatctaacggttacaagattcagttcatacttgggttttgctcattgtattgtcttcaagcagggtatgaggaatagtatagatggaacaatttcttctctgttagtggcacattgtcaatggtgtgtctgacaacattctcaaccacatcatcctagagaacaatgagaacaagcctgtcacaaacagtcgtgacactcaggagatatgccttgaacaaggccttcatatcctcaagatattcgaggattatcatgtcagcaaaacatccatcctgaacgaccttgcctcagcaatgggaaacactccaaacccatacgagcaagccatgtccacttgtgtgaatgaccaagcgatgatgctatcgcatatggtgtggcatgagtctacaatttcactgtagttatgaaaactgatcagtcaatgatgatgaatcatacgaaccttttttacttcagcacgttctttaataggggacgaatttgcatgaggtgttatgaactgcaggtggaggtgagcagtgggagcgtttgcgtattaaagtgcattgcactacaatacttgtttgtggatgttgagtgtttactttagcttaatcaatcttatagttttttaattaattaatgttatctttgttgtcca

SEQ ID NO: 9890 - DNA, 2957 bp, Zea Mays
caattgcctcccccaccgcgccttctcccacaatttacgcctcccccaccgccccattccatccatgacggtcgcccctaacccacggtgtcgactgctccaccgtaagcgcctgtttcaccgccaccgccgacttcggttggtcctcacccgcgcgtggatggcgcacgcgcctctctcctccaagtgcgccgtcgacaccaagctcccctgcctcaccgcgcgatctccagccccgccgcgctcgcaagtcttgagatcgagcagatccaccatcctgcgccctcgccccatcacgcactcaccttggccccgcatccctgcgccgccataccctcggcctcgccctcgcctcatcctcccctgcccccgcaccgcatccaacgcgtagatccagcgtcgtcgccgcgatacctgcccatgccaccgcgtgcgcaccccccgtgccgtcggcaaaccctagcgtgatccccaccctgcccccgtcctcctcacatcatcggctcccccgtcatccatatcccagtggacatctctggcgacgagaggatgacgtcgtccggggtggtggccgcccggacaacccgttgctcgccaggccgagtctcctgagacccttgagcttgctcagtgacggagggatgcttccatggaaggaattgaaatacagatcaagaaactctaggctctagcactactccagctcttctggcatctgaccggagaatttgttctcggatagcgctagctgagcaaggctggtgaggctggagacgtcaggttggctacagtgtcggggatgaacccactcagcgcgttactactcagatcaagctccactagctgggcgaggtcgccgatggaggatgggattggccccgtcaaccggttcccctgcaacgccaacttcgtgaggttcttcatgttcccaatccctgttgggatggtgccgttgaggaggttggattcgaggcccaacgtcgtgagcccgatgaggtcgtcgctggccggtggaatagacccggagatgctgttttcccctatgttcagtgcttgaatctccctcgggaggcgggcaatggagcctggcaactagccaccgagcttgttgttgtcaagggcgaggacctgcaggctgccgcagttggtaagatggtccaggaactcccagccttactcgtcgctcgccgtcagctggttgcccgacatgtacaacgactgtgggcagagcatgccgatgactcactgctcctttttttgaagaacagagatggcgagcaatctgccattgcagctgtaggttcgctaaaaagtatggatccaaatcggatcattctgaagaaaattgttctgaccatgtatccacagagtctcgaatctgaaatcgatcgtgttgtatatgttccacgatcccaacgacgtaaaatggttcaagcctattgagcggtggacaaaacatggtcgtcgtggccgcatcatggagaccgttggtactcatggtgccatgaaatgtttattcaacagcagcatgatactgtgtgcatgagcttgtacaaacacgtgtacctaaaatggccttaacaactctaccacgtataaggttgcctgacgtttcgctagatctgtaccagcaggctatccaaacgacgagaatgaaataaccttggagctagcgtggtgtgtagcctatctaaatatttttaggattagaaaattgttttgtattggtccatcttatacttttctttaacattacaccctcattcttcttggtcttagacgactcttttcagtatcaaatccaaattcatgtttaattgcgtgttgagataatgccaacttattccatgttggcatatgtactacccagtacccacaatcatcggagggtcttataagaaacattagggggtaactctacctacatctatcttatacttgaacatcacacccccattctccttggatcaaatttaaaccaacaacaaattcacttgtatgtggaggcatctattttactacttacaggtatgcatcttgactagctcgctgagggggatggcctggtggatctgttgttggtttgcttgtatcctcggcgtctggtggagctgcgccgcctccacgccactgtcaagcgcttcctcggcgtctgcttcggccactagctgccaatcccatacccgtccagatataagcaagctataatgtgcttttgaaatacaagcgaatattgctatagcatgctgcttgagcttagcattcctctttctttcttttgcagcataagaaacactcttacgaagctcttaccaaatctaacggttacaagattcagttcatacttgggttttgctcattgtattgtcttcaagcagggtatgaggaatagtatagatggaacaatttcttctctgttagtggcacattgtcaatggtgtgtctgacaacattctcaaccacatcatcctagagaacaatgagaacaagcctgtcacaaacagtcgtgacactcaggagatatgccttgaacaaggccttcatatcctcaagatattcgaggattatcatgtcagcaaaacatccatcctgaacgaccttgcctcagcaatgggaaacactccaaacccatacgagcaagccatgtccacttgtgtgaatgaccaagcgatgatgctatcgcatatggtgtggcatgagtctacaatttcactgtagttatgaaaactgatcagtcaatgatgatgaatcatacgaaccttttttacttcagcacgttctttaataggggacgaatttgcatgaggtgttatgaactgcaggtggaggtgagcagtgggagcgtttgcgtattaaagtgcattgcactacaatacttgtttgtggatgttgagtgtttactttagcttaatcaatcttatagttttttaattaattaatgttatctttgttgtcca

SEQ ID NO: 9891 - DNA, 571 bp, Zea Mays
agtgtcttcaggtcaatctgtgccttacaaatcaaacggacaaaactgtgggcccttttgaagtatttctggctccaagcatgtcgggtgaagacagagctgttctagtcaatgggccacagaagttgagcatggtgaccacccagctaggagtgcaaaagatttccggaattacaatgtacgccgtgcaggaaaagaagtactatgaacctttgcccgacatagagatttttgttgatgcagaatagcaacaccaaattgggacccatttgacgagctgaagatgcatttgtacttttcattaccatgggaggtctacatagtttacataaagcactggctgatgtatattgatacatgcgattgtcatattgatatcaaattgacttctgtcggatgtcactcaaccttggattaccacattctcactcaaccttgagctgcacattgatcatgctctgctaaagactgcacggattacaattcttcaagctgggaaagttttggcccaaaattactgctgaatgtggccggttgctcttgctggttatctcgtgattttctgtcaagt

SEQ ID NO: 9892 - DNA, 1164 bp, Zea Mays
ctctgctgcctcgaagcagggtccagatctctctcccccggctccggcgatggcttcgccttacgccggcggcgtgcagcctccctctcccgctggggcggtgcagcagcagcagcagaaccactctctggcgttccgcgtgatgcggctgtctcgcccctcactccagccagacctggccgctctgctccgcttcgacccacgcgacgtcttcctccctgaggacgcgctcaccggctccgacccgtccgctgccgccaaattcctccacggcctcctccaccctgcggactccgccactgccgtccctggagacttcaccttccgcgaccgcttcctcctccgcgacccagccgacgcgctcgctctgccgggcctcctcgtcctcccccagtcgttcggtgcgatctatctgggcgagaccttctgcagttacatcagcatcaacaatagctccagctttgaggccagggacgtcgtcatcaagaaatacaaacagagagacagagaatacttcttctggatacatcaaaatcccctgttgagtcaattagatctgggggtagatatgatttcattgtggaacatgatgtcaaagaactaggagcacatacgcttgtatgtactgctttatataatgatggtgatggagagcgtaaatatcttccccagttctttaagttctctgtttcaaacccattatctgttaggacaaaggttcgcaccatcaaggtaggtcacctcttgttgtgcaagggtaaataacaactgtaggttctttggttagttgtagatgccatctttagaagtcttaacaggtgtatattttgtatatagatcattacagcttgacaaatataacttagaaaatgatttgcgattaagtgagtagtttttgtgtttaatatagatgtttatgttttgttgtatgaactaatagctctcccattttttattaataatatttaccaagatttttcttttgtatttcttgccatcccatggaagctgagctaactcaatcggctaagggtgtggatgtacactcagatcacccaggttcaagtccttgtcgaggcgactttgggtgcctgttttcttcttaataaagccacctagctcctccttggctgatctagttttttcttgccatcccatttgttg

SEQ ID NO: 9893 - DNA, 1176 bp, Zea Mays
ctttcggggttcagctctgctgcctcgaagcagggtccagatctctctcccccggctccggcgatggcttcgccttacgccggcggcgtgcagcctccctctcccgctggggcggtgcagcagcagcagcagaaccactctctggcgttccgcgtgatgcggctgtctcgcccctcactccagccagacctggccgctctgctccgcttcgacccacgcgacgtcttcctccctgaggacgcgctcaccggctccgacccgtccgctgccgccaaattcctccacggcctcctccaccctgcggactccgccactgccgtccctggagacttcaccttccgcgaccgcttcctcctccgcgacccagccgacgcgctcgctctgccgggcctcctcgtcctcccccagtctgcgatctatctgggcgagaccttctgcagttacatcagcatcaacaatagctccagctttgaggccagggacgtcgtcatcaaggcagaaatacaaacagagagacagagaatacttcttctggatacatcaaaatcccctgttgagtcaattagatctgggggtagatatgatttcattgtggaacatgatgtcaaagaactaggagcacatacgcttgtatgtactgctttatataatgatggtgatggagagcgtaaatatcttccccagttctttaagttctctgtttcaaacccattatctgttaggacaaaggttcgcaccatcaaggtaggtcacctcttgttgtgcaagggtaaataacaactgtaggttctttggttagttgtagatgccatctttagaagtcttaacaggtgtatattttgtatatagatcattacagcttgacaaatataacttagaaaatgatttgcgattaagtgagtagtttttgtgtttaatatagatgtttatgttttgttgtatgaactaatagctctcccattttttattaataatatttaccaagatttttcttttgtatttcttgccatcccatggaagctgagctaactcaatcggctaagggtgtggatgtacactcagatcacccaggttcaagtccttgtcgaggcgactttgggtgcctgttttcttcttaataaagccacctagctcctccttggctgatctagttttttcttgccatcccatttgttg

SEQ ID NO: 9894 - DNA, 3128 bp, Zea Mays
cgcggtctcgcctgcgcgtcccctccctttccctttccacggccgcatccaccacctccgtttccaccccacttgatagcgacgccgccgcacaggaactcaggaacccctctcgcatctcccctcgcttccccgcgacagcgacggccggtcgcttcaagtgacccaagcacctgcgcccctcctttctccttttctcccctcggcccccgtccctctcagcccctatgacctcttccgcttccccgaaccctagccccgtcccagtccccactccgatcaccaccgcgaacgggaccacctcatcaccgaaggatcagccgccgcctccgcctccgctgccgcagcagcagcagcagcaggggggcggccaggaggaggcagaggcggcggatgggggaggcgccgaggctgcggaggcgggagtattagctggtgttgcggccgaggctatggaagtggatgggggctctggcgcgggggatgcggaggcgggcggctcggtggggggaggagtaggcgctggggcgggtggaggagcgcagcaggcctcgccggcgaccgtgttccggattcggctcaagcagtcgcctgcgagcctccgtcacaagatgcgcgtgcccgagctgtgcagaaacttcagtgcagttgcttggtgtggaaaactgaatgcaattgcttgcgcttcagagacttgtgcacgtattccaagctcaaattcaagccctccattttggattcctatacatatcctgaatccagagagaccaacagaatgctctgtattcaatgtgaaagcagattctccacgtgactttgttcagttcattgaatggtctcctcggtcctgccctcgtgcattgctagtggcaaattttcatgggcggatcactatatggacacaaccaacaaagggtcctgtaaatcttgtacgtgatgcaagcttgtggcagtgtgaacatgaatggcgtcaagatctttctgtggtgaccaagtggttgtctggaatttctccgtatagatggcttcctacaaactccactagttcaaacctgaagaccttcgaggaaaaattcctcacccaacagcctcagagtgcagtgggatggccaagtattctatgcgtctgttcagttttttcatcaggttctgttcaacttcattggtcacaatggccttctcaaaactcagcacattctagatggttttctactagcaaagggcttctaggagcaggacccagtggcataatggctgctgatgctattgtaacagaatctggagctttacatgttgctggggtaccccttgttaatccatccactgtagttgtttgggaagtgatgccaggtcttggaaatggtattcaggcaactgcaaagataaatgcagcaagttctgttcctccatctctgaatcccccttcatggccgggttttgctccactagcagcctacctattttctttgcaagattatcttgtttctgagggtgcacagacaaaaaagctgacagacaataatgagactactgaggctgcatcaattcattgttgtccagtttctaatttttcagcttatgtcagtccagaagcagctgcacagtcagctactactaccacctgggggtctggggtcacctcagttgcttttgatccgactcgtggaggatcggtcattacagttgtaatagttgaagggcagtacatgtctccttatgaccctgatgaaggaccttctatcaccggatggagggtgcaatgctgggaatcttcgtgccaacctgttgttcttcatccaatatttggaagccctactagcttaggtgggcagcctcccatgcaaactgtttggtccactagagttaataaaagcattccaccaacggaggatcttaaaaatcctcaaacatatgttccgatgccaacgacatcagatgaacggagctcctctgagtgcagtgttgacagggcgaacagactcagctttgacccttacgatcttccaaatgatgttcgacaactagctcaaatagtttattctgctcatggtggtgaagttgctgttgctttcctccgtggaggagtgcacattttctcaggtccaaattttgatcaggttgacagctaccatgtcaatgttggctctgctattgctccaccagccttttcatcaagcagttgctgcttagcatcagtttggcatgacacgctcaaagatcgaaccatattgaagataatacgtgtgcttcctcctgcaattcttagcacacaaacaaagatcagctcagcagcatgggaacgtgcaatagcagatagattttggtggagtttattggctagagttgattggtgggatgctgttggttgtacacagagtgctgccgaagatggtatagtttcacttaacagtgtgatagcttttctggatgcggacttccattctcttccgactatgcaacagaggcagcagcactgtcctaaccttgataggattaagtgtaggttgttggaaggaacaaatgcccaagatgtacgggcacttgtgttggacatgcaagcaagattacttctggatatgctaggcaaaggaatcgagtctgcccttacaaatccatcaactctgctacctgagccctggcaagcttccagtgatatgttatccagcatcgatgctgacaaaatgactgttgagccagctctgcttccaaacatccaggtcaagctgtctcctttatgcaagttgtttctatttcatagccatggaacttaaattcagctatctaacattctttctttctttttactgactttattcttttaagacttgctactgagccgttttttttcattttataaagtagtgagcagtatattggtatgctagatcacttccatgtaaacggtactttagttatgttggtgaactcatgtgcaatgtctgttatcctttgccaaaactggtgtattacagccttttaatgttgagtattgtataaatttcagcacaggttatctgcatagggattctttatgttactaggaaatagcttattttatttgcattcaaatgcagggttacgttgatgctgttcttgatttagcatcacatttcataactcgcttgcgg

SEQ ID NO: 9895 - DNA, 165 bp, Zea Mays
ggatgctgttggttgtacacagagtgctgccgaagatggtatagtttcacttaacagtgtgatagcttttctggatgcggacttccattctcttccgactatgcaacagaggcagcagcactgtcctcgtgcgccttgcgctggcctgcaccttgtgctggctgc

SEQ ID NO: 9896 - DNA, 173 bp, Zea Mays
gggatgctgttggttgtacacagagtgctgccgaagatggtatagtttcacttaacagtgtgatagcttttctggatgcggacttccattctcttccgactatgcaacagaggcagcagcactgtcctgcagtggtggatccaggaatggatcaaaggaggggctgctaaaag

SEQ ID NO: 9897 - DNA, 1726 bp, Zea Mays
gtttctacaacttcatttatctgtgcagttgcttggtgtggaaaactgaatgcaattgcttgcgcttcagagacttgtgcacgtattccaagctcaaattcaagccctccattttggattcctatacatatcctgaatccagagagaccaacagaatgctctgtattcaatgtgaaagcagattctccacgtgactttgttcagttcattgaatggtctcctcggtcctgccctcgtgcattgctagtggcaaattttcatgggcggatcactatatggacacaaccaacaaagggtcctgtaaatcttgtacgtgatgcaagcttgtggcagtgtgaacatgaatggcgtcaagatctttctgtggtgaccaagtggttgtctggaatttctccgatggcttcctacaaactccactagttcaaacctgaagaccttcgaggaaaaattcctcacccaacagcctcagagtgcagtgggatggccaagtattctatgcgtctgttcagttttttcatcaggttctgttcaacttcattggtcacaatggccttctcaaaactcagcacattctagatggttttctactagcaaagggcttctaggagcaggacccagtggcataatggctgctgatgctattgtaacagaatctggagctttacatgttgctggggtaccccttgttaatccatccactgtagttgtttgggaagtgatgccaggtcttggaaatggtattcaggcaactgcaaagataaatgcagcaagttctgttcctccatctctgaatcccccttcatggccgggttttgctccactagcagcctacctattttctttgcaagattatcttgtttctgagggtgcacagacaaaaaagctgacagacaataatgagactactgaggctgcatcaattcattgttgtccagtttctaatttttcagcttatgtcagtccagaagcagctgcacagtcagctactactaccacctgggggtctggggtcacctcagttgcttttgatccgactcgtggaggatcggtcattacagttgtaatagttgaagggcagtacatgtctccttatgaccctgatgaaggaccttctatcaccggatggagggtgcaatgctgggaatcttcgtgccaacctgttgttcttcatccaatatttggaagccctactagcttaggtgggcagcctcccatgcaaactgtttggtccactagagttaataaaagcattccaccaacggaggatcttaaaaatcctcaaacatatgttccgatgccaacgacatcagatgaacggagctcctctgagtgcagtgttgacagggcgaacagactcagctttgacccttacgatcttccaaatgatgttcgacaactagctcaaatagtttattctgctcatggtggtgaagttgctgttgctttcctccgtggaggagtgcacattttctcaggtccaaattttgatcaggttgacagctaccatgtcaatgttggctctgctattgctccaccagccttttcatcaagcagttgctgcttagcatcagtttggcatgacacgctcaaagatcgaaccatattgaagataatacgtgtgcttcctcctgcaattcttagcacacaaacaaagatcagctcagcagcatgggaacgtgcaatagcagataggtatgttaccaaatttatagacgctgattcctaa

SEQ ID NO: 9898 - DNA, 1733 bp, Zea Mays
gacttctgagccattatgaagaggttgcagttgcttggtgtggaaaactgaatgcaattgcttgcgcttcagagacttgtgcacgtattccaagctcaaattcaagccctccattttggattcctatacatatcctgaatccagagagaccaacagaatgctctgtattcaatgtgaaagcagattctccacgtgactttgttcagttcattgaatggtctcctcggtcctgccctcgtgcattgctagtggcaaattttcatgggcggatcactatatggacacaaccaacaaagggtcctgtaaatcttgtacgtgatgcaagcttgtggcagtgtgaacatgaatggcgtcaagatctttctgtggtgaccaagtggttgtctggaatttctccgtatagatggcttcctacaaactccactagttcaaacctgaagaccttcgaggaaaaattcctcacccaacagcctcagagtgcagtgggatggccaagtattctatgcgtctgttcagttttttcatcaggttctgttcaacttcattggtcacaatggccttctcaaaactcagcacattctagatggttttctactagcaaagggcttctaggagcaggacccagtggcataatggctgctgatgctattgtaacagaatctggagctttacatgttgctggggtaccccttgttaatccatccactgtagttgtttgggaagtgatgccaggtcttggaaatggtattcaggcaactgcaaagataaatgcagcaagttctgttcctccatctctgaatcccccttcatggccgggttttgctccactagcagcctacctattttctttgcaagattatcttgtttctgagggtgcacagacaaaaaagctgacagacaataatgagactactgaggctgcatcaattcattgttgtccagtttctaatttttcagcttatgtcagtccagaagcagctgcacagtcagctactactaccacctgggggtctggggtcacctcagttgcttttgatccgactcgtggaggatcggtcattacagttgtaatagttgaagggcagtacatgtctccttatgaccctgatgaaggaccttctatcaccggatggagggtgcaatgctgggaatcttcgtgccaacctgttgttcttcatccaatatttggaagccctactagcttaggtgggcagcctcccatgcaaactgtttggtccactagagttaataaaagcattccaccaacggaggatcttaaaaatcctcaaacatatgttccgatgccaacgacatcagatgaacggagctcctctgagtgcagtgttgacagggcgaacagactcagctttgacccttacgatcttccaaatgatgttcgacaactagctcaaatagtttattctgctcatggtggtgaagttgctgttgctttcctccgtggaggagtgcacattttctcaggtccaaattttgatcaggttgacagctaccatgtcaatgttggctctgctattgctccaccagccttttcatcaagcagttgctgcttagcatcagtttggcatgacacgctcaaagatcgaaccatattgaagataatacgtgtgcttcctcctgcaattcttagcacacaaacaaagatcagctcagcagcatgggaacgtgcaatagcagataggtatgttaccaaatttatagacgctgattcctaa

SEQ ID NO: 9899 - DNA, 1770 bp, Zea Mays
ttgggggtgcggcggcccgcgggcgcagagtaggaaggcaccttttcgtcactcgaacctgttgcttgacctgcaagtgtcgggcggtgcacctgtgcccttgttgccgcgatgcagattatgtgggttttgagttggacagctgatggagtgcaaatctctggcctgccaggtagctgctaatggagattgacagcctcagagaaggatttgatcgagttgctgagaaacgttcattatcttctgctaaagctctggaagttgttgatcaaatagtgaatgaaattgagcaggctattgtgaagctgcagatgatgaatacagattctactggaaatgttgaccacccatccatccttgcagaactgaaagctaagctcaatgaaatggcaccactaaaccagcttgaaggcagccaaaaggagctcaatgttgctctgagcaaatatctcaaactccttgagaagtctttcaatccagatatatctaaggcatacagaaatgtggattttgaggtccatacagtaaacaatatcatagcgaatcatttctaccgccaaggcctctttgatcttggtgacatgtttgtccatgagtgtggggaactaggcggagcttccttgaagctaccgtttcaggagatgtatgctatccttgaagccatgaaagcgagaaacctcgagcctgctctcagttgggctgccaaaaaccatgatcagctgttgcagaatgggtctatgctggagttcaagctttatcagcttcagtttgttgaaatattgtccaaaggcagtaggggtgaggccaaagatgaggctcttttatatgctaggactcacttggtcccctttgcagccgtgcacaaggaagaattccagaagctaatggcttgccttctatgggttggccggctcgatcaatccccatattctgagttaatgtcatccgcgcattgggagaagctagctgaggagctcacccatcaattctgtagccttctgggccagtcgagggagagcccgctgagtgttgcagtgtcagctggttttcaaggactaccaactctgctgaagctgacgcaagtcatggctgcgaagaagcaggagtggcaagttatgaagcagcttcctgtccccatagacatcgggccagaattccagtatcattctgtctttgtgtgcccggtgctcagggagcagtccagtgacgagaatcccccaatgcggatgccttgtggacatgttgtctccaagcagtccatcatgaagctgtcgaaaagcagctcgagggccttcaagtgcccctactgcccctcggaggctatggcgtcgcattgcaagcagctgcatttctagatgtgttaatcttttctggctgcgcaaaactgcaaacctgttgtgtgttgcttaagtctcttctggagattaaaggaattcgaaagtgttggtggacaagtggacgtggactgtttgggagtatttctgctagactatagagaccttgctagtaaacactagccattagatgcgtgagaacatagaggttatacctttggtttggtgttggtgagggatgtcattaaggtggggagagtcggtgagggtgtgtttgtttgaggaataagtaggccatcatcttctcattctttactttctttttatttgtggaatataatgagttgattcagcactatttcattctttataagctaatactaccttcgttctcgaatatttgttgtcctctagttcatttttaaactaaatggtg

SEQ ID NO: 9900 - DNA, 1789 bp, Zea Mays
gtcactaggcactagccacccgacctgcctgtaggctgtagctgtctcctatatgctgcgaccctagcctgccttgtcttcttcatcaatcatcaccgcaagcgtgcgcgcaacccagctcccaccgacgactgcaccggccgtcgctgccgcgctacttcggccccttttccggcgacgagcaccaccaggtagctgctaatggagattgacagcctcagagaaggatttgatcgagttgctgagaaacgttcattatcttctgctaaagctctggaagttgttgatcaaatagtgaatgaaattgagcaggctattgtgaagctgcagatgatgaatacagattctactggaaatgttgaccacccatccatccttgcagaactgaaagctaagctcaatgaaatggcaccactaaaccagcttgaaggcagccaaaaggagctcaatgttgctctgagcaaatatctcaaactccttgagaagtctttcaatccagatatatctaaggcatacagaaatgtggattttgaggtccatacagtaaacaatatcatagcgaatcatttctaccgccaaggcctctttgatcttggtgacatgtttgtccatgagtgtggggaactaggcggagcttccttgaagctaccgtttcaggagatgtatgctatccttgaagccatgaaagcgagaaacctcgagcctgctctcagttgggctgccaaaaaccatgatcagctgttgcagaatgggtctatgctggagttcaagctttatcagcttcagtttgttgaaatattgtccaaaggcagtaggggtgaggccaaagatgaggctcttttatatgctaggactcacttggtcccctttgcagccgtgcacaaggaagaattccagaagctaatggcttgccttctatgggttggccggctcgatcaatccccatattctgagttaatgtcatccgcgcattgggagaagctagctgaggagctcacccatcaattctgtagccttctgggccagtcgagggagagcccgctgagtgttgcagtgtcagctggttttcaaggactaccaactctgctgaagctgacgcaagtcatggctgcgaagaagcaggagtggcaagttatgaagcagcttcctgtccccatagacatcgggccagaattccagtatcattctgtctttgtgtgcccggtgctcagggagcagtccagtgacgagaatcccccaatgcggatgccttgtggacatgttgtctccaagcagtccatcatgaagctgtcgaaaagcagctcgagggccttcaagtgcccctactgcccctcggaggctatggcgtcgcattgcaagcagctgcatttctagatgtgttaatcttttctggctgcgcaaaactgcaaacctgttgtgtgttgcttaagtctcttctggagattaaaggaattcgaaagtgttggtggacaagtggacgtggactgtttgggagtatttctgctagactatagagaccttgctagtaaacactagccattagatgcgtgagaacatagaggttatacctttggtttggtgttggtgagggatgtcattaaggtggggagagtcggtgagggtgtgtttgtttgaggaataagtaggccatcatcttctcattctttactttctttttatttgtggaatataatgagttgattcagcactatttcattctttataagctaatactaccttcgttctcgaatatttgttgtcctctagttcatttttaaactaaatggtg

SEQ ID NO: 9901 - DNA, 2335 bp, Zea Mays
gtcactaggcactagccacccgacctgcctgtaggctgtagctgtctcctatatgctgcgaccctagcctgccttgtcttcttcatcaatcatcaccgcaagcgtgcgcgcaacccagctcccaccgacgactgcaccggccgtcgctgccgcgctacttcggccccttttccggcgacgagcaccaccaggaatcggttggtgtttatcgctgttcttaaaggtgttgttccctggccatcttagtgtcaaagcagtgaagggtgtagaagaaagaagtgtgacagggaatcaaaggagggctagtcatcctgtcggtggcagtagggtatggtgtcaacagaaaaatgagtgatgttctgactgctggggtgaggaggggagtggtggtgtggtagcactgtatcacattgaggtaaaagcgctgcatgaaggtcggggcctacatatctactcttggtgaagggtgtatttgatagctacagctctccaagagtatgcccaggacactcacacaagacacaaacggacattggatgctggtggaacgactgcagcttttctgtttcctctatttatacagagctgaatgttacattcaagtagctgctaatggagattgacagcctcagagaaggatttgatcgagttgctgagaaacgttcattatcttctgctaaagctctggaagttgttgatcaaatagtgaatgaaattgagcaggctattgtgaagctgcagatgatgaatacagattctactggaaatgttgaccacccatccatccttgcagaactgaaagctaagctcaatgaaatggcaccactaaaccagcttgaaggcagccaaaaggagctcaatgttgctctgagcaaatatctcaaactccttgagaagtctttcaatccagatatatctaaggcatacagaaatgtggattttgaggtccatacagtaaacaatatcatagcgaatcatttctaccgccaaggcctctttgatcttggtgacatgtttgtccatgagtgtggggaactaggcggagcttccttgaagctaccgtttcaggagatgtatgctatccttgaagccatgaaagcgagaaacctcgagcctgctctcagttgggctgccaaaaaccatgatcagctgttgcagaatgggtctatgctggagttcaagctttatcagcttcagtttgttgaaatattgtccaaaggcagtaggggtgaggccaaagatgaggctcttttatatgctaggactcacttggtcccctttgcagccgtgcacaaggaagaattccagaagctaatggcttgccttctatgggttggccggctcgatcaatccccatattctgagttaatgtcatccgcgcattgggagaagctagctgaggagctcacccatcaattctgtagccttctgggccagtcgagggagagcccgctgagtgttgcagtgtcagctggttttcaaggactaccaactctgctgaagctgacgcaagtcatggctgcgaagaagcaggagtggcaagttatgaagcagcttcctgtccccatagacatcgggccagaattccagtatcattctgtctttgtgtgcccggtgctcagggagcagtccagtgacgagaatcccccaatgcggatgccttgtggacatgttgtctccaagcagtccatcatgaagctgtcgaaaagcagctcgagggccttcaagtgcccctactgcccctcggaggctatggcgtcgcattgcaagcagctgcatttctagatgtgttaatcttttctggctgcgcaaaactgcaaacctgttggtacatgtttcccctcctgttccatgttgcaccagtccaataactgtctctctgtaatataaacatctacgtccggataaacatgtagtttcgtctgtattactgatatgtacagttgcatctttgatctttcagtgtgttgcttaagtctcttctggagattaaaggaattcgaaagtgttggtggacaagtggacgtggactgtttgggagtatttctgctagactatagagaccttgctagtaaacactagccattagatgcgtgagaacatagaggttatacctttggtttggtgttggtgagggatgtcattaaggtggggagagtcggtgagggtgtgtttgtttgaggaataagtaggccatcatcttctcattctttactttctttttatttgtggaatataatgagttgattcagcactatttcattctttataagctaatactaccttcgttctcgaatatttgttgtcctctagttcatttttaaactaaatggtg

SEQ ID NO: 9902 - DNA, 745 bp, Zea Mays
aggaccgcatgttctagatgcgatttgcttcatgctttttttgtccaaggaagaatgtgaccatttgatttcactggcaaagcctcatatgaagaagtcaacagtagttgattcagcaactggaggcagcaaggacagcagggtgcggacaagttcaggaatgtttcttagaagagggcaggacaaaattattcggacaattgagaaaaggatagcagattacaccttcatacctgtagagcagggtgagggtcttcaagttctccactatgaagttgggcagaagtatgaacctcactttgattacttccatgatgattacaacaccaagaatggaggccagcgtatagcaactcttcttatgtatctttcggatgttgaagatggtggcgagactgtgttcccttcgtcgacaacaaacagcagctcgtcaccattttataatgagctgtctgaatgtgcaaagggtggtctatctgttaaaccaaagatgggagatgcgcttctgttctggagcatgaagcctgatgggtccctagatcccacaagcctgcatggtggatgcccagttataaaaggcaacaaatggtcatcgacgaagtggatgcgtgttcatgagtacaaagtttagatacaaaaagacacagacctgaggtacgacattttgcttagaaaccaaaatactccttttttagtttgcctactgcaaaagtaatgctgggcctctaccttgcaccaacaatat

SEQ ID NO: 9903 - DNA, 772 bp, Zea Mays
cttcattcgtttctgtttggtgggaaggacaaggaccgcatgttctagatgcgatttgcttcatgctttttttgtccaaggaagaatgtgaccatttgatttcactggcaaagcctcatatgaagaagtcaacagtagttgattcagcaactggaggcagcaaggacagcagggtgcggacaagttcaggaatgtttcttagaagagggcaggacaaaattattcggacaattgagaaaaggatagcagattacaccttcatacctagcagggtgagggtcttcaagttctccactatgaagttgggcagaagtatgaacctcactttgattacttccatgatgattacaacaccaagaatggaggccagcgtatagcaactcttcttatgtatctttcggatgttgaagatggtggcgagactgtgttcccttcgtcgacaacaaacagcagctcgtcaccattttataatgagctgtctgaatgtgcaaagggtggtctatctgttaaaccaaagatgggagatgcgcttctgttctggagcatgaagcctgatgggtccctagatcccacaagcctgcatggtggatgcccagttataaaaggcaacaaatggtcatcgacgaagtggatgcgtgttcatgagtacaaagtttagatacaaaaagacacagacctgaggtacgacattttgcttagaaaccaaaatactccttttttagtttgcctactgcaaaagtaatgctgggcctctaccttgcaccaacaatat

SEQ ID NO: 9904 - DNA, 782 bp, Zea Mays
cttcacccttgcttcattcgtttctgtttggtgggaaggacaaggaccgcatgttctagatgcgatttgcttcatgctttttttgtccaaggaagaatgtgaccatttgatttcactggcaaagcctcatatgaagaagtcaacagtagttgattcagcaactggaggcagcaaggacagcagggtgcggacaagttcaggaatgtttcttagaagagggcaggacaaaattattcggacaattgagaaaaggatagcagattacaccttcatacctgtagggtgagggtcttcaagttctccactatgaagttgggcagaagtatgaacctcactttgattacttccatgatgattacaacaccaagaatggaggccagcgtatagcaactcttcttatgtatctttcggatgttgaagatggtggcgagactgtgttcccttcgtcgacaacaaacagcagctcgtcaccattttataatgagctgtctgaatgtgcaaagggtggtctatctgttaaaccaaagatgggagatgcgcttctgttctggagcatgaagcctgatgggtccctagatcccacaagcctgcatggtggatgcccagttataaaaggcaacaaatggtcatcgacgaagtggatgcgtgttcatgagtacaaagtttagatacaaaaagacacagacctgaggtacgacattttgcttagaaaccaaaatactccttttttagtttgcctactgcaaaagtaatgctgggcctctaccttgcaccaacaatat

SEQ ID NO: 9905 - DNA, 1692 bp, Zea Mays
agacgtgcagccagcgccggggcgtccagctaactcgcaaacatttttataacccgagcacgcgtcagacatgggaaacggcggtgggactggcgataagacgaagacgaaggcgacaggagggctcaccggtcgcgaatcctcctcctccagccacgcctcgaaacggcgtcggggcctgcgcggcgagtccatggctgatcgcttcattcccaatgactttcctgacttcgtcgccgaggctgaggcctccgacggcgaggggcaccgccccgcagggcatcggggcctgctctcgcttccgtacaccaggctctccgaccacttcgtccgcgccgcgcgccgcctcaaggacaaggtggttgaggagacgtgggtgaaagccggacggaaggtgacggactacacgctctacacgggctctctcgggacagcgctgctgctgttcaagtccttccaggtcactggagaccgcggggacctcgccctcgccgctgatatcgtccgcgcgtgcgatgatgcatcgcggggcctgccgcgcaggttcttgacattcatatgcgggagggcgggtgtctgcgctcttggggcggtgattgccaagcattgcgatgatcagctgagggtcactcagtatctgagctcctttgatgagataacaatcaccgagaaagttccaaatgagttgctgtatggaagggcaggctatctgtgggcttgtttgttcttgaataagcatctcagcgagaagacgatccctctcgatcacattaattctgtggcgaaggacattattaatgagggaagaggttttgcaagcaaggggagtagccctctgatgtacgaatggcatgggaagaaatactggggggctgcgcatggtcttgctggaatcatgcacgtgctaatgcacaccgaactgaaaccagatgagcaggatgatgtaaagaacaccctgcggtatatgatcaagaacaagtttcctagtggcaattatccctcaagtgaaggcaatgaatcagatcacttggtgcactggtgtcatggtgccccaggtgttgctcttacccttgctaaagcatatgaggtcttccatgatgattatttcgagcaatcagctgcagaggctgctgaggttgtctggaaccgagggcttctgaagagagtcggaatatgccacggtgtaagcgggaatgcctatgcgtttctctcactctacaggctaaccgggaaagctgggatgtcatacctcctcttggacatggttgatccatctgaatcaaggttccctgcgtatgaactttgagatatactattaccctgcgacttgtgaggctgttcgatgatccatcagtcacgaaaactctgtttgtattttctcgtctagtatgtgatgtgtgcttagacctcggtggtctgttgtgtttgtagatttggcgttcgtgatgttgcaaacttgaatcttctgtgaagtatgtgtgaccatcacattctgctaaatagattataatctcaaacaaacaccccctaaggctggttccaacgtcgatatggactgctagtgtgggcgagccggcggtcatatcgaccgcctcagctctaacacccgtcgatttggtcagccggttggttcggttggtaccgacattgttggaactagacccatcagtattggtatcaattggatgacat

SEQ ID NO: 9906 - DNA, 1689 bp, Zea Mays
agacgtgcagccagcgccggggcgtccagctaactcgcaaacatttttataacccgagcacgcgtcagacatgggaaacggcggtgggactggcgataagacgaagacgaaggcgacaggagggctcaccggtcgcgaatcctcctcctccagccacgcctcgaaacggcgtcggggcctgcgcggcgagtccatggctgatcgcttcattcccaatgactttcctgacttcgtcgccgaggctgaggcctccgacggcgaggggcaccgccccgcagggcatcggggcctgctctcgcttccgtacaccaggctctccgaccacttcgtccgcgccgcgcgccgcctcaaggacaaggtggttgaggagacgtgggtgaaagccggacggaaggtgacggactacacgctctacacgggctctctcgggacagcgctgctgctgttcaagtccttccaggtcactggagaccgcggggacctcgccctcgccgctgatatcgtccgcgcgtgcgatgatgcatcgcggggcctgccgttcttgacattcatatgcgggagggcgggtgtctgcgctcttggggcggtgattgccaagcattgcgatgatcagctgagggtcactcagtatctgagctcctttgatgagaattctgtggcgaaggacattattaatgagggaagaggttttgcaagcaaggggagtagccctctgatgtacgaatggcatgggaagaaatactggggggctgcgcatggtcttgctggaatcatgcacgtgctaatgcacaccgaactgaaaccagatgagcaggatgatgtaaagaacaccctgcggtatatgatcaagaacaagtttcctagtggcaattatccctcaagtgaaggcaatgaatcagatcacttggtgcactggtgtcatggtgccccaggtgttgctcttacccttgctaaagcatatgaggtcttccatgatgattatttcgagcaatcagctgcagaggctgctgaggttgtctggaaccgagggcttctgaagagagtcggaatatgccacggtgtaagcgggaatgcctatgcgtttctctcactctacaggctaaccggtaatgttgagtacctctaccgggcaaaggcttttgcctgctttcttctggagaaagctgatcagttgatagccgagggggccatgcatggtggtgatcgcccgttttcactgtttgaagggaaagctgggatgtcatacctcctcttggacatggttgatccatctgaatcaaggttccctgcgtatgaactttgagatatactattaccctgcgacttgtgaggctgttcgatgatccatcagtcacgaaaactctgtttgtattttctcgtctagtatgtgatgtgtgcttagacctcggtggtctgttgtgtttgtagatttggcgttcgtgatgttgcaaacttgaatcttctgtgaagtatgtgtgaccatcacattctgctaaatagattataatctcaaacaaacaccccctaaggctggttccaacgtcgatatggactgctagtgtgggcgagccggcggtcatatcgaccgcctcagctctaacacccgtcgatttggtcagccggttggttcggttggtaccgacattgttggaactagacccatcagtattggtatcaattggatgacat

SEQ ID NO: 9907 - DNA, 843 bp, Zea Mays
gtgaactgcttgattgcttcacaaggatgatgaagaatctctgttgcaaggagaacgcgaagctgaaatgatgattgtggaggcctatgcagctcttgtgctcgcctttctttcaacggaaagtatgaaggttcgaggagccatttctagttgccttccggacaacaacttgaaagttcttgtaccagtgctagagaaatttgtgtcatttcatctgcagctcaacatgatgacaagggaaacgcattcagctgtgactgaagtcatcgaaagatgtcggctatcatagaagtgggaagaggcgccctgtacagattagctgacctctttgcagccgaagcacacacaggtgttgctcatcacctggccagggcgcaacaaatggatgccagaggctggcctgcagtgggctttgggagctaacagtgattttattctttcttttgtccctagtttcttgttctccgcatcccccgaaatcacatgtttcattgtcgtaggaatagtccgtattatgaatgtacaataacaacataggccgtagggggaatgtagttgtgctgtttcagttcctgggctgtctgcctttcaggttgtatgctcgtgtcacatggaatcagtgaccgcatgcctaaatctgagttaagattgtatatcacataatagccgtgcaattcaactatgtagccctatgtacagaggcgccatatattgaagcatcttctggttgcaaaaaacatgaatgttgtataaatagtgtaactgaaggtatacaaatcttccaggcagttccttggtgctatataatgcacggcttagtggcgtagctaggatttttctcat

SEQ ID NO: 9908 - DNA, 2692 bp, Zea Mays
caaccattgtaccgggggctcacctttcggtccaagacaataatttgctgtcttcagaaacttgtgtccatttcctcctcaaattattaaaccctccggtgaatgttgttgatgccaaagcaccatcaataggttccaaacttcttggaatcagtaaatttcagatgcttaacggttccaataaggatgtggactcttgttcagaggacatacttttaaaagttgaagaaatcctcttaagctgcaaagagatcaaaccagcagacagggattataagagaacaacaaggccggaactatgttcaaagtggcttgctttgttgacaatggaaaaggcgtgcttgtctgctgttgcattagaggatacatctgacatggtcttagaactcggaggaaatttcaaagaaacattaaggcagttgggtggccttgatgatatttttaatgtcatggtgaattgccattcagaattggagaaacttgtaaaggatgcctccactacggttgtggagggaaaagaaggtgctcctctacaaagcaccacactcctcttgaaatgtttgaaaattttggagaatgccacatttctaagtgacaacaacaagacccatttgctcagcatgagtcgaaaattgagccctaaatgccgctcactttcttttgttggtgtcattctcaacattgttgagttactatcagcagctctctctctccttcagaaaccttccactgtttcaagaaaagcagatccaaaaaatactaaagtttgcaacggggcctgctctgacagtagaggtttgagcttattgaatcatcattgcaagtgcaataactcaaagaaaaagagcattttactgaaccgaaggtgccagtattgttcatccaccaaatcagaagcttctcatgttaccctctcttctagtagtgatgtcagtcagtcagaaaggatactcaattgctcatctttttcaagcaatgggacatcaagtggttcatttggagtgaaacatattaatggtgctagtttgaagctcaatgtaagaatggatcgttctaaagcttatccagtcagaggctcaactggttggatttctatgaaagcacaaacttctgattggaactccagagaaatggcaaaaaagcggcgcctatctgaaaatgtacgcactgatttgagtaatggtggtgatgatccatttgcatttgatgatattgatcaagaaccttcaaattgggatctatttggtccaaaaaggaaatcaccacagaagcgagcgaaaagaactaatggagaagtgttggatgattgtggaactgcattaatgggaagtcctaaattatgtcaacctgaagatatttatcagtcagttgcaacttctggttctaaggttgtagatgagtccaatcttttggaggattgccttttggcgtcagttaaggttcttatgaacttggcaaatgacaacccgtctggttgcgaacagatcgcgtcatgtggcggacttaataacatggcctccttgatcattaaacatttcccctcatttgatttctccatgaacagtaacaatcaaatgaatgaaagtgtgtcctctggtgatccgttgtcttcccagaacagcaagtcaccccaaatcaaaactaagcagttgcgggactatgaacttgattttctagttgccatattgggattgcttgtgaaccttgtggagaaggatagccttaatagggtacgacttgcgaatgctcgtgtttctgttaatctatctcaaaatccagatagcaaagaggtacagagggatgtcatacccctgctctgttcaatattcttagcgagtcaaggtaccggggaaactgctgaagctatatcaccggatgatgaagaatctctgttgcaaggagaacgcgaagctgaaatgatgattgtggaggcctatgcagctcttgtgctcgcctttctttcaacggaaagtatgaaggttcgaggagccatttctagttgccttccggacaacaacttgaaagttcttgtaccagtgctagagaaatttgtgtcatttcatctgcagctcaacatgatgacaagggaaacgcattcagctgtgactgaagtcatcgaaagatgtcggctatcatagaagtgggaagaggcgccctgtacagattagctgacctctttgcagccgaagcacacacaggtgttgctcatcacctggccagggcgcaacaaatggatgccagaggctggcctgcagtgggctttgggagctaacagtgattttattctttcttttgtccctagtttcttgttctccgcatcccccgaaatcacatgtttcattgtcgtaggaatagtccgtattatgaatgtacaataacaacataggccgtagggggaatgtagttgtgctgtttcagttcctgggctgtctgcctttcaggttgtatgctcgtgtcacatggaatcagtgaccgcatgcctaaatctgagttaagattgtatatcacataatagccgtgcaattcaactatgtagccctatgtacagaggcgccatatattgaagcatcttctggttgcaaaaaacatgaatgttgtataaatagtgtaactgaaggtatacaaatcttccaggcagttccttggtgctatataatgcacggcttagtggcgtagctaggatttttctcat

SEQ ID NO: 9909 - DNA, 2696 bp, Zea Mays
tggaaattggttgtggtgttagtggttgggtgtggggtctgttgttttggtggccttgaggatatcatataggcgttcaggtcatagccaaccattgtaccgggggctcacctttcggtccaagacaataatttgctgtcttcagaaacttgtgtccatttcctcctcaaattattaaaccctccggtgaatgttgttgatgccaaagcaccatcaataggttccaaacttcttggaatcagtaaatttcagatgcttaacggttccaataaggatgtggactcttgttcagaggacatacttttaaaagttgaagaaatcctcttaagctgcaaagagatcaaaccagcagacagggattataagagaacaacaaggccggaactatgttcaaagtggcttgctttgttgacaatggaaaaggcgtgcttgtctgctgttgcattagaggatacatctgacatggtcttagaactcggaggaaatttcaaagaaacattaaggcagttgggtggccttgatgatatttttaatgtcatggtgaattgccattcagaattggagaaacttgtaaaggatgcctccactacggttgtggagggaaaagaaggtgctcctctacaaagcaccacactcctcttgaaatgtttgaaaattttggagaatgccacatttctaagtgacaacaacaagacccatttgctcagcatgagtcgaaaattgagccctaaatgccgctcactttcttttgttggtgtcattctcaacattgttgagttactatcagcagacagtagaggtttgagcttattgaatcatcattgcaagtgcaataactcaaagaaaaagagcattttactgaaccgaaggtgccagtattgttcatccaccaaatcagaagcttctcatgttaccctctcttctagtagtgatgtcagtcagtcagaaaggatactcaattgctcatctttttcaagcaatgggacatcaagtggttcatttggagtgaaacatattaatggtgctagtttgaagctcaatgtaagaatggatcgttctaaagcttatccagtcagaggctcaactggttggatttctatgaaagcacaaacttctgattggaactccagagaaatggcaaaaaagcggcgcctatctgaaaatgtacgcactgatttgagtaatggtggtgatgatccatttgcatttgatgatattgatcaagaaccttcaaattgggatctatttggtccaaaaaggaaatcaccacagaagcgagcgaaaagaactaatggagaagtgttggatgattgtggaactgcattaatgggaagtcctaaattatgtcaacctgaagatatttatcagtcagttgcaacttctggttctaaggttgtagatgagtccaatcttttggaggattgccttttggcgtcagttaaggttcttatgaacttggcaaatgacaacccgtctggttgcgaacagatcgcgtcatgtggcggacttaataacatggcctccttgatcattaaacatttcccctcatttgatttctccatgaacagtaacaatcaaatgaatgaaagtgtgtcctctggtgatccgttgtcttcccagaacagcaagtcaccccaaatcaaaactaagcagttgcgggactatgaacttgattttctagttgccatattgggattgcttgtgaaccttgtggagaaggatagccttaatagggtacgacttgcgaatgctcgtgtttctgttaatctatctcaaaatccagatagcaaagaggtacagagggatgtcatacccctgctctgttcaatattcttagcgagtcaaggtaccggggaaactgctgaagctatatcaccggatgatgaagaatctctgttgcaaggagaacgcgaagctgaaatgatgattgtggaggcctatgcagctcttgtgctcgcctttctttcaacggaaagtatgaaggttcgaggagccatttctagttgccttccggacaacaacttgaaagttcttgtaccagtgctagagaaatttgtgtcatttcatctgcagctcaacatgatgacaagggaaacgcattcagctgtgactgaagtcatcgaaagatgtcggctatcatagaagtgggaagaggcgccctgtacagattagctgacctctttgcagccgaagcacacacaggtgttgctcatcacctggccagggcgcaacaaatggatgccagaggctggcctgcagtgggctttgggagctaacagtgattttattctttcttttgtccctagtttcttgttctccgcatcccccgaaatcacatgtttcattgtcgtaggaatagtccgtattatgaatgtacaataacaacataggccgtagggggaatgtagttgtgctgtttcagttcctgggctgtctgcctttcaggttgtatgctcgtgtcacatggaatcagtgaccgcatgcctaaatctgagttaagattgtatatcacataatagccgtgcaattcaactatgtagccctatgtacagaggcgccatatattgaagcatcttctggttgcaaaaaacatgaatgttgtataaatagtgtaactgaaggtatacaaatcttccaggcagttccttggtgctatataatgcacggcttagtggcgtagctaggatttttctcat

SEQ ID NO: 9910 - DNA, 3436 bp, Zea Mays
ctgagcctgcagcccagctgcccgttccaactcctttccaaatccgccgcaacgcgaagcaaacgacgcctgaacggtcccaaaacccacaccgccacacggccacgcccagttctcccctctctcgctgcgcatcgacgacggcgagggcgccatgatcgtgcgcacgtacaggcgtagatcccgttccatctccgaaggcgggggcggggtctcgtcctcgcaggaggcgttcgacttcgatgccgacgtcgacgtgctgggatcgtcggcctcgcagccgctcccgccatcgcaggaatcctcctcgatgtgggatttcgacgaggacccgcctccgtccccgccgcggcccgggaaggaggggaggcgaagcgggcggggcggagccagaagaggaggagggttggagctcgcggaagctcccgcgatggcgccgacggtgacgctgatggaggcggaggagtacggagagatgatggagagcgtggacgacgtcacgttcgcgctcgacgggctccgccccgccgcgcagaagcggacgcggcgggccagcctgctcgcgctgctcgggatctgcgactccgccgagcgccgccgcgtgcttcggtcccaaggattggtacagcaaattatcgatgctattttggttctggacattgatgatcctccctgcgctattgctgcaggagctcttttatttgttttggcaagtgatgtccaagacaataatttgctgtcttcagaaacttgtgtccatttcctcctcaaattattaaaccctccggtgaatgttgttgatgccaaagcaccatcaataggttccaaacttcttggaatcagtaaatttcagatgcttaacggttccaataaggatgtggactcttgttcagaggacatacttttaaaagttgaagaaatcctcttaagctgcaaagagatcaaaccagcagacagggattataagagaacaacaaggccggaactatgttcaaagtggcttgctttgttgacaatggaaaaggcgtgcttgtctgctgttgcattagaggatacatctgacatggtcttagaactcggaggaaatttcaaagaaacattaaggcagttgggtggccttgatgatatttttaatgtcatggtgaattgccattcagaattggagaaacttgtaaaggatgcctccactacggttgtggagggaaaagaaggtgctcctctacaaagcaccacactcctcttgaaatgtttgaaaattttggagaatgccacatttctaagtgacaacaacaagacccatttgctcagcatgagtcgaaaattgagccctaaatgccgctcactttcttttgttggtgtcattctcaacattgttgagttactatcagcagacagtagaggtttgagcttattgaatcatcattgcaagtgcaataactcaaagaaaaagagcattttactgaaccgaaggtgccagtattgttcatccaccaaatcagaagcttctcatgttaccctctcttctagtagtgatgtcagtcagtcagaaaggatactcaattgctcatctttttcaagcaatgggacatcaagtggttcatttggagtgaaacatattaatggtgctagtttgaagctcaatgtaagaatggatcgttctaaagcttatccagtcagaggctcaactggttggatttctatgaaagcacaaacttctgattggaactccagagaaatggcaaaaaagcggcgcctatctgaaaatgtacgcactgatttgagtaatggtggtgatgatccatttgcatttgatgatattgatcaagaaccttcaaattgggatctatttggtccaaaaaggaaatcaccacagaagcgagcgaaaagaactaatggagaagtgttggatgattgtggaactgcattaatgggaagtcctaaattatgtcaacctgaagatatttatcagtcagttgcaacttctggttctaaggttgtagatgagtccaatcttttggaggattgccttttggcgtcagttaaggattatgcttgagcagtgggtgagctttatgcaaaattaaaactctacaagttttaaacttacttgctacttctactttgctaatcattgtgaaagttttgatcagctagctttaccaaacaaacatcttttgcagcaggttcttatgaacttggcaaatgacaacccgtctggttgcgaacagatcgcgtcatgtggcggacttaataacatggcctccttgatcattaaacatttcccctcatttgatttctccatgaacagtaacaatcaaatgaatgaaagtgtgtcctctggtgatccgttgtcttcccagaacagcaagtcaccccaaatcaaaactaagcagttgcgggactatgaacttgattttctagttgccatattgggattgcttgtgaaccttgtggagaaggatagccttaatagggtacgacttgcgaatgctcgtgtttctgttaatctatctcaaaatccagatagcaaagaggtacagagggatgtcatacccctgctctgttcaatattcttagcgagtcaaggtaccggggaaactgctgaagctatatcaccggatgatgaagaatctctgttgcaaggagaacgcgaagctgaaatgatgattgtggaggcctatgcagctcttgtgctcgcctttctttcaacggaaagtatgaaggttcgaggagccatttctagttgccttccggacaacaacttgaaagttcttgtaccagtgctagagaaatttgtgtcatttcatctgcagctcaacatgatgacaagggaaacgcattcagctgtgactgaagtcatcgaaagatgtcggctatcatagaagtgggaagaggcgccctgtacagattagctgacctctttgcagccgaagcacacacaggtgttgctcatcacctggccagggcgcaacaaatggatgccagaggctggcctgcagtgggctttgggagctaacagtgattttattctttcttttgtccctagtttcttgttctccgcatcccccgaaatcacatgtttcattgtcgtaggaatagtccgtattatgaatgtacaataacaacataggccgtagggggaatgtagttgtgctgtttcagttcctgggctgtctgcctttcaggttgtatgctcgtgtcacatggaatcagtgaccgcatgcctaaatctgagttaagattgtatatcacataatagccgtgcaattcaactatgtagccctatgtacagaggcgccatatattgaagcatcttctggttgcaaaaaacatgaatgttgtataaatagtgtaactgaaggtatacaaatcttccaggcagttccttggtgctatataatgcacggcttagtggcgtagctaggatttttctcat

SEQ ID NO: 9911 - DNA, 3436 bp, Zea Mays
ctgagcctgcagcccagctgcccgttccaactcctttccaaatccgccgcaacgcgaagcaaacgacgcctgaacggtcccaaaacccacaccgccacacggccacgcccagttctcccctctctcgctgcgcatcgacgacggcgagggcgccatgatcgtgcgcacgtacaggcgtagatcccgttccatctccgaaggcgggggcggggtctcgtcctcgcaggaggcgttcgacttcgatgccgacgtcgacgtgctgggatcgtcggcctcgcagccgctcccgccatcgcaggaatcctcctcgatgtgggatttcgacgaggacccgcctccgtccccgccgcggcccgggaaggaggggaggcgaagcgggcggggcggagccagaagaggaggagggttggagctcgcggaagctcccgcgatggcgccgacggtgacgctgatggaggcggaggagtacggagagatgatggagagcgtggacgacgtcacgttcgcgctcgacgggctccgccccgccgcgcagaagcggacgcggcgggccagcctgctcgcgctgctcgggatctgcgactccgccgagcgccgccgcgtgcttcggtcccaaggattggtacagcaaattatcgatgctattttggttctggacattgatgatcctccctgcgctattgctgcaggagctcttttatttgttttggcaagtgatgtccaagacaataatttgctgtcttcagaaacttgtgtccatttcctcctcaaattattaaaccctccggtgaatgttgttgatgccaaagcaccatcaataggttccaaacttcttggaatcagtaaatttcagatgcttaacggttccaataaggatgtggactcttgttcagaggacatacttttaaaagttgaagaaatcctcttaagctgcaaagagatcaaaccagcagacagggattataagagaacaacaaggccggaactatgttcaaagtggcttgctttgttgacaatggaaaaggcgtgcttgtctgctgttgcattagaggatacatctgacatggtcttagaactcggaggaaatttcaaagaaacattaaggcagttgggtggccttgatgatatttttaatgtcatggtgaattgccattcagaattggagaaacttgtaaaggatgcctccactacggttgtggagggaaaagaaggtgctcctctacaaagcaccacactcctcttgaaatgtttgaaaattttggagaatgccacatttctaagtgacaacaacaagacccatttgctcagcatgagtcgaaaattgagccctaaatgccgctcactttcttttgttggtgtcattctcaacattgttgagttactatcagctctctctctccttcagaaaccttccactgtttcaagaaaagcagatccaaaaaatactaaagtttgcaacggggcctgctctgcagacagtagaggtttgagcttattgaatcatcattgcaagtgcaataactcaaagaaaaagagcattttactgaaccgaaggtgccagtattgttcatccaccaaatcagaagcttctcatgttaccctctcttctagtagtgatgtcagtcagtcagaaaggatactcaattgctcatctttttcaagcaatgggacatcaagtggttcatttggagtgaaacatattaatggtgctagtttgaagctcaatgtaagaatggatcgttctaaagcttatccagtcagaggctcaactggttggatttctatgaaagcacaaacttctgattggaactccagagaaatggcaaaaaagcggcgcctatctgaaaatgtacgcactgatttgagtaatggtggtgatgatccatttgcatttgatgatattgatcaagaaccttcaaattgggatctatttggtccaaaaaggaaatcaccacagaagcgagcgaaaagaactaatggagaagtgttggatgattgtggaactgcattaatgggaagtcctaaattatgtcaacctgaagatatttatcagtcagttgcaacttctggttctaaggttgtagatgagtccaatcttttggaggattgccttttggcgtcagttaaggattatgcttgagcagtgggtgagctttatgcaaaattaaaactctacaagttttaaacttacttgctacttctactttgctaatcattgtgaaagttttgatcagctagctttaccaaacaaacatcttttgcagcaggttcttatgaacttggcaaatgacaacccgtctggttgcgaacagatcgcgtcatgtggcggacttaataacatggcctccttgatcattaaacatttcccctcatttgatttctccatgaacagtaacaatcaaatgaatgaaagtgtgtcctctggtgatccgttgtcttcccagaacagcaagtcaccccaaatcaaaactaagcagttgcgggactatgaacttgattttctagttgccatattgggattgcttgtgaaccttgtggagaaggatagccttaatagggtacgacttgcgaatgctcgtgtttctgttaatctatctcaaaatccagatagcaaagaggatgatgaagaatctctgttgcaaggagaacgcgaagctgaaatgatgattgtggaggcctatgcagctcttgtgctcgcctttctttcaacggaaagtatgaaggttcgaggagccatttctagttgccttccggacaacaacttgaaagttcttgtaccagtgctagagaaatttgtgtcatttcatctgcagctcaacatgatgacaagggaaacgcattcagctgtgactgaagtcatcgaaagatgtcggctatcatagaagtgggaagaggcgccctgtacagattagctgacctctttgcagccgaagcacacacaggtgttgctcatcacctggccagggcgcaacaaatggatgccagaggctggcctgcagtgggctttgggagctaacagtgattttattctttcttttgtccctagtttcttgttctccgcatcccccgaaatcacatgtttcattgtcgtaggaatagtccgtattatgaatgtacaataacaacataggccgtagggggaatgtagttgtgctgtttcagttcctgggctgtctgcctttcaggttgtatgctcgtgtcacatggaatcagtgaccgcatgcctaaatctgagttaagattgtatatcacataatagccgtgcaattcaactatgtagccctatgtacagaggcgccatatattgaagcatcttctggttgcaaaaaacatgaatgttgtataaatagtgtaactgaaggtatacaaatcttccaggcagttccttggtgctatataatgcacggcttagtggcgtagctaggatttttctcat

SEQ ID NO: 9912 - DNA, 3520 bp, Zea Mays
ctgagcctgcagcccagctgcccgttccaactcctttccaaatccgccgcaacgcgaagcaaacgacgcctgaacggtcccaaaacccacaccgccacacggccacgcccagttctcccctctctcgctgcgcatcgacgacggcgagggcgccatgatcgtgcgcacgtacaggcgtagatcccgttccatctccgaaggcgggggcggggtctcgtcctcgcaggaggcgttcgacttcgatgccgacgtcgacgtgctgggatcgtcggcctcgcagccgctcccgccatcgcaggaatcctcctcgatgtgggatttcgacgaggacccgcctccgtccccgccgcggcccgggaaggaggggaggcgaagcgggcggggcggagccagaagaggaggagggttggagctcgcggaagctcccgcgatggcgccgacggtgacgctgatggaggcggaggagtacggagagatgatggagagcgtggacgacgtcacgttcgcgctcgacgggctccgccccgccgcgcagaagcggacgcggcgggccagcctgctcgcgctgctcgggatctgcgactccgccgagcgccgccgcgtgcttcggtcccaaggattggtacagcaaattatcgatgctattttggttctggacattgatgatcctccctgcgctattgctgcaggagctcttttatttgttttggcaagtgatgtccaagacaataatttgctgtcttcagaaacttgtgtccatttcctcctcaaattattaaaccctccggtgaatgttgttgatgccaaagcaccatcaataggttccaaacttcttggaatcagtaaatttcagatgcttaacggttccaataaggatgtggactcttgttcagaggacatacttttaaaagttgaagaaatcctcttaagctgcaaagagatcaaaccagcagacagggattataagagaacaacaaggccggaactatgttcaaagtggcttgctttgttgacaatggaaaaggcgtgcttgtctgctgttgcattagaggatacatctgacatggtcttagaactcggaggaaatttcaaagaaacattaaggcagttgggtggccttgatgatatttttaatgtcatggtgaattgccattcagaattggagaaacttgtaaaggatgcctccactacggttgtggagggaaaagaaggtgctcctctacaaagcaccacactcctcttgaaatgtttgaaaattttggagaatgccacatttctaagtgacaacaacaagacccatttgctcagcatgagtcgaaaattgagccctaaatgccgctcactttcttttgttggtgtcattctcaacattgttgagttactatcagctctctctctccttcagaaaccttccactgtttcaagaaaagcagatccaaaaaatactaaagtttgcaacggggcctgctctgcagacagtagaggtttgagcttattgaatcatcattgcaagtgcaataactcaaagaaaaagagcattttactgaaccgaaggtgccagtattgttcatccaccaaatcagaagcttctcatgttaccctctcttctagtagtgatgtcagtcagtcagaaaggatactcaattgctcatctttttcaagcaatgggacatcaagtggttcatttggagtgaaacatattaatggtgctagtttgaagctcaatgtaagaatggatcgttctaaagcttatccagtcagaggctcaactggttggatttctatgaaagcacaaacttctgattggaactccagagaaatggcaaaaaagcggcgcctatctgaaaatgtacgcactgatttgagtaatggtggtgatgatccatttgcatttgatgatattgatcaagaaccttcaaattgggatctatttggtccaaaaaggaaatcaccacagaagcgagcgaaaagaactaatggagaagtgttggatgattgtggaactgcattaatgggaagtcctaaattatgtcaacctgaagatatttatcagtcagttgcaacttctggttctaaggttgtagatgagtccaatcttttggaggattgccttttggcgtcagttaaggattatgcttgagcagtgggtgagctttatgcaaaattaaaactctacaagttttaaacttacttgctacttctactttgctaatcattgtgaaagttttgatcagctagctttaccaaacaaacatcttttgcagcaggttcttatgaacttggcaaatgacaacccgtctggttgcgaacagatcgcgtcatgtggcggacttaataacatggcctccttgatcattaaacatttcccctcatttgatttctccatgaacagtaacaatcaaatgaatgaaagtgtgtcctctggtgatccgttgtcttcccagaacagcaagtcaccccaaatcaaaactaagcagttgcgggactatgaacttgattttctagttgccatattgggattgcttgtgaaccttgtggagaaggatagccttaatagggtacgacttgcgaatgctcgtgtttctgttaatctatctcaaaatccagatagcaaagaggtacagagggatgtcatacccctgctctgttcaatattcttagcgagtcaaggtaccggggaaactgctgaagctatatcaccggatgatgaagaatctctgttgcaaggagaacgcgaagctgaaatgatgattgtggaggcctatgcagctcttgtgctcgcctttctttcaacggaaagtatgaaggttcgaggagccatttctagttgccttccggacaacaacttgaaagttcttgtaccagtgctagagaaatttgtgtcatttcatctgcagctcaacatgatgacaagggaaacgcattcagctgtgactgaagtcatcgaaagatgtcggctatcatagaagtgggaagaggcgccctgtacagattagctgacctctttgcagccgaagcacacacaggtgttgctcatcacctggccagggcgcaacaaatggatgccagaggctggcctgcagtgggctttgggagctaacagtgattttattctttcttttgtccctagtttcttgttctccgcatcccccgaaatcacatgtttcattgtcgtaggaatagtccgtattatgaatgtacaataacaacataggccgtagggggaatgtagttgtgctgtttcagttcctgggctgtctgcctttcaggttgtatgctcgtgtcacatggaatcagtgaccgcatgcctaaatctgagttaagattgtatatcacataatagccgtgcaattcaactatgtagccctatgtacagaggcgccatatattgaagcatcttctggttgcaaaaaacatgaatgttgtataaatagtgtaactgaaggtatacaaatcttccaggcagttccttggtgctatataatgcacggcttagtggcgtagctaggatttttctcat

SEQ ID NO: 9913 - DNA, 3998 bp, Zea Mays
ctgagcctgcagcccagctgcccgttccaactcctttccaaatccgccgcaacgcgaagcaaacgacgcctgaacggtcccaaaacccacaccgccacacggccacgcccagttctcccctctctcgctgcgcatcgacgacggcgagggcgccatgatcgtgcgcacgtacaggcgtagatcccgttccatctccgaaggcgggggcggggtctcgtcctcgcaggaggcgttcgacttcgatgccgacgtcgacgtgctgggatcgtcggcctcgcagccgctcccgccatcgcaggaatcctcctcgatgtgggatttcgacgaggacccgcctccgtccccgccgcggcccgggaaggaggggaggcgaagcgggcggggcggagccagaagaggaggagggttggagctcgcggaagctcccgcgatggcgccgacggtgacgctgatggaggcggaggagtacggagagatgatggagagcgtggacgacgtcacgttcgcgctcgacgggctccgccccgccgcgcagaagcggacgcggcgggccagcctgctcgcgctgctcgggatctgcgactccgccgagcgccgccgcgtgcttcggtcccaaggattggtacagcaaattatcgatgctattttggttctggacattgatgatcctccctgcgctattgctgcaggagctcttttatttgttttggcaagtgatgtccaagacaataatttgctgtcttcagaaacttgtgtccatttcctcctcaaattattaaaccctccggtgaatgttgttgatgccaaagcaccatcaataggttccaaacttcttggaatcagtaaatttcagatgcttaacggttccaataaggatgtggactcttgttcagaggacatacttttaaaagttgaagaaatcctcttaagctgcaaagagatcaaaccagcagacagggattataagagaacaacaaggccggaactatgttcaaagtggcttgctttgttgacaatggaaaaggcgtgcttgtctgctgttgcattagaggatacatctgacatggtcttagaactcggaggaaatttcaaagaaacattaaggcagttgggtggccttgatgatatttttaatgtcatggtgaattgccattcagaattggagaaacttgtaaaggatgcctccactacggttgtggagggaaaagaaggtgctcctctacaaagcaccacactcctcttgaaatgtttgaaaattttggagaatgccacatttctaagtgacaacaacaagacccatttgctcagcatgagtcgaaaattgagccctaaatgccgctcactttcttttgttggtgtcattctcaacattgttgagttactatcagctctctctctccttcagaaaccttccactgtttcaagaaaagcagatccaaaaaatactaaagtttgcaacggggcctgctctgcagacagtagaggtttgagcttattgaatcatcattgcaagtgcaataactcaaagaaaaagagcattttactgaaccgaaggtgccagtattgttcatccaccaaatcagaagcttctcatgttaccctctcttctagtagtgatgtcagtcagtcagaaaggatactcaattgctcatctttttcaagcaatgggacatcaagtggttcatttggagtgaaacatattaatggtgctagtttgaagctcaatgtaagaatggatcgttctaaagcttatccagtcagaggctcaactggttggatttctatgaaagcacaaacttctgattggaactccagagaaatggcaaaaaagcggcgcctatctgaaaatgtacgcactgatttgagtaatggtggtgatgatccatttgcatttgatgatattgatcaagaaccttcaaattgggatctatttggtccaaaaaggaaatcaccacagaagcgagcgaaaagaactaatggagaagtgttggatgattgtggaactgcattaatgggaagtcctaaattatgtcaacctgaagatatttatcagtcagttgcaacttctggttctaaggttgtagatgagtccaatcttttggaggattgccttttggcgtcagttaaggattatgcttgagcagtgggtgagctttatgcaaaattaaaactctacaagttttaaacttacttgctacttctactttgctaatcattgtgaaagttttgatcagctagctttaccaaacaaacatcttttgcagcaggccagtgacatattattgagggactacttgtttttattacatttgcaatgagatgtatctaacatcttccattgtttttgtgacaggttcttatgaacttggcaaatgacaacccgtctggttgcgaacagatcgcgtcatgtggcggacttaataacatggcctccttgatcattaaacatttcccctcatttgatttctccatgaacagtaacaatcaaatgaatgaaagtgtgtcctctggtgatccgttgtcttcccagaacagcaagtcaccccaaatcaaaactaagcagttgcgggactatgaacttgattttctagttgccatattgggattgcttgtgaaccttgtggagaaggatagccttaatagggtacgacttgcgaatgctcgtgtttctgttaatctatctcaaaatccagatagcaaagaggtacagagggatgtcatacccctgctctgttcaatattcttagcgagtcaaggtaccggggaaactgctgaagctatatcaccggatgatgaagaatctctgttgcaaggagaacgcgaagctgaaatgatgattgtggaggcctatgcagctcttgtgctcgcctttctttcaacggaaaggttcatagtgccttatttcataatcttttcttaattagttataattttaatgtgagccccaccccactgccgtcagcttatgaactgatgtttgctgccacagtatgaaggttcgaggagccatttctagttgccttccggacaacaacttgaaagttcttgtaccagtgctagagaaatttgtggtatgtttccataatttctgaatgtactgtctcaagcaacgttcgagagagatacatgaactaccatttttctgggagccagtaatttgtcatgtccatagatgctaatccctattctttatgtacgttgtatatatttgttcgttttctggcatgtttactacgtctacatagtatgcgactgctctagattaaaaaatgtcttggttgttttcccgatcttccttcccgcgacaaccttatagctagttttgctcgtaatttacctgaccatcttggtctcctgcagtcatttcatctgcagctcaacatgatgacaagggaaacgcattcagctgtgactgaagtcatcgaaagatgtcggctatcatagaagtgggaagaggcgccctgtacagattagctgacctctttgcagccgaagcacacacaggtgttgctcatcacctggccagggcgcaacaaatggatgccagaggctggcctgcagtgggctttgggagctaacagtgattttattctttcttttgtccctagtttcttgttctccgcatcccccgaaatcacatgtttcattgtcgtaggaatagtccgtattatgaatgtacaataacaacataggccgtagggggaatgtagttgtgctgtttcagttcctgggctgtctgcctttcaggttgtatgctcgtgtcacatggaatcagtgaccgcatgcctaaatctgagttaagattgtatatcacataatagccgtgcaattcaactatgtagccctatgtacagaggcgccatatattgaagcatcttctggttgcaaaaaacatgaatgttgtataaatagtgtaactgaaggtatacaaatcttccaggcagttccttggtgctatataatgcacggcttagtggcgtagctaggatttttctcat

SEQ ID NO: 9914 - DNA, 3249 bp, Zea Mays
ctgagcctgcagcccagctgcccgttccaactcctttccaaatccgccgcaacgcgaagcaaacgacgcctgaacggtcccaaaacccacaccgccacacggccacgcccagttctcccctctctcgctgcgcatcgacgacggcgagggcgccatgatcgtgcgcacgtacaggcgtagatcccgttccatctccgaaggcgggggcggggtctcgtcctcgcaggaggcgttcgacttcgatgccgacgtcgacgtgctgggatcgtcggcctcgcagccgctcccgccatcgcaggaatcctcctcgatgtgggatttcgacgaggacccgcctccgtccccgccgcggcccgggaaggaggggaggcgaagcgggcggggcggagccagaagaggaggagggttggagctcgcggaagctcccgcgatggcgccgacggtgacgctgatggaggcggaggagtacggagagatgatggagagcgtggacgacgtcacgttcgcgctcgacgggctccgccccgccgcgcagaagcggacgcggcgggccagcctgctcgcgctgctcgggatctgcgactccgccgagcgccgccgcgtgcttcggtcccaaggattggtacagcaaattatcgatgctattttggttctggacattgatgatcctccctgcgctattgctgcaggagctcttttatttgttttggcaagtgatgtccaagacaataatttgctgtcttcagaaacttgtgtccatttcctcctcaaattattaaaccctccggtgaatgttgttgatgccaaagcaccatcaataggttccaaacttcttggaatcagtaaatttcagatgcttaacggttccaataaggatgtggactcttgttcagaggacatacttttaaaagttgaagaaatcctcttaagctgcaaagagatcaaaccagcagacagggattataagagaacaacaaggccggaactatgttcaaagtggcttgctttgttgacaatggaaaaggcgtgcttgtctgctgttgcattagaggatacatctgacatggtcttagaactcggaggaaatttcaaagaaacattaaggcagttgggtggccttgatgatatttttaatgtcatggtgaattgccattcagaattggagacccatttgctcagcatgagtcgaaaattgagccctaaatgccgctcactttcttttgttggtgtcattctcaacattgttgagttactatcagctctctctctccttcagaaaccttccactgtttcaagaaaagcagatccaaaaaatactaaagtttgcaacggggcctgctctgacagtagaggtttgagcttattgaatcatcattgcaagtgcaataactcaaagaaaaagagcattttactgaaccgaaggtgccagtattgttcatccaccaaatcagaagcttctcatgttaccctctcttctagtagtgatgtcagtcagtcagaaaggatactcaattgctcatctttttcaagcaatgggacatcaagtggttcatttggagtgaaacatattaatggtgctagtttgaagctcaatgtaagaatggatcgttctaaagcttatccagtcagaggctcaactggttggatttctatgaaagcacaaacttctgattggaactccagagaaatggcaaaaaagcggcgcctatctgaaaatgtacgcactgatttgagtaatggtggtgatgatccatttgcatttgatgatattgatcaagaaccttcaaattgggatctatttggtccaaaaaggaaatcaccacagaagcgagcgaaaagaactaatggagaagtgttggatgattgtggaactgcattaatgggaagtcctaaattatgtcaacctgaagatatttatcagtcagttgcaacttctggttctaaggttgtagatgagtccaatcttttggaggattgccttttggcgtcagttaaggttcttatgaacttggcaaatgacaacccgtctggttgcgaacagatcgcgtcatgtggcggacttaataacatggcctccttgatcattaaacatttcccctcatttgatttctccatgaacagtaacaatcaaatgaatgaaagtgtgtcctctggtgatccgttgtcttcccagaacagcaagtcaccccaaatcaaaactaagcagttgcgggactatgaacttgattttctagttgccatattgggattgcttgtgaaccttgtggagaaggatagccttaatagggtacgacttgcgaatgctcgtgtttctgttaatctatctcaaaatccagatagcaaagaggtacagagggatgtcatacccctgctctgttcaatattcttagcgagtcaaggtaccggggaaactgctgaagctatatcaccggatgatgaagaatctctgttgcaaggagaacgcgaagctgaaatgatgattgtggaggcctatgcagctcttgtgctcgcctttctttcaacggaaagtatgaaggttcgaggagccatttctagttgccttccggacaacaacttgaaagttcttgtaccagtgctagagaaatttgtgtcatttcatctgcagctcaacatgatgacaagggaaacgcattcagctgtgactgaagtcatcgaaagatgtcggctatcatagaagtgggaagaggcgccctgtacagattagctgacctctttgcagccgaagcacacacaggtgttgctcatcacctggccagggcgcaacaaatggatgccagaggctggcctgcagtgggctttgggagctaacagtgattttattctttcttttgtccctagtttcttgttctccgcatcccccgaaatcacatgtttcattgtcgtaggaatagtccgtattatgaatgtacaataacaacataggccgtagggggaatgtagttgtgctgtttcagttcctgggctgtctgcctttcaggttgtatgctcgtgtcacatggaatcagtgaccgcatgcctaaatctgagttaagattgtatatcacataatagccgtgcaattcaactatgtagccctatgtacagaggcgccatatattgaagcatcttctggttgcaaaaaacatgaatgttgtataaatagtgtaactgaaggtatacaaatcttccaggcagttccttggtgctatataatgcacggcttagtggcgtagctaggatttttctcat

SEQ ID NO: 9915 - DNA, 3298 bp, Zea Mays
gctgagcctgcagcccagctgcccgttccaactcctttccaaatccgccgcaacgcgaagcaaacgacgcctgaacggtcccaaaacccacaccgccacacggccacgcccagttctcccctctctcgctgcgcatcgacgacggcgagggcgccatgatcgtgcgcacgtacaggcgtagatcccgttccatctccgaaggcgggggcggggtctcgtcctcgcaggaggcgttcgacttcgatgccgacgtcgacgtgctgggatcgtcggcctcgcagccgctcccgccatcgcaggaatcctcctcgatgtgggatttcgacgaggacccgcctccgtccccgccgcggcccgggaaggaggggaggcgaagcgggcggggcggagccagaagaggaggagggttggagctcgcggaagctcccgcgatggcgccgacggtgacgctgatggaggcggaggagtacggagagatgatggagagcgtggacgacgtcacgttcgcgctcgacgggctccgccccgccgcgcagaagcggacgcggcgggccagcctgctcgcgctgctcgggatctgcgactccgccgagcgccgccgcgtgcttcggtcccaaggattggtacagcaaattatcgatgctattttggttctggacattgatgatcctccctgcgctattgctgcaggagctcttttatttgttttggcaagtgatgtccaagacaataatttgctgtcttcagaaacttgtgtccatttcctcctcaaattattaaaccctccggtgaatgttgttgatgccaaagcaccatcaataggttccaaacttcttggaatcagtaaatttcagatgcttaacggttccaataaggatgtggactcttgttcagaggacatacttttaaaagttgaagaaatcctcttaagctgcaaagagatcaaaccagcagacagggattataagagaacaacaaggccggaactatgttcaaagtggcttgctttgttgacaatggaaaaggcgtgcttgtctgctgttgcattagaggatacatctgacatggtcttagaactcggaggaaatttcaaagaaacattaaggcagttgggtggccttgatgatatttttaatgtcatggtgaattgccattcagaattggagaaacttgtaaaggatgcctccactacggttgtggagggaaaagaaggtgctcctctacaaagcaccacactcctcttgaaatgtttgaaaattttggagaatgccacatttctaagtgacaacaacaagacccatttgctcagcatgagtcgaaaattgagccctaaatgccgctcactttcttttgttggtgtcattctcaacattgttgagttactatcagctctctctctccttcagaaaccttccactgtttcaagaaaagcagatccaaaaaatactaaagtttgcaacggggcctgctctgcagacagtagaggtttgagcttattgaatcatcattgcaagtgcaataactcaaagaaaaagagcattttactgaaccgaaggtgccagtattgttcatccaccaaatcagaagcttctcatgttaccctctcttctagtagtgatgtcagtcagtcagaaaggatactcaattgctcatctttttcaagcaatgggacatcaagtggttcatttggagtgaaacatattaatggtgctagtttgaagctcaatgtaagaatggatcgttctaaagcttatccagtcagaggctcaactggttggatttctatgaaagcacaaacttctgattggaactccagagaaatggcaaaaaagcggcgcctatctgaaaatgtacgcactgatttgagtaatggtggtgatgatccatttgcatttgatgatattgatcaagaaccttcaaattgggatctatttggtccaaaaaggaaatcaccacagaagcgagcgaaaagaactaatggagaagtgttggatgattgtggaactgcattaatgggaagtcctaaattatgtcaacctgaagatatttatcagtcagttgcaacttctggttctaaggttgtagatgagtccaatcttttggaggattgccttttggcgtcagttaaggttcttatgaacttggcaaatgacaacccgtctggttgcgaacagatcgcgtcatgtggcggacttaataacatggcctccttgatcattaaacatttcccctcatttgatttctccatgaacagtaacaatcaaatgaatgaaagtgtgtcctctggtgatccgttgtcttcccagaacagcaagtcaccccaaatcaaaactaagcagttgcgggactatgaacttgattttctagttgccatattgggattgcttgtgaaccttgtggagaaggatagccttaatagggtacgacttgcgaatgctcgtgtttctgttaatctatctcaaaatccagatagcaaagaggatgatgaagaatctctgttgcaaggagaacgcgaagctgaaatgatgattgtggaggcctatgcagctcttgtgctcgcctttctttcaacggaaagtatgaaggttcgaggagccatttctagttgccttccggacaacaacttgaaagttcttgtaccagtgctagagaaatttgtgtcatttcatctgcagctcaacatgatgacaagggaaacgcattcagctgtgactgaagtcatcgaaagatgtcggctatcatagaagtgggaagaggcgccctgtacagattagctgacctctttgcagccgaagcacacacaggtgttgctcatcacctggccagggcgcaacaaatggatgccagaggctggcctgcagtgggctttgggagctaacagtgattttattctttcttttgtccctagtttcttgttctccgcatcccccgaaatcacatgtttcattgtcgtaggaatagtccgtattatgaatgtacaataacaacataggccgtagggggaatgtagttgtgctgtttcagttcctgggctgtctgcctttcaggttgtatgctcgtgtcacatggaatcagtgaccgcatgcctaaatctgagttaagattgtatatcacataatagccgtgcaattcaactatgtagccctatgtacagaggcgccatatattgaagcatcttctggttgcaaaaaacatgaatgttgtataaatagtgtaactgaaggtatacaaatcttccaggcagttccttggtgctatataatgcacggcttagtggcgtagctaggatttttctcat

SEQ ID NO: 9916 - DNA, 3675 bp, Zea Mays
ctcagctgagcctgcagcccagctgcccgttccaactcctttccaaatccgccgcaacgcgaagcaaacgacgcctgaacggtcccaaaacccacaccgccacacggccacgcccagttctcccctctctcgctgcgcatcgacgacggcgagggcgccatgatcgtgcgcacgtacaggcgtagatcccgttccatctccgaaggcgggggcggggtctcgtcctcgcaggaggcgttcgacttcgatgccgacgtcgacgtgctgggatcgtcggcctcgcagccgctcccgccatcgcaggaatcctcctcgatgtgggatttcgacgaggacccgcctccgtccccgccgcggcccgggaaggaggggaggcgaagcgggcggggcggagccagaagaggaggagggttggagctcgcggaagctcccgcgatggcgccgacggtgacgctgatggaggcggaggagtacggagagatgatggagagcgtggacgacgtcacgttcgcgctcgacgggctccgccccgccgcgcagaagcggacgcggcgggccagcctgctcgcgctgctcgggatctgcgactccgccgagcgccgccgcgtgcttcggtcccaaggattggtacagcaaattatcgatgctattttggttctggacattgatgatcctccctgcgctattgctgcaggagctcttttatttgttttggcaagtgatgtccaagacaataatttgctgtcttcagaaacttgtgtccatttcctcctcaaattattaaaccctccggtgaatgttgttgatgccaaagcaccatcaataggttccaaacttcttggaatcagtaaatttcagatgcttaacggttccaataaggatgtggactcttgttcagaggacatacttttaaaagttgaagaaatcctcttaagctgcaaagagatcaaaccagcagacagggattataagagaacaacaaggccggaactatgttcaaagtggcttgctttgttgacaatggaaaaggcgtgcttgtctgctgttgcattagaggatacatctgacatggtcttagaactcggaggaaatttcaaagaaacattaaggcagttgggtggccttgatgatatttttaatgtcatggtgaattgccattcagaattggagaaacttgtaaaggatgcctccactacggttgtggagggaaaagaaggtgctcctctacaaagcaccacactcctcttgaaatgtttgaaaattttggagaatgccacatttctaagtgacaacaacaagacccatttgctcagcatgagtcgaaaattgagccctaaatgccgctcactttcttttgttggtgtcattctcaacattgttgagttactatcagctctctctctccttcagaaaccttccactgtttcaagaaaagcagatccaaaaaatactaaagtttgcaacggggcctgctctgcagacagtagaggtttgagcttattgaatcatcattgcaagtgcaataactcaaagaaaaagagcattttactgaaccgaaggtgccagtattgttcatccaccaaatcagaagcttctcatgttaccctctcttctagtagtgatgtcagtcagtcagaaaggatactcaattgctcatctttttcaagcaatgggacatcaagtggttcatttggagtgaaacatattaatggtgctagtttgaagctcaatgtaagaatggatcgttctaaagcttatccagtcagaggctcaactggttggatttctatgaaagcacaaacttctgattggaactccagagaaatggcaaaaaagcggcgcctatctgaaaatgtacgcactgatttgagtaatggtggtgatgatccatttgcatttgatgatattgatcaagaaccttcaaattgggatctatttggtccaaaaaggaaatcaccacagaagcgagcgaaaagaactaatggagaagtgttggatgattgtggaactgcattaatgggaagtcctaaattatgtcaacctgaagatatttatcagtcagttgcaacttctggttctaaggttgtagatgagtccaatcttttggaggattgccttttggcgtcagttaaggttcttatgaacttggcaaatgacaacccgtctggttgcgaacagatcgcgtcatgtggcggacttaataacatggcctccttgatcattaaacatttcccctcatttgatttctccatgaacagtaacaatcaaatgaatgaaagtgtgtcctctggtgatccgttgtcttcccagaacagcaagtcaccccaaatcaaaactaagcagttgcgggactatgaacttgattttctagttgccatattgggattgcttgtgaaccttgtggagaaggatagccttaatagggtacgacttgcgaatgctcgtgtttctgttaatctatctcaaaatccagatagcaaagaggtacagagggatgtcatacccctgctctgttcaatattcttagcgagtcaaggtaccggggaaactgctgaagctatatcaccggatgatgaagaatctctgttgcaaggagaacgcgaagctgaaatgatgattgtggaggcctatgcagctcttgtgctcgcctttctttcaacggaaagtatgaaggttcgaggagccatttctagttgccttccggacaacaacttgaaagttcttgtaccagtgctagagaaatttgtggtatgtttccataatttctgaatgtactgtctcaagcaacgttcgagagagatacatgaactaccatttttctgggagccagtaatttgtcatgtccatagatgctaatccctattctttatgtacgttgtatatatttgttcgttttctggcatgtttactacgtctacatagtatgcgactgctctagattaaaaaatgtcttggttgttttcccgatcttccttcccgcgacaaccttatagctagttttgctcgtaatttacctgaccatcttggtctcctgcagtcatttcatctgcagctcaacatgatgacaagggaaacgcattcagctgtgactgaagtcatcgaaagatgtcggctatcatagaagtgggaagaggcgccctgtacagattagctgacctctttgcagccgaagcacacacaggtgttgctcatcacctggccagggcgcaacaaatggatgccagaggctggcctgcagtgggctttgggagctaacagtgattttattctttcttttgtccctagtttcttgttctccgcatcccccgaaatcacatgtttcattgtcgtaggaatagtccgtattatgaatgtacaataacaacataggccgtagggggaatgtagttgtgctgtttcagttcctgggctgtctgcctttcaggttgtatgctcgtgtcacatggaatcagtgaccgcatgcctaaatctgagttaagattgtatatcacataatagccgtgcaattcaactatgtagccctatgtacagaggcgccatatattgaagcatcttctggttgcaaaaaacatgaatgttgtataaatagtgtaactgaaggtatacaaatcttccaggcagttccttggtgctatataatgcacggcttagtggcgtagctaggatttttctcat

SEQ ID NO: 9917 - DNA, 3257 bp, Zea Mays
ctcagctgagcctgcagcccagctgcccgttccaactcctttccaaatccgccgcaacgcgaagcaaacgacgcctgaacggtcccaaaacccacaccgccacacggccacgcccagttctcccctctctcgctgcgcatcgacgacggcgagggcgccatgatcgtgcgcacgtacaggcgtagatcccgttccatctccgaaggcgggggcggggtctcgtcctcgcaggaggcgttcgacttcgatgccgacgtcgacgtgctgggatcgtcggcctcgcagccgctcccgccatcgcaggaatcctcctcgatgtgggatttcgacgaggacccgcctccgtccccgccgcggcccgggaaggaggggaggcgaagcgggcggggcggagccagaagaggaggagggttggagctcgcggaagctcccgcgatggcgccgacggtgacgctgatggaggcggaggagtacggagagatgatggagagcgtggacgacgtcacgttcgcgctcgacgggctccgccccgccgcgcagaagcggacgcggcgggccagcctgctcgcgctgctcgggatctgcgactccgccgagcgccgccgcgtgcttcggtcccaaggattggtacagcaaattatcgatgctattttggttctggacattgatgatcctccctgcgctattgctgcaggagctcttttatttgttttggcaagtgatgtccaagacaataatttgctgtcttcagaaacttgtgtccatttcctcctcaaattattaaaccctccggtgaatgttgttgatgccaaagcaccatcaataggttccaaacttcttggaatcagtaaatttcagatgcttaacggttccaataaggatgtggactcttgttcagaggacatacttttaaaagttgaagaaatcctcttaagctgcaaagagatcaaaccagcagacagggattataagagaacaacaaggccggaactatgttcaaagtggcttgctttgttgacaatggaaaaggcgtgcttgtctgctgttgcattagaggatacatctgacatggtcttagaactcggaggaaatttcaaagaaacattaaggcagttgggtggccttgatgatatttttaatgtcatggtgaattgccattcagaattggagacccatttgctcagcatgagtcgaaaattgagccctaaatgccgctcactttcttttgttggtgtcattctcaacattgttgagttactatcagctctctctctccttcagaaaccttccactgtttcaagaaaagcagatccaaaaaatactaaagtttgcaacggggcctgctctgcagacagtagaggtttgagcttattgaatcatcattgcaagtgcaataactcaaagaaaaagagcattttactgaaccgaaggtgccagtattgttcatccaccaaatcagaagcttctcatgttaccctctcttctagtagtgatgtcagtcagtcagaaaggatactcaattgctcatctttttcaagcaatgggacatcaagtggttcatttggagtgaaacatattaatggtgctagtttgaagctcaatgtaagaatggatcgttctaaagcttatccagtcagaggctcaactggttggatttctatgaaagcacaaacttctgattggaactccagagaaatggcaaaaaagcggcgcctatctgaaaatgtacgcactgatttgagtaatggtggtgatgatccatttgcatttgatgatattgatcaagaaccttcaaattgggatctatttggtccaaaaaggaaatcaccacagaagcgagcgaaaagaactaatggagaagtgttggatgattgtggaactgcattaatgggaagtcctaaattatgtcaacctgaagatatttatcagtcagttgcaacttctggttctaaggttgtagatgagtccaatcttttggaggattgccttttggcgtcagttaaggttcttatgaacttggcaaatgacaacccgtctggttgcgaacagatcgcgtcatgtggcggacttaataacatggcctccttgatcattaaacatttcccctcatttgatttctccatgaacagtaacaatcaaatgaatgaaagtgtgtcctctggtgatccgttgtcttcccagaacagcaagtcaccccaaatcaaaactaagcagttgcgggactatgaacttgattttctagttgccatattgggattgcttgtgaaccttgtggagaaggatagccttaatagggtacgacttgcgaatgctcgtgtttctgttaatctatctcaaaatccagatagcaaagaggtacagagggatgtcatacccctgctctgttcaatattcttagcgagtcaaggtaccggggaaactgctgaagctatatcaccggatgatgaagaatctctgttgcaaggagaacgcgaagctgaaatgatgattgtggaggcctatgcagctcttgtgctcgcctttctttcaacggaaagtatgaaggttcgaggagccatttctagttgccttccggacaacaacttgaaagttcttgtaccagtgctagagaaatttgtgtcatttcatctgcagctcaacatgatgacaagggaaacgcattcagctgtgactgaagtcatcgaaagatgtcggctatcatagaagtgggaagaggcgccctgtacagattagctgacctctttgcagccgaagcacacacaggtgttgctcatcacctggccagggcgcaacaaatggatgccagaggctggcctgcagtgggctttgggagctaacagtgattttattctttcttttgtccctagtttcttgttctccgcatcccccgaaatcacatgtttcattgtcgtaggaatagtccgtattatgaatgtacaataacaacataggccgtagggggaatgtagttgtgctgtttcagttcctgggctgtctgcctttcaggttgtatgctcgtgtcacatggaatcagtgaccgcatgcctaaatctgagttaagattgtatatcacataatagccgtgcaattcaactatgtagccctatgtacagaggcgccatatattgaagcatcttctggttgcaaaaaacatgaatgttgtataaatagtgtaactgaaggtatacaaatcttccaggcagttccttggtgctatataatgcacggcttagtggcgtagctaggatttttctcat

SEQ ID NO: 9918 - DNA, 3460 bp, Zea Mays
ctgaccgctgaagccgtgaagcgtgatgcaaacaaagcaaaccatacccgtatcgccgtcctacccgccagtgactcagctgagcctgcagcccagctgcccgttccaactcctttccaaatccgccgcaacgcgaagcaaacgacgcctgaacggtcccaaaacccacaccgccacacggccacgcccagttctcccctctctcgctgcgcatcgacgacggcgagggcgccatgatcgtgcgcacgtacaggcgtagatcccgttccatctccgaaggcgggggcggggtctcgtcctcgcaggaggcgttcgacttcgatgccgacgtcgacgtgctgggatcgtcggcctcgcagccgctcccgccatcgcaggaatcctcctcgatgtgggatttcgacgaggacccgcctccgtccccgccgcggcccgggaaggaggggaggcgaagcgggcggggcggagccagaagaggaggagggttggagctcgcggaagctcccgcgatggcgccgacggtgacgctgatggaggcggaggagtacggagagatgatggagagcgtggacgacgtcacgttcgcgctcgacgggctccgccccgccgcgcagaagcggacgcggcgggccagcctgctcgcgctgctcgggatctgcgactccgccgagcgccgccgcgtgcttcggtcccaaggattggtacagcaaattatcgatgctattttggttctggacattgatgatcctccctgcgctattgctgcaggagctcttttatttgttttggcaagtgatgtccaagacaataatttgctgtcttcagaaacttgtgtccatttcctcctcaaattattaaaccctccggtgaatgttgttgatgccaaagcaccatcaataggttccaaacttcttggaatcagtaaatttcagatgcttaacggttccaataaggatgtggactcttgttcagaggacatacttttaaaagttgaagaaatcctcttaagctgcaaagagatcaaaccagcagacagggattataagagaacaacaaggccggaactatgttcaaagtggcttgctttgttgacaatggaaaaggcgtgcttgtctgctgttgcattagaggatacatctgacatggtcttagaactcggaggaaatttcaaagaaacattaaggcagttgggtggccttgatgatatttttaatgtcatggtgaattgccattcagaattggagaaacttgtaaaggatgcctccactacggttgtggagggaaaagaaggtgctcctctacaaagcaccacactcctcttgaaatgtttgaaaattttggagaatgccacatttctaagtgacaacaacaagacccatttgctcagcatgagtcgaaaattgagccctaaatgccgctcactttcttttgttggtgtcattctcaacattgttgagttactatcagctctctctctccttcagaaaccttccactgtttcaagaaaagcagatccaaaaaatactaaagtttgcaacggggcctgctctgcagacagtagaggtttgagcttattgaatcatcattgcaagtgcaataactcaaagaaaaagagcattttactgaaccgaaggtgccagtattgttcatccaccaaatcagaagcttctcatgttaccctctcttctagtagtgatgtcagtcagtcagaaaggatactcaattgctcatctttttcaagcaatgggacatcaagtggttcatttggagtgaaacatattaatggtgctagtttgaagctcaatgtaagaatggatcgttctaaagcttatccagtcagaggctcaactggttggatttctatgaaagcacaaacttctgattggaactccagagaaatggcaaaaaagcggcgcctatctgaaaatgtacgcactgatttgagtaatggtggtgatgatccatttgcatttgatgatattgatcaagaaccttcaaattgggatctatttggtccaaaaaggaaatcaccacagaagcgagcgaaaagaactaatggagaagtgttggatgattgtggaactgcattaatgggaagtcctaaattatgtcaacctgaagatatttatcagtcagttgcaacttctggttctaaggttgtagatgagtccaatcttttggaggattgccttttggcgtcagttaaggttcttatgaacttggcaaatgacaacccgtctggttgcgaacagatcgcgtcatgtggcggacttaataacatggcctccttgatcattaaacatttcccctcatttgatttctccatgaacagtaacaatcaaatgaatgaaagtgtgtcctctggtgatccgttgtcttcccagaacagcaagtcaccccaaatcaaaactaagcagttgcgggactatgaacttgattttctagttgccatattgggattgcttgtgaaccttgtggagaaggatagccttaatagggtacgacttgcgaatgctcgtgtttctgttaatctatctcaaaatccagatagcaaagaggtacagagggatgtcatacccctgctctgttcaatattcttagcgagtcaaggtaccggggaaactgctgaagctatatcaccggatgatgaagaatctctgttgcaaggagaacgcgaagctgaaatgatgattgtggaggcctatgcagctcttgtgctcgcctttctttcaacggaaagtatgaaggttcgaggagccatttctagttgccttccggacaacaacttgaaagttcttgtaccagtgctagagaaatttgtgtcatttcatctgcagctcaacatgatgacaagggaaacgcattcagctgtgactgaagtcatcgaaagatgtcggctatcatagaagtgggaagaggcgccctgtacagattagctgacctctttgcagccgaagcacacacaggtgttgctcatcacctggccagggcgcaacaaatggatgccagaggctggcctgcagtgggctttgggagctaacagtgattttattctttcttttgtccctagtttcttgttctccgcatcccccgaaatcacatgtttcattgtcgtaggaatagtccgtattatgaatgtacaataacaacataggccgtagggggaatgtagttgtgctgtttcagttcctgggctgtctgcctttcaggttgtatgctcgtgtcacatggaatcagtgaccgcatgcctaaatctgagttaagattgtatatcacataatagccgtgcaattcaactatgtagccctatgtacagaggcgccatatattgaagcatcttctggttgcaaaaaacatgaatgttgtataaatagtgtaactgaaggtatacaaatcttccaggcagttccttggtgctatataatgcacggcttagtggcgtagctaggatttttctcat

SEQ ID NO: 9919 - DNA, 3457 bp, Zea Mays
ctgaccgctgaagccgtgaagcgtgatgcaaacaaagcaaaccatacccgtatcgccgtcctacccgccagtgactcagctgagcctgcagcccagctgcccgttccaactcctttccaaatccgccgcaacgcgaagcaaacgacgcctgaacggtcccaaaacccacaccgccacacggccacgcccagttctcccctctctcgctgcgcatcgacgacggcgagggcgccatgatcgtgcgcacgtacaggcgtagatcccgttccatctccgaaggcgggggcggggtctcgtcctcgcaggaggcgttcgacttcgatgccgacgtcgacgtgctgggatcgtcggcctcgcagccgctcccgccatcgcaggaatcctcctcgatgtgggatttcgacgaggacccgcctccgtccccgccgcggcccgggaaggaggggaggcgaagcgggcggggcggagccagaagaggaggagggttggagctcgcggaagctcccgcgatggcgccgacggtgacgctgatggaggcggaggagtacggagagatgatggagagcgtggacgacgtcacgttcgcgctcgacgggctccgccccgccgcgcagaagcggacgcggcgggccagcctgctcgcgctgctcgggatctgcgactccgccgagcgccgccgcgtgcttcggtcccaaggattggtacagcaaattatcgatgctattttggttctggacattgatgatcctccctgcgctattgctgcaggagctcttttatttgttttggcaagtgatgtccaagacaataatttgctgtcttcagaaacttgtgtccatttcctcctcaaattattaaaccctccggtgaatgttgttgatgccaaagcaccatcaataggttccaaacttcttggaatcagtaaatttcagatgcttaacggttccaataaggatgtggactcttgttcagaggacatacttttaaaagttgaagaaatcctcttaagctgcaaagagatcaaaccagcagacagggattataagagaacaacaaggccggaactatgttcaaagtggcttgctttgttgacaatggaaaaggcgtgcttgtctgctgttgcattagaggatacatctgacatggtcttagaactcggaggaaatttcaaagaaacattaaggcagttgggtggccttgatgatatttttaatgtcatggtgaattgccattcagaattggagaaacttgtaaaggatgcctccactacggttgtggagggaaaagaaggtgctcctctacaaagcaccacactcctcttgaaatgtttgaaaattttggagaatgccacatttctaagtgacaacaacaagacccatttgctcagcatgagtcgaaaattgagccctaaatgccgctcactttcttttgttggtgtcattctcaacattgttgagttactatcagctctctctctccttcagaaaccttccactgtttcaagaaaagcagatccaaaaaatactaaagtttgcaacggggcctgctctgacagtagaggtttgagcttattgaatcatcattgcaagtgcaataactcaaagaaaaagagcattttactgaaccgaaggtgccagtattgttcatccaccaaatcagaagcttctcatgttaccctctcttctagtagtgatgtcagtcagtcagaaaggatactcaattgctcatctttttcaagcaatgggacatcaagtggttcatttggagtgaaacatattaatggtgctagtttgaagctcaatgtaagaatggatcgttctaaagcttatccagtcagaggctcaactggttggatttctatgaaagcacaaacttctgattggaactccagagaaatggcaaaaaagcggcgcctatctgaaaatgtacgcactgatttgagtaatggtggtgatgatccatttgcatttgatgatattgatcaagaaccttcaaattgggatctatttggtccaaaaaggaaatcaccacagaagcgagcgaaaagaactaatggagaagtgttggatgattgtggaactgcattaatgggaagtcctaaattatgtcaacctgaagatatttatcagtcagttgcaacttctggttctaaggttgtagatgagtccaatcttttggaggattgccttttggcgtcagttaaggttcttatgaacttggcaaatgacaacccgtctggttgcgaacagatcgcgtcatgtggcggacttaataacatggcctccttgatcattaaacatttcccctcatttgatttctccatgaacagtaacaatcaaatgaatgaaagtgtgtcctctggtgatccgttgtcttcccagaacagcaagtcaccccaaatcaaaactaagcagttgcgggactatgaacttgattttctagttgccatattgggattgcttgtgaaccttgtggagaaggatagccttaatagggtacgacttgcgaatgctcgtgtttctgttaatctatctcaaaatccagatagcaaagaggtacagagggatgtcatacccctgctctgttcaatattcttagcgagtcaaggtaccggggaaactgctgaagctatatcaccggatgatgaagaatctctgttgcaaggagaacgcgaagctgaaatgatgattgtggaggcctatgcagctcttgtgctcgcctttctttcaacggaaagtatgaaggttcgaggagccatttctagttgccttccggacaacaacttgaaagttcttgtaccagtgctagagaaatttgtgtcatttcatctgcagctcaacatgatgacaagggaaacgcattcagctgtgactgaagtcatcgaaagatgtcggctatcatagaagtgggaagaggcgccctgtacagattagctgacctctttgcagccgaagcacacacaggtgttgctcatcacctggccagggcgcaacaaatggatgccagaggctggcctgcagtgggctttgggagctaacagtgattttattctttcttttgtccctagtttcttgttctccgcatcccccgaaatcacatgtttcattgtcgtaggaatagtccgtattatgaatgtacaataacaacataggccgtagggggaatgtagttgtgctgtttcagttcctgggctgtctgcctttcaggttgtatgctcgtgtcacatggaatcagtgaccgcatgcctaaatctgagttaagattgtatatcacataatagccgtgcaattcaactatgtagccctatgtacagaggcgccatatattgaagcatcttctggttgcaaaaaacatgaatgttgtataaatagtgtaactgaaggtatacaaatcttccaggcagttccttggtgctatataatgcacggcttagtggcgtagctaggatttttctcat

SEQ ID NO: 9920 - DNA, 2645 bp, Zea Mays
ctgagcctgcagcccagctgcccgttccaactcctttccaaatccgccgcaacgcgaagcaaacgacgcctgaacggtcccaaaacccacaccgccacacggccacgcccagttctcccctctctcgctgcgcatcgacgacggcgagggcgccatgatcgtgcgcacgtacaggcgtagatcccgttccatctccgaaggcgggggcggggtctcgtcctcgcaggaggcgttcgacttcgatgccgacgtcgacgtgctgggatcgtcggcctcgcagccgctcccgccatcgcaggaatcctcctcgatgtgggatttcgacgaggacccgcctccgtccccgccgcggcccgggaaggaggggaggcgaagcgggcggggcggagccagaagaggaggagggttggagctcgcggaagctcccgcgatggcgccgacggtgacgctgatggaggcggaggagtacggagagatgatggagagcgtggacgacgtcacgttcgcgctcgacgggctccgccccgccgcgcagaagcggacgcggcgggccagcctgctcgcgctgctcgggatctgcgactccgccgagcgccgccgcgtgcttcggtcccaaggattggtacagcaaattatcgatgctattttggttctggacattgatgatcctccctgcgctattgctgcaggagctcttttatttgttttggcaagtgatgtccaagacaataatttgctgtcttcagaaacttgtgtccatttcctcctcaaattattaaaccctccggtgaatgttgttgatgccaaagcaccatcaataggttccaaacttcttggaatcagtaaatttcagatgcttaacggttccaataaggatgtggactcttgttcagaggacatacttttaaaagttgaagaaatcctcttaagctgcaaagagatcaaaccagcagacagggattataagagaacaacaaggccggaactatgttcaaagtggcttgctttgttgacaatggaaaaggcgtgcttgtctgctgttgcattagaggatacatctgacatggtcttagaactcggaggaaatttcaaagaaacattaaggcagttgggtggccttgatgatatttttaatgtcatggtgaattgccattcagaattggagaaacttgtaaaggatgcctccactacggttgtggagggaaaagaaggtgctcctctacaaagcaccacactcctcttgaaatgtttgaaaattttggagaatgccacatttctaagtgacaacaacaagacccatttgctcagcatgagtcgaaaattgagccctaaatgccgctcactttcttttgttggtgtcattctcaacattgttgagttactatcagctctctctctccttcagaaaccttccactgtttcaagaaaagcagatccaaaaaatactaaagtttgcaacggggcctgctctgcagacagtagaggtttgagcttattgaatcatcattgcaagtgcaataactcaaagaaaaagagcattttactgaaccgaaggtgccagtattgttcatccaccaaatcagaagcttctcatgttaccctctcttctagtagtgatgtcagtcagtcagaaaggatactcaattgctcatctttttcaagcaatgggacatcaagtggttcatttggagtgaaacatattaatggtgctagtttgaagctcaatgtaagaatggatcgttctaaagcttatccagtcagaggctcaactggttggatttctatgaaagcacaaacttctgattggaactccagagaaatggcaaaaaagcggcgcctatctgaaaatgtacgcactgatttgagtaatggtggtgatgatccatttgcatttgatgatattgatcaagaaccttcaaattgggatctatttggtccaaaaaggaaatcaccacagaagcgagcgaaaagaactaatggagaagtgttggatgattgtggaactgcattaatgggaagtcctaaattatgtcaacctgaagatatttatcagtcagttgcaacttctggttctaaggttgtagatgagtccaatcttttggaggattgccttttggcgtcagttaaggttcttatgaacttggcaaatgacaacccgtctggttgcgaacagatcgcgtcatgtggcggacttaataacatggcctccttgatcattaaacatttcccctcatttgatttctccatgaacagtaacaatcaaatgaatgaaagtgtgtcctctggtgatccgttgtcttcccagaacagcaagtcaccccaaatcaaaactaagcagttgcgggactatgaacttgattttctagttgccatattgggattgcttgtgaaccttgtggagaaggatagccttaatagggtacgacttgcgaatgctcgtgtttctgttaatctatctcaaaatccagatagcaaagaggtacagagggatgtcatacccctgctctgttcaatattcttagcgagtcaaggtaccggggaaactgctgaagctatatcaccggggaggttgatgcgaacagatttctatctctggtcatatgatttgtacatacactatcaagcactcaagtacccaactcgac

SEQ ID NO: 9921 - DNA, 2642 bp, Zea Mays
ctgagcctgcagcccagctgcccgttccaactcctttccaaatccgccgcaacgcgaagcaaacgacgcctgaacggtcccaaaacccacaccgccacacggccacgcccagttctcccctctctcgctgcgcatcgacgacggcgagggcgccatgatcgtgcgcacgtacaggcgtagatcccgttccatctccgaaggcgggggcggggtctcgtcctcgcaggaggcgttcgacttcgatgccgacgtcgacgtgctgggatcgtcggcctcgcagccgctcccgccatcgcaggaatcctcctcgatgtgggatttcgacgaggacccgcctccgtccccgccgcggcccgggaaggaggggaggcgaagcgggcggggcggagccagaagaggaggagggttggagctcgcggaagctcccgcgatggcgccgacggtgacgctgatggaggcggaggagtacggagagatgatggagagcgtggacgacgtcacgttcgcgctcgacgggctccgccccgccgcgcagaagcggacgcggcgggccagcctgctcgcgctgctcgggatctgcgactccgccgagcgccgccgcgtgcttcggtcccaaggattggtacagcaaattatcgatgctattttggttctggacattgatgatcctccctgcgctattgctgcaggagctcttttatttgttttggcaagtgatgtccaagacaataatttgctgtcttcagaaacttgtgtccatttcctcctcaaattattaaaccctccggtgaatgttgttgatgccaaagcaccatcaataggttccaaacttcttggaatcagtaaatttcagatgcttaacggttccaataaggatgtggactcttgttcagaggacatacttttaaaagttgaagaaatcctcttaagctgcaaagagatcaaaccagcagacagggattataagagaacaacaaggccggaactatgttcaaagtggcttgctttgttgacaatggaaaaggcgtgcttgtctgctgttgcattagaggatacatctgacatggtcttagaactcggaggaaatttcaaagaaacattaaggcagttgggtggccttgatgatatttttaatgtcatggtgaattgccattcagaattggagaaacttgtaaaggatgcctccactacggttgtggagggaaaagaaggtgctcctctacaaagcaccacactcctcttgaaatgtttgaaaattttggagaatgccacatttctaagtgacaacaacaagacccatttgctcagcatgagtcgaaaattgagccctaaatgccgctcactttcttttgttggtgtcattctcaacattgttgagttactatcagctctctctctccttcagaaaccttccactgtttcaagaaaagcagatccaaaaaatactaaagtttgcaacggggcctgctctgacagtagaggtttgagcttattgaatcatcattgcaagtgcaataactcaaagaaaaagagcattttactgaaccgaaggtgccagtattgttcatccaccaaatcagaagcttctcatgttaccctctcttctagtagtgatgtcagtcagtcagaaaggatactcaattgctcatctttttcaagcaatgggacatcaagtggttcatttggagtgaaacatattaatggtgctagtttgaagctcaatgtaagaatggatcgttctaaagcttatccagtcagaggctcaactggttggatttctatgaaagcacaaacttctgattggaactccagagaaatggcaaaaaagcggcgcctatctgaaaatgtacgcactgatttgagtaatggtggtgatgatccatttgcatttgatgatattgatcaagaaccttcaaattgggatctatttggtccaaaaaggaaatcaccacagaagcgagcgaaaagaactaatggagaagtgttggatgattgtggaactgcattaatgggaagtcctaaattatgtcaacctgaagatatttatcagtcagttgcaacttctggttctaaggttgtagatgagtccaatcttttggaggattgccttttggcgtcagttaaggttcttatgaacttggcaaatgacaacccgtctggttgcgaacagatcgcgtcatgtggcggacttaataacatggcctccttgatcattaaacatttcccctcatttgatttctccatgaacagtaacaatcaaatgaatgaaagtgtgtcctctggtgatccgttgtcttcccagaacagcaagtcaccccaaatcaaaactaagcagttgcgggactatgaacttgattttctagttgccatattgggattgcttgtgaaccttgtggagaaggatagccttaatagggtacgacttgcgaatgctcgtgtttctgttaatctatctcaaaatccagatagcaaagaggtacagagggatgtcatacccctgctctgttcaatattcttagcgagtcaaggtaccggggaaactgctgaagctatatcaccggggaggttgatgcgaacagatttctatctctggtcatatgatttgtacatacactatcaagcactcaagtacccaactcgac

SEQ ID NO: 9922 - DNA, 2603 bp, Zea Mays
ctgagcctgcagcccagctgcccgttccaactcctttccaaatccgccgcaacgcgaagcaaacgacgcctgaacggtcccaaaacccacaccgccacacggccacgcccagttctcccctctctcgctgcgcatcgacgacggcgagggcgccatgatcgtgcgcacgtacaggcgtagatcccgttccatctccgaaggcgggggcggggtctcgtcctcgcaggaggcgttcgacttcgatgccgacgtcgacgtgctgggatcgtcggcctcgcagccgctcccgccatcgcaggaatcctcctcgatgtgggatttcgacgaggacccgcctccgtccccgccgcggcccgggaaggaggggaggcgaagcgggcggggcggagccagaagaggaggagggttggagctcgcggaagctcccgcgatggcgccgacggtgacgctgatggaggcggaggagtacggagagatgatggagagcgtggacgacgtcacgttcgcgctcgacgggctccgccccgccgcgcagaagcggacgcggcgggccagcctgctcgcgctgctcgggatctgcgactccgccgagcgccgccgcgtgcttcggtcccaaggattggtacagcaaattatcgatgctattttggttctggacattgatgatcctccctgcgctattgctgcaggagctcttttatttgttttggcaagtgatgtccaagacaataatttgctgtcttcagaaacttgtgtccatttcctcctcaaattattaaaccctccggtgaatgttgttgatgccaaagcaccatcaataggttccaaacttcttggaatcagtaaatttcagatgcttaacggttccaataaggatgtggactcttgttcagaggacatacttttaaaagttgaagaaatcctcttaagctgcaaagagatcaaaccagcagacagggattataagagaacaacaaggccggaactatgttcaaagtggcttgctttgttgacaatggaaaaggcgtgcttgtctgctgttgcattagaggatacatctgacatggtcttagaactcggaggaaatttcaaagaaacattaaggcagttgggtggccttgatgatatttttaatgtcatggtgaattgccattcagaattggagaaacttgtaaaggatgcctccactacggttgtggagggaaaagaaggtgctcctctacaaagcaccacactcctcttgaaatgtttgaaaattttggagaatgccacatttctaagtgacaacaacaagacccatttgctcagcatgagtcgaaaattgagccctaaatgccgctcactttcttttgttggtgtcattctcaacattgttgagttactatcagctctctctctccttcagaaaccttccactgtttcaagaaaagcagatccaaaaaatactaaagtttgcaacggggcctgctctgcagacagtagaggtttgagcttattgaatcatcattgcaagtgcaataactcaaagaaaaagagcattttactgaaccgaaggtgccagtattgttcatccaccaaatcagaagcttctcatgttaccctctcttctagtagtgatgtcagtcagtcagaaaggatactcaattgctcatctttttcaagcaatgggacatcaagtggttcatttggagtgaaacatattaatggtgctagtttgaagctcaatgtaagaatggatcgttctaaagcttatccagtcagaggctcaactggttggatttctatgaaagcacaaacttctgattggaactccagagaaatggcaaaaaagcggcgcctatctgaaaatgtacgcactgatttgagtaatggtggtgatgatccatttgcatttgatgatattgatcaagaaccttcaaattgggatctatttggtccaaaaaggaaatcaccacagaagcgagcgaaaagaactaatggagaagtgttggatgattgtggaactgcattaatgggaagtcctaaattatgtcaacctgaagatatttatcagtcagttgcaacttctggttctaaggttgtagatgagtccaatcttttggaggattgccttttggcgtcagttaaggttcttatgaacttggcaaatgacaacccgtctggttgcgaacagatcgcgtcatgtggcggacttaataacatggcctccttgatcattaaacatttcccctcatttgatttctccatgaacagtaacaatcaaatgaatgaaagtgtgtcctctggtgatccgttgtcttcccagaacagcaagtcaccccaaatcaaaactaagcagttgcgggactatgaacttgattttctagttgccatattgggattgcttgtgaaccttgtggagaaggatagccttaatagggtacgacttgcgaatgctcgtgtttctgttaatctatctcaaaatccagatagcaaagaggtacagagggatgtcatacccctgctctgttcaatattcttagcgagtcaaggtaccggggaaactgctgaagctatatcaccggctatggtcacggattggactgtccacctcagttctctat

SEQ ID NO: 9923 - DNA, 2519 bp, Zea Mays
ctgagcctgcagcccagctgcccgttccaactcctttccaaatccgccgcaacgcgaagcaaacgacgcctgaacggtcccaaaacccacaccgccacacggccacgcccagttctcccctctctcgctgcgcatcgacgacggcgagggcgccatgatcgtgcgcacgtacaggcgtagatcccgttccatctccgaaggcgggggcggggtctcgtcctcgcaggaggcgttcgacttcgatgccgacgtcgacgtgctgggatcgtcggcctcgcagccgctcccgccatcgcaggaatcctcctcgatgtgggatttcgacgaggacccgcctccgtccccgccgcggcccgggaaggaggggaggcgaagcgggcggggcggagccagaagaggaggagggttggagctcgcggaagctcccgcgatggcgccgacggtgacgctgatggaggcggaggagtacggagagatgatggagagcgtggacgacgtcacgttcgcgctcgacgggctccgccccgccgcgcagaagcggacgcggcgggccagcctgctcgcgctgctcgggatctgcgactccgccgagcgccgccgcgtgcttcggtcccaaggattggtacagcaaattatcgatgctattttggttctggacattgatgatcctccctgcgctattgctgcaggagctcttttatttgttttggcaagtgatgtccaagacaataatttgctgtcttcagaaacttgtgtccatttcctcctcaaattattaaaccctccggtgaatgttgttgatgccaaagcaccatcaataggttccaaacttcttggaatcagtaaatttcagatgcttaacggttccaataaggatgtggactcttgttcagaggacatacttttaaaagttgaagaaatcctcttaagctgcaaagagatcaaaccagcagacagggattataagagaacaacaaggccggaactatgttcaaagtggcttgctttgttgacaatggaaaaggcgtgcttgtctgctgttgcattagaggatacatctgacatggtcttagaactcggaggaaatttcaaagaaacattaaggcagttgggtggccttgatgatatttttaatgtcatggtgaattgccattcagaattggagaaacttgtaaaggatgcctccactacggttgtggagggaaaagaaggtgctcctctacaaagcaccacactcctcttgaaatgtttgaaaattttggagaatgccacatttctaagtgacaacaacaagacccatttgctcagcatgagtcgaaaattgagccctaaatgccgctcactttcttttgttggtgtcattctcaacattgttgagttactatcagcagacagtagaggtttgagcttattgaatcatcattgcaagtgcaataactcaaagaaaaagagcattttactgaaccgaaggtgccagtattgttcatccaccaaatcagaagcttctcatgttaccctctcttctagtagtgatgtcagtcagtcagaaaggatactcaattgctcatctttttcaagcaatgggacatcaagtggttcatttggagtgaaacatattaatggtgctagtttgaagctcaatgtaagaatggatcgttctaaagcttatccagtcagaggctcaactggttggatttctatgaaagcacaaacttctgattggaactccagagaaatggcaaaaaagcggcgcctatctgaaaatgtacgcactgatttgagtaatggtggtgatgatccatttgcatttgatgatattgatcaagaaccttcaaattgggatctatttggtccaaaaaggaaatcaccacagaagcgagcgaaaagaactaatggagaagtgttggatgattgtggaactgcattaatgggaagtcctaaattatgtcaacctgaagatatttatcagtcagttgcaacttctggttctaaggttgtagatgagtccaatcttttggaggattgccttttggcgtcagttaaggttcttatgaacttggcaaatgacaacccgtctggttgcgaacagatcgcgtcatgtggcggacttaataacatggcctccttgatcattaaacatttcccctcatttgatttctccatgaacagtaacaatcaaatgaatgaaagtgtgtcctctggtgatccgttgtcttcccagaacagcaagtcaccccaaatcaaaactaagcagttgcgggactatgaacttgattttctagttgccatattgggattgcttgtgaaccttgtggagaaggatagccttaatagggtacgacttgcgaatgctcgtgtttctgttaatctatctcaaaatccagatagcaaagaggtacagagggatgtcatacccctgctctgttcaatattcttagcgagtcaaggtaccggggaaactgctgaagctatatcaccggctatggtcacggattggactgtccacctcagttctctat

SEQ ID NO: 9924 - DNA, 2471 bp, Zea Mays
ctgagcctgcagcccagctgcccgttccaactcctttccaaatccgccgcaacgcgaagcaaacgacgcctgaacggtcccaaaacccacaccgccacacggccacgcccagttctcccctctctcgctgcgcatcgacgacggcgagggcgccatgatcgtgcgcacgtacaggcgtagatcccgttccatctccgaaggcgggggcggggtctcgtcctcgcaggaggcgttcgacttcgatgccgacgtcgacgtgctgggatcgtcggcctcgcagccgctcccgccatcgcaggaatcctcctcgatgtgggatttcgacgaggacccgcctccgtccccgccgcggcccgggaaggaggggaggcgaagcgggcggggcggagccagaagaggaggagggttggagctcgcggaagctcccgcgatggcgccgacggtgacgctgatggaggcggaggagtacggagagatgatggagagcgtggacgacgtcacgttcgcgctcgacgggctccgccccgccgcgcagaagcggacgcggcgggccagcctgctcgcgctgctcgggatctgcgactccgccgagcgccgccgcgtgcttcggtcccaaggattggtacagcaaattatcgatgctattttggttctggacattgatgatcctccctgcgctattgctgcaggagctcttttatttgttttggcaagtgatgtccaagacaataatttgctgtcttcagaaacttgtgtccatttcctcctcaaattattaaaccctccggtgaatgttgttgatgccaaagcaccatcaataggttccaaacttcttggaatcagtaaatttcagatgcttaacggttccaataaggatgtggactcttgttcagaggacatacttttaaaagttgaagaaatcctcttaagctgcaaagagatcaaaccagcagacagggattataagagaacaacaaggccggaactatgttcaaagtggcttgctttgttgacaatggaaaaggcgtgcttgtctgctgttgcattagaggatacatctgacatggtcttagaactcggaggaaatttcaaagaaacattaaggcagttgggtggccttgatgatatttttaatgtcatggtgaattgccattcagaattggagacccatttgctcagcatgagtcgaaaattgagccctaaatgccgctcactttcttttgttggtgtcattctcaacattgttgagttactatcagctctctctctccttcagaaaccttccactgtttcaagaaaagcagatccaaaaaatactaaagtttgcaacggggcctgctctgacagtagaggtttgagcttattgaatcatcattgcaagtgcaataactcaaagaaaaagagcattttactgaaccgaaggtgccagtattgttcatccaccaaatcagaagcttctcatgttaccctctcttctagtagtgatgtcagtcagtcagaaaggatactcaattgctcatctttttcaagcaatgggacatcaagtggttcatttggagtgaaacatattaatggtgctagtttgaagctcaatgtaagaatggatcgttctaaagcttatccagtcagaggctcaactggttggatttctatgaaagcacaaacttctgattggaactccagagaaatggcaaaaaagcggcgcctatctgaaaatgtacgcactgatttgagtaatggtggtgatgatccatttgcatttgatgatattgatcaagaaccttcaaattgggatctatttggtccaaaaaggaaatcaccacagaagcgagcgaaaagaactaatggagaagtgttggatgattgtggaactgcattaatgggaagtcctaaattatgtcaacctgaagatatttatcagtcagttgcaacttctggttctaaggttgtagatgagtccaatcttttggaggattgccttttggcgtcagttaaggttcttatgaacttggcaaatgacaacccgtctggttgcgaacagatcgcgtcatgtggcggacttaataacatggcctccttgatcattaaacatttcccctcatttgatttctccatgaacagtaacaatcaaatgaatgaaagtgtgtcctctggtgatccgttgtcttcccagaacagcaagtcaccccaaatcaaaactaagcagttgcgggactatgaacttgattttctagttgccatattgggattgcttgtgaaccttgtggagaaggatagccttaatagggtacgacttgcgaatgctcgtgtttctgttaatctatctcaaaatccagatagcaaagaggtacagagggatgtcatacccctgctctgttcaatattcttagcgagtcaaggtaccggggaaactgctgaagctatatcaccggctatggtcacggattggactgtccacctcagttctctat

SEQ ID NO: 9925 - DNA, 2541 bp, Zea Mays
gcttcgcatttgtccccgagccaagaagccaaactgcgaaagcatccgcgagaacacgcgctccgcacgtctgaaatccaagaccatcaccaacccaaagtcttgcgccttgcccggtccccgccttttcggagatcgcacccaatggccggctcaaccaaggtgctggccgccatcctgctcgtcgacctcgtcgccttcggcctcgccatcggcgcggtgcagagccgcccctcggcgaggctggagacggacgagaggcaggagtggacctactgcgtgtaccgcacggacgccgccacggcgctgggcggcgccgcgctcgcgctggtgttcgtgggacaggcggtggccgccgccgccagtcgctgcttctgctgcgggtccgtgctgcggcccggcggcgccagggcctgcgcgctcgtcctcttcatctcctcctggtctgattggacagaattggtcagaacagagaagaggtcatagcttatgtcattggcaataaagaagaccatcaaacttggttgccgtcttctaaatttactggtgttgaaaaaaagtgacctggtcaatgtaatgtttttaacgacatactgggtcaatgaagacttgagtaggtattcgctcagaaaactgcatgttctgacacaggtcgagaaaacccccgaacccctgccccacccatacacagcgacatcgaagcccatgtgagaacgaccacgaccggggctgagccttagacatgtgctttggcgtgggacagacgaggggatttttttaaccacggcctgaaatacgctcccacggggagtcgaacccagaacctgaggagggctactcagaccacctaaccaattcagctagaggccctttcgcgaaaactgcatgtttagatgtggggtctaggctatatctcttaggagtattctaagtgtgatctagtaatataaccattttccttaatttgtctgataaagatgagtagtaaaaactcatatcatttatgcctgcatgaactctaaactgtgcccacgtttaatttgtttgacaaaaatacagagcggtaaaaattcatatcatttatggctgcatgaactccaaactctgcctgtgtttaatttgtccgataaagatgtagagtaataaaattcataccatttatgcctgcatgaactccaaactttgcctgtgcttatgtttcatcaacatttataaatccttccagtgttttttgttttttgtttttgtgcgaaaagacctctagctgagttggttaggtggtctgagtagtatttcttagatcccgagtttgactcctgtgagagcgaattgtatgtgtggggcaggggtttggtgttttcctcgacctgcgtgagaaggtcttcttaattgtaatgctgttggtcttcttaattgtaatgctgttggtcttcttaattgtaatgctgctggggtggtcttaccctccgcaggttgagttttttttctcttttgtctttgatgaagtgaaactgttaagtactaataaactagccaggcatgtgggttgtactgatggcattcaagcataaatatcccaatttagatgtgcatgcactcaattttgcttgtgactacgtgaagttgctgacttgctgccaccatgctgccgatgctggtatgaaatttattggagctattcagtattatgtaataggattgcacatatctcatgatagactaggagtaaagaatgtcacttgtggaagtccataatgctgaccttctgatattgttaagaacctcttaactacttataatttgccattttgtttagctggtgtctgcaaatgtgacttgtccggggaagtttgtgtgagaccttctggaaccaatgaagcattagattaatgttgacgtgaaatctggtcacacatcagcaagagctacgttggcctagcacgtagcagacagaggtcaaaatcactgaggctgaccaacaggactgccgtacagatccgacgctcgttcttggccgagcccacgaacagctcccattaagacccgtctgggagcacagcgggattaaccttggactgggtgacattcgtcatcgctgaggcgtgcttgctagctggtcttttgcaatccgcctaccacactggctaccggaaggtgtttttccagaacccgccggactgcgagacggtgcggaggggcacgttcggagccggcgctgcgtttgcccttttcacctgcgtgctcacctcggcctactactactgcttctccaaggcgcggatctactaccaccgcccggaagccgccatcggcatgactccgttgtaaacagatttaccggtctctctgcagtaacagttttgatagcaactatatatgtctgttaggtttttgcatatattgtgttgggctggtatgtgacagttttttcaggaccatgtatctgactgagttgaactcaatctctactaataattaagatccctctgtagaccgcccccgccccctaaaaccccgcgcccacctccgcccacctgcgca

SEQ ID NO: 9926 - DNA, 2956 bp, Zea Mays
tagggtctattaattatgcttcaggctgcatgttgaattgtctatgcaaatgccctgtccaataaggttcatgtccagcatgcacggtttggtacctttcatgttttattggctgaacataaattgtctgctgaatctgtgcagttcaaatgtgagtttgagtgctaaatgtaaggcaaactgcagcaggattttgttgctgtgttatgtacatgcacttactgaagtgcccttaacgactgtctttatgcaatatgcttatggggctacaagattggttttgatggattatgacaagtctagaagaagtaactccaagaagaggacacattccaattctgatgacggaaagagaaaacggttaaacactaggcatgatgacacatctatgttctctgagccaattgaaaccatctacaggatattgtgcccggtaaaaaagataggcagtgtcttgggaagaggtggtgacattgttaaggcccttagagaggaaactaaagccaagataagggttgctgattccattcctggtgcagatgagagagtaattatcatcttcaattaccaaaatgagcctgaaccgactgatgaagcagctgaagaaaaaaatagtgatggcttagggaacttcaaatcccattgctttgcccaagatgcgttattgaagatacatgataagattgtgtctgatgaaattcatgatgaagtcgccaatgatgaaaagtctgaaagtgcagatgatgtgactgctcgaattttggttcaaggcaatcaagttggctgccttctaggaaaaggtggctccattatacagcaactacgaagtaatactggtgctggaatccgtgtcttgccatctgaaaaccttccccagtgtgcacttaaaagtgatgaactggtgcagatatctggagcaccttcccttgtaagaaaagctctatatgaaatatctactcgtctccatcagcatcctcgtaaggaaaatagacctcttgaagaaataatagatgcaagcacacaaaggaaacgtgaatctccaacactacaacatgaatattcaatgttgccgcacctgcatagtgatcatacacctccaatacccctgcttgatccatatagaagtggaccacaatatcctgttactgaaactgaagagttctctatcagaattctgtgtgcttctgagctcattggttcagttattgggaaaagtggggccaatgttaggcgtgtagagcagcagactggtgctcgcattaaagttcaagagatcgacaaagatgcttctggagaaaggctgatcattatttcatctaatgagataccagctgaaccaatatccccagcaattgaggcactcattttgctccatgataaagttagtgcaccctctgagaaacaccattcaagtacaaggcttgttgtaccatcaagcaaagttggctgtattattggggaaggtggaaaagtgattactgacatgagaagacgaactggggctgaaattcgagtttactcaaaggcagataaaccaaaatacttgtcttttgatgatgaacttgtgcaggttgctgggcctccaactattgcaagaggagccctcacagaaattgcttcgaggcttagaactaggactttgagagatacaagtaccgccaataatcctccaccttttgccccttttgatgatcctcctgttgatatgcctagcagaaagttgtcactatatggagggcctgccactgatccaccgtatggaaggcctgccaatgatccactgtatggaaggcctgccattgatccaccattcggaagacctaccaatgatcgaccatatggaaggactgctgttgctcccccatttggaagacctgccaacgatccaccatatggaaggcctaccaacgatccaccatatggacgaccttccggtagtataccatatggaagaccaaacggaagtgcacctcgtgagccttccgatgcatatcctgtagactacttttctaaaagagaatatcctagtggaagtcctatgtttactagtaatgccccatcagctgcttatgagagatatgcagcacccacacgctttcctactagagaatttccctctgctttcagtcctggtgtagatcatatgcctcatcattcctatcgtgaccatgtgcctactgatagctactctagtaggggtacacagcaattaggcatcacaagaggtggaaattcagatgcttatgactataccgaggctgctggacaaattcatggacgtgaggattacagagaaccgacaagtgctaccggaaggttcttgagcactattgaactaaggattccaaatagttctttggggtctatcgtcggtgctggtggggtcaatctagcagagatccgtcaggtttctggtgcaagactgaggctacatgaggctcatgctggttcttctgagtctgtggtggagatccagggcacactggaccaagcaaaagctgcccagagcctcctgcaaggctttattagtgcaaacagccggcagcaacagcagccctattcttctcgcatgccactttacccaagctggggatagcttctggtctcatggtcgtgtcagaggaaaacagagtcagcagggtttgtcatgtggctgtagatctcggactgcagattagctgtagcgatgatgttgttgaaggaggctgtttaacagtgcaagcaagataacttatacttatgccttaggacaagtaatattgttttcctctgatgaaatacttggtaacgatctgtctctgtatttttatatttgattctgaatgctttgaaccctagtgttacaaaagctgctattttgaggtcagactacggaggccgaataattctgttatctgcagaattgggcaaaaaagcacatcttgctgaggttcctatgtcttcacccatatcgttt

SEQ ID NO: 9927 - DNA, 2167 bp, Zea Mays
agtagccacggactccgacactccgttcaacccccctgcctttttgctctcctgttcaccccttgtgcccgcgctctctcgtggcgacgacttgcgcgaccgccgccaacgccaggcacctaggtcttcgtcggtcctttcttcagagacgagcacccaacagggggctacaagattggttttgatggattatgacaagtctagaagaagtaactccaagaagaggacacattccaattctgatgacggaaagagaaaacggttaaacactaggcatgatgacacatctatgttctctgagccaattgaaaccatctacaggatattgtgcccggtaaaaaagataggcagtgtcttgggaagaggtggtgacattgttaaggcccttagagaggaaactaaagccaagataagggttgctgattccattcctggtgcagatgagagagtaattatcatcttcaattaccaaaatgagcctgaaccgactgatgaagcagctgaagaaaaaaatagtgatggcttagggaacttcaaatcccattgctttgcccaagatgcgttattgaagatacatgataagattgtgtctgatgaaattcatgatgaagtcgccaatgatgaaaagtctgaaagtgcagatgatgtgactgctcgaattttggttcaaggcaatcaagttggctgccttctaggaaaaggtggctccattatacagcaactacgaagtaatactggtgctggaatccgtgtcttgccatctgaaaaccttccccagtgtgcacttaaaagtgatgaactggtgcagatatctggagcaccttcccttgtaagaaaagctctatatgaaatatctactcgtctccatcagcatcctcgtaaggaaaatagacctcttgaagaaataatagatgcaagcacacaaaggaaacgtgaatctccaacactacaacatgaatattcaatgttgccgcacctgcatagtgatcatacacctccaatacccctgcttgatccatatagaagtggaccacaatatcctgttactgaaactgaagagttctctatcagaattctgtgtgcttctgagctcattggttcagttattgggaaaagtggggccaatgttaggcgtgtagagcagcagactggtgctcgcattaaagttcaagagatcgacaaagatgcttctggagaaaggctgatcattatttcatctaatgagataccagctgaaccaatatccccagcaattgaggcactcattttgctccatgataaagttagtgcaccctctgagaaacaccattcaagtacaaggcttgttgtaccatcaagcaaagttggctgtattattggggaaggtggaaaagtgattactgacatgagaagacgaactggggctgaaattcgagtttactcaaaggcagataaaccaaaatacttgtcttttgatgatgaacttgtgcaggctgctggacaaattcatggacgtgaggattacagagaaccgacaagtgctaccgggttcttgagcactattgaactaaggattccaaatagttctttggggtctatcgtcggtgctggtggggtcaatctagcagagatccgtcaggtttctggtgcaagactgaggctacatgaggctcatgctggttcttctgagtctgtggtggagatccagggcacactggaccaagcaaaagctgcccagagcctcctgcaaggctttattagtgcaaacagccggcagcaacagcagccctattcttctcgcatgccactttacccaagctggggatagcttctggtctcatggtcgtgtcagaggaaaacagagtcagcagggtttgtcatgtggctgtagatctcggactgcagattagctgtagcgatgatgttgttgaaggaggctgtttaacagtgcaagcaagataacttatacttatgccttaggacaagtaatattgttttcctctgatgaaatacttggtaacgatctgtctctgtatttttatatttgattctgaatgctttgaaccctagtgttacaaaagctgctattttgaggtcagactacggaggccgaataattctgttatctgcagaattgggcaaaaaagcacatcttgctgaggttcctatgtcttcacccatatcgttt

SEQ ID NO: 9928 - DNA, 3349 bp, Zea Mays
cctgttccttgtgctgggtctttatgtgggctgccgtgatcccatatgggggtcggtcaacggatcccgattccctcagcggtcaggcgggcctcatgcctcatcccctaaccgaacaggagtagccacggactccgacactccgttcaacccccctgcctttttgctctcctgttcaccccttgtgcccgcgctctctcgtggcgacgacttgcgcgaccgccgccaacgccaggcacctaggtcttcgtcggtcctttcttcagagacgagcacccaacagggggctacaagattggttttgatggattatgacaagtctagaagaagtaactccaagaagaggacacattccaattctgatgacggaaagagaaaacggttaaacactaggcatgatgacacatctatgttctctgagccaattgaaaccatctacaggatattgtgcccggtaaaaaagataggcagtgtcttgggaagaggtggtgacattgttaaggcccttagagaggaaactaaagccaagataagggttgctgattccattcctggtgcagatgagagagtaattatcatcttcaattaccaaaatgagcctgaaccgactgatgaagcagctgaagaaaaaaatagtgatggcttagggaacttcaaatcccattgctttgcccaagatgcgttattgaagatacatgataagattgtgtctgatgaaattcatgatgaagtcgccaatgatgaaaagtctgaaagtgcagatgatgtgactgctcgaattttggttcaaggcaatcaagttggctgccttctaggaaaaggtggctccattatacagcaactacgaagtaatactggtgctggaatccgtgtcttgccatctgaaaaccttccccagtgtgcacttaaaagtgatgaactggtgcagatatctggagcaccttcccttgtaagaaaagctctatatgaaatatctactcgtctccatcagcatcctcgtaaggaaaatagacctcttgaagaaataatagatgcaagcacacaaaggaaacgtgaatctccaacactacaacatgaatattcaatgttgccgcacctgcatagtgatcatacacctccaatacccctgcttgatccatatagaagtggaccacaatatcctgttactgaaactgaagagttctctatcagaattctgtgtgcttctgagctcattggttcagttattgggaaaagtggggccaatgttaggcgtgtagagcagcagactggtgctcgcattaaagttcaagagatcgacaaagatgcttctggagaaaggctgatcattatttcatctaatgagataccagctgaaccaatatccccagcaattgaggcactcattttgctccatgataaagttagtgcaccctctgagaaacaccattcaagtacaaggcttgttgtaccatcaagcaaagttggctgtattattggggaaggtggaaaagtgattactgacatgagaagacgaactggggctgaaattcgagtttactcaaaggcagataaaccaaaatacttgtcttttgatgatgaacttgtgcaggttgctgggcctccaactattgcaagaggagccctcacagaaattgcttcgaggcttagaactaggactttgagagatacaagtaccgccaataatcctccaccttttgccccttttgatgatcctcctgttgatatgcctagcagaaagttgtcactatatggagggcctgccactgatccaccgtatggaaggcctgccaatgatccactgtatggaaggcctgccattgatccaccattcggaagacctaccaatgatcgaccatatggaaggactgctgttgctcccccatttggaagacctgccaacgatccaccatatggaaggcctaccaacgatccaccatatggacgaccttccggtagtataccatatggaagaccaaacggaagtgcacctcgtgagccttccgatgcatatcctgtagactacttttctaaaagagaatatcctagtggaagtcctatgtttactagtaatgccccatcagctgcttatgagagatatgcagcacccacacgctttcctactagagaatttccctctgctttcagtcctggtgtagatcatatgcctcatcattcctatcgtgaccatgtgcctactgatagctactctagtaggggtacacagcaattaggcatcacaagaggtggaaattcagatgcttatgactataccgaggtacatccttgacgtgagcttccctcttttgcaaaaggccatcacctaaatttttcattagaagcttgagactttacacatgcctgctccattgcccctgttctgttatgttctgtattaggtggtactcctaaatattgcaaaaaagtcatatgttggtgtcttagctgtcacttctgtggcagcaatgttcaccctataatgtggtcacatggtgcaactcttttcatttgttgtcactcacaacttggttcaatatatatttggcagctgggatgtactctgctgctcttggctttaaccaatttttctttattttgtggcctatcagaaaatctcaagttctgtacatatttaaattttatcattgcacaggctgctggacaaattcatggacgtgaggattacagagaaccgacaagtgctaccgggttcttgagcactattgaactaaggattccaaatagttctttggggtctatcgtcggtgctggtggggtcaatctagcagagatccgtcaggtttctggtgcaagactgaggctacatgaggctcatgctggttcttctgagtctgtggtggagatccagggcacactggaccaagcaaaagctgcccagagcctcctgcaaggctttattagtgcaaacagccggcagcaacagcagccctattcttctcgcatgccactttacccaagctggggatagcttctggtctcatggtcgtgtcagaggaaaacagagtcagcagggtttgtcatgtggctgtagatctcggactgcagattagctgtagcgatgatgttgttgaaggaggctgtttaacagtgcaagcaagataacttatacttatgccttaggacaagtaatattgttttcctctgatgaaatacttggtaacgatctgtctctgtatttttatatttgattctgaatgctttgaaccctagtgttacaaaagctgctattttgaggtcagactacggaggccgaataattctgttatctgcagaattgggcaaaaaagcacatcttgctgaggttcctatgtcttcacccatatcgttt

SEQ ID NO: 9929 - DNA, 3374 bp, Zea Mays
ctgctgttgcaatgttgctcgccctgttccttgtgctgggtctttatgtgggctgccgtgatcccatatgggggtcggtcaacggatcccgattccctcagcggtcaggcgggcctcatgcctcatcccctaaccgaacaggagtagccacggactccgacactccgttcaacccccctgcctttttgctctcctgttcaccccttgtgcccgcgctctctcgtggcgacgacttgcgcgaccgccgccaacgccaggcacctaggtcttcgtcggtcctttcttcagagacgagcacccaacagggggctacaagattggttttgatggattatgacaagtctagaagaagtaactccaagaagaggacacattccaattctgatgacggaaagagaaaacggttaaacactaggcatgatgacacatctatgttctctgagccaattgaaaccatctacaggatattgtgcccggtaaaaaagataggcagtgtcttgggaagaggtggtgacattgttaaggcccttagagaggaaactaaagccaagataagggttgctgattccattcctggtgcagatgagagagtaattatcatcttcaattaccaaaatgagcctgaaccgactgatgaagcagctgaagaaaaaaatagtgatggcttagggaacttcaaatcccattgctttgcccaagatgcgttattgaagatacatgataagattgtgtctgatgaaattcatgatgaagtcgccaatgatgaaaagtctgaaagtgcagatgatgtgactgctcgaattttggttcaaggcaatcaagttggctgccttctaggaaaaggtggctccattatacagcaactacgaagtaatactggtgctggaatccgtgtcttgccatctgaaaaccttccccagtgtgcacttaaaagtgatgaactggtgcagatatctggagcaccttcccttgtaagaaaagctctatatgaaatatctactcgtctccatcagcatcctcgtaaggaaaatagacctcttgaagaaataatagatgcaagcacacaaaggaaacgtgaatctccaacactacaacatgaatattcaatgttgccgcacctgcatagtgatcatacacctccaatacccctgcttgatccatatagaagtggaccacaatatcctgttactgaaactgaagagttctctatcagaattctgtgtgcttctgagctcattggttcagttattgggaaaagtggggccaatgttaggcgtgtagagcagcagactggtgctcgcattaaagttcaagagatcgacaaagatgcttctggagaaaggctgatcattatttcatctaatgagataccagctgaaccaatatccccagcaattgaggcactcattttgctccatgataaagttagtgcaccctctgagaaacaccattcaagtacaaggcttgttgtaccatcaagcaaagttggctgtattattggggaaggtggaaaagtgattactgacatgagaagacgaactggggctgaaattcgagtttactcaaaggcagataaaccaaaatacttgtcttttgatgatgaacttgtgcaggttgctgggcctccaactattgcaagaggagccctcacagaaattgcttcgaggcttagaactaggactttgagagatacaagtaccgccaataatcctccaccttttgccccttttgatgatcctcctgttgatatgcctagcagaaagttgtcactatatggagggcctgccactgatccaccgtatggaaggcctgccaatgatccactgtatggaaggcctgccattgatccaccattcggaagacctaccaatgatcgaccatatggaaggactgctgttgctcccccatttggaagacctgccaacgatccaccatatggaaggcctaccaacgatccaccatatggacgaccttccggtagtataccatatggaagaccaaacggaagtgcacctcgtgagccttccgatgcatatcctgtagactacttttctaaaagagaatatcctagtggaagtcctatgtttactagtaatgccccatcagctgcttatgagagatatgcagcacccacacgctttcctactagagaatttccctctgctttcagtcctggtgtagatcatatgcctcatcattcctatcgtgaccatgtgcctactgatagctactctagtaggggtacacagcaattaggcatcacaagaggtggaaattcagatgcttatgactataccgaggtacatccttgacgtgagcttccctcttttgcaaaaggccatcacctaaatttttcattagaagcttgagactttacacatgcctgctccattgcccctgttctgttatgttctgtattaggtggtactcctaaatattgcaaaaaagtcatatgttggtgtcttagctgtcacttctgtggcagcaatgttcaccctataatgtggtcacatggtgcaactcttttcatttgttgtcactcacaacttggttcaatatatatttggcagctgggatgtactctgctgctcttggctttaaccaatttttctttattttgtggcctatcagaaaatctcaagttctgtacatatttaaattttatcattgcacaggctgctggacaaattcatggacgtgaggattacagagaaccgacaagtgctaccggaaggttcttgagcactattgaactaaggattccaaatagttctttggggtctatcgtcggtgctggtggggtcaatctagcagagatccgtcaggtttctggtgcaagactgaggctacatgaggctcatgctggttcttctgagtctgtggtggagatccagggcacactggaccaagcaaaagctgcccagagcctcctgcaaggctttattagtgcaaacagccggcagcaacagcagccctattcttctcgcatgccactttacccaagctggggatagcttctggtctcatggtcgtgtcagaggaaaacagagtcagcagggtttgtcatgtggctgtagatctcggactgcagattagctgtagcgatgatgttgttgaaggaggctgtttaacagtgcaagcaagataacttatacttatgccttaggacaagtaatattgttttcctctgatgaaatacttggtaacgatctgtctctgtatttttatatttgattctgaatgctttgaaccctagtgttacaaaagctgctattttgaggtcagactacggaggccgaataattctgttatctgcagaattgggcaaaaaagcacatcttgctgaggttcctatgtcttcacccatatcgttt

SEQ ID NO: 9930 - DNA, 2761 bp, Zea Mays
ctcatcccctaaccgaacaggagtagccacggactccgacactccgttcaacccccctgcctttttgctctcctgttcaccccttgtgcccgcgctctctcgtggcgacgacttgcgcgaccgccgccaacgccaggcacctaggtcttcgtcggtcctttcttcagagacgagcacccaacagggggctacaagattggttttgatggattatgacaagtctagaagaagtaactccaagaagaggacacattccaattctgatgacggaaagagaaaacggttaaacactaggcatgatgacacatctatgttctctgagccaattgaaaccatctacaggatattgtgcccggtaaaaaagataggcagtgtcttgggaagaggtggtgacattgttaaggcccttagagaggaaactaaagccaagataagggttgctgattccattcctggtgcagatgagagagtaattatcatcttcaattaccaaaatgagcctgaaccgactgatgaagcagctgaagaaaaaaatagtgatggcttagggaacttcaaatcccattgctttgcccaagatgcgttattgaagatacatgataagattgtgtctgatgaaattcatgatgaagtcgccaatgatgaaaagtctgaaagtgcagatgatgtgactgctcgaattttggttcaaggcaatcaagttggctgccttctaggaaaaggtggctccattatacagcaactacgaagtaatactggtgctggaatccgtgtcttgccatctgaaaaccttccccagtgtgcacttaaaagtgatgaactggtgcagatatctggagcaccttcccttgtaagaaaagctctatatgaaatatctactcgtctccatcagcatcctcgtaaggaaaatagacctcttgaagaaataatagatgcaagcacacaaaggaaacgtgaatctccaacactacaacatgaatattcaatgttgccgcacctgcatagtgatcatacacctccaatacccctgcttgatccatatagaagtggaccacaatatcctgttactgaaactgaagagttctctatcagaattctgtgtgcttctgagctcattggttcagttattgggaaaagtggggccaatgttaggcgtgtagagcagcagactggtgctcgcattaaagttcaagagatcgacaaagatgcttctggagaaaggctgatcattatttcatctaatgagataccagctgaaccaatatccccagcaattgaggcactcattttgctccatgataaagttagtgcaccctctgagaaacaccattcaagtacaaggcttgttgtaccatcaagcaaagttggctgtattattggggaaggtggaaaagtgattactgacatgagaagacgaactggggctgaaattcgagtttactcaaaggcagataaaccaaaatacttgtcttttgatgatgaacttgtgcaggttgctgggcctccaactattgcaagaggagccctcacagaaattgcttcgaggcttagaactaggactttgagagatacaagtaccgccaataatcctccaccttttgccccttttgatgatcctcctgttgatatgcctagcagaaagttgtcactatatggagggcctgccactgatccaccgtatggaaggcctgccaatgatccactgtatggaaggcctgccattgatccaccattcggaagacctaccaatgatcgaccatatggaaggactgctgttgctcccccatttggaagacctgccaacgatccaccatatggaaggcctaccaacgatccaccatatggacgaccttccggtagtataccatatggaagaccaaacggaagtgcacctcgtgagccttccgatgcatatcctgtagactacttttctaaaagagaatatcctagtggaagtcctatgtttactagtaatgccccatcagctgcttatgagagatatgcagcacccacacgctttcctactagagaatttccctctgctttcagtcctggtgtagatcatatgcctcatcattcctatcgtgaccatgtgcctactgatagctactctagtaggggtacacagcaattaggcatcacaagaggtggaaattcagatgcttatgactataccgaggtacatccttgacgtgagcttccctcttttgcaaaaggccatcacctaaatttttcattagaagcttgagactttacacatgcctgctccattgcccctgttctgttatgttctgtattaggtggtactcctaaatattgcaaaaaagtcatatgttggtgtcttagctgtcacttctgtggcagcaatgttcaccctataatgtggtcacatggtgcaactcttttcatttgttgtcactcacaacttggttcaatatatatttggcagctgggatgtactctgctgctcttggctttaaccaatttttctttattttgtggcctatcagaaaatctcaagttctgtacatatttaaattttatcattgcacaggctgctggacaaattcatggacgtgaggattacagagaaccgacaagtgctaccggaaggttcttgagcactattgaactaaggattccaaatagttctttggggtctatcgtcggtgctggtggggtcaatctagcagagatccgtcagttgaactatccagcgtcaaataaaaaaatggaggtagtaatagattttctcattaat

SEQ ID NO: 9931 - DNA, 1596 bp, Zea Mays
cccagcccgagaaaggaggaagaaaaactagaaaccctagcgatgctgcagatccgcctgagcaagattggctcgtcggactccggcggtgccgccgctagcacggcagctggcgccggcgcccccgccgcggttggggcggctgcggcgctcggtggcagcatcctggaatcggtcaccgtggcatgccccgaccacctcgtgatcgcggacctccccgtcgcgaagagcctcggcgccgtcacgacctccgctgccgccgccacgcgcgccatcggccgtcgctcccgtcgcccgctcggggagcgcgtccacatctgctcccgctgcgagttccccatcgccatctacggccgcctcatcccttgtgaacatgccttctgtttatcctgtgcaagaagcgattctagctgctatctttgtgatgagcgcattcagaagatacaaagtgtgaaaatgatggaggggattttcatctgtgctgcaccaatgtgtctcaaatcgttccttaagaaagcagattttgagttccatgtgcctgatgtccatgccaacctcctccaaactaatctagagaaggaagaagaacgcaatgagtcagatgctcctaacatcccctgtgcttctgcaggggatactcaaagacaatctcaaatgcctgaaatgtctactgcacgtgctcctcctccaaggccaggtgtttcacaagatcgtgaagaacgctcccgctaccaccagtccagggagcaaacaccactgaggcctccacccctttcaaaaccaccgttccatggtcgccattcttacccaccaggggatactcaggccgagaacaatccacctcaaggattcgaccggccatacaactgggcttctcaatcacgtcaggagagcccagggaaactttatgatgcctatgaatatgaatcagcctttgatctccaacgcaccattcaattaccctctccagcaagatggaaaccctcagtacttttctgcccctttccagatgccgccgctaccagatactggatcagaccaaggttccatgtcaagtgtccagcctccagttggccctatgagcttccctgaggggcttcagcgcccatgggctatggggatgatgggtaatccatttcacccgatggcccttggtcagggaatggttgatggtgcgggtgatcctcagggtggtggtggccttgccttcatgcaagctggttttgggggcatgcctgatggctccatgaatacaggcatgcccgatagaggtgatggaaggggtgttcgagcacagatgcccacgccaatgcaaatgcagatgtcacttcccccacctccgcctacacaacctccatcaggctcgcagcaaacatttaacaggacttgatatattttgttttgcacgaatcgatggttcctctcaaaattccatgtcaattcattgaggaaactgtaattttatcgtctttggcatgtaacctgtgagaactagatggctcagttctattccctggtttgataggagcctgtgtattatgctgtaactgtcctgtttgaatgaagtgttcccaagttacgaaattttagttcagg

SEQ ID NO: 9932 - DNA, 2674 bp, Zea Mays
cacacaggagtatactctgcagcacggacacgcccggcccgacaagccagccactcttctcgcgtgaagctgccaggacgagaagagagagagggagtgagacacacacagacagagaaagcggaggagactaacgaggcgtgcatgaggaagggggcagtggccgtgatggggagggaggccgcggccgcggtggcggcggagctggaggactcgttggggaacgctgctgctgccgcggcggcggcgcccgtgctgagcccgctgagcgagacgctgtggcgcgacagggcggcggcgggcggggtcctcctcggggacgtgtcggcgcggctggcgtggcgggacctcaccgtgaccgtggcgctcggcaccggcgacacgcaggccgtgctgcagggcctcacgggccacgccgagcccggcaccatcaccgcgctcatgggcccgtccggctccggcaagtccacgctgctcgacgcgctcgccggacgcctcgccgccaacgccttcctcgacgggaccgtcctcctcaacggccgcaaggccaacctctccttcggcgccgcggtacgcacgtcgtcgtcgtcctcgtgtcaccggttcgccgtcggttctgtaaccttgctgcctttcggcagcggcttcgcgatcgcagcacaagatgccatgcatcaagccagcccttgcatctgtggttgttggatcagcagcagtagccatctccggtcaaaatttgggcgacatgctgccttcgctagctgtcgcccgtctgttctcctgatggatcgttctgttgtcaggcctacgtgacgcaagacgacaacctgatcggcacgctgacggtgagggagacgatctcgtactcggcgcgtctccggctccccgacagcatgccgagggaggagaagcaggccctggtggagggcaccatcgccgagatggggctccaggactgcgccgacacggtggtgggcaactggcacctgagggggatcagcggcggcgagaagaggcgggtcagcatcgccctggagatcctcatgaggccccggctgctcttcctggacgagcccaccagcggcctcgacagcgcttcggcgttcttcgtgacgcagacgctgcgggggctggcgagggatggcggccggaccgtcgtagcttcggtccaccagccgagcagcgacgtcttcttgctgttcgactgcctctacctcctgtcaggaggcagaacagtctactttggcaaggcttcagaggcttgcgagttcttcgcgcaagctgggttcccgtgcccgccgatgcgcaacccgtcggaccatttcctccggtgcataaattcggacttcgacagggtgaaggccaccctgaaagggtcgatgaagacgaggttcgaaagatcttacgacgatccgctggagaagatcacgacctcggaggcgatgagcaggctggtcagccactaccagcactcgcagcactacgtcagcgcgcagcagaaagtagacgagatggcccggctcaaagggactgtgctggactctggagggagccaggctagcttcctgatgcaggcgtccacgctcacgaagcggtcgttcgtcaatatgtccagggatttcgggtactactggctgaggctcatcatctatgtcgtcgtcacgatttgcatcgggactatatacttcaatgtcggcaccggctacagctctatcctggcccggggggcatgcgcttccttcatcttcggcttcgtcacgttcatgtcgatcggggggttcccgtcgttcgtggaggacatgaaggtgtttcagagggagaggctgaacgggcactacggcgtggtcgcgttcgtgatcagcaacacggtgtcggcgatgccgttcctggtcctgatcaccctggtgtcgggcacgctgtgctacttcatggtgcgcctgcacccgggcttcacgcactacctcttcttcgtgctggacctctacgccagcgtcaccgtggtggagagcctgatgatggccatcgcgagcgtcatccccaacttcctcatgggcatcatcgtcggcgcggggatccaggggatattcatgctggtgtcgggctacttcaggctcccccacgacatccccaagcccttctggaggtaccccatgtcctacatcagcttccactactgggcgctgcggggccagtaccagaacgacctcaagggcctgctgttcgacggccagcaggacgacgtgctgcccagcaagatccccggcgagttcatcctggagaacgtgttccagatggacgcggggcggtccaagtggctcgacctggccgtgctgctctgcatggtcgtcgtctaccgcctgctcttcttcgccatgatcaaggccgccgaggacgtcaccccccgggtgcgccgccacgtcgcgcgccggcgggtgcggagccggcggcgccagcagccgctgcccgcccggacgccctcgctccgcggttacgtggtccacgccgccgccagcctgccggccgatcacccgtgaacaacgtaaccgtcagttgtactgcaatatatatgatatgcgtgtgttaagttgttagtagcaaccgctttatagctgtaacgaagatgcaatgcaccggtaagatgatgtgtgttatcaccagcttgatgcaagttttt

SEQ ID NO: 9933 - DNA, 2998 bp, Zea Mays
tgctttttctgaccgtaaattctcatgtcgaattgctggtaacagtacgctagtactgttcctttctccccccttaattatttggaggattgtttgcacggaaccaagtcttactagccggagaaagttgcgattcacgctgcgacgaatggacgattgccgaccgacgcctggcaccacgctgagatggacagcgtcgagtacttcaatcttgccgacctctgggaacagtactatgaatggagcgcgtacggcgccggagctacggtgcagctcccaggaggggacagagtagttcagtactatgttccatacctgtcagggatgcagctatacaccaacaagaagttttggtgaagataatggcatggatttatggagtgatgatgaggacaacgagaagatgtcgagatcctggagttccacctctgatgaatcattgttcaactgtgatgtgttatggtccaacaggaagcgtccagggcacctgtactttgagttctttgaagtaggttcaccttatggaagggttcctctcattgacaaggtttatgaactatcccagggctttcctggattgacatcactgaagagtgctgagctttcgcctgttagctggatgtcagttgcctggtaccctatataccacattccttaccagcgcagcgtgaaggacttatctgcatgcttcctaacttaccataccatttcctcctcgtttcaaggtatgttttcctcgttttgtttgaaggcatgtttgttcatcagagtgtcagtcactaaactctaccattttcttaaattcttacggcacaataatttgattattctaatatgcttctgtaccagtgccaaacagacgttgtataaccgttgaaattgttatcaacaatcttcatactttttagggtcttgagttgatttcccttttccgatgtttaggatatatgtgttggcatattggttgaaatttcaaactcaggttgtgcatcaaagcatgactacaggatatagtgacagctccttttgtttagtgcagtattctaataaacatctagtcttctaatacttctgttgtgttgtgacttagaacttatttgcatataaaacattagggcttaatgagtgaaaaagttaccgtttgctcaagctcaaatcccatgatatgtattgcaacattattatcgttcacaggaaagagtatttctcatgtctgtgtacctgagaaaagatttccccgaaccattgatatattgcttaatgtacactaaaaaagaggaatgtcaatctggtggcctagacctaggggtggtaatagatcgtgatccaaatgtttcttcacgatttgttatggccctaaataaattttggttcaaaaatgaatagaattagagtccgatccttaaattttatagtgtaaaatttagagcccattgtcacctctaccaggaccagaagaaaggaatttaaactgttgctttctcattcttcttgtaattggttggttgagtggtctttagttttcaaacaatgaactttatatttggaaaaggtgtaactgatgttcagttacgtttctatatctagaaagtttcctactatataacttaatgatgtgctctatactgcataccagttggtatggcacactattcttaaatcaatcgatggcttagcttacaagagtataagagtttccttcaaagctttgttcgtcttgctatgttgcgtccagtttgtcaactttggtttcaaaaggcttcatgtcttagctttaaagtctgtagttaaggaaaccactcaaacaaaaagttagtggcagcagttctttgctcagtaaagagaaggaaagagaccgtgttgtcatgttccacgacttcattacttatccatagacatgcagttgtttcttgaagctaaaaatacctatgttatataacatggaggaagagttgttcaatagaccatctttggagaaagcttgtttggattgcgatatgtgcaaaagcacctaggttcaccagctgtccttcccaagaaaacaaatgatgatatatagagtccaaatcaagccaagatctttaagcttgaatatgctttgcatgtgaatacattgactttcggtcagttatttgttaatgtatgtccttaatcacggctgcaccagcgatgaccttagtactgttttcaaaccctcagtaacctgtgttatgtttctcacagatcacgggcttgagaccatgaccactgattgttgccatccagttgcaaacggcaaacaaaatggccacatggataagaagagcaacaccgtatcactgcctccatttggcctcgcagcacacaagatacaaggttccctctggaccaaccccatgacaggagaccgcagaaagatggacttcctcttcagtgcggcagactcctggctgaagcagcttggagtccagcatcatgacttcaacttcttcatcactcaccccatgtgaactgctgatccggagtggcttgcaaagaaccacatgggtacagtttgaagctagtgatattacctacccaccaccaacggggtagcaaaacgtttacagtacaatgcgctggtgaaatgagtctaacaatcgcaggatagatttatacttgagtttactgctgcagcgaataccaaacatgtcggcactcaaaaaggttttctgtttcttgtttcttggcagaaaaatgtaactgatctgtacagaagttttgcaactaatttggtatccaatgtgggggttgagctgttgcttgtgaactttagtaccctagagaatgttagttccaggatgaaactgtttacgcagactctagctggacctgaatctgtcgatgacaattagttatcttctacagtaaggcagttgtacgcacacattctcattcagtctgattggatacctgcacatgagcgcgcaggctcggacgaggctgactgtgtggatacaccagttttgagcgtttctgt

SEQ ID NO: 9934 - DNA, 1806 bp, Zea Mays
cacagcgaagctaagcaaagcaaaccgaagccggtttcatatcgcaccccgcaccccgctcctccctcctcctgctccggctcccttcctccacagctcgaataaagtcccctcctcttccagtcttcctcctccgcgctccaatcttcccagcggcacggtttcggttcttgcagggtagcacggaggttccttcgttgggggttcttggtctgccttgagcgatttggtgcgccgcggattgttgtggggttgtgagttgtgactgcagagacaagggccgtgtggagagtcgagccatcgaggtcgaggaggagggaaaggaaaaggggggcgcatgggcggccagtggctgggggaggggatgccgtcgtccaacctgcagtgcttcttggactgcaccacccccaccgtcgagacgcacattctccccaagacgaatggacgattgccgaccgacgcctggcaccacgctgagatggacagcgtcgagtacttcaatcttgccgacctctgggaacagtactatgaatggagcgcgtacggcgccggagctacggtgcagctcccaggaggggacagagtagttcagtactatgttccatacctgtcagggatgcagctatacaccaacaaggtcctgactgcatccagttttggtgaagataatggcatggatttatggagtgatgatgaggacaacgagaagatgtcgagatcctggagttccacctctgatgaatcattgttcaactgtgatgtgttatggtccaacaggaagcgtccagggcacctgtactttgagttctttgaagtaggttcaccttatggaagggttcctctcattgacaaggtttatgaactatcccagggctttcctggattgacatcactgaagagtgctgagctttcgcctgttagctggatgtcagttgcctggtaccctatataccacattccttaccagcgcagcgtgaaggacttatctgcatgcttcctaacttaccataccatttcctcctcgtttcaagatcacgggcttgagaccatgaccactgattgttgccatccagttgcaaacggcaaacaaaatggccacatggataagaagagcaacaccgtatcactgcctccatttggcctcgcagcacacaagatacaaggttccctctggaccaaccccatgacaggagaccgcagaaagatggacttcctcttcagtgcggcagactcctggctgaagcagcttggagtccagcatcatgacttcaacttcttcatcactcaccccatgtgaactgctgatccggagtggcttgcaaagaaccacatgggtacagtttgaagctagtgatattacctacccaccaccaacggggtagcaaaacgtttacagtacaatgcgctggtgaaatgagtctaacaatcgcaggatagatttatacttgagtttactgctgcagcgaataccaaacatgtcggcactcaaaaaggttttctgtttcttgtttcttggcagaaaaatgtaactgatctgtacagaagttttgcaactaatttggtatccaatgtgggggttgagctgttgcttgtgaactttagtaccctagagaatgttagttccaggatgaaactgtttacgcagactctagctggacctgaatctgtcgatgacaattagttatcttctacagtaaggcagttgtacgcacacattctcattcagtctgattggatacctgcacatgagcgcgcaggctcggacgaggctgactgtgtggatacaccagttttgagcgtttctgt

SEQ ID NO: 9935 - DNA, 1788 bp, Zea Mays
ctccaccaatctcatcctcaacccggacggcggtcacggcgcacgcgagcagggttgctcacgaatcgcaggatcgcgggcagacggcggaccgaaagaagaatgtcgcacgtggccatgtctcggccgcgccccgctcctccgtcacagcctcatagtcacaggctcccagcctcccgcgtccggagtccggatccggacacgcgctcgaggccacccgcgctgtcccgcctccggcagcgatggcggccgccgcgcgccccgcgtccgcccacctcctcctcctcgccccgctcccttctcctccccgcctttcgcatctcatccacacccgcagactctacgcactcgcccccgcccgccgccctgcggccgcgcgcgcgcgccgcgaatcctctcctccctccgcgccctcccctcctgccccggctgactcgctcgattgcgtcggaactggctcggatgtcgagtgcttcgtcgacgccggcgccgaagacgccgctcccctccttcccgcgctctccgcaggcgcgtcaaaggacgatgggaagagcgagggcgacgcggcggtttcggcttcccctacggggagggagctcttggagtgggcatctctggtgtcgcccttcttcttctggggcacggctatggtggccatgaagggggtcataccccgcacgggtcccttcttcgtcgccgcgatacgcctgctccccgcgggcgcactgctagttgccttcgccgccgcgcgcggcaggaagcagccctccggctgggaggcctggctcgccatcgctgcgttcggactcatcgacgcggcctgcttccagggctttctcgcggagggactgcagaagacatcggctgggctcgggagcgtcatcattgactcgcagccattgacggttgctatccttgcatcactgctctttggagagtcgattggcgcgataggagttggaggactcgtgttgggcgtcgtggggctcttgcttctggaggttccagcactgtcagttgaaggaaatgacacaacaatctggggaagcggggaatcgttgatgttcctctcagctcaaagcatggcagtcggaactatcatggtccgctgggtgtcaaagtactctgatccaattatggcaacaggatggcacatgattattggtgggcttcctttgctagtgatatctgttcttaatcatgatcctgctctgagtggccatattcaagatcttacatggagcgacatattagcacttggttatacatctatatttggcagtgctgtcagctacggtgtatacttttacaatgctactaggggtagcttaaccacacttagttctctcactttcttgacccccatgtttgcatccgttttcgggtacctgtacctgggtgagaccttctcaacagtacagattggtggtgcgcttctcacactggttgccatctacatggttaactacaaaagcattataggtacttagggcaatatgagctactgaatgttttatagaactggtggcggattacaggactggaggattagtctagaccagaagtctagtacaggcaaaagggattctactgagttggttaggtggtctgagtaatacttctcaggtcttgaatttgaatttcagtggaagtgaatttcagtctaaggttaaaaaaaggtcactcgttggttcctttagttgtgtacacacgagatagactgatctatgtggttgaattcttgtgtaggggttgaaagggttcaaagcacgagtaaatatatagcct

SEQ ID NO: 9936 - DNA, 2040 bp, Zea Mays
ctcaacccggacggcggtcacggcgcacgcgagcagggttgctcacgaatcgcaggatcgcgggcagacggcggaccgaaagaagaatgtcgcacgtggccatgtctcggccgcgccccgctcctccgtcacagcctcatagtcacaggctcccagcctcccgcgtccggagtccggatccggacacgcgctcgaggccacccgcgctgtcccgcctccggcagcgatggcggccgccgcgcgccccgcgtccgcccacctcctcctcctcgccccgctcccttctcctccccgcctttcgcatctcatccacacccgcagactctacgcactcgcccccgcccgccgccctgcggccgcgcgcgcgcgccgcgaatcctctcctccctccgcgccctcccctcctgccccggctgactcgctcgattgcgtcggaactggctcggatgtcgagtgcttcgtcgacgccggcgccgaagacgccgctcccctccttcccgcgctctccgcaggcgcgtcaaaggacgatgggaagagcgagggcgacgcggcggtttcggcttcccctacggggagggagctcttggagtgggcatctctggtgtcgcccttcttcttctggggcacggctatggtggccatgaagggggtcataccccgcacgggtcccttcttcgtcgccgcgatacgcctgctccccgcgggcgcactgctagttgccttcgccgccgcgcgcggcaggaagcagccctccggctgggaggcctggctcgccatcgctgcgttcggactcatcgacgcggcctgcttccagggctttctcgcggagggactgcagaagacatcggctgggctcgggagcgtcatcattgactcgcagccattgacggttgctatccttgcatcactgctctttggagagtcgattggcgcgataggagttggaggactcgtgttgggcgtcgtggggctcttgcttctggaggttccagcactgtcagttgaaggaaatgacacaacaatctggggaagcggggaatcgttgatgttcctctcagctcaaagcatggcagtcggaactatcatggtccgctgggtgtcaaagtactctgatccaattatggcaacaggatgggtatattatccatagatgaataatcatccatgttatgtcttagtttgtgtcacatgcaccaaagctctgttttgctatcggttatattgtttcaacttagcctttctgtgatctattttggctaatgattttgcatgtttcctagaattttaatttagttagttcattctgcagaacgcgatgtatatatcatttcttgttattataattgcaaagattattgcatactcatgtagctcccataatattacccatgtagttgaaggcagatgcataaatttcaaaacagaattgcatttgttattttgttgatattcctaaaggtacctaggccttccaacttgtttaagattccatcggaatgaagatgttacatttaatccatgttgttgaaatttccacccttttatgggatggtccttgcaattagtaccaaatctggcattacatcattattattataatactaatatcaacattatgacagcacatgattattggtgggcttcctttgctagtgatatctgttcttaatcatgatcctgctctgagtggccatattcaagatcttacatggagcgacatattagcacttggttatacatctatatttggcagtgctgtcagctacggtgtatacttttacaatgctactaggggtagcttaaccacacttagttctctcactttcttgacccccatgtttgcatccgttttcgggtacctgtacctgggtgagaccttctcaacagtacagattggtggtgcgcttctcacactggttgccatctacatggttaactacaaaagcattataggtatccaccattactagcagtgtttcaaaggcatcacctagtcgtccatgcgtgcccagcactatgcctagtcaccttttaaacaca

SEQ ID NO: 9937 - DNA, 1570 bp, Zea Mays
cctccaccaatctcatcctcaacccggacggcggtcacggcgcacgcgagcagggttgctcacgaatcgcaggatcgcgggcagacggcggaccgaaagaagaatgtcgcacgtggccatgtctcggccgcgccccgctcctccgtcacagcctcatagtcacaggctcccagcctcccgcgtccggagtccggatccggacacgcgctcgaggccacccgcgctgtcccgcctccggcagcgatggcggccgccgcgcgccccgcgtccgcccacctcctcctcctcgccccgctcccttctcctccccgcctttcgcatctcatccacacccgcagactctacgcactcgcccccgcccgccgccctgcggccgcgcgcgcgcgccgcgaatcctctcctccctccgcgccctcccctcctgccccggctgactcgctcgattgcgtcggaactggctcggatgtcgagtgcttcgtcgacgccggcgccgaagacgccgctcccctccttcccgcgctctccgcaggcgcgtcaaaggacgatgggaagagcgagggcgacgcggcggtttcggcttcccctacggggagggagctcttggagtgggcatctctggtgtcgcccttcttcttctggggcacggctatggtggccatgaagggggtcataccccgcacgggtcccttcttcgtcgccgcgatacgcctgctccccgcgggcgcactgctagttgccttcgccgccgcgcgcggcaggaagcagccctccggctgggaggcctggctcgccatcgctgcgttcggactcatcgacgcggcctgcttccagggctttctcgcggagggactgcagaagacatcggctgggctcgggagcgtcatcattgactcgcagccattgacggttgctatccttgcatcactgctctttggagagtcgattggcgcgataggagttggaggactcgtgttgggcgtcgtggggctcttgcttctggaggttccagcactgtcagttgaaggaaatgacacaacaatctggggaagcggggaatcgttgatgttcctctcagctcaaagcatggcagtcggaactatcatggtccgctgggtgtcaaagtactctgatccaattatggcaacaggatggcacatgattattggtgggcttcctttgctagtgatatctgttcttaatcatgatcctgctctgagtggccatattcaagatcttacatggagcgacatattagcacttggttatacatctatatttggcagtgctgtcagctacggtgtatacttttacaatgctactaggggtagcttaaccacacttagttctctcactttcttgacccccatgtttgcatccgttttcgggtacctgtacctgggtgagaccttctcaacagtacagattggtggtgcgcttctcacactggttgccatctacatggttaactacaaaagcattataggtatccaccattactagcagtgtttcaaaggcatcacctagtcgtccatgcgtgcccagcactatgcctagtcaccttttaaacaca

SEQ ID NO: 9938 - DNA, 2033 bp, Zea Mays
accaatctcatcctcaacccggacggcggtcacggcgcacgcgagcagggttgctcacgaatcgcaggatcgcgggcagacggcggaccgaaagaagaatgtcgcacgtggccatgtctcggccgcgccccgctcctccgtcacagcctcatagtcacaggctcccagcctcccgcgtccggagtccggatccggacacgcgctcgaggccacccgcgctgtcccgcctccggcagcgatggcggccgccgcgcgccccgcgtccgcccacctcctcctcctcgccccgctcccttctcctccccgcctttcgcatctcatccacacccgcagactctacgcactcgcccccgcccgccgccctgcggccgcgcgcgcgcgccgcgaatcctctcctccctccgcgccctcccctcctgccccggctgactcgctcgattgcgtcggaactggctcggatgtcgagtgcttcgtcgacgccggcgccgaagacgccgctcccctccttcccgcgctctccgcaggcgcgtcaaaggacgatgggaagagcgagggcgacgcggcggtttcggcttcccctacggggagggagctcttggagtgggcatctctggtgtcgcccttcttcttctggggcacggctatggtggccatgaagggggtcataccccgcacgggtcccttcttcgtcgccgcgatacgcctgctccccgcgggcgcactgctagttgccttcgccgccgcgcgcggcaggaagcagccctccggctgggaggcctggctcgccatcgctgcgttcggactcatcgacgcggcctgcttccagggctttctcgcggagggactgcagaagacatcggctgggctcgggagcgtaaggcgaaatccaaactccggccctgttctttatctcatcaggtcatcattgactcgcagccattgacggttgctatccttgcatcactgctctttggagagtcgattggcgcgataggagttggaggactcgtgttgggcgtcgtggggctcttgcttctggaggttccagcactgtcagttgaaggaaatgacacaacaatctggggaagcggggaatcgttgatgttcctctcagctcaaagcatggcagtcggaactatcatggtccgctgggtgtcaaagtactctgatccaattatggcaacaggatggcacatgattattggtgggcttcctttgctagtgatatctgttcttaatcatgatcctgctctgagtggccatattcaagatcttacatggagcgacatattagcacttggttatacatctatatttggcagtgctgtcagctacggtgtatacttttacaatgctactaggggtagcttaaccacacttagttctctcactttcttgacccccatgtttgcatccgttttcgggtacctgtacctgggtgagaccttctcaacagtacagattggtggtgcgcttctcacactggttgccatctacatggttaactacaaaagcattataggtgagaaataagaggctatcacctacttgtgcgacgtttatcacataagggtggttgggtgctgcatgcggcacctattgccacttgttgggttcaggaatctgaagattaagtacagtcatgaagactcgggcaaattatcagattggagagagatgtgctctttttcaggtctagactgtaaatgcagtataaagtggcacaaaaccaaataggtttcatcagctccttcgacaatcctattagattgcctggttatgtctacttctaggttacccagcaacctgtatctctgttatgcgtagctgagagaattataatttataggatgtttccgaattgtagttgctacgtattattatctagggaggtaggggatgccccccccccccccccccccaaacaacccgtgttgcaatggtcagaaacatggaatcagtttcaaggaagaaggaaggctcgtttgtctatgaatctgctccgttttttaaataattactagattttttgc

SEQ ID NO: 9939 - DNA, 1824 bp, Zea Mays
gcgtgcccagtgtctgacaacgcgccccaaccccaaccccaacccagcggtcccagtcccccctccgttctctctgcactctgcagctgccggtgccggccatggcgcgcgccccgagctcgtggacgccgtccctcgccatggtgctcctcgtcgtggccgccgcggccgtggtcgcgtcgtcggaggcggccagggtgcccgccgccgtcggcaactggacgggggaggagctgcgcggggccgcggcgaggcggggcggccggcgctcccggcgccgcgcgttcgagaacggcctcggccggacgccgcagatggggtggaatagctggaaccacttcggctgcgggatcaacgagaacctcatcaagcagacagctgatgcgctggtcaacaccggtctggcgaagctgggctacgagtatgtcaacatagatgattgctgggcggagtctgacagggactaccaggtaaaccggatcaagtttgcccctgcagacgcagcacgctaacccgctaaccaccgccgcaatcgttttcagcactaataatggggagagaggaacttgtagaaagcacaatcgtaaatggagaggaactcgtcattatctggctcctagagaactctaaaaccttttttttagatgcatatatgctaatcaggattttaaaaacagaaagaactagtatgtggactgttttggagttataatgagtgattgaagtcatttccccccctcttattcttacaggatgactacatttcactttagtactgccggtccgtcgctgctgagtactgacgaaatgctgcgttgctattttctcagggaagcttcgttgcaaacagacaaaccttcccctctggcatcaaggcgctcgcggactacgtgcacgccaaggggctcaagcttggcatctacagcgatgctgggacacggacgtgcagccagaaaatgccagggtcacttgaccacgaggagcaggacgtgaagacattctcgtcctggggtatcgattatctgaaatacgacaactgcaacgacgccggcaggagcgtcatggagaggtatacgaagatgagcaacgctatgaagacgtatgggaagggcatcttcttctcgctgtgcgaatgggggaggcaaaaccctgctacctgggcaggcggcatggggaacagctggagaacgaccgatgatatcgccgacaactggggcagcatgacgtctcgtgcagaccagaacgacaggtgggcttcctacgccggacctggcgggtggaacgatcctgacatgcttgaggtgggcaacggcggcatgtccgaggcggagtaccgctctcacttcagcatctgggcgctcgccaaggctccgcttctgatcgggtgcgacgtgcgggcgatgagccagcagacgatgggcatactcagcaactcggaagtcatcgccgtgaaccaagatagccaaggtgcgcagggaaagaaagtgcagtccagcaatggcttggaggtttgggctgggccgctcagcaacaacaggaaggccgtggttctctggaaccggcagggataccaggcaaccatcaccgcgcagtggtcgagcatcgggctcgcttcttccactgctgtcactgctcgcgatctatgggcgcactcgtcgttctcggctcaaggccagctatcagcttcggtgccacctcacgactgcaagatgtatgtcttgacgccgaactagctcagaagacaagagcggattgttccatggcgcgtgggatgcaaccattcggtcaggattcagggaagaagagtatgcaggcaaggatttc

SEQ ID NO: 9940 - DNA, 1392 bp, Zea Mays
aagcagggcacatgctgacatgccccgtgaccgtgccgttgtatcagaataatgccaaggagatgctgatgcgctggtcaacaccggtctggcgaagctgggctacgagtatgtcaacatagatgattgctgggcggagtctgacagggactaccagggaagcttcgttgcaaacagacaaaccttcccctctggcatcaaggcgctcgcggactacgtgcacgccaaggggctcaagcttggcatctacagcgatgctgggacacggacgtgcagccagaaaatgccagggtcacttgaccacgaggagcaggacgtgaagacattctcgtcctggggtatcgattatctgaaatacgacaactgcaacgacgccggcaggagcgtcatggagaggtatacgaagatgagcaacgctatgaagacgtatgggaagggcatcttcttctcgctgtgcgaatgggggaggcaaaaccctgctacctgggcaggcggcatggggaacagctggagaacgaccgatgatatcgccgacaactggggcagcatgacgtctcgtgcagaccagaacgacaggtgggcttcctacgccggacctggcgggtggaacgatcctgacatgcttgaggtgggcaacggcggcatgtccgaggcggagtaccgctctcacttcagcatctgggcgctcgccaaggctccgcttctgatcgggtgcgacgtgcgggcgatgagccagcagacgatgggcatactcagcaactcggaagtcatcgccgtgaaccaagatagccaaggtgcgcagggaaagaaagtgcagtccagcaatggcttggaggtttgggctgggccgctcagcaacaacaggaaggccgtggttctctggaaccggcagggataccaggcaaccatcaccgcacagtggtcgagcatcgggctcgcttcttccactgctgtcactgctcgcgatctatgggcgcactcgtcgttctcggctcaaggccagctatcagcttcggtgccacctcacgactgcaagatgtatgtcttgacgccgaactagctcagaagacaagagcggattgttccatggcgcgtgggatgcaaccattcggtcaggattcagggaagaagagtatgcagtgcaggcaaggatttcaagagaaggaaattcgatatcatttggttatacaggatatgagtgcgaatggaggaataatttatactaatactatggaagtgtatctaaggcgccgtcaaaatgccggtgcctgtgttactggatgtttgtaacgagagttgcagcaataaaattggcttgcccaccaccctttttacgagcatgtggacggatttcagagaacaagagaatatagaaaatgtgcgttctctgtg

SEQ ID NO: 9941 - DNA, 1429 bp, Zea Mays
aagcagggcacatgctgacatgccccgtgaccgtgccgttgtatcagaataatgccaaggagatggtaccttagcgtaaaccttctccagtcagcaattcgtctgatgcgctggtcaacaccggtctggcgaagctgggctacgagtatgtcaacatagatgattgctgggcggagtctgacagggactaccagggaagcttcgttgcaaacagacaaaccttcccctctggcatcaaggcgctcgcggactacgtgcacgccaaggggctcaagcttggcatctacagcgatgctgggacacggacgtgcagccagaaaatgccagggtcacttgaccacgaggagcaggacgtgaagacattctcgtcctggggtatcgattatctgaaatacgacaactgcaacgacgccggcaggagcgtcatggagaggtatacgaagatgagcaacgctatgaagacgtatgggaagggcatcttcttctcgctgtgcgaatgggggaggcaaaaccctgctacctgggcaggcggcatggggaacagctggagaacgaccgatgatatcgccgacaactggggcagcatgacgtctcgtgcagaccagaacgacaggtgggcttcctacgccggacctggcgggtggaacgatcctgacatgcttgaggtgggcaacggcggcatgtccgaggcggagtaccgctctcacttcagcatctgggcgctcgccaaggctccgcttctgatcgggtgcgacgtgcgggcgatgagccagcagacgatgggcatactcagcaactcggaagtcatcgccgtgaaccaagatagccaaggtgcgcagggaaagaaagtgcagtccagcaatggcttggaggtttgggctgggccgctcagcaacaacaggaaggccgtggttctctggaaccggcagggataccaggcaaccatcaccgcacagtggtcgagcatcgggctcgcttcttccactgctgtcactgctcgcgatctatgggcgcactcgtcgttctcggctcaaggccagctatcagcttcggtgccacctcacgactgcaagatgtatgtcttgacgccgaactagctcagaagacaagagcggattgttccatggcgcgtgggatgcaaccattcggtcaggattcagggaagaagagtatgcagtgcaggcaaggatttcaagagaaggaaattcgatatcatttggttatacaggatatgagtgcgaatggaggaataatttatactaatactatggaagtgtatctaaggcgccgtcaaaatgccggtgcctgtgttactggatgtttgtaacgagagttgcagcaataaaattggcttgcccaccaccctttttacgagcatgtggacggatttcagagaacaagagaatatagaaaatgtgcgttctctgtg

SEQ ID NO: 9942 - DNA, 2007 bp, Zea Mays
aacaacacacggttctcattggcctttcacattatgtagacgacaatttccaataaagatggaaattactccaatatcacaactacgtccaggaaagttaaattatgctttacatgtgcgaatatctagaatgtgggagtttagaggcacaaatgaacagaacgacatcaaacaccttgaccttgttctcatcgatcaaaagggaaattcaatatatgcagagattccaccagatgcaattgctgtcttaaaaagccacatctacacgaaaaaaagattgtatacatatccaaaataacaattgaacgagctaaactgggattcagagttgttgacaatccttatatggtaaagctcaacaagagaaccattgtgcttgaagataaggatcaaattcaaggttttcctaaatatacattctcactaacacccttagataagttggaccaatacaaaaacaagaccgatcgttttatagatgtcattgctaagatcagtggagtatcaaatgtagcaaaggttcctacaacctcaggagatcagcaaatgaggagagttgtattattagaagaccttaagggaaacatgattgagctatcactatcaggaaaaagagctttggaatttgacggagatcaagttttagatgtgggtcagcaacatcatgttattgcaatatttgtaggaaccttagtcaaactttacaaaggtgaatatacattcttgagtggaacatcagcatgccggtggtacatcaacgaaaatgacattgctgaaatcaaggctttccagaaaagtttgccaagtgaacctgtacctatcaaaaagacctatctccaaaatgatgatgcaactcacaaatttgaggagaaaagtctggaacagctcaagcatgtagaccctttccttgacatgggacaaagatatcagtgcacagctactataattggtatcacagaaaaccaaacatggtgttacaaagcatgcaagatctgtaactcagcaatcattcaaaaggaaaatggttataaatgcacaaaggaaggatgtccatctacacaatttgaatggaagtacaagataccattcattgcaagtgaccacacctataatctagagtttatgttctttgaaaaaaagggaatggagcttataggaaagagtgcatcgactcttcgaaaacaatatgaaccaaaggagataccaccggatataacatcttggataggttataaattcacttttgttgttagagtcctatcaaagaaaagtgtcaagactattgatccatcctttgaagtgcttatgataaaagaaaaataccagaaggaacctattatatcatttatcagctcaagtggagttgtaccagcagaatcatcttcctctacaatggcagaatacaaggaattaccattgctagtgccaattacctccaaagacatagaaaaaaaggagcgatccacttcacaaccagaacacaccgaagaaactcaagatatggacattgaaccatctggcatttgggaagaatctcagatttcaaacaaaagaagctttggagacccaaactatgacaaacaagaaacaactgatgacaaagatgaccttccacaattcaagaaaatcaggagtacccactctcaaggaaaaagcaaaaaatgatgcatgatagactaagaagacaaagtaaagtagtagactttaaaagatcttgactaaagtaatatatctatattttctgtttcgataaacaacgatagcgctagtgctacatcttttaatgtatataaccatgtagtatcaatagcgctacatcttaagcgtgtagcaccagcagcgctacatattttgatgtatataagcatgtagcatcaatagcgctacatcttttgttaaatataagcacatcttttgatatatataagcatgtagcatcaatagtgctagctatggtgctaatcttacattatatggcgtatatgttagttaatatctaacgttgat

SEQ ID NO: 9943 - DNA, 1507 bp, Zea Mays
ggaacttcacaaagcaaaggttcctacaacctcaggagatcagcaaatgaggagagttgtattattagaagaccttaagggaaacatgattgagctatcactatcaggaaaaagagctttggaatttgacggagatcaagttttagatgtgggtcagcaacatcatgttattgcaatatttgtaggaaccttagtcaaactttacaaaggtgaatatacattcttgagtggaacatcagcatgccggtggtacatcaacgaaaatgacattgctgaaatcaaggctttccagaaaagtttgccaagtgaacctgtacctatcaaaaagacctatctccaaaatgatgatgcaactcacaaatttgaggagaaaagtctggaacagctcaagcatgtagaccctttccttgacatgggacaaagatatcagtgcacagctactataattggtatcacagaaaaccaaacatggtgttacaaagcatgcaagatctgtaactcagcaatcattcaaaaggaaaatggttataaatgcacaaaggaaggatgtccatctacacaatttgaatggaagtacaagataccattcattgcaagtgaccacacctataatctagagtttatgttctttgaaaaaaagggaatggagcttataggaaagagtgcatcgactcttcgaaaacaatatgaaccaaaggagataccaccggatataacatcttggataggttataaattcacttttgttgttagagtcctatcaaagaaaagtgtcaagactattgatccatcctttgaagtgcttatgataaaagaaaaataccagaaggaacctattatatcatttatcagctcaagtggagttgtaccagcagaatcatcttcctctacaatggcagaatacaaggaattaccattgctagtgccaattacctccaaagacatagaaaaaaaggagcgatccacttcacaaccagaacacaccgaagaaactcaagatatggacattgaaccatctggcatttgggaagaatctcagatttcaaacaaaagaagctttggagacccaaactatgacaaacaagaaacaactgatgacaaagatgaccttccacaattcaagaaaatcaggagtacccactctcaaggaaaaagcaaaaaatgatgcatgatagactaagaagacaaagtaaagtagtagactttaaaagatcttgactaaagtaatatatctatattttctgtttcgataaacaacgatagcgctagtgctacatcttttaatgtatataaccatgtagtatcaatagcgctacatcttaagcgtgtagcaccagcagcgctacatattttgatgtatataagcatgtagcatcaatagcgctacatcttttgttaaatataagcacatcttttgatatatataagcatgtagcatcaatagtgctagctatggtgctaatcttacattatatggcgtatatgttagttaatatctaacgttgat

SEQ ID NO: 9944 - DNA, 1664 bp, Zea Mays
caacctgctccattcttggcgagcgttcaggcgaaagaggaaaaagagaggagtgcaccgcgagtgtacagctcgaagatccacttccaagtgcttccttttaggataatcttatataccttcaagcaaatagacaatcggaggaacttcacaaagatgtcattgctaagatcagtggagtatcaaatgtagcaaaggttcctacaacctcaggagatcagcaaatgaggagagttgtattattagaagaccttaagggaaacatgattgagctatcactatcaggaaaaagagctttggaatttgacggagatcaagttttagatgtgggtcagcaacatcatgttattgcaatatttgtaggaaccttagtcaaactttacaaaggtgaatatacattcttgagtggaacatcagcatgccggtggtacatcaacgaaaatgacattgctgaaatcaaggctttccagaaaagtttgccaagtgaacctgtacctatcaaaaagacctatctccaaaatgatgatgcaactcacaaatttgaggagaaaagtctggaacagctcaagcatggacaaagatatcagtgcacagctactataattggtatcacagaaaaccaaacatggtgttacaaagcatgcaagatctgtaactcagcaatcattcaaaaggaaaatggttataaatgcacaaaggaaggatgtccatctacacaatttgaatggaagtacaagataccattcattgcaagtgaccacacctataatctagagtttatgttctttgaaaaaaagggaatggagcttataggaaagagtgcatcgactcttcgaaaacaatatgaaccaaaggagataccaccggatataacatcttggataggttataaattcacttttgttgttagagtcctatcaaagaaaagtgtcaagactattgatccatcctttgaagtgcttatgataaaagaaaaataccagaaggaacctattatatcatttatcagctcaagtggagttgtaccagcagaatcatcttcctctacaatggcagaatacaaggaattaccattgctagtgccaattacctccaaagacatagaaaaaaaggagcgatccacttcacaaccagaacacaccgaagaaactcaagatatggacattgaaccatctggcatttgggaagaatctcagatttcaaacaaaagaagctttggagacccaaactatgacaaacaagaaacaactgatgacaaagatgaccttccacaattcaagaaaatcaggagtacccactctcaaggaaaaagcaaaaaatgatgcatgatagactaagaagacaaagtaaagtagtagactttaaaagatcttgactaaagtaatatatctatattttctgtttcgataaacaacgatagcgctagtgctacatcttttaatgtatataaccatgtagtatcaatagcgctacatcttaagcgtgtagcaccagcagcgctacatattttgatgtatataagcatgtagcatcaatagcgctacatcttttgttaaatataagcacatcttttgatatatataagcatgtagcatcaatagtgctagctatggtgctaatcttacattatatggcgtatatgttagttaatatctaacgttgat

SEQ ID NO: 9945 - DNA, 2130 bp, Zea Mays
tacacaacctgctccattcttggcgagcgttcaggcgaaagaggaaaaagagaggagtgcaccgcgagtgtacagctcgaagatccacttccaagtgcttccttttagtgctaacacagtaggaacgaggataatcttatataccttcaagcaaatagacaatcggaggaacttcacaaagatggaaattactccaatatcacaactacgtccaggaaagttaaattatgctttacatgtgcgaatatctagaatgtgggagtttagaggcacaaatgaacagaacgacatcaaacaccttgaccttgttctcatcgatcaaaagggaaattcaatatatgcagagattccaccagatgcaattgctgtcttaaaaagccacatctacacgaaaaaaagattgtatacatatccaaaataacaattgaacgagctaaactgggattcagagttgttgacaatccttatatggtaaagctcaacaagagaaccattgtgcttgaagataaggatcaaattcaaggttttcctaaatatacattctcactaacacccttagataagttggaccaatacaaaaacaagaccgatcgttttatagatgtcattgctaagatcagtggagtatcaaatgtagcaaaggttcctacaacctcaggagatcagcaaatgaggagagttgtattattagaagaccttaagggaaacatgattgagctatcactatcaggaaaaagagctttggaatttgacggagatcaagttttagatgtgggtcagcaacatcatgttattgcaatatttgtaggaaccttagtcaaactttacaaaggtgaatatacattcttgagtggaacatcagcatgccggtggtacatcaacgaaaatgacattgctgaaatcaaggctttccagaaaagtttgccaagtgaacctgtacctatcaaaaagacctatctccaaaatgatgatgcaactcacaaatttgaggagaaaagtctggaacagctcaagcatgtagaccctttccttgacatgggacaaagatatcagtgcacagctactataattggtatcacagaaaaccaaacatggtgttacaaagcatgcaagatctgtaactcagcaatcattcaaaaggaaaatggttataaatgcacaaaggaaggatgtccatctacacaatttgaatggaagtacaagataccattcattgcaagtgaccacacctataatctagagtttatgttctttgaaaaaaagggaatggagcttataggaaagagtgcatcgactcttcgaaaacaatatgaaccaaaggagataccaccggatataacatcttggataggttataaattcacttttgttgttagagtcctatcaaagaaaagtgtcaagactattgatccatcctttgaagtgcttatgataaaagaaaaataccagaaggaacctattatatcatttatcagctcaagtggagttgtaccagcagaatcatcttcctctacaatggcagaatacaaggaattaccattgctagtgccaattacctccaaagacatagaaaaaaaggagcgatccacttcacaaccagaacacaccgaagaaactcaagatatggacattgaaccatctggcatttgggaagaatctcagatttcaaacaaaagaagctttggagacccaaactatgacaaacaagaaacaactgatgacaaagatgaccttccacaattcaagaaaatcaggagtacccactctcaaggaaaaagcaaaaaatgatgcatgatagactaagaagacaaagtaaagtagtagactttaaaagatcttgactaaagtaatatatctatattttctgtttcgataaacaacgatagcgctagtgctacatcttttaatgtatataaccatgtagtatcaatagcgctacatcttaagcgtgtagcaccagcagcgctacatattttgatgtatataagcatgtagcatcaatagcgctacatcttttgttaaatataagcacatcttttgatatatataagcatgtagcatcaatagtgctagctatggtgctaatcttacattatatggcgtatatgttagttaatatctaacgttgat

SEQ ID NO: 9946 - DNA, 1990 bp, Zea Mays
cccgtacacaacctgctccattcttggcgagcgttcaggcgaaagaggaaaaagagaggagtgcaccgcgagtgtacagctcgaagatccacttccaagtgcttccttttagaatgtgggagtttagaggcacaaatgaacagaacgacatcaaacaccttgaccttgttctcatcgatcaaaagggaaattcaatatatgcagagattccaccagatgcaattgctgtcttaaaaagccacatctacacgaaaaaaagattgtatacatatccaaaataacaattgaacgagctaaactgggattcagagttgttgacaatccttatatggtaaagctcaacaagagaaccattgtgcttgaagataaggatcaaattcaaggttttcctaaatatacattctcactaacacccttagataagttggaccaatacaaaaacaagaccgatcgttttatagatgtcattgctaagatcagtggagtatcaaatgtagcaaaggttcctacaacctcaggagatcagcaaatgaggagagttgtattattagaagaccttaagggaaacatgattgagctatcactatcaggaaaaagagctttggaatttgacggagatcaagttttagatgtgggtcagcaacatcatgttattgcaatatttgtaggaaccttagtcaaactttacaaaggtgaatatacattcttgagtggaacatcagcatgccggtggtacatcaacgaaaatgacattgctgaaatcaaggctttccagaaaagtttgccaagtgaacctgtacctatcaaaaagacctatctccaaaatgatgatgcaactcacaaatttgaggagaaaagtctggaacagctcaagcatgtagaccctttccttgacatgggacaaagatatcagtgcacagctactataattggtatcacagaaaaccaaacatggtgttacaaagcatgcaagatctgtaactcagcaatcattcaaaaggaaaatggttataaatgcacaaaggaaggatgtccatctacacaatttgaatggaagtacaagataccattcattgcaagtgaccacacctataatctagagtttatgttctttgaaaaaaagggaatggagcttataggaaagagtgcatcgactcttcgaaaacaatatgaaccaaaggagataccaccggatataacatcttggataggttataaattcacttttgttgttagagtcctatcaaagaaaagtgtcaagactattgatccatcctttgaagtgcttatgataaaagaaaaataccagaaggaacctattatatcatttatcagctcaagtggagttgtaccagcagaatcatcttcctctacaatggcagaatacaaggaattaccattgctagtgccaattacctccaaagacatagaaaaaaaggagcgatccacttcacaaccagaacacaccgaagaaactcaagatatggacattgaaccatctggcatttgggaagaatctcagatttcaaacaaaagaagctttggagacccaaactatgacaaacaagaaacaactgatgacaaagatgaccttccacaattcaagaaaatcaggagtacccactctcaaggaaaaagcaaaaaatgatgcatgatagactaagaagacaaagtaaagtagtagactttaaaagatcttgactaaagtaatatatctatattttctgtttcgataaacaacgatagcgctagtgctacatcttttaatgtatataaccatgtagtatcaatagcgctacatcttaagcgtgtagcaccagcagcgctacatattttgatgtatataagcatgtagcatcaatagcgctacatcttttgttaaatataagcacatcttttgatatatataagcatgtagcatcaatagtgctagctatggtgctaatcttacattatatggcgtatatgttagttaatatctaacgttgat

SEQ ID NO: 9947 - DNA, 1543 bp, Zea Mays
ctcccgtacacaacctgctccattcttggcgagcgttcaggcgaaagaggaaaaagagaggagtgcaccgcgagtgtacagctcgaagatccacttccaagtgcttccttttaggggaaacatgattgagctatcactatcaggaaaaagagctttggaatttgacggagatcaagttttagatgtgggtcagcaacatcatgttattgcaatatttgtaggaaccttagtcaaactttacaaaggtgaatatacattcttgagtggaacatcagcatgccggtggtacatcaacgaaaatgacattgctgaaatcaaggctttccagaaaagtttgccaagtgaacctgtacctatcaaaaagacctatctccaaaatgatgatgcaactcacaaatttgaggagaaaagtctggaacagctcaagcatgtagaccctttccttgacatgggacaaagatatcagtgcacagctactataattggtatcacagaaaaccaaacatggtgttacaaagcatgcaagatctgtaactcagcaatcattcaaaaggaaaatggttataaatgcacaaaggaaggatgtccatctacacaatttgaatggaagtacaagataccattcattgcaagtgaccacacctataatctagagtttatgttctttgaaaaaaagggaatggagcttataggaaagagtgcatcgactcttcgaaaacaatatgaaccaaaggagataccaccggatataacatcttggataggttataaattcacttttgttgttagagtcctatcaaagaaaagtgtcaagactattgatccatcctttgaagtgcttatgataaaagaaaaataccagaaggaacctattatatcatttatcagctcaagtggagttgtaccagcagaatcatcttcctctacaatggcagaatacaaggaattaccattgctagtgccaattacctccaaagacatagaaaaaaaggagcgatccacttcacaaccagaacacaccgaagaaactcaagatatggacattgaaccatctggcatttgggaagaatctcagatttcaaacaaaagaagctttggagacccaaactatgacaaacaagaaacaactgatgacaaagatgaccttccacaattcaagaaaatcaggagtacccactctcaaggaaaaagcaaaaaatgatgcatgatagactaagaagacaaagtaaagtagtagactttaaaagatcttgactaaagtaatatatctatattttctgtttcgataaacaacgatagcgctagtgctacatcttttaatgtatataaccatgtagtatcaatagcgctacatcttaagcgtgtagcaccagcagcgctacatattttgatgtatataagcatgtagcatcaatagcgctacatcttttgttaaatataagcacatcttttgatatatataagcatgtagcatcaatagtgctagctatggtgctaatcttacattatatggcgtatatgttagttaatatctaacgttgat

SEQ ID NO: 9948 - DNA, 1622 bp, Zea Mays
cttctctacagccggatgtatttgcttctcccgtacacaacctgctccattcttggcgagcgttcaggcgaaagaggaaaaagagaggagtgcaccgcgagtgtacagctcgaagatccacttccaagtgcttccttttaggataatcttatataccttcaagcaaatagacaatcggaggaacttcacaaaggggaaacatgattgagctatcactatcaggaaaaagagctttggaatttgacggagatcaagttttagatgtgggtcagcaacatcatgttattgcaatatttgtaggaaccttagtcaaactttacaaaggtgaatatacattcttgagtggaacatcagcatgccggtggtacatcaacgaaaatgacattgctgaaatcaaggctttccagaaaagtttgccaagtgaacctgtacctatcaaaaagacctatctccaaaatgatgatgcaactcacaaatttgaggagaaaagtctggaacagctcaagcatgtagaccctttccttgacatgggacaaagatatcagtgcacagctactataattggtatcacagaaaaccaaacatggtgttacaaagcatgcaagatctgtaactcagcaatcattcaaaaggaaaatggttataaatgcacaaaggaaggatgtccatctacacaatttgaatggaagtacaagataccattcattgcaagtgaccacacctataatctagagtttatgttctttgaaaaaaagggaatggagcttataggaaagagtgcatcgactcttcgaaaacaatatgaaccaaaggagataccaccggatataacatcttggataggttataaattcacttttgttgttagagtcctatcaaagaaaagtgtcaagactattgatccatcctttgaagtgcttatgataaaagaaaaataccagaaggaacctattatatcatttatcagctcaagtggagttgtaccagcagaatcatcttcctctacaatggcagaatacaaggaattaccattgctagtgccaattacctccaaagacatagaaaaaaaggagcgatccacttcacaaccagaacacaccgaagaaactcaagatatggacattgaaccatctggcatttgggaagaatctcagatttcaaacaaaagaagctttggagacccaaactatgacaaacaagaaacaactgatgacaaagatgaccttccacaattcaagaaaatcaggagtacccactctcaaggaaaaagcaaaaaatgatgcatgatagactaagaagacaaagtaaagtagtagactttaaaagatcttgactaaagtaatatatctatattttctgtttcgataaacaacgatagcgctagtgctacatcttttaatgtatataaccatgtagtatcaatagcgctacatcttaagcgtgtagcaccagcagcgctacatattttgatgtatataagcatgtagcatcaatagcgctacatcttttgttaaatataagcacatcttttgatatatataagcatgtagcatcaatagtgctagctatggtgctaatcttacattatatggcgtatatgttagttaatatctaacgttgat

SEQ ID NO: 9949 - DNA, 2578 bp, Zea Mays
aaaatataaaggagccgcttctctacagccggatgtatttgcttctcccgtacacaacctgctccattcttggcgagcgttcaggcgaaagaggaaaaagagaggagtgcaccgcgagtgtacagctcgaagatccacttccaagtgcttccttttaggataatcttatataccttcaagcaaatagacaatcggaggaacttcacaaagggaaattcaatatatgcagagattccaccagatgcaattgctgtcttaaaaagccacatctacacgaaaaaaagattgtatacatatccaaaataacaattgaacgagctaaactgggattcagagttgttgacaatccttatatggtaaagctcaacaagagaaccattgtgcttgaagataaggatcaaattcaaggttttcctaaatatacattctcactaacacccttagataagttggaccaatacaaaaacaagaccgatcgttttatagatgtcattgctaagatcagtggagtatcaaatgtagcaaaggttcctacaacctcaggagatcagcaaatgaggagagttgtattattagaagaccttaagggaaacatgattgagctatcactatcaggaaaaagagctttggaatttgacggagatcaagttttagatgtgggtcagcaacatcatgttattgcaatatttgtaggaaccttagtcaaactttacaaaggtgaatatacattcttgagtggaacatcagcatgccggtggtacatcaacgaaaatgacattgctgaaatcaaggctttccagaaaagtttgccaagtgaacctgtacctatcaaaaagacctatctccaaaatgatgatgcaactcacaaatttgaggagaaaagtctggaacagctcaagcatgtagaccctttccttgacatgggacaaagatatcagtgcacagctactataattggtatcacagaaaaccaaacatggtgttacaaagcatgcaagatctgtaactcagcaatcattcaaaaggaaaatggttataaatgcacaaaggaaggatgtccatctacacaatttgaatggaagtacaagataccattcattgcaagtgaccacacctataatctagagtttatgttctttgaaaaaaagggaatggagcttataggaaagagtgcatcgactcttcgaaaacaatatgaaccaaaggagataccaccggatataacatcttggataggttataaattcacttttgttgttagagtcctatcaaagaaaagtgtcaagactattgatccatcctttgaagtgcttatgataaaagaaaaataccagaaggaacctattatatcatttatcagctcaagtggagttgtaccagcagaatcatcttcctctacaatggcagaatacaaggaattaccattgctagtgccaattacctccaaagacatagaaaaaaaggagcgatccacttcacaaccagaacacaccgaagaaactcaagatatggacattgaaccatctgggtatgattaagataagcttcgttcttaccttctatattaaatcttaatatctttcctataataccatttcatatttattttccatgatgaactatatatatgtgtctacatacaagaaaagattatacttatttgtttgatctgcaattaaaaaaaatatctagtccattcaaatactgcatattagttcaacgttttttataaacaacttcaataccttatgtcataaattcccaatgaaaccatagtttagagaccatgagctatgtagcacaatttccagaaaatctaaacacttaaatcttcatttaaagtgacatggcagttcattatgtattgtttgccattctatctatttacttttccatgtgggcacaaagtcaagaacaacaatgtggttttgtgcagttttgtgcacacatcctagactccatattatctgcatttcaacatttcgaaagaatctaggcattaatggtctatgtcatgttgttataataattttaaaatcttacgtcttgtcattctaaataatccttcacactatattatcttcatttcagcatttgggaagaatctcagatttcaaacaaaagaagctttggagacccaaactatgacaaacaagaaacaactgatgacaaagatgaccttccacaattcaagaaaatcaggagtacccactctcaaggaaaaagcaaaaaatgatgcatgatagactaagaagacaaagtaaagtagtagactttaaaagatcttgactaaagtaatatatctatattttctgtttcgataaacaacgatagcgctagtgctacatcttttaatgtatataaccatgtagtatcaatagcgctacatcttaagcgtgtagcaccagcagcgctacatattttgatgtatataagcatgtagcatcaatagcgctacatcttttgttaaatataagcacatcttttgatatatataagcatgtagcatcaatagtgctagctatggtgctaatcttacattatatggcgtatatgttagttaatatctaacgttgat

SEQ ID NO: 9950 - DNA, 2202 bp, Zea Mays
aaaatataaaggagccgcttctctacagccggatgtatttgcttctcccgtacacaacctgctccattcttggcgagcgttcaggcgaaagaggaaaaagagaggagtgcaccgcgagtgtacagctcgaagatccacttccaagtgcttccttttaggataatcttatataccttcaagcaaatagacaatcggaggaacttcacaaaggggaaacatgattgagctatcactatcaggaaaaagagctttggaatttgacggagatcaagttttagatgtgggtcagcaacatcatgttattgcaatatttgtaggaaccttagtcaaactttacaaaggtgaatatacattcttgagtggaacatcagcatgccggtggtacatcaacgaaaatgacattgctgaaatcaaggctttccagaaaagtttgccaagtgaacctgtacctatcaaaaagacctatctccaaaatgatgatgcaactcacaaatttgaggagaaaagtctggaacagctcaagcatgtagaccctttccttgacatgggacaaagatatcagtgcacagctactataattggtatcacagaaaaccaaacatggtgttacaaagcatgcaagatctgtaactcagcaatcattcaaaaggaaaatggttataaatgcacaaaggaaggatgtccatctacacaatttgaatggaagtacaagataccattcattgcaagtgaccacacctataatctagagtttatgttctttgaaaaaaagggaatggagcttataggaaagagtgcatcgactcttcgaaaacaatatgaaccaaaggagataccaccggatataacatcttggataggttataaattcacttttgttgttagagtcctatcaaagaaaagtgtcaagactattgatccatcctttgaagtgcttatgataaaagaaaaataccagaaggaacctattatatcatttatcagctcaagtggagttgtaccagcagaatcatcttcctctacaatggcagaatacaaggaattaccattgctagtgccaattacctccaaagacatagaaaaaaaggagcgatccacttcacaaccagaacacaccgaagaaactcaagatatggacattgaaccatctgggtatgattaagataagcttcgttcttaccttctatattaaatcttaatatctttcctataataccatttcatatttattttccatgatgaactatatatatgtgtctacatacaagaaaagattatacttatttgtttgatctgcaattaaaaaaaatatctagtccattcaaatactgcatattagttcaacgttttttataaacaacttcaataccttatgtcataaattcccaatgaaaccatagtttagagaccatgagctatgtagcacaatttccagaaaatctaaacacttaaatcttcatttaaagtgacatggcagttcattatgtattgtttgccattctatctatttacttttccatgtgggcacaaagtcaagaacaacaatgtggttttgtgcagttttgtgcacacatcctagactccatattatctgcatttcaacatttcgaaagaatctaggcattaatggtctatgtcatgttgttataataattttaaaatcttacgtcttgtcattctaaataatccttcacactatattatcttcatttcagcatttgggaagaatctcagatttcaaacaaaagaagctttggagacccaaactatgacaaacaagaaacaactgatgacaaagatgaccttccacaattcaagaaaatcaggagtacccactctcaaggaaaaagcaaaaaatgatgcatgatagactaagaagacaaagtaaagtagtagactttaaaagatcttgactaaagtaatatatctatattttctgtttcgataaacaacgatagcgctagtgctacatcttttaatgtatataaccatgtagtatcaatagcgctacatcttaagcgtgtagcaccagcagcgctacatattttgatgtatataagcatgtagcatcaatagcgctacatcttttgttaaatataagcacatcttttgatatatataagcatgtagcatcaatagtgctagctatggtgctaatcttacattatatggcgtatatgttagttaatatctaacgttgat

SEQ ID NO: 9951 - DNA, 1687 bp, Zea Mays
ctttaccttataaaaatataaaggagccgcttctctacagccggatgtatttgcttctcccgtacacaacctgctccattcttggcgagcgttcaggcgaaagaggaaaaagagaggagtgcaccgcgagtgtacagctcgaagatccacttccaagtgcttccttttaggataatcttatataccttcaagcaaatagacaatcggaggaacttcacaaagatgtcattgctaagatcagtggagtatcaaatgtagcaaaggttcctacaacctcaggagatcagcaaatgaggagagttgtattattagaagaccttaagggaaacatgattgagctatcactatcaggaaaaagagctttggaatttgacggagatcaagttttagatgtgggtcagcaacatcatgttattgcaatatttgtaggaaccttagtcaaactttacaaaggtgaatatacattcttgagtggaacatcagcatgccggtggtacatcaacgaaaatgacattgctgaaatcaaggctttccagaaaagtttgccaagtgaacctgtacctatcaaaaagacctatctccaaaatgatgatgcaactcacaaatttgaggagaaaagtctggaacagctcaagcatgtagaccctttccttgacatgggacaaagatatcagtgcacagctactataattggtatcacagaaaaccaaacatggtgttacaaagcatgcaagatctgtaactcagcaatcattcaaaaggaaaatggttataaatgcacaaaggaaggatgtccatctacacaatttgaatggaagtacaagataccattcattgcaagtgaccacacctataatctagagtttatgttctttgaaaaaaagggaatggagcttataggaaagagtgcatcgactcttcgaaaacaatatgaaccaaaggagataccaccggatataacatcttggataggttataaattcacttttgttgttagagtcctatcaaagaaaagtgtcaagactattgatccatcctttgaagtgcttatgataaaagaaaaataccagaaggaacctattatatcatttatcagctcaagtggagttgtaccagcagaatcatcttcctctacaatggcagaatacaaggaattaccattgctagtgccaattacctccaaagacatagaaaaaaaggagcgatccacttcacaaccagaacacaccgaagaaactcaagatatggacattgaaccatctgggaaacaactgatgacaaagatgaccttccacaattcaagaaaatcaggagtacccactctcaaggaaaaagcaaaaaatgatgcatgatagactaagaagacaaagtaaagtagtagactttaaaagatcttgactaaagtaatatatctatattttctgtttcgataaacaacgatagcgctagtgctacatcttttaatgtatataaccatgtagtatcaatagcgctacatcttaagcgtgtagcaccagcagcgctacatattttgatgtatataagcatgtagcatcaatagcgctacatcttttgttaaatataagcacatcttttgatatatataagcatgtagcatcaatagtgctagctatggtgctaatcttacattatatggcgtatatgttagttaatatctaacgttgat

SEQ ID NO: 9952 - DNA, 2749 bp, Zea Mays
atccgctagaaacatctttaccttataaaaatataaaggagccgcttctctacagccggatgtatttgcttctcccgtacacaacctgctccattcttggcgagcgttcaggcgaaagaggaaaaagagaggagtgcaccgcgagtgtacagctcgaagatccacttccaagtgcttccttttaggataatcttatataccttcaagcaaatagacaatcggaggaacttcacaaagatggaaattactccaatatcacaactacgtccaggaaagttaaattatgctttacatgtgcgaatatctagaatgtgggagtttagaggcacaaatgaacagaacgacatcaaacaccttgaccttgttctcatcgatcaaaagggaaattcaatatatgcagagattccaccagatgcaattgctgtcttaaaaagccacatctacacgaaaaaaagattgtatacatatccaaaataacaattgaacgagctaaactgggattcagagttgttgacaatccttatatggtaaagctcaacaagagaaccattgtgcttgaagataaggatcaaattcaaggttttcctaaatatacattctcactaacacccttagataagttggaccaatacaaaaacaagaccgatcgttttatagatgtcattgctaagatcagtggagtatcaaatgtagcaaaggttcctacaacctcaggagatcagcaaatgaggagagttgtattattagaagaccttaagggaaacatgattgagctatcactatcaggaaaaagagctttggaatttgacggagatcaagttttagatgtgggtcagcaacatcatgttattgcaatatttgtaggaaccttagtcaaactttacaaaggtgaatatacattcttgagtggaacatcagcatgccggtggtacatcaacgaaaatgacattgctgaaatcaaggctttccagaaaagtttgccaagtgaacctgtacctatcaaaaagacctatctccaaaatgatgatgcaactcacaaatttgaggagaaaagtctggaacagctcaagcatgtagaccctttccttgacatgggacaaagatatcagtgcacagctactataattggtatcacagaaaaccaaacatggtgttacaaagcatgcaagatctgtaactcagcaatcattcaaaaggaaaatggttataaatgcacaaaggaaggatgtccatctacacaatttgaatggaagtacaagataccattcattgcaagtgaccacacctataatctagagtttatgttctttgaaaaaaagggaatggagcttataggaaagagtgcatcgactcttcgaaaacaatatgaaccaaaggagataccaccggatataacatcttggataggttataaattcacttttgttgttagagtcctatcaaagaaaagtgtcaagactattgatccatcctttgaagtgcttatgataaaagaaaaataccagaaggaacctattatatcatttatcagctcaagtggagttgtaccagcagaatcatcttcctctacaatggcagaatacaaggaattaccattgctagtgccaattacctccaaagacatagaaaaaaaggagcgatccacttcacaaccagaacacaccgaagaaactcaagatatggacattgaaccatctgggtatgattaagataagcttcgttcttaccttctatattaaatcttaatatctttcctataataccatttcatatttattttccatgatgaactatatatatgtgtctacatacaagaaaagattatacttatttgtttgatctgcaattaaaaaaaatatctagtccattcaaatactgcatattagttcaacgttttttataaacaacttcaataccttatgtcataaattcccaatgaaaccatagtttagagaccatgagctatgtagcacaatttccagaaaatctaaacacttaaatcttcatttaaagtgacatggcagttcattatgtattgtttgccattctatctatttacttttccatgtgggcacaaagtcaagaacaacaatgtggttttgtgcagttttgtgcacacatcctagactccatattatctgcatttcaacatttcgaaagaatctaggcattaatggtctatgtcatgttgttataataattttaaaatcttacgtcttgtcattctaaataatccttcacactatattatcttcatttcagcatttgggaagaatctcagatttcaaacaaaagaagctttggagacccaaactatgacaaacaagaaacaactgatgacaaagatgaccttccacaattcaagaaaatcaggagtacccactctcaaggaaaaagcaaaaaatgatgcatgatagactaagaagacaaagtaaagtagtagactttaaaagatcttgactaaagtaatatatctatattttctgtttcgataaacaacgatagcgctagtgctacatcttttaatgtatataaccatgtagtatcaatagcgctacatcttaagcgtgtagcaccagcagcgctacatattttgatgtatataagcatgtagcatcaatagcgctacatcttttgttaaatataagcacatcttttgatatatataagcatgtagcatcaatagtgctagctatggtgctaatcttacattatatggcgtatatgttagttaatatctaacgttgat

SEQ ID NO: 9953 - DNA, 2086 bp, Zea Mays
atccgctagaaacatctttaccttataaaaatataaaggagccgcttctctacagccggatgtatttgcttctcccgtacacaacctgctccattcttggcgagcgttcaggcgaaagaggaaaaagagaggagtgcaccgcgagtgtacagctcgaagatccacttccaagtgcttccttttaggataatcttatataccttcaagcaaatagacaatcggaggaacttcacaaagatggaaattactccaatatcacaactacgtccaggaaagttaaattatgctttacatgtgcgaatatctagaatgtgggagtttagaggcacaaatgaacagaacgacatcaaacaccttgaccttgttctcatcgatcaaaagggaaattcaatatatgcagagattccaccagatgcaattgctgtcttaaaaagccacatctacacgaaaaaaagattgtatacatatccaaaataacaattgaacgagctaaactgggattcagagttgttgacaatccttatatggtaaagctcaacaagagaaccattgtgcttgaagataaggatcaaattcaaggttttcctaaatatacattctcactaacacccttagataagttggaccaatacaaaaacaagaccgatcgttttataggggaaacatgattgagctatcactatcaggaaaaagagctttggaatttgacggagatcaagttttagatgtgggtcagcaacatcatgttattgcaatatttgtaggaaccttagtcaaactttacaaaggtgaatatacattcttgagtggaacatcagcatgccggtggtacatcaacgaaaatgacattgctgaaatcaaggctttccagaaaagtttgccaagtgaacctgtacctatcaaaaagacctatctccaaaatgatgatgcaactcacaaatttgaggagaaaagtctggaacagctcaagcatgtagaccctttccttgacatgggacaaagatatcagtgcacagctactataattggtatcacagaaaaccaaacatggtgttacaaagcatgcaagatctgtaactcagcaatcattcaaaaggaaaatggttataaatgcacaaaggaaggatgtccatctacacaatttgaatggaagtacaagataccattcattgcaagtgaccacacctataatctagagtttatgttctttgaaaaaaagggaatggagcttataggaaagagtgcatcgactcttcgaaaacaatatgaaccaaaggagataccaccggatataacatcttggataggttataaattcacttttgttgttagagtcctatcaaagaaaagtgtcaagactattgatccatcctttgaagtgcttatgataaaagaaaaataccagaaggaacctattatatcatttatcagctcaagtggagttgtaccagcagaatcatcttcctctacaatggcagaatacaaggaattaccattgctagtgccaattacctccaaagacatagaaaaaaaggagcgatccacttcacaaccagaacacaccgaagaaactcaagatatggacattgaaccatctggcatttgggaagaatctcagatttcaaacaaaagaagctttggagacccaaactatgacaaacaagaaacaactgatgacaaagatgaccttccacaattcaagaaaatcaggagtacccactctcaaggaaaaagcaaaaaatgatgcatgatagactaagaagacaaagtaaagtagtagactttaaaagatcttgactaaagtaatatatctatattttctgtttcgataaacaacgatagcgctagtgctacatcttttaatgtatataaccatgtagtatcaatagcgctacatcttaagcgtgtagcaccagcagcgctacatattttgatgtatataagcatgtagcatcaatagcgctacatcttttgttaaatataagcacatcttttgatatatataagcatgtagcatcaatagtgctagctatggtgctaatcttacattatatggcgtatatgttagttaatatctaacgttgat

SEQ ID NO: 9954 - DNA, 2125 bp, Zea Mays
gctatccgctagaaacatctttaccttataaaaatataaaggagccgcttctctacagccggatgtatttgcttctcccgtacacaacctgctccattcttggcgagcgttcaggcgaaagaggaaaaagagaggagtgcaccgcgagtgtacagctcgaagatccacttccaagtgcttccttttaggataatcttatataccttcaagcaaatagacaatcggaggaacttcacaaagatggaaattactccaatatcacaactacgtccaggaaagttaaattatgctttacatgtgcgaatatctagaatgtgggagtttagaggcacaaatgaacagaacgacatcaaacaccttgaccttgttctcatcgatcaaaagggaaattcaatatatgcagagattccaccagatgcaattgctgtcttaaaaagccacatctacacgaaaaaaagattgtatacatatccaaaataacaattgaacgagctaaactgggattcagagttgttgacaatccttatatggtaaagctcaacaagagaaccattgtgcttgaagataaggatcaaattcaaggttttcctaaatatacattctcactaacacccttagataagttggaccaatacaaaaacaagaccgatcgttttatagatgtcattgctaagatcagtggagtatcaaatgtagcaaaggttcctacaacctcaggagatcagcaaatgaggagagttgtattattagaagaccttaagggaaacatgattgagctatcactatcaggaaaaagagctttggaatttgacggagatcaagttttagatgtgggtcagcaacatcatgttattgcaatatttgtaggaaccttagtcaaactttacaaaggtgaatatacattcttgagtggaacatcagcatgccggtggtacatcaacgaaaatgacattgctgaaatcaaggctttccagaaaagtttgccaagtgaacctgtacctatcaaaaagacctatctccaaaatgatgatgcaactcacaaatttgaggagaaaagtctggaacagctcaagcatgtagaccctttccttgacatgggacaaagatatcagtgcacagctactataattggtatcacagaaaaccaaacatggtgttacaaagcatgcaagatctgtaactcagcaatcattcaaaaggaaaatggttataaatgcacaaaggaaggatgtccatctacacaatttgaatggaagtacaagataccattcattgcaagtgaccacacctataatctagagtttatgttctttgaaaaaaagggaatggagcttataggaaagagtgcatcgactcttcgaaaacaatatgaaccaaaggagataccaccggatataacatcttggataggttataaattcacttttgttgttagagtcctatcaaagaaaagtgtcaagactattgatccatcctttgaagtgcttatgataaaagaaaaataccagaaggaacctattatatcatttatcagctcaagtggagttgtaccagcagaatcatcttcctctacaatggcagaatacaaggaattaccattgctagtgccaattacctccaaagacatagaaaaaaaggagcgatccacttcacaaccagaacacaccgaagaaactcaagatatggacattgaaccatctgggaaacaactgatgacaaagatgaccttccacaattcaagaaaatcaggagtacccactctcaaggaaaaagcaaaaaatgatgcatgatagactaagaagacaaagtaaagtagtagactttaaaagatcttgactaaagtaatatatctatattttctgtttcgataaacaacgatagcgctagtgctacatcttttaatgtatataaccatgtagtatcaatagcgctacatcttaagcgtgtagcaccagcagcgctacatattttgatgtatataagcatgtagcatcaatagcgctacatcttttgttaaatataagcacatcttttgatatatataagcatgtagcatcaatagtgctagctatggtgctaatcttacattatatggcgtatatgttagttaatatctaacgttgat

SEQ ID NO: 9955 - DNA, 2396 bp, Zea Mays
cgcgagtcgtgcaaggcgccggacttgaaccgtcggcagctactagagaaatccacagcctactgctatccgctagaaacatctttaccttataaaaatataaaggagccgcttctctacagccggatgtatttgcttctcccgtacacaacctgctccattcttggcgagcgttcaggcgaaagaggaaaaagagaggagtgcaccgcgagtgtacagctcgaagatccacttccaagtgcttccttttaggataatcttatataccttcaagcaaatagacaatcggaggaacttcacaaagatgtcattgctaagatcagtggagtatcaaatgtagcaaaggttcctacaacctcaggagatcagcaaatgaggagagttgtattattagaagaccttaagggaaacatgattgagctatcactatcaggaaaaagagctttggaatttgacggagatcaagttttagatgtgggtcagcaacatcatgttattgcaatatttgtaggaaccttagtcaaactttacaaaggtgaatatacattcttgagtggaacatcagcatgccggtggtacatcaacgaaaatgacattgctgaaatcaaggctttccagaaaagtttgccaagtgaacctgtacctatcaaaaagacctatctccaaaatgatgatgcaactcacaaatttgaggagaaaagtctggaacagctcaagcatgtagaccctttccttgacatgggacaaagatatcagtgcacagctactataattggtatcacagaaaaccaaacatggtgttacaaagcatgcaagatctgtaactcagcaatcattcaaaaggaaaatggttataaatgcacaaaggaaggatgtccatctacacaatttgaatggaagtacaagataccattcattgcaagtgaccacacctataatctagagtttatgttctttgaaaaaaagggaatggagcttataggaaagagtgcatcgactcttcgaaaacaatatgaaccaaaggagataccaccggatataacatcttggataggttataaattcacttttgttgttagagtcctatcaaagaaaagtgtcaagactattgatccatcctttgaagtgcttatgataaaagaaaaataccagaaggaacctattatatcatttatcagctcaagtggagttgtaccagcagaatcatcttcctctacaatggcagaatacaaggaattaccattgctagtgccaattacctccaaagacatagaaaaaaaggagcgatccacttcacaaccagaacacaccgaagaaactcaagatatggacattgaaccatctgggtatgattaagataagcttcgttcttaccttctatattaaatcttaatatctttcctataataccatttcatatttattttccatgatgaactatatatatgtgtctacatacaagaaaagattatacttatttgtttgatctgcaattaaaaaaaatatctagtccattcaaatactgcatattagttcaacgttttttataaacaacttcaataccttatgtcataaattcccaatgaaaccatagtttagagaccatgagctatgtagcacaatttccagaaaatctaaacacttaaatcttcatttaaagtgacatggcagttcattatgtattgtttgccattctatctatttacttttccatgtgggcacaaagtcaagaacaacaatgtggttttgtgcagttttgtgcacacatcctagactccatattatctgcatttcaacatttcgaaagaatctaggcattaatggtctatgtcatgttgttataataattttaaaatcttacgtcttgtcattctaaataatccttcacactatattatcttcatttcagcatttgggaagaatctcagatttcaaacaaaagaagctttggagacccaaactatgacaaacaagaaacaactgatgacaaagatgaccttccacaattcaagaaaatcaggagtacccactctcaaggaaaaagcaaaaaatgatgcatgatagactaagaagacaaagtaaagtagtagactttaaaagatcttgactaaagtaatatatctatattttctgtttcgataaacaacgatagcgctagtgctacatcttttaatgtatataaccatgtagtatcaatagcgctacatcttaagcgtgtagcaccagcagcgctacatattttgatgtatataagcatgtagcatcaatagcgctacatcttttgttaaatataagcacatcttttgatatatataagcatgtagcatcaatagtgctagctatggtgctaatcttacattatatggcgtatatgttagttaatatctaacgttgat

SEQ ID NO: 9956 - DNA, 2058 bp, Zea Mays
cagaatcgctgtcggctctgggctccgctcgcggacgcgagtcgtgcaaggcgccggacttgaaccgtcggcagctactagagaaatccacagcctactgctatccgctagaaacatctttaccttataaaaatataaaggagccgcttctctacagccggatgtatttgcttctcccgtacacaacctgctccattcttggcgagcgttcaggcgaaagaggaaaaagagaggagtgcaccgcgagtgtacagctcgaagatccacttccaagtgcttccttttaggataatcttatataccttcaagcaaatagacaatcggaggaacttcacaaagatggaaattactccaatatcacaactacgtccaggaaagttaaattatgctttacatgtgcgaatatctagaatgtgggagtttagaggcacaaatgaacagaacgacatcaaacaccttgaccttgttctcatcgatcaaaagggaaattcaatatatgcagagattccaccagatgcaattgctgtcttaaaaagccacatctacacgaaaaaaagattgtatacatatccaaaataacaattgaacgagctaaactgggattcagagttgttgacaatccttatatggggaaacatgattgagctatcactatcaggaaaaagagctttggaatttgacggagatcaagttttagatgtgggtcagcaacatcatgttattgcaatatttgtaggaaccttagtcaaactttacaaaggtgaatatacattcttgagtggaacatcagcatgccggtggtacatcaacgaaaatgacattgctgaaatcaaggctttccagaaaagtttgccaagtgaacctgtacctatcaaaaagacctatctccaaaatgatgatgcaactcacaaatttgaggagaaaagtctggaacagctcaagcatgtagaccctttccttgacatgggacaaagatatcagtgcacagctactataattggtatcacagaaaaccaaacatggtgttacaaagcatgcaagatctgtaactcagcaatcattcaaaaggaaaatggttataaatgcacaaaggaaggatgtccatctacacaatttgaatggaagtacaagataccattcattgcaagtgaccacacctataatctagagtttatgttctttgaaaaaaagggaatggagcttataggaaagagtgcatcgactcttcgaaaacaatatgaaccaaaggagataccaccggatataacatcttggataggttataaattcacttttgttgttagagtcctatcaaagaaaagtgtcaagactattgatccatcctttgaagtgcttatgataaaagaaaaataccagaaggaacctattatatcatttatcagctcaagtggagttgtaccagcagaatcatcttcctctacaatggcagaatacaaggaattaccattgctagtgccaattacctccaaagacatagaaaaaaaggagcgatccacttcacaaccagaacacaccgaagaaactcaagatatggacattgaaccatctggcatttgggaagaatctcagatttcaaacaaaagaagctttggagacccaaactatgacaaacaagaaacaactgatgacaaagatgaccttccacaattcaagaaaatcaggagtacccactctcaaggaaaaagcaaaaaatgatgcatgatagactaagaagacaaagtaaagtagtagactttaaaagatcttgactaaagtaatatatctatattttctgtttcgataaacaacgatagcgctagtgctacatcttttaatgtatataaccatgtagtatcaatagcgctacatcttaagcgtgtagcaccagcagcgctacatattttgatgtatataagcatgtagcatcaatagcgctacatcttttgttaaatataagcacatcttttgatatatataagcatgtagcatcaatagtgctagctatggtgctaatcttacattatatggcgtatatgttagttaatatctaacgttgat

SEQ ID NO: 9957 - DNA, 1992 bp, Zea Mays
agcaaagcagaatcgctgtcggctctgggctccgctcgcggacgcgagtcgtgcaaggcgccggacttgaaccgtcggcagctactagagaaatccacagcctactgctatccgctagaaacatctttaccttataaaaatataaaggagccgcttctctacagccggatgtatttgcttctcccgtacacaacctgctccattcttggcgagcgttcaggcgaaagaggaaaaagagaggagtgcaccgcgagtgtacagctcgaagatccacttccaagtgcttccttttaggataatcttatataccttcaagcaaatagacaatcggaggaacttcacaaagatggaaattactccaatatcacaactacgtccaggaaagttaaattatgctttacatgtgcgaatatctagaatgtgggagtttagaggcacaaatgaacagaacgacatcaaacaccttgaccttgttctcatcgatcaaaagggaaattcaatatatgcagagattccaccagatgcaattgctgtcttaaaaagccacatctacacgaaaaaaagattgtatacatatccaaaataacaattgaacgagctaaactgggattcagagttgttgacaatccttatatggtaaagctcaacaagagaaccattgtgcttgaagataaggatcaaattcaaggttttcctaaatatacattcttgagtggaacatcagcatgccggtggtacatcaacgaaaatgacattgctgaaatcaaggctttccagaaaagtttgccaagtgaacctgtacctatcaaaaagacctatctccaaaatgatgatgcaactcacaaatttgaggagaaaagtctggaacagctcaagcatgtagaccctttccttgacatgggacaaagatatcagtgcacagctactataattggtatcacagaaaaccaaacatggtgttacaaagcatgcaagatctgtaactcagcaatcattcaaaaggaaaatggttataaatgcacaaaggaaggatgtccatctacacaatttgaatggaagtacaagataccattcattgcaagtgaccacacctataatctagagtttatgttctttgaaaaaaagggaatggagcttataggaaagagtgcatcgactcttcgaaaacaatatgaaccaaaggagataccaccggatataacatcttggataggttataaattcacttttgttgttagagtcctatcaaagaaaagtgtcaagactattgatccatcctttgaagtgcttatgataaaagaaaaataccagaaggaacctattatatcatttatcagctcaagtggagttgtaccagcagaatcatcttcctctacaatggcagaatacaaggaattaccattgctagtgccaattacctccaaagacatagaaaaaaaggagcgatccacttcacaaccagaacacaccgaagaaactcaagatatggacattgaaccatctggcatttgggaagaatctcagatttcaaacaaaagaagctttggagacccaaactatgacaaacaagaaacaactgatgacaaagatgaccttccacaattcaagaaaatcaggagtacccactctcaaggaaaaagcaaaaaatgatgcatgatagactaagaagacaaagtaaagtagtagactttaaaagatcttgactaaagtaatatatctatattttctgtttcgataaacaacgatagcgctagtgctacatcttttaatgtatataaccatgtagtatcaatagcgctacatcttaagcgtgtagcaccagcagcgctacatattttgatgtatataagcatgtagcatcaatagcgctacatcttttgttaaatataagcacatcttttgatatatataagcatgtagcatcaatagtgctagctatggtgctaatcttacattatatggcgtatatgttagttaatatctaacgttgat

SEQ ID NO: 9958 - DNA, 2311 bp, Zea Mays
ctcaaggctaaagccgagcaaagcagaatcgctgtcggctctgggctccgctcgcggacgcgagtcgtgcaaggcgccggacttgaaccgtcggcagctactagagaaatccacagcctactgctatccgctagaaacatctttaccttataaaaatataaaggagccgcttctctacagccggatgtatttgcttctcccgtacacaacctgctccattcttggcgagcgttcaggcgaaagaggaaaaagagaggagtgcaccgcgagtgtacagctcgaagatccacttccaagtgcttccttttaggataatcttatataccttcaagcaaatagacaatcggaggaacttcacaaagatggaaattactccaatatcacaactacgtccaggaaagttaaattatgctttacatgtgcgaatatctagaatgtgggagtttagaggcacaaatgaacagaacgacatcaaacaccttgaccttgttctcatcgatcaaaagggaaattcaatatatgcagagattccaccagatgcaattgctgtcttaaaaagccacatctacacgaaaaaaagattgtatacatatccaaaataacaattgaacgagctaaactgggattcagagttgttgacaatccttatatggtaaagctcaacaagagaaccattgtgcttgaagataaggatcaaattcaaggttttcctaaatatacattctcactaacacccttagataagttggaccaatacaaaaacaagaccgatcgttttatagatgtcattgctaagatcagtggagtatcaaatgtagcaaaggttcctacaacctcaggagatcagcaaatgaggagagttgtattattagaagaccttaagggaaacatgattgagctatcactatcaggaaaaagagctttggaatttgacggagatcaagttttagatgtgggtcagcaacatcatgttattgcaatatttgtaggaaccttagtcaaactttacaaaggtgaatatacattcttgagtggaacatcagcatgccggtggtacatcaacgaaaatgacattgctgaaatcaaggctttccagaaaagtttgccaagtgaacctgtacctatcaaaaagacctatctccaaaatgatgatgcaactcacaaatttgaggagaaaagtctggaacagctcaagcatgtagaccctttccttgacatgggacaaagatatcagtgcacagctactataattggtatcacagaaaaccaaacatggtgttacaaagcatgcaagatctgtaactcagcaatcattcaaaaggaaaatggttataaatgcacaaaggaaggatgtccatctacacaatttgaatggaagtacaagataccattcattgcaagtgaccacacctataatctagagtttatgttctttgaaaaaaagggaatggagcttataggaaagagtgcatcgactcttcgaaaacaatatgaaccaaaggagataccaccggatataacatcttggataggttataaattcacttttgttgttagagtcctatcaaagaaaagtgtcaagactattgatccatcctttgaagtgcttatgataaaagaaaaataccagaaggaacctattatatcatttatcagctcaagtggagttgtaccagcagaatcatcttcctctacaatggcagaatacaaggaattaccattgctagtgccaattacctccaaagacatagaaaaaaaggagcgatccacttcacaaccagaacacaccgaagaaactcaagatatggacattgaaccatctggcatttgggaagaatctcagatttcaaacaaaagaagctttggagacccaaactatgacaaacaagaaacaactgatgacaaagatgaccttccacaattcaagaaaatcaggagtacccactctcaaggaaaaagcaaaaaatgatgcatgatagactaagaagacaaagtaaagtagtagactttaaaagatcttgactaaagtaatatatctatattttctgtttcgataaacaacgatagcgctagtgctacatcttttaatgtatataaccatgtagtatcaatagcgctacatcttaagcgtgtagcaccagcagcgctacatattttgatgtatataagcatgtagcatcaatagcgctacatcttttgttaaatataagcacatcttttgatatatataagcatgtagcatcaatagtgctagctatggtgctaatcttacattatatggcgtatatgttagttaatatctaacgttgat

SEQ ID NO: 9959 - DNA, 1891 bp, Zea Mays
ctcaaggctaaagccgagcaaagcagaatcgctgtcggctctgggctccgctcgcggacgcgagtcgtgcaaggcgccggacttgaaccgtcggcagctactagagaaatccacagcctactgctatccgctagaaacatctttaccttataaaaatataaaggagccgcttctctacagccggatgtatttgcttctcccgtacacaacctgctccattcttggcgagcgttcaggcgaaagaggaaaaagagaggagtgcaccgcgagtgtacagctcgaagatccacttccaagtgcttccttttaggataatcttatataccttcaagcaaatagacaatcggaggaacttcacaaagatgtcattgctaagatcagtggagtatcaaatgtagcaaaggttcctacaacctcaggagatcagcaaatgaggagagttgtattattagaagaccttaagggaaacatgattgagctatcactatcaggaaaaagagctttggaatttgacggagatcaagttttagatgtgggtcagcaacatcatgttattgcaatatttgtaggaaccttagtcaaactttacaaaggtgaatatacattcttgagtggaacatcagcatgccggtggtacatcaacgaaaatgacattgctgaaatcaaggctttccagaaaagtttgccaagtgaacctgtacctatcaaaaagacctatctccaaaatgatgatgcaactcacaaatttgaggagaaaagtctggaacagctcaagcatgtagaccctttccttgacatgggacaaagatatcagtgcacagctactataattggtatcacagaaaaccaaacatggtgttacaaagcatgcaagatctgtaactcagcaatcattcaaaaggaaaatggttataaatgcacaaaggaaggatgtccatctacacaatttgaatggaagtacaagataccattcattgcaagtgaccacacctataatctagagtttatgttctttgaaaaaaagggaatggagcttataggaaagagtgcatcgactcttcgaaaacaatatgaaccaaaggagataccaccggatataacatcttggataggttataaattcacttttgttgttagagtcctatcaaagaaaagtgtcaagactattgatccatcctttgaagtgcttatgataaaagaaaaataccagaaggaacctattatatcatttatcagctcaagtggagttgtaccagcagaatcatcttcctctacaatggcagaatacaaggaattaccattgctagtgccaattacctccaaagacatagaaaaaaaggagcgatccacttcacaaccagaacacaccgaagaaactcaagatatggacattgaaccatctggcatttgggaagaatctcagatttcaaacaaaagaagctttggagacccaaactatgacaaacaagaaacaactgatgacaaagatgaccttccacaattcaagaaaatcaggagtacccactctcaaggaaaaagcaaaaaatgatgcatgatagactaagaagacaaagtaaagtagtagactttaaaagatcttgactaaagtaatatatctatattttctgtttcgataaacaacgatagcgctagtgctacatcttttaatgtatataaccatgtagtatcaatagcgctacatcttaagcgtgtagcaccagcagcgctacatattttgatgtatataagcatgtagcatcaatagcgctacatcttttgttaaatataagcacatcttttgatatatataagcatgtagcatcaatagtgctagctatggtgctaatcttacattatatggcgtatatgttagttaatatctaacgttgat

SEQ ID NO: 9960 - DNA, 2008 bp, Zea Mays
gttattctcggatatatcctggagatcatgctaacttggatcatgtgagaactagtacttacagaaatgccataatgcatcacaaagatcttatttcaggcaaggtagttttggatgtgggttgcggcactggtgttctttcgatattctgtgcttttgctggtgccactcgtgtttatgcagttgatgcaagtgatattgcatttcaggctatggagattgtaagagagaatgagctgtctgacaaagttgtggttttgcatggccgaattgaggatgtcgatattgaagaaaaagttgatgtcatcatatctgaatggatgggctacatgcttttgtatgagagtatgctgggaagtgtaatttttgctagggacaaatggcttaagccaggaggtcttattcttccatcgcatgcatcgctttacatggcacctgttacgaattctcaaagataccatgatagtatttacttctggcgagatgtatatggcataaaaatgtcctctatgatgcctcttgcgaaactatgtgcgtttatggagccatcagttgagacaattagtggagagaatgtcttgacatggccagcagtggttgcacaggtggattgttataccatacaagctcagaagctcgaaaccatcactgctgcatttaaatttacgtcaatgttacaagttacaggcctgatcagagtttagtttttacccatgattggtggaatataatgtgctacatgtggtgtttgatctgatacagctccattgcatggttttgcattttggttcgatgttgagttcaatggaccagtacgccagaaatcgaagaagcaacctagtcaatcattggatgagaacacccaaaatgccagcccaagcaataggaagagaaaaccagatgtctctattgttctttcaactgcaccagaggatgcccctactcactggcagcagacccttttgtacttgtttgaacctatagaactaaacaaagatcagatcatagaaggctctgttactatctcccagagccagcaacatgctcgcttccttaacatctgcctgaaatactttactggcgaccaatggtatgtcaaagaatctgtgatgcgataatctgggggaaactgaaacatagtaaccttctttctgaataggctcaaatctgttttgtatgaaggacaaccttgctgctggtcattgcggtttaggagcattctgactgtactgggttgtcgtggtagcaaattgataaaaaatggagtgccatttcgagtgcagcttgatcaaaatggtagtgggcctcgacaagtaatatgtgaatctttggctccaaactcaaattgacgaacaaaacatagaacatgttgacaagagtagtaccgttttctttttttttttgttcttttgaataggtacaagctgctggtactttattccccataatagactgctcattcattgtaacgcttctgcagcgtgtagtgcagcatagacggtatgattttacaaatggtagcattgaatttttacgagtggagtttttgaagagtaaaatgcatgaataaaatgtgcatggtgtctggacaagtagaatgcatggtgaatgtcagtttgtttcaatttggccattagctccttaataatcatacgtatttgatttactaggttccgttgatgacagcggacatattactgcatatactatattcttttttcactttcaccccctcacttaatttatttgcgtaacatccgtaagtctaacatcctgcttaagaactgttattttcatctacaatgtatagcattcctcattatgtgtcccctctccaagtgtgatattgtgtttttttttcaatatgtgttcctattttattttcgcatttaattattttttgtctcacctttaaataattgagttatgcgattgctggttctcactatgatagaaaggattatggttggatccaatacacctcgcttatatctactgccacatcaac

SEQ ID NO: 9961 - DNA, 2983 bp, Zea Mays
atggccgatttggggagaagggcggcttgcgcggacaatgtagctcatatagtccatagcctattcgaatgccttctaagccggcccgttggcccaactgaaacattagtccgccttctcccccgagacccccgagagtcccctcgctgccgacgccacacaaacgcctccaccctcatgttcaccggcgctgcgggcggcattggcaacctgccacggccgcgcaggccgcggctcggcggaataggacacgggggcgtcatggtgtctccacagggacaggtggctctgggggcacatccgcacctagccgccccgccgtgcaccgactacgacgtggcctacttcaaggcctactcacacatcggcgtccacgaggagatgctcaaggatcatgtgagaactagtacttacagaaatgccataatgcatcacaaagatcttatttcaggcaaggtagttttggatgtgggttgcggcactggtgttctttcgatattctgtgcttttgctggtgccactcgtgtttatgcagttgatgcaagtgatattgcatttcaggctatggagattgtaagagagaatgagctgtctgacaaagttgtggttttgcatggccgaattgaggatgtcgatattgaagaaaaagttgatgtcatcatatctgaatggatgggctacatgcttttgtatgagagtatgctgggaagtgtaatttttgctagggacaaatggcttaagccaggaggtcttattcttccatcgcatgcatcgctttacatggcacctgttacgaattctcaaagataccatgatagtatttacttctggcgagatgtatatggcataaaaatgtcctctatgatgcctcttgcgaaactatgtgcgtttatggagccatcagttgagacaattagtggagagaatgtcttgacatggccagcagtggttgcacaggtggattgttataccatacaagctcagaagctcgaaaccatcactgctgcatttaaatttacgtcaatgttacaagggcagacctggtgcagtagtgagagctgtttcaccaagtcaccaagtcatgggttcgaagtaacctctccacattttcgtgggaaaagcttgccttggtttatccctttccgagaccccactcatgtgggagcctccgacattgtgtctaccctttttataagcctacactcgtttcaaagcatgcatatactgctttcttcctgttttgcactcggttgttagctgtaattgggattagacatgcactgtgatgagagacttttttcagtgctttcagttaaagggatgagccttagttgtaagttgtatttcccaacgctgagaatgaggatggcatgctactttttccatgtatatcaatccaggatgtttctaatttcttgtaactactacaaatttcctaaaacattatataaggatacaatgttctaatgctttgggaagttaggatatgatgttctaatgcttgagctggaatgcaatcaacaagagcatttgagagaatctttcatacatgtgacttattttgaggtggtgctaataaatccacctcttctgtgtagctaattatggagatatattaatctggcttatcttataattttgtgactgcttgcccagttacaggcctgatcagagtttagtttttacccatgattggtggaatataatgtgctacatgtggtgtttgatctgatacagctccattgcatggttttgcattttggttcgatgttgagttcaatggaccagtacgccagaaatcgaagaagcaacctagtcaatcattggatgagaacacccaaaatgccagcccaagcaataggaagagaaaaccagatgtctctattgttctttcaactgcaccagaggatgcccctactcactggcagcagacccttttgtacttgtttgaacctatagaactaaacaaagatcagatcatagaaggctctgttactatctcccagagccagcaacatgctcgcttccttaacatctgcctgaaatactttactggcgaccaatggtatgtcaaagaatctgtgatgcgataatctgggggaaactgaaacatagtaaccttctttctgaataggctcaaatctgttttgtatgaaggacaaccttgctgctggtcattgcggtttaggagcattctgactgtactgggttgtcgtggtagcaaattgataaaaaatggagtgccatttcgagtgcagcttgatcaaaatggtagtgggcctcgacaagtaatatgtgaatctttggctccaaactcaaattgacgaacaaaacatagaacatgttgacaagagtagtaccgttttctttttttttttgttcttttgaataggtacaagctgctggtactttattccccataatagactgctcattcattgtaacgcttctgcagcgtgtagtgcagcatagacggtatgattttacaaatggtagcattgaatttttacgagtggagtttttgaagagtaaaatgcatgaataaaatgtgcatggtgtctggacaagtagaatgcatggtgaatgtcagtttgtttcaatttggccattagctccttaataatcatacgtatttgatttactaggttccgttgatgacagcggacatattactgcatatactatattcttttttcactttcaccccctcacttaatttatttgcgtaacatccgtaagtctaacatcctgcttaagaactgttattttcatctacaatgtatagcattcctcattatgtgtcccctctccaagtgtgatattgtgtttttttttcaatatgtgttcctattttattttcgcatttaattattttttgtctcacctttaaataattgagttatgcgattgctggttctcactatgatagaaaggattatggttggatccaatacacctcgcttatatctactgccacatcaac

SEQ ID NO: 9962 - DNA, 3230 bp, Zea Mays
atggccgatttggggagaagggcggcttgcgcggacaatgtagctcatatagtccatagcctattcgaatgccttctaagccggcccgttggcccaactgaaacattagtccgccttctcccccgagacccccgagagtcccctcgctgccgacgccacacaaacgcctccaccctcatgttcaccggcgctgcgggcggcattggcaacctgccacggccgcgcaggccgcggctcggcggaataggacacgggggcgtcatggtgtctccacagggacaggtggctctgggggcacatccgcacctagccgccccgccgtgcaccgactacgacgtggcctacttcaaggcctactcacacatcggcgtccacgaggagatgctcaaggatcatgtgagaactagtacttacagaaatgccataatgcatcacaaagatcttatttcaggcaaggtttatgcagttgatgcaagtgatattgcatttcaggctatggagattgtaagagagaatgagctgtctgacaaagttgtggttttgcatggccgaattgaggatgtcgatattgaagaaaaagttgatgtcatcatatctgaatggatgggctacatgcttttgtatgagagtatgctgggaagtgtaatttttgctagggacaaatggcttaagccaggaggtcttattcttccatcgcatgcatcgctttacatggcacctgttacgaattctcaaagataccatgatagtatttacttctggcgagatgtatatggcataaaaatgtcctctatgatgcctcttgcgaaactatgtgcgtttatggagccatcagttgagacaattagtggagagaatgtcttgacatggccagcagtggttgcacaggtggattgttataccatacaagctcagaagctcgaaaccatcactgctgcatttaaatttacgtcaatgttacaagggcagacctggtgcagtagtgagagctgtttcaccaagtcaccaagtcatgggttcgaagtaacctctccacattttcgtgggaaaagcttgccttggtttatccctttccgagaccccactcatgtgggagcctccgacattgtgtctaccctttttataagcctacactcgtttcaaagcatgcatatactgctttcttcctgttttgcactcggttgttagctgtaattgggattagacatgcactgtgatgagagacttttttcagtgctttcagttaaagggatgagccttagttgtaagttgtatttcccaacgctgagaatgaggatggcatgctactttttccatgtatatcaatccaggatgtttctaatttcttgtaactactacaaatttcctaaaacattatataaggatacaatgttctaatgctttgggaagttaggatatgatgttctaatgcttgagctggaatgcaatcaacaagagcatttgagagaatctttcatacatgtgacttattttgaggtggtgctaataaatccacctcttctgtgtagctaattatggagatatattaatctggcttatcttataattttgtgactgcttgcccagttacaggcctgatcagagtttagtttttacccatgattggtggaatataatgtgctacatgtggtgtttgatctgatacaggtatagttaaattaatttagcaccacagtctgagcaaccgcacacttttgatgccactatcatgatctaaacctctactttgtttggccagctttcttctgctgccatgtcttggttaactgctttatcgtagtgaactctcttgcttagtcacattgccataaaacttttacgatggtaattgctcaatggaaattatattgatttagcgtgcttgatctttgtcgtgattgtgtttatatcatgtaggtgttacttagtgtagatgggataatagtgccaatcatgctctcgttatcttgtgttatttttttagctccattgcatggttttgcattttggttcgatgttgagttcaatggaccagtacgccagaaatcgaagaagcaacctagtcaatcattggatgagaacacccaaaatgccagcccaagcaataggaagagaaaaccagatgtctctattgttctttcaactgcaccagaggatgcccctactcactggcagcagacccttttgtacttgtttgaacctatagaactaaacaaagatcagatcatagaaggctctgttactatctcccagagccagcaacatgctcgcttccttaacatctgcctgaaatactttactggcgaccaatggtatgtcaaagaatctgtgatgcgataatctgggggaaactgaaacatagtaaccttctttctgaataggctcaaatctgttttgtatgaaggacaaccttgctgctggtcattgcggtttaggagcattctgactgtactgggttgtcgtggtagcaaattgataaaaaatggagtgccatttcgagtgcagcttgatcaaaatggtagtgggcctcgacaagtaatatgtgaatctttggctccaaactcaaattgacgaacaaaacatagaacatgttgacaagagtagtaccgttttctttttttttttgttcttttgaataggtacaagctgctggtactttattccccataatagactgctcattcattgtaacgcttctgcagcgtgtagtgcagcatagacggtatgattttacaaatggtagcattgaatttttacgagtggagtttttgaagagtaaaatgcatgaataaaatgtgcatggtgtctggacaagtagaatgcatggtgaatgtcagtttgtttcaatttggccattagctccttaataatcatacgtatttgatttactaggttccgttgatgacagcggacatattactgcatatactatattcttttttcactttcaccccctcacttaatttatttgcgtaacatccgtaagtctaacatcctgcttaagaactgttattttcatctacaatgtatagcattcctcattatgtgtcccctctccaagtgtgatattgtgtttttttttcaatatgtgttcctattttattttcgcatttaattattttttgtctcacctttaaataattgagttatgcgattgctggttctcactatgatagaaaggattatggttggatccaatacacctcgcttatatctactgccacatcaac

SEQ ID NO: 9963 - DNA, 3313 bp, Zea Mays
atggccgatttggggagaagggcggcttgcgcggacaatgtagctcatatagtccatagcctattcgaatgccttctaagccggcccgttggcccaactgaaacattagtccgccttctcccccgagacccccgagagtcccctcgctgccgacgccacacaaacgcctccaccctcatgttcaccggcgctgcgggcggcattggcaacctgccacggccgcgcaggccgcggctcggcggaataggacacgggggcgtcatggtgtctccacagggacaggtggctctgggggcacatccgcacctagccgccccgccgtgcaccgactacgacgtggcctacttcaaggcctactcacacatcggcgtccacgaggagatgctcaaggttgctgattgcaggatcatgtgagaactagtacttacagaaatgccataatgcatcacaaagatcttatttcaggcaaggtagttttggatgtgggttgcggcactggtgttctttcgatattctgtgcttttgctggtgccactcgtgtttatgcagttgatgcaagtgatattgcatttcaggctatggagattgtaagagagaatgagctgtctgacaaagttgtggttttgcatggccgaattgaggatgtcgatattgaagaaaaagttgatgtcatcatatctgaatggatgggctacatgcttttgtatgagagtatgctgggaagtgtaatttttgctagggacaaatggcttaagccaggaggtcttattcttccatcgcatgcatcgctttacatggcacctgttacgaattctcaaagataccatgatagtatttacttctggcgagatgtatatggcataaaaatgtcctctatgatgcctcttgcgaaactatgtgcgtttatggagccatcagttgagacaattagtggagagaatgtcttgacatggccagcagtggttgcacaggtggattgttataccatacaagctcagaagctcgaaaccatcactgctgcatttaaatttacgtcaatgttacaagggcagacctggtgcagtagtgagagctgtttcaccaagtcaccaagtcatgggttcgaagtaacctctccacattttcgtgggaaaagcttgccttggtttatccctttccgagaccccactcatgtgggagcctccgacattgtgtctaccctttttataagcctacactcgtttcaaagcatgcatatactgctttcttcctgttttgcactcggttgttagctgtaattgggattagacatgcactgtgatgagagacttttttcagtgctttcagttaaagggatgagccttagttgtaagttgtatttcccaacgctgagaatgaggatggcatgctactttttccatgtatatcaatccaggatgtttctaatttcttgtaactactacaaatttcctaaaacattatataaggatacaatgttctaatgctttgggaagttaggatatgatgttctaatgcttgagctggaatgcaatcaacaagagcatttgagagaatctttcatacatgtgacttattttgaggtggtgctaataaatccacctcttctgtgtagctaattatggagatatattaatctggcttatcttataattttgtgactgcttgcccagttacaggcctgatcagagtttagtttttacccatgattggtggaatataatgtgctacatgtggtgtttgatctgatacaggtatagttaaattaatttagcaccacagtctgagcaaccgcacacttttgatgccactatcatgatctaaacctctactttgtttggccagctttcttctgctgccatgtcttggttaactgctttatcgtagtgaactctcttgcttagtcacattgccataaaacttttacgatggtaattgctcaatggaaattatattgatttagcgtgcttgatctttgtcgtgattgtgtttatatcatgtaggtgttacttagtgtagatgggataatagtgccaatcatgctctcgttatcttgtgttatttttttagctccattgcatggttttgcattttggttcgatgttgagttcaatggaccagtacgccagaaatcgaagaagcaacctagtcaatcattggatgagaacacccaaaatgccagcccaagcaataggaagagaaaaccagatgtctctattgttctttcaactgcaccagaggatgcccctactcactggcagcagacccttttgtacttgtttgaacctatagaactaaacaaagatcagatcatagaaggctctgttactatctcccagagccagcaacatgctcgcttccttaacatctgcctgaaatactttactggcgaccaatggtatgtcaaagaatctgtgatgcgataatctgggggaaactgaaacatagtaaccttctttctgaataggctcaaatctgttttgtatgaaggacaaccttgctgctggtcattgcggtttaggagcattctgactgtactgggttgtcgtggtagcaaattgataaaaaatggagtgccatttcgagtgcagcttgatcaaaatggtagtgggcctcgacaagtaatatgtgaatctttggctccaaactcaaattgacgaacaaaacatagaacatgttgacaagagtagtaccgttttctttttttttttgttcttttgaataggtacaagctgctggtactttattccccataatagactgctcattcattgtaacgcttctgcagcgtgtagtgcagcatagacggtatgattttacaaatggtagcattgaatttttacgagtggagtttttgaagagtaaaatgcatgaataaaatgtgcatggtgtctggacaagtagaatgcatggtgaatgtcagtttgtttcaatttggccattagctccttaataatcatacgtatttgatttactaggttccgttgatgacagcggacatattactgcatatactatattcttttttcactttcaccccctcacttaatttatttgcgtaacatccgtaagtctaacatcctgcttaagaactgttattttcatctacaatgtatagcattcctcattatgtgtcccctctccaagtgtgatattgtgtttttttttcaatatgtgttcctattttattttcgcatttaattattttttgtctcacctttaaataattgagttatgcgattgctggttctcactatgatagaaaggattatggttggatccaatacacctcgcttatatctactgccacatcaac

SEQ ID NO: 9964 - DNA, 2291 bp, Zea Mays
atggccgatttggggagaagggcggcttgcgcggacaatgtagctcatatagtccatagcctattcgaatgccttctaagccggcccgttggcccaactgaaacattagtccgccttctcccccgagacccccgagagtcccctcgctgccgacgccacacaaacgcctccaccctcatgttcaccggcgctgcgggcggcattggcaacctgccacggccgcgcaggccgcggctcggcggaataggacacgggggcgtcatggtgtctccacagggacaggtggctctgggggcacatccgcacctagccgccccgccgtgcaccgactacgacgtggcctacttcaaggcctactcacacatcggcgtccacgaggagatgctcaaggatcatgtgagaactagtacttacagaaatgccataatgcatcacaaagatcttatttcaggcaaggtttatgcagttgatgcaagtgatattgcatttcaggctatggagattgtaagagagaatgagctgtctgacaaagttgtggttttgcatggccgaattgaggatgtcgatattgaagaaaaagttgatgtcatcatatctgaatggatgggctacatgcttttgtatgagagtatgctgggaagtgtaatttttgctagggacaaatggcttaagccaggaggtcttattcttccatcgcatgcatcgctttacatggcacctgttacgaattctcaaagataccatgatagtatttacttctggcgagatgtatatggcataaaaatgtcctctatgatgcctcttgcgaaactatgtgcgtttatggagccatcagttgagacaattagtggagagaatgtcttgacatggccagcagtggttgcacaggtggattgttataccatacaagctcagaagctcgaaaccatcactgctgcatttaaatttacgtcaatgttacaagttacaggcctgatcagagtttagtttttacccatgattggtggaatataatgtgctacatgtggtgtttgatctgatacagctccattgcatggttttgcattttggttcgatgttgagttcaatggaccagtacgccagaaatcgaagaagcaacctagtcaatcattggatgagaacacccaaaatgccagcccaagcaataggaagagaaaaccagatgtctctattgttctttcaactgcaccagaggatgcccctactcactggcagcagacccttttgtacttgtttgaacctatagaactaaacaaagatcagatcatagaaggctctgttactatctcccagagccagcaacatgctcgcttccttaacatctgcctgaaatactttactggcgaccaatggtatgtcaaagaatctgtgatgcgataatctgggggaaactgaaacatagtaaccttctttctgaataggctcaaatctgttttgtatgaaggacaaccttgctgctggtcattgcggtttaggagcattctgactgtactgggttgtcgtggtagcaaattgataaaaaatggagtgccatttcgagtgcagcttgatcaaaatggtagtgggcctcgacaagtaatatgtgaatctttggctccaaactcaaattgacgaacaaaacatagaacatgttgacaagagtagtaccgttttctttttttttttgttcttttgaataggtacaagctgctggtactttattccccataatagactgctcattcattgtaacgcttctgcagcgtgtagtgcagcatagacggtatgattttacaaatggtagcattgaatttttacgagtggagtttttgaagagtaaaatgcatgaataaaatgtgcatggtgtctggacaagtagaatgcatggtgaatgtcagtttgtttcaatttggccattagctccttaataatcatacgtatttgatttactaggttccgttgatgacagcggacatattactgcatatactatattcttttttcactttcaccccctcacttaatttatttgcgtaacatccgtaagtctaacatcctgcttaagaactgttattttcatctacaatgtatagcattcctcattatgtgtcccctctccaagtgtgatattgtgtttttttttcaatatgtgttcctattttattttcgcatttaattattttttgtctcacctttaaataattgagttatgcgattgctggttctcactatgatagaaaggattatggttggatccaatacacctcgcttatatctactgccacatcaac

SEQ ID NO: 9965 - DNA, 3294 bp, Zea Mays
atggccgatttggggagaagggcggcttgcgcggacaatgtagctcatatagtccatagcctattcgaatgccttctaagccggcccgttggcccaactgaaacattagtccgccttctcccccgagacccccgagagtcccctcgctgccgacgccacacaaacgcctccaccctcatgttcaccggcgctgcgggcggcattggcaacctgccacggccgcgcaggccgcggctcggcggaataggacacgggggcgtcatggtgtctccacagggacaggtggctctgggggcacatccgcacctagccgccccgccgtgcaccgactacgacgtggcctacttcaaggcctactcacacatcggcgtccacgaggagatgctcaaggatcatgtgagaactagtacttacagaaatgccataatgcatcacaaagatcttatttcaggcaaggtagttttggatgtgggttgcggcactggtgttctttcgatattctgtgcttttgctggtgccactcgtgtttatgcagttgatgcaagtgatattgcatttcaggctatggagattgtaagagagaatgagctgtctgacaaagttgtggttttgcatggccgaattgaggatgtcgatattgaagaaaaagttgatgtcatcatatctgaatggatgggctacatgcttttgtatgagagtatgctgggaagtgtaatttttgctagggacaaatggcttaagccaggaggtcttattcttccatcgcatgcatcgctttacatggcacctgttacgaattctcaaagataccatgatagtatttacttctggcgagatgtatatggcataaaaatgtcctctatgatgcctcttgcgaaactatgtgcgtttatggagccatcagttgagacaattagtggagagaatgtcttgacatggccagcagtggttgcacaggtggattgttataccatacaagctcagaagctcgaaaccatcactgctgcatttaaatttacgtcaatgttacaagacctggtgcagtagtgagagctgtttcaccaagtcaccaagtcatgggttcgaagtaacctctccacattttcgtgggaaaagcttgccttggtttatccctttccgagaccccactcatgtgggagcctccgacattgtgtctaccctttttataagcctacactcgtttcaaagcatgcatatactgctttcttcctgttttgcactcggttgttagctgtaattgggattagacatgcactgtgatgagagacttttttcagtgctttcagttaaagggatgagccttagttgtaagttgtatttcccaacgctgagaatgaggatggcatgctactttttccatgtatatcaatccaggatgtttctaatttcttgtaactactacaaatttcctaaaacattatataaggatacaatgttctaatgctttgggaagttaggatatgatgttctaatgcttgagctggaatgcaatcaacaagagcatttgagagaatctttcatacatgtgacttattttgaggtggtgctaataaatccacctcttctgtgtagctaattatggagatatattaatctggcttatcttataattttgtgactgcttgcccagttacaggcctgatcagagtttagtttttacccatgattggtggaatataatgtgctacatgtggtgtttgatctgatacaggtatagttaaattaatttagcaccacagtctgagcaaccgcacacttttgatgccactatcatgatctaaacctctactttgtttggccagctttcttctgctgccatgtcttggttaactgctttatcgtagtgaactctcttgcttagtcacattgccataaaacttttacgatggtaattgctcaatggaaattatattgatttagcgtgcttgatctttgtcgtgattgtgtttatatcatgtaggtgttacttagtgtagatgggataatagtgccaatcatgctctcgttatcttgtgttatttttttagctccattgcatggttttgcattttggttcgatgttgagttcaatggaccagtacgccagaaatcgaagaagcaacctagtcaatcattggatgagaacacccaaaatgccagcccaagcaataggaagagaaaaccagatgtctctattgttctttcaactgcaccagaggatgcccctactcactggcagcagacccttttgtacttgtttgaacctatagaactaaacaaagatcagatcatagaaggctctgttactatctcccagagccagcaacatgctcgcttccttaacatctgcctgaaatactttactggcgaccaatggtatgtcaaagaatctgtgatgcgataatctgggggaaactgaaacatagtaaccttctttctgaataggctcaaatctgttttgtatgaaggacaaccttgctgctggtcattgcggtttaggagcattctgactgtactgggttgtcgtggtagcaaattgataaaaaatggagtgccatttcgagtgcagcttgatcaaaatggtagtgggcctcgacaagtaatatgtgaatctttggctccaaactcaaattgacgaacaaaacatagaacatgttgacaagagtagtaccgttttctttttttttttgttcttttgaataggtacaagctgctggtactttattccccataatagactgctcattcattgtaacgcttctgcagcgtgtagtgcagcatagacggtatgattttacaaatggtagcattgaatttttacgagtggagtttttgaagagtaaaatgcatgaataaaatgtgcatggtgtctggacaagtagaatgcatggtgaatgtcagtttgtttcaatttggccattagctccttaataatcatacgtatttgatttactaggttccgttgatgacagcggacatattactgcatatactatattcttttttcactttcaccccctcacttaatttatttgcgtaacatccgtaagtctaacatcctgcttaagaactgttattttcatctacaatgtatagcattcctcattatgtgtcccctctccaagtgtgatattgtgtttttttttcaatatgtgttcctattttattttcgcatttaattattttttgtctcacctttaaataattgagttatgcgattgctggttctcactatgatagaaaggattatggttggatccaatacacctcgcttatatctactgccacatcaac

SEQ ID NO: 9966 - DNA, 2354 bp, Zea Mays
atggccgatttggggagaagggcggcttgcgcggacaatgtagctcatatagtccatagcctattcgaatgccttctaagccggcccgttggcccaactgaaacattagtccgccttctcccccgagacccccgagagtcccctcgctgccgacgccacacaaacgcctccaccctcatgttcaccggcgctgcgggcggcattggcaacctgccacggccgcgcaggccgcggctcggcggaataggacacgggggcgtcatggtgtctccacagggacaggtggctctgggggcacatccgcacctagccgccccgccgtgcaccgactacgacgtggcctacttcaaggcctactcacacatcggcgtccacgaggagatgctcaaggatcatgtgagaactagtacttacagaaatgccataatgcatcacaaagatcttatttcaggcaaggtagttttggatgtgggttgcggcactggtgttctttcgatattctgtgcttttgctggtgccactcgtgtttatgcagttgatgcaagtgatattgcatttcaggctatggagattgtaagagagaatgagctgtctgacaaagttgtggttttgcatggccgaattgaggatgtcgatattgaagaaaaagttgatgtcatcatatctgaatggatgggctacatgcttttgtatgagagtatgctgggaagtgtaatttttgctagggacaaatggcttaagccaggaggtcttattcttccatcgcatgcatcgctttacatggcacctgttacgaattctcaaagataccatgatagtatttacttctggcgagatgtatatggcataaaaatgtcctctatgatgcctcttgcgaaactatgtgcgtttatggagccatcagttgagacaattagtggagagaatgtcttgacatggccagcagtggttgcacaggtggattgttataccatacaagctcagaagctcgaaaccatcactgctgcatttaaatttacgtcaatgttacaaggcctgatcagagtttagtttttacccatgattggtggaatataatgtgctacatgtggtgtttgatctgatacagctccattgcatggttttgcattttggttcgatgttgagttcaatggaccagtacgccagaaatcgaagaagcaacctagtcaatcattggatgagaacacccaaaatgccagcccaagcaataggaagagaaaaccagatgtctctattgttctttcaactgcaccagaggatgcccctactcactggcagcagacccttttgtacttgtttgaacctatagaactaaacaaagatcagatcatagaaggctctgttactatctcccagagccagcaacatgctcgcttccttaacatctgcctgaaatactttactggcgaccaatggtatgtcaaagaatctgtgatgcgataatctgggggaaactgaaacatagtaaccttctttctgaataggctcaaatctgttttgtatgaaggacaaccttgctgctggtcattgcggtttaggagcattctgactgtactgggttgtcgtggtagcaaattgataaaaaatggagtgccatttcgagtgcagcttgatcaaaatggtagtgggcctcgacaagtaatatgtgaatctttggctccaaactcaaattgacgaacaaaacatagaacatgttgacaagagtagtaccgttttctttttttttttgttcttttgaataggtacaagctgctggtactttattccccataatagactgctcattcattgtaacgcttctgcagcgtgtagtgcagcatagacggtatgattttacaaatggtagcattgaatttttacgagtggagtttttgaagagtaaaatgcatgaataaaatgtgcatggtgtctggacaagtagaatgcatggtgaatgtcagtttgtttcaatttggccattagctccttaataatcatacgtatttgatttactaggttccgttgatgacagcggacatattactgcatatactatattcttttttcactttcaccccctcacttaatttatttgcgtaacatccgtaagtctaacatcctgcttaagaactgttattttcatctacaatgtatagcattcctcattatgtgtcccctctccaagtgtgatattgtgtttttttttcaatatgtgttcctattttattttcgcatttaattattttttgtctcacctttaaataattgagttatgcgattgctggttctcactatgatagaaaggattatggttggatccaatacacctcgcttatatctactgccacatcaac

SEQ ID NO: 9967 - DNA, 2824 bp, Zea Mays
atggccgatttggggagaagggcggcttgcgcggacaatgtagctcatatagtccatagcctattcgaatgccttctaagccggcccgttggcccaactgaaacattagtccgccttctcccccgagacccccgagagtcccctcgctgccgacgccacacaaacgcctccaccctcatgttcaccggcgctgcgggcggcattggcaacctgccacggccgcgcaggccgcggctcggcggaataggacacgggggcgtcatggtgtctccacagggacaggtggctctgggggcacatccgcacctagccgccccgccgtgcaccgactacgacgtggcctacttcaaggcctactcacacatcggcgtccacgaggagatgctcaaggatcatgtgagaactagtacttacagaaatgccataatgcatcacaaagatcttatttcaggcaaggtttatgcagttgatgcaagtgatattgcatttcaggctatggagattgtaagagagaatgagctgtctgacaaagttgtggttttgcatggccgaattgaggatgtcgatattgaagaaaaagttgatgtcatcatatctgaatggatgggctacatgcttttgtatgagagtatgctgggaagtgtaatttttgctagggacaaatggcttaagccaggaggtcttattcttccatcgcatgcatcgctttacatggcacctgttacgaattctcaaagataccatgatagtatttacttctggcgagatgtatatggcataaaaatgtcctctatgatgcctcttgcgaaactatgtgcgtttatggagccatcagttgagacaattagtggagagaatgtcttgacatggccagcagtggttgcacaggtggattgttataccatacaagctcagaagctcgaaaccatcactgctgcatttaaatttacgtcaatgttacaagggcagacctggtgcagtagtgagagctgtttcaccaagtcaccaagtcatgggttcgaagtaacctctccacattttcgtgggaaaagcttgccttggtttatccctttccgagaccccactcatgtgggagcctccgacattgtgtctaccctttttataagcctacactcgtttcaaagcatgcatatactgctttcttcctgttttgcactcggttgttagctgtaattgggattagacatgcactgtgatgagagacttttttcagtgctttcagttaaagggatgagccttagttgtaagttgtatttcccaacgctgagaatgaggatggcatgctactttttccatgtatatcaatccaggatgtttctaatttcttgtaactactacaaatttcctaaaacattatataaggatacaatgttctaatgctttgggaagttaggatatgatgttctaatgcttgagctggaatgcaatcaacaagagcatttgagagaatctttcatacatgtgacttattttgagttacaggcctgatcagagtttagtttttacccatgattggtggaatataatgtgctacatgtggtgtttgatctgatacagctccattgcatggttttgcattttggttcgatgttgagttcaatggaccagtacgccagaaatcgaagaagcaacctagtcaatcattggatgagaacacccaaaatgccagcccaagcaataggaagagaaaaccagatgtctctattgttctttcaactgcaccagaggatgcccctactcactggcagcagacccttttgtacttgtttgaacctatagaactaaacaaagatcagatcatagaaggctctgttactatctcccagagccagcaacatgctcgcttccttaacatctgcctgaaatactttactggcgaccaatggtatgtcaaagaatctgtgatgcgataatctgggggaaactgaaacatagtaaccttctttctgaataggctcaaatctgttttgtatgaaggacaaccttgctgctggtcattgcggtttaggagcattctgactgtactgggttgtcgtggtagcaaattgataaaaaatggagtgccatttcgagtgcagcttgatcaaaatggtagtgggcctcgacaagtaatatgtgaatctttggctccaaactcaaattgacgaacaaaacatagaacatgttgacaagagtagtaccgttttctttttttttttgttcttttgaataggtacaagctgctggtactttattccccataatagactgctcattcattgtaacgcttctgcagcgtgtagtgcagcatagacggtatgattttacaaatggtagcattgaatttttacgagtggagtttttgaagagtaaaatgcatgaataaaatgtgcatggtgtctggacaagtagaatgcatggtgaatgtcagtttgtttcaatttggccattagctccttaataatcatacgtatttgatttactaggttccgttgatgacagcggacatattactgcatatactatattcttttttcactttcaccccctcacttaatttatttgcgtaacatccgtaagtctaacatcctgcttaagaactgttattttcatctacaatgtatagcattcctcattatgtgtcccctctccaagtgtgatattgtgtttttttttcaatatgtgttcctattttattttcgcatttaattattttttgtctcacctttaaataattgagttatgcgattgctggttctcactatgatagaaaggattatggttggatccaatacacctcgcttatatctactgccacatcaac

SEQ ID NO: 9968 - DNA, 4584 bp, Zea Mays
gccgattcaaaaccttcccgatgcgatagcgaagcagcctccacagcagctcgactcccacccggcaggcacagccgcacaggaacccacccggcctctccaccgctgcacctgcagtcctgcacccatttaaatttaaacatttaaaaaaaaaacccaccccacgaaattcgcagaccaccttaattcccattacatcaattattttctcttcccgacccagtccgccgctgcctgcttccttccttccttctctctcctccctctcctccagcgacagagacagggaaggaggcggaggaggaggccgcgtggctgcggaggcgggcagccgcggcccgtgcgattcgcggcgcctctctcgccgtatctgcggtggcgcgggcgggttggcggccggccagcgagatcggctgttgtttttggtggtatttttttttctttccccacggcggtttttgggagttggagcgtggattgaagacggctgacggccggaggggtttggggggtccagttgaggccgtcggggcggagatcccgcggggagctgcggttccgccgcggcccgtgagttggattccgggcgcagcgccgcgccgacgatggcgtcggtggaggtgcgcaagtccagggccctgcgggcgcgcagcgggcccagcaagctgcagccggcgcggtcgatgccgctcgactacaggtactcggccggggcgtcgccggcgaacggcgccggcggcgggccggacgcgaacggcgtcgggcggcgggcggctgcggcggaggcggagaacggaggggaggtggtggtgcggttggaggggggcgatgcggactccccgtacagctccacggcggtcacagcggcggaggaggaggaagtgggggagagaggtggaggaggagacgaggtggattcagcggccacggcgacgccgaggcggttgtcgccgagggcagcagcgagccccacggaaggcgacgcccggtggggtgacaccagctcgtacggcgctaagaagaagcatagagttttttgtcagcttccgaatggcgattgggcattatgcacagtaattacaacctctggtgatgagtcggttgtaaaggtttctgaagggaaggtactgagattgaaaaccgagtgtctacaacctgcaaatcctgaaattcttgatggagtggatgatcttatgcagctaagttatctaagtgaaccatcagtactgtacaatctgcagtacagatactccaaggatatgatttatactaaagcaggtccagttttggtggctgtcaatcctttcaagaaagtttcactgtatggtaacgagtacatcgatgcatatagaaataaatcaatggatagtccacatgtttatgcaatagcagatgcagcactttgtgaaatgaaaagagatgaagtcaaccaatctataattataagtggtgagagtggagcaggaaaaacagaaaccgcaaaaattgctatgcagtacctggcttcccttggaggtggaagtggcattgaatacgaaattcttcagacaaatccaatactcgaggcttttggcaatgcaaagacattgagaaatgataactcaagtcgttttggaaagcttatagaaattcatttcagtaccactggaagaatatgtggtgccatgattcaaacatttttgcttgagaagtccagagttgtgcaatgtgcagttggtgagcgatcataccatatattttatcagctgtgcgctggtgcacctgcctctctaaaagagaagttgaatttgaaaaaggtggatggatacaaatatcttaagcagagctgttgctattcaattgcgggtgtggatgatgcccaaatgtttcgaactgtgacgcaagctatgaacattgttcatatcagcaaagaggaccaagagagtgtttttgcaatggtctctgctgttctttggctgggggatgtctcgttcacagtaattgacaatgaaaatcatgttgaaatcatagtagatgaagcttcgaaaacggtttcagaacttcttggctgcagtattgaagatctcaatttagctttatcaaagcgccacatgaaagttaataatgaaaacattgtccagaaacttacccttgctcaggcaactgacacaagagatgctctggccaaatcagtgtatgccagtttgtttgagtggcttgtagaacaaattaataagtctctctcagttggcaagcgtcgaactgggagatctatcagtattcttgatatctatggctttgaatcatttgataagaacagttttgaacagttctgcattaattatgctaatgaaaggttgcagcaacatttcaatcgtcatttgtttaagcttgagcaagaggaatatgtggaggatggcatcgactgggcaaaggttgacttcgaggataatcaggactgtttgagcctctttgagaaaaaaccactgggactattgtctctgctggatgaggaatctactttcccgaatgccacagatcttacttttgcaaacaagcttaagcaacatcttgactcgaattcttgcttcagaggagaaagaggcaaggcatttgctgtccgtcactatgcaggagaggtggcttatgatacttcgggttttctggagaagaatagagatttattgcacatggactcgattcagctccttgccaaatgcaaaacttctctgccaaaaatgtttgcatcgaagatgctagttcaatcagataattctatgtctgttccatatagatctagtgctgctgattctcaaaaactaagtgttgccatgaagttcaagggtcaactgttccaacttatgcaaagactggaaagtacaacgccacactttattcgttgcattaaaccaaacaatttacaacttcctgcaatttatgaacaaggacttgtgcttcaacaacttaaatgttgtggggttcttgaggttgtccggatttcaagatctgggtatccaacaagaatgactcaccagaagtttgctcggcggtatggttttcttcttgaggatgttgcatctcaagatccactcagtgtttcagttgcaattcttcatcagttcaacattttacctgagatgtatcaagttggctacacaaagttgttcttccgaactgattggcaaccttgaagatactcggaatcgtactctgcatggtattttaagggttcaaagctgtttcagggggcatcaagcccgtcatcatgcaagagaacgaacaagaggagttttgactcttcaatcattcattcgtggtgagaatgcacggcaaatttactcctctttgttgaggaaacatagagccgcagttgttttgcagagaaatgtgagatgttggcttgcaagaaggtatttcataaatgtccggaaggcctcagtgataatacagtctggtattcgtggcagtcttgttcgaagatgtaatggcaatattgatctaataaatgtgctaagagagtttgaatcaaaacaggaggcacatggtgaccaaattttgatcaaggcctcagtcctggctgagttacagaggcggatactaaaagccgaggccacagtacgtgaaaaggatgaagagaacgagatgcttcatcagcggcttcagcaatatgaaaaccgctggttagagtacgaacagaaaatgaaagctatggaggaaatgtggcagaagcaaatgcgttcgctgcaatcgagcctttccgtagcaaagaagagccttgttttggatgaaacgcctaggatgtcggactcatcagtggatcagagctgggaaagcaatgggaaccaccatgtcagcagcggttctcagctggtgccacacactggtggacgtgaaatgaacgctggcctcagcgtcatcagccgcctggcagaagaattcgagcagcggagccaggttttcgctgatgacgccaagttcctggtcgaggtcaagtctgggcaggcggacgccagcctaaacccagacatggagctccggaggttgaagcagaacttcgactcgtggaagaaagatttcagtggacggatgagggagacgaaggtgatcctgaacaagctcggcaatggcaacgagtcatcgcccaactctgtgaagcggaagtggtggggcaggctgaacacctccaagttttcgtgagtttattatgtattgattggtaatttgtagatgtaaccggtattttacacgccggtgtggttctagcttcctagagtttctactctacgggtgctgtgaaagtccagtgtgttggactggatttgtattccacggagggcgagttgtatagttctcccacaatggcttccttttgaggggtcaaggaccactgaattgtgatgtaattacttgctgaagtagctgtcgaaggggggagattgtgagtgcttaatattccactatccttgtgctttactttctgcctgttgtagattcatagatttaaatgttggtatggtgtgacataatctatcatccgatgactcgtagcatgtttggtttgagaaataagatagtttattatttctcacttattttttgtttagt

SEQ ID NO: 9969 - DNA, 4579 bp, Zea Mays
gccgattcaaaaccttcccgatgcgatagcgaagcagcctccacagcagctcgactcccacccggcaggcacagccgcacaggaacccacccggcctctccaccgctgcacctgcagtcctgcacccatttaaatttaaacatttaaaaaaaaaacccaccccacgaaattcgcagaccaccttaattcccattacatcaattattttctcttcccgacccagtccgccgctgcctgcttccttccttccttctctctcctccctctcctccagcgacagagacagggaaggaggcggaggaggaggccgcgtggctgcggaggcgggcagccgcggcccgtgcgattcgcggcgcctctctcgccgtatctgcggtggcgcgggcgggttggcggccggccagcgagatcggctgttgtttttggtggtatttttttttctttccccacggcggtttttgggagttggagcgtggattgaagacggctgacggccggaggggtttggggggtccagttgaggccgtcggggcggagatcccgcggggagctgcggttccgccgcggcccgtgagttggattccgggcgcagcgccgcgccgacgatggcgtcggtggaggtgcgcaagtccagggccctgcgggcgcgcagcgggcccagcaagctgcagccggcgcggtcgatgccgctcgactacaggtactcggccggggcgtcgccggcgaacggcgccggcggcgggccggacgcgaacggcgtcgggcggcgggcggctgcggcggaggcggagaacggaggggaggtggtggtgcggttggaggggggcgatgcggactccccgtacagctccacggcggtcacagcggcggaggaggaggaagtgggggagagaggtggaggaggagacgaggtggattcagcggccacggcgacgccgaggcggttgtcgccgagggcagcagcgagccccacggaaggcgacgcccggtggggtgacaccagctcgtacggcgctaagaagaagcatagagttttttgtcagcttccgaatggcgattgggcattatgcacagtaattacaacctctggtgatgagtcggttgtaaaggtttctgaagggaaggtactgagattgaaaaccgagtgtctacaacctgcaaatcctgaaattcttgatggagtggatgatcttatgcagctaagttatctaagtgaaccatcagtactgtacaatctgcagtacagatactccaaggatatgatttatgtccagttttggtggctgtcaatcctttcaagaaagtttcactgtatggtaacgagtacatcgatgcatatagaaataaatcaatggatagtccacatgtttatgcaatagcagatgcagcactttgtgaaatgaaaagagatgaagtcaaccaatctataattataagtggtgagagtggagcaggaaaaacagaaaccgcaaaaattgctatgcagtacctggcttcccttggaggtggaagtggcattgaatacgaaattcttcagacaaatccaatactcgaggcttttggcaatgcaaagacattgagaaatgataactcaagtcgttttggaaagcttatagaaattcatttcagtaccactggaagaatatgtggtgccatgattcaaacatttttgcttgagaagtccagagttgtgcaatgtgcagttggtgagcgatcataccatatattttatcagctgtgcgctggtgcacctgcctctctaaaagagaagttgaatttgaaaaaggtggatggatacaaatatcttaagcagagctgttgctattcaattgcgggtgtggatgatgcccaaatgtttcgaactgtgacgcaagctatgaacattgttcatatcagcaaagaggaccaagagagtgtttttgcaatggtctctgctgttctttggctgggggatgtctcgttcacagtaattgacaatgaaaatcatgttgaaatcatagtagatgaagcttcgaaaacggtttcagaacttcttggctgcagtattgaagatctcaatttagctttatcaaagcgccacatgaaagttaataatgaaaacattgtccagaaacttacccttgctcaggcaactgacacaagagatgctctggccaaatcagtgtatgccagtttgtttgagtggcttgtagaacaaattaataagtctctctcagttggcaagcgtcgaactgggagatctatcagtattcttgatatctatggctttgaatcatttgataagaacagttttgaacagttctgcattaattatgctaatgaaaggttgcagcaacatttcaatcgtcatttgtttaagcttgagcaagaggaatatgtggaggatggcatcgactgggcaaaggttgacttcgaggataatcaggactgtttgagcctctttgagaaaaaaccactgggactattgtctctgctggatgaggaatctactttcccgaatgccacagatcttacttttgcaaacaagcttaagcaacatcttgactcgaattcttgcttcagaggagaaagaggcaaggcatttgctgtccgtcactatgcaggagaggtggcttatgatacttcgggttttctggagaagaatagagatttattgcacatggactcgattcagctccttgccaaatgcaaaacttctctgccaaaaatgtttgcatcgaagatgctagttcaatcagataattctatgtctgttccatatagatctagtgctgctgattctcaaaaactaagtgttgccatgaagttcaagggtcaactgttccaacttatgcaaagactggaaagtacaacgccacactttattcgttgcattaaaccaaacaatttacaacttcctgcaatttatgaacaaggacttgtgcttcaacaacttaaatgttgtggggttcttgaggttgtccggatttcaagatctgggtatccaacaagaatgactcaccagaagtttgctcggcggtatggttttcttcttgaggatgttgcatctcaagatccactcagtgtttcagttgcaattcttcatcagttcaacattttacctgagatgtatcaagttggctacacaaagttgttcttccgaactggtcagattggcaaccttgaagatactcggaatcgtactctgcatggtattttaagggttcaaagctgtttcagggggcatcaagcccgtcatcatgcaagagaacgaacaagaggagttttgactcttcaatcattcattcgtggtgagaatgcacggcaaatttactcctctttgttgaggaaacatagagccgcagttgttttgcagagaaatgtgagatgttggcttgcaagaaggtatttcataaatgtccggaaggcctcagtgataatacagtctggtattcgtggcagtcttgttcgaagatgtaatggcaatattgatctaataaatgtgctaagagagtttgaatcaaaacaggaggcacatggtgaccaaattttgatcaaggcctcagtcctggctgagttacagaggcggatactaaaagccgaggccacagtacgtgaaaaggatgaagagaacgagatgcttcatcagcggcttcagcaatatgaaaaccgctggttagagtacgaacagaaaatgaaagctatggaggaaatgtggcagaagcaaatgcgttcgctgcaatcgagcctttccgtagcaaagaagagccttgttttggatgaaacgcctaggatgtcggactcatcagtggatcagagctgggaaagcaatgggaaccaccatgtcagcagcggttctcagctggtgccacacactggtggacgtgaaatgaacgctggcctcagcgtcatcagccgcctggcagaagaattcgagcagcggagccaggttttcgctgatgacgccaagttcctggtcgaggtcaagtctgggcaggcggacgccagcctaaacccagacatggagctccggaggttgaagcagaacttcgactcgtggaagaaagatttcagtggacggatgagggagacgaaggtgatcctgaacaagctcggcaatggcaacgagtcatcgcccaactctgtgaagcggaagtggtggggcaggctgaacacctccaagttttcgtgagtttattatgtattgattggtaatttgtagatgtaaccggtattttacacgccggtgtggttctagcttcctagagtttctactctacgggtgctgtgaaagtccagtgtgttggactggatttgtattccacggagggcgagttgtatagttctcccacaatggcttccttttgaggggtcaaggaccactgaattgtgatgtaattacttgctgaagtagctgtcgaaggggggagattgtgagtgcttaatattccactatccttgtgctttactttctgcctgttgtagattcatagatttaaatgttggtatggtgtgacataatctatcatccgatgactcgtagcatgtttggtttgagaaataagatagtttattatttctcacttattttttgtttagt

SEQ ID NO: 9970 - DNA, 4514 bp, Zea Mays
gccgattcaaaaccttcccgatgcgatagcgaagcagcctccacagcagctcgactcccacccggcaggcacagccgcacaggaacccacccggcctctccaccgctgcacctgcagtcctgcacccatttaaatttaaacatttaaaaaaaaaacccaccccacgaaattcgcagaccaccttaattcccattacatcaattattttctcttcccgacccagtccgccgctgcctgcttccttccttccttctctctcctccctctcctccagcgacagagacagggaaggaggcggaggaggaggccgcgtggctgcggaggcgggcagccgcggcccgtgcgattcgcggcgcctctctcgccgtatctgcggtggcgcgggcgggttggcggccggccagcgagatcggctgttgtttttggtggtatttttttttctttccccacggcggtttttgggagttggagcgtggattgaagacggctgacggccggaggggtttggggggtccagttgaggccgtcggggcggagatcccgcggggagctgcggttccgccgcggcccgtgagttggattccgggcgcagcgccgcgccgacgatggcgtcggtggaggtgcgcaagtccagggccctgcgggcgcgcagcgggcccagcaagctgcagccggcgcggtcgatgccgctcgactacaggtactcggccggggcgtcgccggcgaacggcgccggcggcgggccggacgcgaacggcgtcgggcggcgggcggctgcggcggaggcggagaacggaggggaggtggtggtgcggttggaggggggcgatgcggactccccgtacagctccacggcggtcacagcggcggaggaggaggaagtgggggagagaggtggaggaggagacgaggtggattcagcggccacggcgacgccgaggcggttgtcgccgagggcagcagcgagccccacggaaggcgacgcccggtggggtgacaccagctcgtacggcgctaagaagaagcatagagttttttgtcagcttccgaatggcgattgggcattatgcacagtaattacaacctctggtgatgagtcggttgtaaaggtttctgaagggaagctaagttatctaagtgaaccatcagtactgtacaatctgcagtacagatactccaaggatatgatttatactaaagcaggtccagttttggtggctgtcaatcctttcaagaaagtttcactgtatggtaacgagtacatcgatgcatatagaaataaatcaatggatagtccacatgtttatgcaatagcagatgcagcactttgtgaaatgaaaagagatgaagtcaaccaatctataattataagtggtgagagtggagcaggaaaaacagaaaccgcaaaaattgctatgcagtacctggcttcccttggaggtggaagtggcattgaatacgaaattcttcagacaaatccaatactcgaggcttttggcaatgcaaagacattgagaaatgataactcaagtcgttttggaaagcttatagaaattcatttcagtaccactggaagaatatgtggtgccatgattcaaacatttttgcttgagaagtccagagttgtgcaatgtgcagttggtgagcgatcataccatatattttatcagctgtgcgctggtgcacctgcctctctaaaagagaagttgaatttgaaaaaggtggatggatacaaatatcttaagcagagctgttgctattcaattgcgggtgtggatgatgcccaaatgtttcgaactgtgacgcaagctatgaacattgttcatatcagcaaagaggaccaagagagtgtttttgcaatggtctctgctgttctttggctgggggatgtctcgttcacagtaattgacaatgaaaatcatgttgaaatcatagtagatgaagcttcgaaaacggtttcagaacttcttggctgcagtattgaagatctcaatttagctttatcaaagcgccacatgaaagttaataatgaaaacattgtccagaaacttacccttgctcaggcaactgacacaagagatgctctggccaaatcagtgtatgccagtttgtttgagtggcttgtagaacaaattaataagtctctctcagttggcaagcgtcgaactgggagatctatcagtattcttgatatctatggctttgaatcatttgataagaacagttttgaacagttctgcattaattatgctaatgaaaggttgcagcaacatttcaatcgtcatttgtttaagcttgagcaagaggaatatgtggaggatggcatcgactgggcaaaggttgacttcgaggataatcaggactgtttgagcctctttgagaaaaaaccactgggactattgtctctgctggatgaggaatctactttcccgaatgccacagatcttacttttgcaaacaagcttaagcaacatcttgactcgaattcttgcttcagaggagaaagaggcaaggcatttgctgtccgtcactatgcaggagaggtggcttatgatacttcgggttttctggagaagaatagagatttattgcacatggactcgattcagctccttgccaaatgcaaaacttctctgccaaaaatgtttgcatcgaagatgctagttcaatcagataattctatgtctgttccatatagatctagtgctgctgattctcaaaaactaagtgttgccatgaagttcaagggtcaactgttccaacttatgcaaagactggaaagtacaacgccacactttattcgttgcattaaaccaaacaatttacaacttcctgcaatttatgaacaaggacttgtgcttcaacaacttaaatgttgtggggttcttgaggttgtccggatttcaagatctgggtatccaacaagaatgactcaccagaagtttgctcggcggtatggttttcttcttgaggatgttgcatctcaagatccactcagtgtttcagttgcaattcttcatcagttcaacattttacctgagatgtatcaagttggctacacaaagttgttcttccgaactggtcagattggcaaccttgaagatactcggaatcgtactctgcatggtattttaagggttcaaagctgtttcagggggcatcaagcccgtcatcatgcaagagaacgaacaagaggagttttgactcttcaatcattcattcgtggtgagaatgcacggcaaatttactcctctttgttgaggaaacatagagccgcagttgttttgcagagaaatgtgagatgttggcttgcaagaaggtatttcataaatgtccggaaggcctcagtgataatacagtctggtattcgtggcagtcttgttcgaagatgtaatggcaatattgatctaataaatgtgctaagagagtttgaatcaaaacaggaggcacatggtgaccaaattttgatcaaggcctcagtcctggctgagttacagaggcggatactaaaagccgaggccacagtacgtgaaaaggatgaagagaacgagatgcttcatcagcggcttcagcaatatgaaaaccgctggttagagtacgaacagaaaatgaaagctatggaggaaatgtggcagaagcaaatgcgttcgctgcaatcgagcctttccgtagcaaagaagagccttgttttggatgaaacgcctaggatgtcggactcatcagtggatcagagctgggaaagcaatgggaaccaccatgtcagcagcggttctcagctggtgccacacactggtggacgtgaaatgaacgctggcctcagcgtcatcagccgcctggcagaagaattcgagcagcggagccaggttttcgctgatgacgccaagttcctggtcgaggtcaagtctgggcaggcggacgccagcctaaacccagacatggagctccggaggttgaagcagaacttcgactcgtggaagaaagatttcagtggacggatgagggagacgaaggtgatcctgaacaagctcggcaatggcaacgagtcatcgcccaactctgtgaagcggaagtggtggggcaggctgaacacctccaagttttcgtgagtttattatgtattgattggtaatttgtagatgtaaccggtattttacacgccggtgtggttctagcttcctagagtttctactctacgggtgctgtgaaagtccagtgtgttggactggatttgtattccacggagggcgagttgtatagttctcccacaatggcttccttttgaggggtcaaggaccactgaattgtgatgtaattacttgctgaagtagctgtcgaaggggggagattgtgagtgcttaatattccactatccttgtgctttactttctgcctgttgtagattcatagatttaaatgttggtatggtgtgacataatctatcatccgatgactcgtagcatgtttggtttgagaaataagatagtttattatttctcacttattttttgtttagt

SEQ ID NO: 9971 - DNA, 4526 bp, Zea Mays
gccgattcaaaaccttcccgatgcgatagcgaagcagcctccacagcagctcgactcccacccggcaggcacagccgcacaggaacccacccggcctctccaccgctgcacctgcagtcctgcacccatttaaatttaaacatttaaaaaaaaaacccaccccacgaaattcgcagaccaccttaattcccattacatcaattattttctcttcccgacccagtccgccgctgcctgcttccttccttccttctctctcctccctctcctccagcgacagagacagggaaggaggcggaggaggaggccgcgtggctgcggaggcgggcagccgcggcccgtgcgattcgcggcgcctctctcgccgtatctgcggtggcgcgggcgggttggcggccggccagcgagatcggctgttgtttttggtggtatttttttttctttccccacggcggtttttgggagttggagcgtggattgaagacggctgacggccggaggggtttggggggtccagttgaggccgtcggggcggagatcccgcggggagctgcggttccgccgcggcccgtgagttggattccgggcgcagcgccgcgccgacgatggcgtcggtggaggtgcgcaagtccagggccctgcgggcgcgcagcgggcccagcaagctgcagccggcgcggtcgatgccgctcgactacaggtactcggccggggcgtcgccggcgaacggcgccggcggcgggccggacgcgaacggcgtcgggcggcgggcggctgcggcggaggcggagaacggaggggaggtggtggtgcggttggaggggggcgatgcggactccccgtacagctccacggcggtcacagcggcggaggaggaggaagtgggggagagaggtggaggaggagacgaggtggattcagcggccacggcgacgccgaggcggttgtcgccgagggcagcagcgagccccacggaaggcgacgcccggtggggtgacaccagctcgtacggcgctaagaagaagcatagagttttttgtcagcttccgaatggcgattgggcattatgcacagtaattacaacctctggtgatgagtcggttgtaaaggtttctgaagggaaggtactgagattgaaaaccgagtgtctacaacctgcaaatcctgaaattcttgatggagtggatgatcttatgcagctaagttatctaagtgaaccatcagtactgtacaatctgcagtacagatactccaaggatatgatttatgtccagttttggtggctgtcaatcctttcaagaaagtttcactgtatggtaacgagtacatcgatgcatatagaaataaatcaatggatagtccacatgtttatgcaatagcagatgcagcactttgtgaaatgaaaagagatgaagtcaaccaatctataattataagtggtgagagtggagcaggaaaaacagaaaccgcaaaaattgctatgcagtacctggcttcccttggaggtggaagtggcattgaatacgaaattcttcagacaaatccaatactcgaggcttttggcaatgcaaagacattgagaaatgataactcaagtcgttttggaaagcttatagaaattcatttcagtaccactggaagaatatgtggtgccatgattcaaacatttttgcttgagaagtccagagttgtgcaatgtgcagttggtgagcgatcataccatatattttatcagctgtgcgctggtgcacctgcctctctaaaagagaagttgaatttgaaaaaggtggatggatacaaatatcttaagcagagctgttgctattcaattgcgggtgtggatgatgcccaaatgtttcgaactgtgacgcaagctatgaacattgttcatatcagcaaagaggaccaagagagtgtttttgcaatggtctctgctgttctttggctgggggatgtctcgttcacagtaattgacaatgaaaatcatgttgaaatcatagtagatgaagcttcgaaaacggtttcagaacttcttggctgcagtattgaagatctcaatttagctttatcaaagcgccacatgaaagttaataatgaaaacattgtccagaaacttacccttgctcaggcaactgacacaagagatgctctggccaaatcagtgtatgccagtttgtttgagtggcttgtagaacaaattaataagtctctctcagttggcaagcgtcgaactgggagatctatcagtattcttgatatctatggctttgaatcatttgataagaacagttttgaacagttctgcattaattatgctaatgaaaggttgcagcaacatttcaatcgtcatttgtttaagcttgagcaagaggaatatgtggaggatggcatcgactgggcaaaggttgacttcgaggataatcaggactgtttgagcctctttgagaaaaaaccactgggactattgtctctgctggatgaggaatctactttcccgaatgccacagatcttacttttgcaaacaagcttaagcaacatcttgactcgaattcttgcttcagaggagaaagaggcaaggcatttgctgtccgtcactatgcaggagaggtggcttatgatacttcgggttttctggagaagaatagagatttattgcacatggactcgattcagctccttgccaaatgcaaaacttctctgccaaaaatgtttgcatcgaagatgctagttcaatcagataattctatgtctgttccatatagatctagtgctgctgattctcaaaaactaagtgttgccatgaagttcaagggtcaactgttccaacttatgcaaagactggaaagtacaacgccacactttattcgttgcattaaaccaaacaatttacaacttcctgcaatttatgaacaaggacttgtgcttcaacaacttaaatgttgtggggttcttgaggttgtccggatttcaagatctgggtatccaacaagaatgactcaccagaagtttgctcggcgttgcaattcttcatcagttcaacattttacctgagatgtatcaagttggctacacaaagttgttcttccgaactggtcagattggcaaccttgaagatactcggaatcgtactctgcatggtattttaagggttcaaagctgtttcagggggcatcaagcccgtcatcatgcaagagaacgaacaagaggagttttgactcttcaatcattcattcgtggtgagaatgcacggcaaatttactcctctttgttgaggaaacatagagccgcagttgttttgcagagaaatgtgagatgttggcttgcaagaaggtatttcataaatgtccggaaggcctcagtgataatacagtctggtattcgtggcagtcttgttcgaagatgtaatggcaatattgatctaataaatgtgctaagagagtttgaatcaaaacaggaggcacatggtgaccaaattttgatcaaggcctcagtcctggctgagttacagaggcggatactaaaagccgaggccacagtacgtgaaaaggatgaagagaacgagatgcttcatcagcggcttcagcaatatgaaaaccgctggttagagtacgaacagaaaatgaaagctatggaggaaatgtggcagaagcaaatgcgttcgctgcaatcgagcctttccgtagcaaagaagagccttgttttggatgaaacgcctaggatgtcggactcatcagtggatcagagctgggaaagcaatgggaaccaccatgtcagcagcggttctcagctggtgccacacactggtggacgtgaaatgaacgctggcctcagcgtcatcagccgcctggcagaagaattcgagcagcggagccaggttttcgctgatgacgccaagttcctggtcgaggtcaagtctgggcaggcggacgccagcctaaacccagacatggagctccggaggttgaagcagaacttcgactcgtggaagaaagatttcagtggacggatgagggagacgaaggtgatcctgaacaagctcggcaatggcaacgagtcatcgcccaactctgtgaagcggaagtggtggggcaggctgaacacctccaagttttcgtgagtttattatgtattgattggtaatttgtagatgtaaccggtattttacacgccggtgtggttctagcttcctagagtttctactctacgggtgctgtgaaagtccagtgtgttggactggatttgtattccacggagggcgagttgtatagttctcccacaatggcttccttttgaggggtcaaggaccactgaattgtgatgtaattacttgctgaagtagctgtcgaaggggggagattgtgagtgcttaatattccactatccttgtgctttactttctgcctgttgtagattcatagatttaaatgttggtatggtgtgacataatctatcatccgatgactcgtagcatgtttggtttgagaaataagatagtttattatttctcacttattttttgtttagt

SEQ ID NO: 9972 - DNA, 914 bp, Zea Mays
cttctcccgacggcgccaccatgccacctccgccctcaaccctagccgtatcgcgccctcgccctgcctccagccccgcgcagtatgctgttcgctcgtcgttgggcgactatcccggctcgttcttcctctcgtctcgcacagatggcggcgctgcatgcgatctccatcgccgcggcccctccaccgatcgccttccgcgagacatcatcaccagcaacctccgctggggtgtgaggtgctatgagcatgtgactctaaatctactagtcctagaatggattacagttgtcaggaatttttgttgggactgtgatataaaaaagttgaaactttcatacttacctgccgagaatgcattgttgaagttgcaaagatgaatcctacatggagtggaatttatctccgggttaattaaccttggttgccaaactagccctcaatgtgcgggacaagaagggaaatactgctttgcacatagctacacggaaatggaggccccagggatctggaataacaggagcctgatggttgcatcagtagagttgaccacttctcagtattgcgagatgcatcttacatggtcaagaagataattcctattctgagctacttgctcgtgtacaagtctccttatcatgtcctcctttcaagccagtctattctttgcttgattcatcacgggtgcacattattgtaattagaatcttcagagtactcgaaggatagttaaagctgtttggctagtccttcagattactgaaaatatagttaagaacatttgtattttgctatttcgatttccaacagtacaactattggggatgattgtttatgtgatgtggatctatcattgtgcaatactaattaaatttgtatatctatgtgatgtgtataaaaattggtgatttgtg

SEQ ID NO: 9973 - DNA, 1530 bp, Zea Mays
cgtccaaatcgaaatcacttctattaaaaactagcaaaccctacctcctcttctccccttctcccgacggcgccaccatgccacctccgccctcaaccctagccgtatcgcgccctcgccctgcctccagccccgcgcagtatgctgttcgctcgtcgttgggcgactatcccggctcgttcttcctctcgtctcgcacagatggcggcgctgcatgcgatctccatcgccgcggcccctccaccgatcgccttccgcgagacatcatcaccagcaacctccgctgggtgatataaaaaagttgaaactttcatacttacctgccgagaatgcattgttgaagttgcaaagatgtatgtctaagtttattttcacataatagtatattttttctattatcaagaattgtttctcaatacattcatgagttggaaattgtattgtgagcctttctatattatctagtctagctagctctacaatagagctctagtacagacagaacacatgctttcatactcctatggaatagtagaatcaggtagtagaattaggtgttcattaaccatgcaaataattaattcaagttatctaaataggcccttagtttatactgctgaaagtataaaaagtgttccactctcaataccgagaataggaagactccaccatgtatatgtgttcttatcaggtgctcttctttcccgataaaataaaaatcctttgcttcaatctgctacatgatactttgtgtatagataaaggaatacatccatatgatgttcctgggagttagtttgatgtcaatatactccatgcttgctgattggaaaggaaactagttatttcgtttgaagtcatatgctgcttggcgtcattctaatccaagtagctgaggggtcaacagtggctaacttccctgtcactttattccaaagagcaaaagggaatcccaccctagctgtgatattttccctggattatggttgtccaggaatcctacatggagtggaatttatctccgggttaattaaccttggttgccaaactagccctcaatgtgcgggacaagaagggaaatactgctttgcacatagctacacggaaatggaggccccagggatctggaataacaggagcctgatggttgcatcagtagagttgaccacttctcagtattgcgagatgcatcttacatggtcaagaagataattcctattctgagctacttgctcgtgtacaagtctccttatcatgtcctcctttcaagccagtctattctttgcttgattcatcacgggtgcacattattgtaattagaatcttcagagtactcgaaggatagttaaagctgtttggctagtccttcagattactgaaaatatagttaagaacatttgtattttgctatttcgatttccaacagtacaactattggggatgattgtttatgtgatgtggatctatcattgtgcaatactaattaaatttgtatatctatgtgatgtgtataaaaattggtgatttgtg

SEQ ID NO: 9974 - DNA, 3005 bp, Zea Mays
attttatatgactattgattcctatgttgtttggtatttgcttctatgtactagtaactattttaaccaatggtgaaaaacagcgaggcatggcaacattggttgagggcgacctaggccatactgaagaagctcttattcaaacccatatatgttcgataagctcggaaatcagaagcctccaggagaaatcctgggatataagcttgaaattgaagaaccgcaagttggttgagacaaagcttgctgggtttgttgaagagatagttgctcctcctggtttggtaaatattcttgttaatggagaggtaaatgaaggttatgccagaagtctggagatccttagcagaaagttgaaatttgttcaagtggatccgttgattaatgcatcaaaagctctgaatgatattaagcaagaattggaaaggcttcgacaaaaggcactatccaagatttccagccatattatggagattttctttgctatgagaaaccctgggactaatatacagatattgcaacaaaatttgcttcagaagcacaggtatctcgttctgtttcttaaagagcatggttccgagacatatggtgatttgtgtgcatcatatgttgatacaatgaacaaggtgctgagtacatactttcatgtgtatgtagaagcattggagaagttgaagctagaaattggtgtacccagtgattttaatggacatgataccagtatcatcgatattataataagaggaagggagcatttgagaaatcatggtttcatgttttcgttaggtgaacgtgcaaatattctgaaggagattcatcaacctggcttggttccacatatatctcaaggcaactctcgtacatacccatatgaagttattttcaggagccttcagaagcttctgatggacactgctagctctgagtatcttttcatggaatcattctttggagaagagtcactgttttatcaagtttttgaaggaccttttgctgttattgatcaacatttggatattactcttccaaattgtcatgatgctgtatgcctcatgctcataatctgcataactaggaagcaccagttggttatgtgcaacagacagctttcttgtcttgataactattttgataaggctctgatgtatctctggccacgtttcaaggtagtgtttgacatgtatattcaaagcttatatcagtgtgatgcgaaaacattatggatagatggtacccatccacaccatattgcaaggtgctacgtggagttcacagcatcccttgttcaacttaatgctgaatgcggagatggtcagcttgatatgaacttggaacgcttgcagtcagctatcgaattcctacttgttaggcttgcccaaacttttacaactaccaagctgcagcacctttttcttctaaataattatgacatggccatctctgtcctgaaggaaactggcgatgaagccaaaaaactgcaaaaatattttgaagagaagttagaaagtaacatgatggcttttgtggatgatttgctgatggaacatttcagtgacttacttcggtttgtgaggagtcatgtctcggaagacctggtatcttacaccgagaacaccaatattgccgacgttgagccagttgtgaagaactttgccatgaagtggagaattgctctagagctcatgcacaacgaagtcataacttcttgtactaaccttttgtctgggatggcaattctaaaagcagctatgactcagttgcttaatgactataacaggctctcagagtgcgtcaaaaaaatcacagggggttcaactttgaacagacatatggtttccatcacatctatttcatatgaaatcaggaaatactcaagaacactctagctgcttataatggtgtcaaagaaattctgataaaaaggttaaacaaaaatatcaccatcgagatttttttgaacattccaaccaggcaaatgctggttgcatttttagtttgatttttgaaattaggtattgtaaatgggacagctcgaacatgttttaatttttgtttgtgactattattgctcatttttatatgctacaaggctttgttgttgttgtcgttgttgttggtcagtcagactatactcgacaacagtaatatgcattattttgaaaagttaattgaatcacctgaagctgaatattatgtgtgaactgccgtaatatggagccccaataaagtgcaactctatgttagcttcgtcctataagctatagctatgctggggactgtattttatagcaagcttcgacctgacattttggtagattggtttcggcttgcatatcgttgtcagctgctgacggtaagtatgctttaaatacgttttcccgttttttcctacggcaaatgataccttttttaatcttggatgtagatagagttctcaacaggaaaagctgttttcgtgaaattagtgtacttgaaactggcccagctgaaaaaaaactctatttgctttaactttttgcagatttgcataatccgctattgttcctcgtgatggaataagtcatgtggtcttcgtgtggaggacagtccgcacagcatctctgctgtaggacagcagcaacaacagtttttgactgcaacgactgcggcagacagcatagcagcagtcttttaactgcaaggacagcgtgctgcaggcatctacttttcattttctagcttttggaggacaacagcttgctgcagtttcttttgactagagtacaacaacacctagtggttagtgcagtttgtaggacaacatattcgcaactctagtaagcatatgttgcagccccttgggctataaatatgaatcccaacccttagacgagtatgacattgtgtagtgtttgagaaaataaacagaaaattgccccaacttatactgttatcctcttgatgagagttagagtccctctacttacaattggtatcggagccaaactatcctgcagcctaaacat

SEQ ID NO: 9975 - DNA, 3541 bp, Zea Mays
gaaattagttctcgtgttttcggccgtgcgctcgctggcgcaagccgcgcgaatcggatcgctgtccgcctctccatttcccctcgtccgcacacccgagcctcgcttccgcctcccacttcccaccaggccaccaccccgtccggcgatcccgatcgcgagacgagggtagcgagatcgagaggattgtcgcggctgccgggcggcgctccagttccaagtcgaggcgaggaactacacgtgtgatatctgcaactcatatggctgggacccacaagaagcgaatggaagaccgttttggtagttttttctcatttgatgaagattctgaaagtgaggacatatcgctggatgagttggaggaggaacttaaagagcacaagaactgtgatgtactagtaactattttaaccaatggtgaaaaacagcgaggcatggcaacattggttgagggcgacctaggccatactgaagaagctcttattcaagattatattgaggataatgacagccttgttctgttgcacgatcagattcatgactgtgacgttattttgtcacaaataggattaattcttagtgggtttcagacccatatatgttcgataagctcggaaatcagaagcctccaggagaaatcctgggatataagcttgaaattgaagaaccgcaaggtcaggacaagcctgcatagtgcataccatatgttaacatcaataatttcctgtattttcacaaattagcttacagttggttgagacaaagcttgctgggtttgttgaagagatagttgctcctcctggtttggtaaatattcttgttaatggagagtttcttttgttaggtaaatgaaggttatgccagaagtctggagatccttagcagaaagttgaaatttgttcaagtggatccgttgattaatgcatcaaaagctctgaatgatattaagcaagaattggaaaggcttcgacaaaaggcactatccaagatttccagccatattatggagattttctttgctatgagaaaccctgggactaatatacagatattgcaacaaaatttgcttcagaagcacaggtatctcgttctgtttcttaaagagcatggttccgagacatatggtgatttgtgtgcatcatatgttgatacaatgaacaaggtgctgagtacatactttcatgtgtatgtagaagcattggagaagttgaagctagaaattggtgtacccagtgattttaatggacatgataccagtatcatcgatattataataagaggaagggagcatttgagaaatcatggtttcatgttttcgttaggtgaacgtgcaaatattctgaaggagattcatcaacctggcttggttccacatatatctcaaggcaactctcgtacatacccatatgaagttattttcaggagccttcagaagcttctgatggacactgctagctctgagtatcttttcatggaatcattctttggagaagagtcactgttttatcaagtttttgaaggaccttttgctgttattgatcaacatttggatattactcttccaaattgtcatgatgctgtatgcctcatgctcataatctgcataactaggaagcaccagttggttatgtgcaacagacagctttcttgtcttgataactattttgataaggctctgatgtatctctggccacgtttcaaggtagtgtttgacatgtatattcaaagcttatatcagtgtgatgcgaaaacattatggatagatggtacccatccacaccatattgcaaggtgctacgtggagttcacagcatcccttgttcaacttaatgctgaatgcggagatggtcagcttgatatgaacttggaacgcttgcagtcagctatcgaattcctacttgttaggcttgcccaaacttttacaactaccaagctgcagcacctttttcttctaaataattatgacatggccatctctgtcctgaaggaaactggcgatgaagccaaaaaactgcaaaaatattttgaagagaagttagaaagtaacatgatggcttttgtggatgatttgctgatggaacatttcagtgacttacttcggtttgtgaggagtcatgtctcggaagacctggtatcttacaccgagaacaccaatattgccgacgttgagccagttgtgaagaactttgccatgaagtggagaattgctctagagctcatgcacaacgaagtcataacttcttgtactaaccttttgtctgggatggcaattctaaaagcagctatgactcagttgcttaatgactataacaggctctcagagtgcgtcaaaaaaatcacagggggttcaactttgaacagacatatggtttccatcacatctatttcatatgaaatcaggaaatactcaagaacactctagctgcttataatggtgtcaaagaaattctgataaaaaggttaaacaaaaatatcaccatcgagatttttttgaacattccaaccaggcaaatgctggttgcatttttagtttgatttttgaaattaggtattgtaaatgggacagctcgaacatgttttaatttttgtttgtgactattattgctcatttttatatgctacaaggctttgttgttgttgtcgttgttgttggtcagtcagactatactcgacaacagtaatatgcattattttgaaaagttaattgaatcacctgaagctgaatattatgtgtgaactgccgtaatatggagccccaataaagtgcaactctatgttagcttcgtcctataagctatagctatgctggggactgtattttatagcaagcttcgacctgacattttggtagattggtttcggcttgcatatcgttgtcagctgctgacggtaagtatgctttaaatacgttttcccgttttttcctacggcaaatgataccttttttaatcttggatgtagatagagttctcaacaggaaaagctgttttcgtgaaattagtgtacttgaaactggcccagctgaaaaaaaactctatttgctttaactttttgcagatttgcataatccgctattgttcctcgtgatggaataagtcatgtggtcttcgtgtggaggacagtccgcacagcatctctgctgtaggacagcagcaacaacagtttttgactgcaacgactgcggcagacagcatagcagcagtcttttaactgcaaggacagcgtgctgcaggcatctacttttcattttctagcttttggaggacaacagcttgctgcagtttcttttgactagagtacaacaacacctagtggttagtgcagtttgtaggacaacatattcgcaactctagtaagcatatgttgcagccccttgggctataaatatgaatcccaacccttagacgagtatgacattgtgtagtgtttgagaaaataaacagaaaattgccccaacttatactgttatcctcttgatgagagttagagtccctctacttacaattggtatcggagccaaactatcctgcagcctaaacat

SEQ ID NO: 9976 - DNA, 3452 bp, Zea Mays
gaaattagttctcgtgttttcggccgtgcgctcgctggcgcaagccgcgcgaatcggatcgctgtccgcctctccatttcccctcgtccgcacacccgagcctcgcttccgcctcccacttcccaccaggccaccaccccgtccggcgatcccgatcgcgagacgagggtagcgagatcgagaggattgtcgcggctgccgggcggcgctccagttccaagtcgaggcgaggaactacacgtgtgatatctgcaactcatatggctgggacccacaagaagcgaatggaagaccgttttggtagttttttctcatttgatgaagattctgaaagtgaggacatatcgctggatgagttggaggaggaacttaaagagcacaagaactgtgatgtactagtaactattttaaccaatggtgaaaaacagcgaggcatggcaacattggttgagggcgacctaggccatactgaagaagctcttattcaagattatattgaggataatgacagccttgttctgttgcacgatcagattcatgactgtgacgttattttgtcacaaataggattaattcttagtgggtttcagacccatatatgttcgataagctcggaaatcagaagcctccaggagaaatcctgggatataagcttgaaattgaagaaccgcaagttggttgagacaaagcttgctgggtttgttgaagagatagttgctcctcctggtttggtaaatattcttgttaatggagaggtaaatgaaggttatgccagaagtctggagatccttagcagaaagttgaaatttgttcaagtggatccgttgattaatgcatcaaaagctctgaatgatattaagcaagaattggaaaggcttcgacaaaaggcactatccaagatttccagccatattatggagattttctttgctatgagaaaccctgggactaatatacagatattgcaacaaaatttgcttcagaagcacaggtatctcgttctgtttcttaaagagcatggttccgagacatatggtgatttgtgtgcatcatatgttgatacaatgaacaaggtgctgagtacatactttcatgtgtatgtagaagcattggagaagttgaagctagaaattggtgtacccagtgattttaatggacatgataccagtatcatcgatattataataagaggaagggagcatttgagaaatcatggtttcatgttttcgttaggtgaacgtgcaaatattctgaaggagattcatcaacctggcttggttccacatatatctcaaggcaactctcgtacatacccatatgaagttattttcaggagccttcagaagcttctgatggacactgctagctctgagtatcttttcatggaatcattctttggagaagagtcactgttttatcaagtttttgaaggaccttttgctgttattgatcaacatttggatattactcttccaaattgtcatgatgctgtatgcctcatgctcataatctgcataactaggaagcaccagttggttatgtgcaacagacagctttcttgtcttgataactattttgataaggctctgatgtatctctggccacgtttcaaggtagtgtttgacatgtatattcaaagcttatatcagtgtgatgcgaaaacattatggatagatggtacccatccacaccatattgcaaggtgctacgtggagttcacagcatcccttgttcaacttaatgctgaatgcggagatggtcagcttgatatgaacttggaacgcttgcagtcagctatcgaattcctacttgttaggcttgcccaaacttttacaactaccaagctgcagcacctttttcttctaaataattatgacatggccatctctgtcctgaaggaaactggcgatgaagccaaaaaactgcaaaaatattttgaagagaagttagaaagtaacatgatggcttttgtggatgatttgctgatggaacatttcagtgacttacttcggtttgtgaggagtcatgtctcggaagacctggtatcttacaccgagaacaccaatattgccgacgttgagccagttgtgaagaactttgccatgaagtggagaattgctctagagctcatgcacaacgaagtcataacttcttgtactaaccttttgtctgggatggcaattctaaaagcagctatgactcagttgcttaatgactataacaggctctcagagtgcgtcaaaaaaatcacagggggttcaactttgaacagacatatggtttccatcacatctatttcatatgaaatcaggaaatactcaagaacactctagctgcttataatggtgtcaaagaaattctgataaaaaggttaaacaaaaatatcaccatcgagatttttttgaacattccaaccaggcaaatgctggttgcatttttagtttgatttttgaaattaggtattgtaaatgggacagctcgaacatgttttaatttttgtttgtgactattattgctcatttttatatgctacaaggctttgttgttgttgtcgttgttgttggtcagtcagactatactcgacaacagtaatatgcattattttgaaaagttaattgaatcacctgaagctgaatattatgtgtgaactgccgtaatatggagccccaataaagtgcaactctatgttagcttcgtcctataagctatagctatgctggggactgtattttatagcaagcttcgacctgacattttggtagattggtttcggcttgcatatcgttgtcagctgctgacggtaagtatgctttaaatacgttttcccgttttttcctacggcaaatgataccttttttaatcttggatgtagatagagttctcaacaggaaaagctgttttcgtgaaattagtgtacttgaaactggcccagctgaaaaaaaactctatttgctttaactttttgcagatttgcataatccgctattgttcctcgtgatggaataagtcatgtggtcttcgtgtggaggacagtccgcacagcatctctgctgtaggacagcagcaacaacagtttttgactgcaacgactgcggcagacagcatagcagcagtcttttaactgcaaggacagcgtgctgcaggcatctacttttcattttctagcttttggaggacaacagcttgctgcagtttcttttgactagagtacaacaacacctagtggttagtgcagtttgtaggacaacatattcgcaactctagtaagcatatgttgcagccccttgggctataaatatgaatcccaacccttagacgagtatgacattgtgtagtgtttgagaaaataaacagaaaattgccccaacttatactgttatcctcttgatgagagttagagtccctctacttacaattggtatcggagccaaactatcctgcagcctaaacat

SEQ ID NO: 9977 - DNA, 3363 bp, Zea Mays
gaaattagttctcgtgttttcggccgtgcgctcgctggcgcaagccgcgcgaatcggatcgctgtccgcctctccatttcccctcgtccgcacacccgagcctcgcttccgcctcccacttcccaccaggccaccaccccgtccggcgatcccgatcgcgagacgagggtagcgagatcgagaggattgtcgcggctgccgggcggcgctccagttccaagtcgaggcgaggaactacacgtgtgatatctgcaactcatatggctgggacccacaagaagcgaatggaagaccgttttggtagttttttctcatttgatgaagattctgaaagtgaggacatatcgctggatgagttggaggaggaacttaaagagcacaagaactgtgatgtactagtaactattttaaccaatggtgaaaaacagcgaggcatggcaacattggttgagggcgacctaggccatactgaagaagctcttattcaaacccatatatgttcgataagctcggaaatcagaagcctccaggagaaatcctgggatataagcttgaaattgaagaaccgcaagttggttgagacaaagcttgctgggtttgttgaagagatagttgctcctcctggtttggtaaatattcttgttaatggagagtttcttttgttaggtaaatgaaggttatgccagaagtctggagatccttagcagaaagttgaaatttgttcaagtggatccgttgattaatgcatcaaaagctctgaatgatattaagcaagaattggaaaggcttcgacaaaaggcactatccaagatttccagccatattatggagattttctttgctatgagaaaccctgggactaatatacagatattgcaacaaaatttgcttcagaagcacaggtatctcgttctgtttcttaaagagcatggttccgagacatatggtgatttgtgtgcatcatatgttgatacaatgaacaaggtgctgagtacatactttcatgtgtatgtagaagcattggagaagttgaagctagaaattggtgtacccagtgattttaatggacatgataccagtatcatcgatattataataagaggaagggagcatttgagaaatcatggtttcatgttttcgttaggtgaacgtgcaaatattctgaaggagattcatcaacctggcttggttccacatatatctcaaggcaactctcgtacatacccatatgaagttattttcaggagccttcagaagcttctgatggacactgctagctctgagtatcttttcatggaatcattctttggagaagagtcactgttttatcaagtttttgaaggaccttttgctgttattgatcaacatttggatattactcttccaaattgtcatgatgctgtatgcctcatgctcataatctgcataactaggaagcaccagttggttatgtgcaacagacagctttcttgtcttgataactattttgataaggctctgatgtatctctggccacgtttcaaggtagtgtttgacatgtatattcaaagcttatatcagtgtgatgcgaaaacattatggatagatggtacccatccacaccatattgcaaggtgctacgtggagttcacagcatcccttgttcaacttaatgctgaatgcggagatggtcagcttgatatgaacttggaacgcttgcagtcagctatcgaattcctacttgttaggcttgcccaaacttttacaactaccaagctgcagcacctttttcttctaaataattatgacatggccatctctgtcctgaaggaaactggcgatgaagccaaaaaactgcaaaaatattttgaagagaagttagaaagtaacatgatggcttttgtggatgatttgctgatggaacatttcagtgacttacttcggtttgtgaggagtcatgtctcggaagacctggtatcttacaccgagaacaccaatattgccgacgttgagccagttgtgaagaactttgccatgaagtggagaattgctctagagctcatgcacaacgaagtcataacttcttgtactaaccttttgtctgggatggcaattctaaaagcagctatgactcagttgcttaatgactataacaggctctcagagtgcgtcaaaaaaatcacagggggttcaactttgaacagacatatggtttccatcacatctatttcatatgaaatcaggaaatactcaagaacactctagctgcttataatggtgtcaaagaaattctgataaaaaggttaaacaaaaatatcaccatcgagatttttttgaacattccaaccaggcaaatgctggttgcatttttagtttgatttttgaaattaggtattgtaaatgggacagctcgaacatgttttaatttttgtttgtgactattattgctcatttttatatgctacaaggctttgttgttgttgtcgttgttgttggtcagtcagactatactcgacaacagtaatatgcattattttgaaaagttaattgaatcacctgaagctgaatattatgtgtgaactgccgtaatatggagccccaataaagtgcaactctatgttagcttcgtcctataagctatagctatgctggggactgtattttatagcaagcttcgacctgacattttggtagattggtttcggcttgcatatcgttgtcagctgctgacggtaagtatgctttaaatacgttttcccgttttttcctacggcaaatgataccttttttaatcttggatgtagatagagttctcaacaggaaaagctgttttcgtgaaattagtgtacttgaaactggcccagctgaaaaaaaactctatttgctttaactttttgcagatttgcataatccgctattgttcctcgtgatggaataagtcatgtggtcttcgtgtggaggacagtccgcacagcatctctgctgtaggacagcagcaacaacagtttttgactgcaacgactgcggcagacagcatagcagcagtcttttaactgcaaggacagcgtgctgcaggcatctacttttcattttctagcttttggaggacaacagcttgctgcagtttcttttgactagagtacaacaacacctagtggttagtgcagtttgtaggacaacatattcgcaactctagtaagcatatgttgcagccccttgggctataaatatgaatcccaacccttagacgagtatgacattgtgtagtgtttgagaaaataaacagaaaattgccccaacttatactgttatcctcttgatgagagttagagtccctctacttacaattggtatcggagccaaactatcctgcagcctaaacat

SEQ ID NO: 9978 - DNA, 3465 bp, Zea Mays
gaaattagttctcgtgttttcggccgtgcgctcgctggcgcaagccgcgcgaatcggatcgctgtccgcctctccatttcccctcgtccgcacacccgagcctcgcttccgcctcccacttcccaccaggccaccaccccgtccggcgatcccgatcgcgagacgagggtagcgagatcgagaggattgtcgcggctgccgggcggcgctccagttccaagtcgaggcgaggaactacacgtgtgatatctgcaactcatatggctgggacccacaagaagcgaatggaagaccgttttggtagttttttctcatttgatgaagattctgaaagtgaggacatatcgctggatgagttggaggaggaacttaaagagcacaagaactgtgatgtactagtaactattttaaccaatggtgaaaaacagcgaggcatggcaacattggttgagggcgacctaggccatactgaagaagctcttattcaagattatattgaggataatgacagccttgttctgttgcacgatcagattcatgactgtgacgttattttgtcacaaataggattaattcttagtgggtttcagacccatatatgttcgataagctcggaaatcagaagcctccaggagaaatcctgggatataagcttgaaattgaagaaccgcaagttggttgagacaaagcttgctgggtttgttgaagagatagttgctcctcctggtttggtaaatattcttgttaatggagagtttcttttgttaggtaaatgaaggttatgccagaagtctggagatccttagcagaaagttgaaatttgttcaagtggatccgttgattaatgcatcaaaagctctgaatgatattaagcaagaattggaaaggcttcgacaaaaggcactatccaagatttccagccatattatggagattttctttgctatgagaaaccctgggactaatatacagatattgcaacaaaatttgcttcagaagcacaggtatctcgttctgtttcttaaagagcatggttccgagacatatggtgatttgtgtgcatcatatgttgatacaatgaacaaggtgctgagtacatactttcatgtgtatgtagaagcattggagaagttgaagctagaaattggtgtacccagtgattttaatggacatgataccagtatcatcgatattataataagaggaagggagcatttgagaaatcatggtttcatgttttcgttaggtgaacgtgcaaatattctgaaggagattcatcaacctggcttggttccacatatatctcaaggcaactctcgtacatacccatatgaagttattttcaggagccttcagaagcttctgatggacactgctagctctgagtatcttttcatggaatcattctttggagaagagtcactgttttatcaagtttttgaaggaccttttgctgttattgatcaacatttggatattactcttccaaattgtcatgatgctgtatgcctcatgctcataatctgcataactaggaagcaccagttggttatgtgcaacagacagctttcttgtcttgataactattttgataaggctctgatgtatctctggccacgtttcaaggtagtgtttgacatgtatattcaaagcttatatcagtgtgatgcgaaaacattatggatagatggtacccatccacaccatattgcaaggtgctacgtggagttcacagcatcccttgttcaacttaatgctgaatgcggagatggtcagcttgatatgaacttggaacgcttgcagtcagctatcgaattcctacttgttaggcttgcccaaacttttacaactaccaagctgcagcacctttttcttctaaataattatgacatggccatctctgtcctgaaggaaactggcgatgaagccaaaaaactgcaaaaatattttgaagagaagttagaaagtaacatgatggcttttgtggatgatttgctgatggaacatttcagtgacttacttcggtttgtgaggagtcatgtctcggaagacctggtatcttacaccgagaacaccaatattgccgacgttgagccagttgtgaagaactttgccatgaagtggagaattgctctagagctcatgcacaacgaagtcataacttcttgtactaaccttttgtctgggatggcaattctaaaagcagctatgactcagttgcttaatgactataacaggctctcagagtgcgtcaaaaaaatcacagggggttcaactttgaacagacatatggtttccatcacatctatttcatatgaaatcaggaaatactcaagaacactctagctgcttataatggtgtcaaagaaattctgataaaaaggttaaacaaaaatatcaccatcgagatttttttgaacattccaaccaggcaaatgctggttgcatttttagtttgatttttgaaattaggtattgtaaatgggacagctcgaacatgttttaatttttgtttgtgactattattgctcatttttatatgctacaaggctttgttgttgttgtcgttgttgttggtcagtcagactatactcgacaacagtaatatgcattattttgaaaagttaattgaatcacctgaagctgaatattatgtgtgaactgccgtaatatggagccccaataaagtgcaactctatgttagcttcgtcctataagctatagctatgctggggactgtattttatagcaagcttcgacctgacattttggtagattggtttcggcttgcatatcgttgtcagctgctgacggtaagtatgctttaaatacgttttcccgttttttcctacggcaaatgataccttttttaatcttggatgtagatagagttctcaacaggaaaagctgttttcgtgaaattagtgtacttgaaactggcccagctgaaaaaaaactctatttgctttaactttttgcagatttgcataatccgctattgttcctcgtgatggaataagtcatgtggtcttcgtgtggaggacagtccgcacagcatctctgctgtaggacagcagcaacaacagtttttgactgcaacgactgcggcagacagcatagcagcagtcttttaactgcaaggacagcgtgctgcaggcatctacttttcattttctagcttttggaggacaacagcttgctgcagtttcttttgactagagtacaacaacacctagtggttagtgcagtttgtaggacaacatattcgcaactctagtaagcatatgttgcagccccttgggctataaatatgaatcccaacccttagacgagtatgacattgtgtagtgtttgagaaaataaacagaaaattgccccaacttatactgttatcctcttgatgagagttagagtccctctacttacaattggtatcggagccaaactatcctgcagcctaaacat

SEQ ID NO: 9979 - DNA, 3764 bp, Zea Mays
gaaattagttctcgtgttttcggccgtgcgctcgctggcgcaagccgcgcgaatcggatcgctgtccgcctctccatttcccctcgtccgcacacccgagcctcgcttccgcctcccacttcccaccaggccaccaccccgtccggcgatcccgatcgcgagacgagggtagcgagatcgagaggattgtcgcggctgccgggcggcgctccagttccaagtcgaggcgaggaactacacgtgtgatatctgcaactcatatggctgggacccacaagaagcgaatggaagaccgttttggtagttttttctcatttgatgaagattctgaaagtgaggacatatcgctggatgagttggaggaggaacttaaagagcacaagaactgtgatgtcagtcaatggaattgatacttctcattctccattttatatgactattgattcctatgttgtttggtatttgcttctatgtgagccagataaactgcatagttagcattttaacatactgggccatgtacatattattctatatttctatttgtcatccacacattgaggacgcatttttggctactaaattcaaaaaatcgccctctccagatggtgttggcatttccaaaagaatcaaataaaatagcgcctttcacttatgtactacttgaagtaaatatgactttgagctatctccccctttgcttacacccaaccccaacatacctcacccaacttcttagaagcttgagctatctttggtcataccagtcatatcgaagtttacatgtttctctctgttgttctcaggtactagtaactattttaaccaatggtgaaaaacagcgaggcatggcaacattggttgagggcgacctaggccatactgaagaagctcttattcaaacccatatatgttcgataagctcggaaatcagaagcctccaggagaaatcctgggatataagcttgaaattgaagaaccgcaagttggttgagacaaagcttgctgggtttgttgaagagatagttgctcctcctggtttggtaaatattcttgttaatggagaggtaaatgaaggttatgccagaagtctggagatccttagcagaaagttgaaatttgttcaagtggatccgttgattaatgcatcaaaagctctgaatgatattaagcaagaattggaaaggcttcgacaaaaggcactatccaagatttccagccatattatggagattttctttgctatgagaaaccctgggactaatatacagatattgcaacaaaatttgcttcagaagcacaggtatctcgttctgtttcttaaagagcatggttccgagacatatggtgatttgtgtgcatcatatgttgatacaatgaacaaggtgctgagtacatactttcatgtgtatgtagaagcattggagaagttgaagctagaaattggtgtacccagtgattttaatggacatgataccagtatcatcgatattataataagaggaagggagcatttgagaaatcatggtttcatgttttcgttaggtgaacgtgcaaatattctgaaggagattcatcaacctggcttggttccacatatatctcaaggcaactctcgtacatacccatatgaagttattttcaggagccttcagaagcttctgatggacactgctagctctgagtatcttttcatggaatcattctttggagaagagtcactgttttatcaagtttttgaaggaccttttgctgttattgatcaacatttggatattactcttccaaattgtcatgatgctgtatgcctcatgctcataatctgcataactaggaagcaccagttggttatgtgcaacagacagctttcttgtcttgataactattttgataaggctctgatgtatctctggccacgtttcaaggtagtgtttgacatgtatattcaaagcttatatcagtgtgatgcgaaaacattatggatagatggtacccatccacaccatattgcaaggtgctacgtggagttcacagcatcccttgttcaacttaatgctgaatgcggagatggtcagcttgatatgaacttggaacgcttgcagtcagctatcgaattcctacttgttaggcttgcccaaacttttacaactaccaagctgcagcacctttttcttctaaataattatgacatggccatctctgtcctgaaggaaactggcgatgaagccaaaaaactgcaaaaatattttgaagagaagttagaaagtaacatgatggcttttgtggatgatttgctgatggaacatttcagtgacttacttcggtttgtgaggagtcatgtctcggaagacctggtatcttacaccgagaacaccaatattgccgacgttgagccagttgtgaagaactttgccatgaagtggagaattgctctagagctcatgcacaacgaagtcataacttcttgtactaaccttttgtctgggatggcaattctaaaagcagctatgactcagttgcttaatgactataacaggctctcagagtgcgtcaaaaaaatcacagggggttcaactttgaacagacatatggtttccatcacatctatttcatatgaaatcaggaaatactcaagaacactctagctgcttataatggtgtcaaagaaattctgataaaaaggttaaacaaaaatatcaccatcgagatttttttgaacattccaaccaggcaaatgctggttgcatttttagtttgatttttgaaattaggtattgtaaatgggacagctcgaacatgttttaatttttgtttgtgactattattgctcatttttatatgctacaaggctttgttgttgttgtcgttgttgttggtcagtcagactatactcgacaacagtaatatgcattattttgaaaagttaattgaatcacctgaagctgaatattatgtgtgaactgccgtaatatggagccccaataaagtgcaactctatgttagcttcgtcctataagctatagctatgctggggactgtattttatagcaagcttcgacctgacattttggtagattggtttcggcttgcatatcgttgtcagctgctgacggtaagtatgctttaaatacgttttcccgttttttcctacggcaaatgataccttttttaatcttggatgtagatagagttctcaacaggaaaagctgttttcgtgaaattagtgtacttgaaactggcccagctgaaaaaaaactctatttgctttaactttttgcagatttgcataatccgctattgttcctcgtgatggaataagtcatgtggtcttcgtgtggaggacagtccgcacagcatctctgctgtaggacagcagcaacaacagtttttgactgcaacgactgcggcagacagcatagcagcagtcttttaactgcaaggacagcgtgctgcaggcatctacttttcattttctagcttttggaggacaacagcttgctgcagtttcttttgactagagtacaacaacacctagtggttagtgcagtttgtaggacaacatattcgcaactctagtaagcatatgttgcagccccttgggctataaatatgaatcccaacccttagacgagtatgacattgtgtagtgtttgagaaaataaacagaaaattgccccaacttatactgttatcctcttgatgagagttagagtccctctacttacaattggtatcggagccaaactatcctgcagcctaaacat

SEQ ID NO: 9980 - DNA, 3462 bp, Zea Mays
gaaaacgaaattagttctcgtgttttcggccgtgcgctcgctggcgcaagccgcgcgaatcggatcgctgtccgcctctccatttcccctcgtccgcacacccgagcctcgcttccgcctcccacttcccaccaggccaccaccccgtccggcgatcccgatcgcgagacgagggtagcgagatcgagaggattgtcgcggctgccgggcggcgctccagttccaagtcgaggcgaggaactacacgtgtgatatctgcaactcatatggctgggacccacaagaagcgaatggaagaccgttttggtagttttttctcatttgatgaagattctgaaagtgaggacatatcgctggatgagttggaggaggaacttaaagagcacaagaactgtgatgtactagtaactattttaaccaatggtgaaaaacagcgaggcatggcaacattggttgagggcgacctaggccatactgaagaagctcttattcaagattatattgaggataatgacagccttgttctgttgcacgatcagattcatgactgtgacgttattttgtcacaaataggattaattcttagtgggtttcagacccatatatgttcgataagctcggaaatcagaagcctccaggagaaatcctgggatataagcttgaaattgaagaaccgcaaggtcaggacaagcctgcatagtgcataccatatgttaacatcaataatttcctgtattttcacaaattagcttacagttggttgagacaaagcttgctgggtttgttgaagagatagttgctcctcctggtttggtaaatattcttgttaatggagaggtaaatgaaggttatgccagaagtctggagatccttagcagaaagttgaaatttgttcaagtggatccgttgattaatgcatcaaaagctctgaatgatattaagcaagaattggaaaggcttcgacaaaaggcactatccaagatttccagccatattatggagattttctttgctatgagaaaccctgggactaatatacagatattgcaacaaaatttgcttcagaagcacaggtatctcgttctgtttcttaaagagcatggttccgagacatatggtgatttgtgtgcatcatatgttgatacaatgaacaaggtgctgagtacatactttcatgtgtatgtagaagcattggagaagttgaagctagaaattggtgtacccagtgattttaatggacatgataccagtatcatcgatattataataagaggaagggagcatttgagaaatcatggtttcatgttttcgttaggtgaacgtgcaaatattctgaaggagattcatcaacctggcttggttccacatatatctcaaggcaactctcgtacatacccatatgaagttattttcaggagccttcagaagcttctgatggacactgctagctctgagtatcttttcatggaatcattctttggagaagagtcactgttttatcaagtttttgaaggaccttttgctgttattgatcaacatttggatattactcttccaaattgtcatgatgctgtatgcctcatgctcataatctgcataactaggaagcaccagttggttatgtgcaacagacagctttcttgtcttgataactattttgataaggctctgatgtatctctggccacgtttcaaggtagtgtttgacatgtatattcaaagcttatatcagtgtgatgcgaaaacattatggatagatggtacccatccacaccatattgcaaggtgctacgtggagttcacagcatcccttgttcaacttaatgctgaatgcggagatggtcagcttgatatgaacttggaacgcttgcagtcagctatcgaattcctacttgttaggcttgcccaaacttttacaactaccaagctgcagcacctttttcttctaaataattatgacatggccatctctgtcctgaaggaaactggcgatgaagccaaaaaactgcaaaaatattttgaagagaagttagaaagtaacatgatggcttttgtggatgatttgctgatggaacatttcagtgacttacttcggtttgtgaggagtcatgtctcggaagacctggtatcttacaccgagaacaccaatattgccgacgttgagccagttgtgaagaactttgccatgaagtggagaattgctctagagctcatgcacaacgaagtcataacttcttgtactaaccttttgtctgggatggcaattctaaaagcagctatgactcagttgcttaatgactataacaggctctcagagtgcgtcaaaaaaatcacagggggttcaactttgaacagacatatggtttccatcacatctatttcatatgaaatcaggaaatactcaagaacactctagctgcttataatggtgtcaaagaaattctgataaaaaggttaaacaaaaatatcaccatcgagatttttttgaacattccaaccaggcaaatgctggttgcatttttagtttgatttttgaaattaggtattgtaaatgggacagctcgaacatgttttaatttttgtttgtgactattattgctcatttttatatgctacaaggctttgttgttgttgtcgttgttgttggtcagtcagactatactcgacaacagtaatatgcattattttgaaaagttaattgaatcacctgaagctgaatattatgtgtgaactgccgtaatatggagccccaataaagtgcaactctatgttagcttcgtcctataagctatagctatgctggggactgtattttatagcaagcttcgacctgacattttggtagattggtttcggcttgcatatcgttgtcagctgctgacgatagagttctcaacaggaaaagctgttttcgtgaaattagtgtacttgaaactggcccagctgaaaaaaaactctatttgctttaactttttgcagatttgcataatccgctattgttcctcgtgatggaataagtcatgtggtcttcgtgtggaggacagtccgcacagcatctctgctgtaggacagcagcaacaacagtttttgactgcaacgactgcggcagacagcatagcagcagtcttttaactgcaaggacagcgtgctgcaggcatctacttttcattttctagcttttggaggacaacagcttgctgcagtttcttttgactagagtacaacaacacctagtggttagtgcagtttgtaggacaacatattcgcaactctagtaagcatatgttgcagccccttgggctataaatatgaatcccaacccttagacgagtatgacattgtgtagtgtttgagaaaataaacagaaaattgccccaacttatactgttatcctcttgatgagagttagagtccctctacttacaattggtatcggagccaaactatcctgcagcctaaacat

SEQ ID NO: 9981 - DNA, 3290 bp, Zea Mays
aaatatgaaaacgaaattagttctcgtgttttcggccgtgcgctcgctggcgcaagccgcgcgaatcggatcgctgtccgcctctccatttcccctcgtccgcacacccgagcctcgcttccgcctcccacttcccaccaggccaccaccccgtccggcgatcccgatcgcgagacgagggtagcgagatcgagaggattgtcgcggctgccgggcggcgctccagttccaagtcgaggcgaggaactacacgtgtgatatctgcaactcatatggctgggacccacaagaagcgaatggaagaccgttttggtagttttttctcatttgatgaagattctgaaagtgaggacatatcgctggatgagttggaggaggaacttaaagagcacaagaactgtgatgtactagtaactattttaaccaatggtgaaaaacagcgaggcatggcaacattggttgagggcgacctaggccatactgaagaagctcttattcaaacccatatatgttcgataagctcggaaatcagaagcctccaggagaaatcctgggatataagcttgaaattgaagaaccgcaagttggttgagacaaagcttgctgggtttgttgaagagatagttgctcctcctggtttggtaaatattcttgttaatggagaggtaaatgaaggttatgccagaagtctggagatccttagcagaaagttgaaatttgttcaagtggatccgttgattaatgcatcaaaagctctgaatgatattaagcaagaattggaaaggcttcgacaaaaggcactatccaagatttccagccatattatggagattttctttgctatgagaaaccctgggactaatatacagatattgcaacaaaatttgcttcagaagcacaggtatctcgttctgtttcttaaagagcatggttccgagacatatggtgatttgtgtgcatcatatgttgatacaatgaacaaggtgctgagtacatactttcatgtgtatgtagaagcattggagaagttgaagctagaaattggtgtacccagtgattttaatggacatgataccagtatcatcgatattataataagaggaagggagcatttgagaaatcatggtttcatgttttcgttaggtgaacgtgcaaatattctgaaggagattcatcaacctggcttggttccacatatatctcaaggcaactctcgtacatacccatatgaagttattttcaggagccttcagaagcttctgatggacactgctagctctgagtatcttttcatggaatcattctttggagaagagtcactgttttatcaagtttttgaaggaccttttgctgttattgatcaacatttggatattactcttccaaattgtcatgatgctgtatgcctcatgctcataatctgcataactaggaagcaccagttggttatgtgcaacagacagctttcttgtcttgataactattttgataaggctctgatgtatctctggccacgtttcaaggtagtgtttgacatgtatattcaaagcttatatcagtgtgatgcgaaaacattatggatagatggtacccatccacaccatattgcaaggtgctacgtggagttcacagcatcccttgttcaacttaatgctgaatgcggagatggtcagcttgatatgaacttggaacgcttgcagtcagctatcgaattcctacttgttaggcttgcccaaacttttacaactaccaagctgcagcacctttttcttctaaataattatgacatggccatctctgtcctgaaggaaactggcgatgaagccaaaaaactgcaaaaatattttgaagagaagttagaaagtaacatgatggcttttgtggatgatttgctgatggaacatttcagtgacttacttcggtttgtgaggagtcatgtctcggaagacctggtatcttacaccgagaacaccaatattgccgacgttgagccagttgtgaagaactttgccatgaagtggagaattgctctagagctcatgcacaacgaagtcataacttcttgtactaaccttttgtctgggatggcaattctaaaagcagctatgactcagttgcttaatgactataacaggctctcagagtgcgtcaaaaaaatcacagggggttcaactttgaacagacatatggtttccatcacatctatttcatatgaaatcaggaaatactcaagaacactctagctgcttataatggtgtcaaagaaattctgataaaaaggttaaacaaaaatatcaccatcgagatttttttgaacattccaaccaggcaaatgctggttgcatttttagtttgatttttgaaattaggtattgtaaatgggacagctcgaacatgttttaatttttgtttgtgactattattgctcatttttatatgctacaaggctttgttgttgttgtcgttgttgttggtcagtcagactatactcgacaacagtaatatgcattattttgaaaagttaattgaatcacctgaagctgaatattatgtgtgaactgccgtaatatggagccccaataaagtgcaactctatgttagcttcgtcctataagctatagctatgctggggactgtattttatagcaagcttcgacctgacattttggtagattggtttcggcttgcatatcgttgtcagctgctgacgatagagttctcaacaggaaaagctgttttcgtgaaattagtgtacttgaaactggcccagctgaaaaaaaactctatttgctttaactttttgcagatttgcataatccgctattgttcctcgtgatggaataagtcatgtggtcttcgtgtggaggacagtccgcacagcatctctgctgtaggacagcagcaacaacagtttttgactgcaacgactgcggcagacagcatagcagcagtcttttaactgcaaggacagcgtgctgcaggcatctacttttcattttctagcttttggaggacaacagcttgctgcagtttcttttgactagagtacaacaacacctagtggttagtgcagtttgtaggacaacatattcgcaactctagtaagcatatgttgcagccccttgggctataaatatgaatcccaacccttagacgagtatgacattgtgtagtgtttgagaaaataaacagaaaattgccccaacttatactgttatcctcttgatgagagttagagtccctctacttacaattggtatcggagccaaactatcctgcagcctaaacat

SEQ ID NO: 9982 - DNA, 1808 bp, Zea Mays
gtcgcgggggtttgccatacgaaatcctgggcggcgatcttggcaggattgtcgggtgcttacggaagcggtcgggcgggagggcgggatgcggggctggcggcgggatgcggggtggggtgcggtcgcgggcgagatgcggggtgcgtgcggcagaacggcagaacggtgtggatgcctacgttatacataattagtagtagagtttttcgaaacttgagtggtaaaatatcatttattccgccacacacccatatgccaaattgcattgacagagaacgagagaaaaaaaaatcctaatccaccctcgccgcgagatcgccggtcgctcccatgtcgactccagccgccgctgcgaagcaatacttttgctaccaatgcaaccgcaccgtcctcatcgcggcctccgccgtcgccgccggggagctctcgtgccccgagtgccacggcaacttcctcgaggaggtcaccatccctgccccaaccttcatccagctccctttcccttttgcttccaccacgatccctaccgccagtaccgccccgcgccccgccccagcagccggcaccggcaggcccccttccttctcgtcctcctccgctgcgacctctcggtccgagccccgctacatctcctccatcctcaactccttcgtcggacccggcgaacaacccaacaggatcagcggctccagcatacgtttcgcccctggcacggccacccacaggaacgagcccgagcccttcgacccggtaatgttcttccagaattacatccaaagcctcgtggagggaggcgccaacatccaggtcctcttcgacgatgccagcgcgagcctcggctccggacccggcctagggcgcctcggcggggcaagcttcggggattacttcgtcggcccaggcttggaacaactcatcgagcagctcgccgagaacgaccccaaccgctatggcacgccgccggctgccaagtcggccctctcctcgctccccgacgtcgtcgtgactcacaccatggtcgcagctgcggagggcgctgagtgcgccgtctgcaaggaggatttctctcctggagaggtggccaagcagatgccctgtaaccacatctaccacaccgactgcatcatgccgtggcttgagcttcacaactcgtgccccatctgtcgctttgagcttcccactgacgatcctgattatgaggtgcggaagggctctaattctcagcaggctgttggtattgctgctgctgcatcagggagctctactgctgctgagggacaaatggagaggcaggagaatccaagggtggttgagaggaggttcaatgtgtcgctgccatggccattcagtggattgggagggcaaacatcgcagcaggacgggaacagtggaggcagtggtagcaactcacaaggcagtggctcgcaggatggtggcccacccagcagcaagaattgataaaaaatcagctggaggctacttgctgcacgaagaaagagaagagggcaagtgaggttcaccttttggcgatctgttaagaagtctgcagtatatacgtgtcaccatgactatacacctacaggaatttacagtctctgtttgttacgaaacaatcgtttgtttttcatgtagacacggcgcaaaaactgccactgcagcagaatttgcgcgctgagagagttgggacttcatgtgtagatttgttgattgatcctggtccatgaaatggtaaaccccaactccatcttttaacctgtattaaggcggcgcctgtcggatgatgcattggcgggcctagttgcggc

SEQ ID NO: 9983 - DNA, 1956 bp, Zea Mays
taaacttacaagcaccaccaagacaagagtagtcaaagaagcacaacaatcaggtaagcacctgaccgtcggtctcggcgatctgcaatgcctctctggactcttacagggagcctcacccgcgccgccgtggagccgcgtcggccgtgcctgcgcgccagggccgccgcggatgcgcccacgccccgtcgcgggggtttgccatacgaaatcctgggcggcgatcttggcaggattgtcgggtgcttacggaagcggtcgggcgggagggcgggatgcggggctggcggcgggatgcggggtggggtgcggtcgcgggcgagatgcggggtgcgtgcggcagaacggcagaacggtgtggatgcctacgttatacataattagtagtagagtttttcgaaacttgagtggtaaaatatcatttattccgccacacacccatatgccaaattgcattgacagagaacgagagaaaaaaaaatcctaatccaccctcgccgcgagatcgccggtcgctcccatgtcgactccagccgccgctgcgaagcaatacttttgctaccaatgcaaccgcaccgtcctcatcgcggcctccgccgtcgccgccggggagctctcgtgccccgagtgccacggcaacttcctcgaggaggtcaccatccctgccccaaccttcatccagctccctttcccttttgcttccaccacgatccctaccgccagtaccgccccgcgccccgccccagcagccggcaccggcaggcccccttccttctcgtcctcctccgctgcgacctctcggtccgagccccgctacatctcctccatcctcaactccttcgtcggacccggcgaacaacccaacaggatcagcggctccagcatacgtttcgcccctggcacggccacccacaggaacgagcccgagcccttcgacccggtaatgttcttccagaattacatccaaagcctcgtggagggaggcgccaacatccaggtcctcttcgacgatgccagcgcgagcctcggctccggacccggcctagggcgcctcggcggggcaagcttcggggattacttcgtcggcccaggcttggaacaactcatcgagcagctcgccgagaacgaccccaaccgctatggcacgccgccggctgccaagtcggccctctcctcgctccccgacgtcgtcgtgactcacaccatggtcgcagctgcggagggcgctgagtgcgccgtctgcaaggaggatttctctcctggagaggtggccaagcagatgccctgtaaccacatctaccacaccgactgcatcatgccgtggcttgagcttcacaactcgtgccccatctgtcgctttgagcttcccactgacgatcctgattatgaggtgcggaagggctctaattctcagcaggctgttggtattgctgctgctgcatcagggagctctactgctgctgagggacaaatggagaggcaggagaatccaagggtggttgagaggaggttcaatgtgtcgctgccatggccattcagtggattgggagggcaaacatcgcagcaggacgggaacagtggaggcagtggtagcaactcacaaggcagtggctcgcaggatggtggcccacccagcagcaagaattgataaaaaatcagctggaggttcaccttttggcgatctgttaagaagtctgcagtatatacgtgtcaccatgactatacacctacaggaatttacagtctctgtttgttacgaaacaatcgtttgtttttcatgtagacacggcgcaaaaactgccactgcagcagaatttgcgcgctgagagagttgggacttcatgtgtagatttgttgattgatcctggtccatgaaatggtaaaccccaactccatcttttaacctgtattaaggcggcgcctgtcggatgatgcattggcgggcctagttgcggc

SEQ ID NO: 9984 - DNA, 1594 bp, Zea Mays
gtcgcgggggtttgccatacgaaatcctgggcggcgatcttggcaggattgtcgggtgcttacggaagcggtcgggcgggagggcgggatgcggggctggcggcgggatgcggggtggggtgcggtcgcgggcgagatgcggggtgcgtgcggcagaacggcagaacggtgtggatgcctacgttatacataattagtagtagagtttttcgaaacttgagtggtaaaatatcatttattccgccacacacccatatgccaaattgcattgacagagaacgagagaaaaaaaaatcctaatccaccctcgccgcgagatcgccggtcgctcccatgtcgactccagccgccgctgcgaagcaatacttttgctaccaatgcaaccgcaccgtcctcatcgcggcctccgccgtcgccgccggggagctctcgtgccccgagtgccacggcaacttcctcgaggaggtcaccatccctgccccaaccttcatccagctccctttcccttttgcttccaccacgatccctaccgccagtaccgccccgcgccccgccccagcagccggcaccggcaggcccccttccttctcgtcctcctccgctgcgacctctcggtccgagccccgctacatctcctccatcctcaactccttcgtcggacccggcgaacaacccaacaggatcagcggctccagcatacgtttcgcccctggcacggccacccacaggaacgagcccgagcccttcgacccggtaatgttcttccagaattacatccaaagcctcgtggagggaggcgccaacatccaggtcctcttcgacgatgccagcgcgagcctcggctccggacccggcctagggcgcctcggcggggcaagcttcggggattacttcgtcggcccaggcttggaacaactcatcgagcagctcgccgagaacgaccccaaccgctatggcacgccgccggctgccaagtcggccctctcctcgctccccgacgtcgtcgtgactcacaccatggtcgcagctgcggagggcgctgagtgcgccgtctgcaaggaggatttctctcctggagaggtggccaagcagatgccctgtaaccacatctaccacaccgactgcatcatgccgtggcttgagcttcacaactcgtgccccatctgtcgctttgagcttcccactgacgatcctgattatgaggtgcggaagggctctaattctcagcaggctgttggtattgctgctgctgcatcagggagctctactgctgctgagggacaaatggagaggcaggagaatccaagggtggttgagaggaggttcaatgtgtcgctgccatggccattcagtggattgggagggcaaacatcgcagcaggacgggaacagtggaggcagtggtagcaactcacaaggcagtggctcgcaggatggtggcccacccagcagcaagaattgataaaaaatcagctggagggacggaggcagttggatgcgggaccgaagcagaggtgggcccagggcaggacgacacagttggatgcgggtggggatacgaaagtatggtaaaaatatgatataatatgtagtag

SEQ ID NO: 9985 - DNA, 1435 bp, Zea Mays
ctgctcactgcccagccgcaggccggagcgcgcagcgcggcctcggtagggtcggtcgactggtcgacaggtcgagtcaggtaggctcctgtcaaatcaaatcaaacaccgctcgccggtcgccgccgcccgcgtcaatcgatacagcatcgatcgaacatccgtcccacgcattcgattttcctcctgcaccgcgcgtggcgtcgatccgtgcccgtggatacccgttgcctgccgctgcctctgcgcctcgccgtgccgtgcgtgcagtgcgcaccggtggccgcgctcggcgagggagaatggcgtcggcgagccgctgggcgtggatggcggaggtggcgggggaggagctggcgaagctggaggcggcgcacccgggccgcttcggcccgctcaaggccgagctcgagcgcttcgtcgccgaccccgccttggacgaggccgcgttcccgctcgtctcaccccgcgccgacgccgctgataccactccggccgcctcgttccattccgctgctccttcgcgcacggtgcccgtgtgcacccaagagtcgtcgacccggaagagaaagccgcgcggcagcgtgcgggagcgggaggaggggaagcggagacggcgggcgagcacgccgccgggagggacgaaggacagggcactcatggccatcgagcgcgcccagcgatgcctagagaggatccgcgccgtcaaacagagtttgcttgccgcctggatccactgatggggggaatgcaatgcaagggtggagagacgagagcaggaagaaggaacgtttctggcgacggcatgaggaccaaaggaaacaccttttatcgatcgagggccctttttttacctgatagtactaggtacaacttggttaccagcatatggtcagtttatatattttcgggccacaagatatgtaatactttatatcctttttgagtatgatagattcaccatcatcaacacaaaaatgagaaggacataagcttagatacctactaatcagacctctcttagccctccattctcgtttggttcttagcgagggttctagattgctggtgtctagttcatctctttgtctgcacttaccattggatgagtccttttagtgttggatcttctaccttcgtctgaacctcaaagagtcatctccttcatgtccctctacttgtatgaccaaggaaggagagagttacaagtctcccaggtagcgggctctatccagcttggtggtgaggcgcggtatataataatacactccagcgagcgcctggtgctccccatccttgccgcgcgctgtgttcctcggtgaggagcagacgaccactgttatagctttgcaaattcgcttgctatcagggaaccatacaggcaagagctctcgtgcatctgacaacaataccgccgaacgttgtagtactcata

SEQ ID NO: 9986 - DNA, 1836 bp, Zea Mays
gctgttggaggttggagccagcctagaactccacttccgtgttagctttgccctcgtgcgagactctggtactcaatttctgaaggtcgaggcgtgaaagaaaaactccggaggtcgaaatggcggcggcggtgcggcgagcggaggagctggtggagagggagatgggcgggcgcgatgcctcccacgacgccgcgcacgcgctccgcgtccgagaccttgcgctctcgctcgcagccgaagagggcctctccgctcccgaccgcctcctcaccgtggaactggccgctctcctgcacgacgttggagattacaagtataccaagtaagggagcttctagtgttttgttaagttcattccttgtatttccgaagggtggaagtggaaggaaattgaattagagaacaatgtggaggatataagcgtcgttgagatgtttcttcaagaggtaggattggatgaaggccaaaaggatgaaatagtggcaattattaaggggatggggttcaaaaatgaagtttcaaataaatctattgttgagcccactcttgaatttgcaattgtacaagatgcagatcgcttggatgcaattggggcaattggtattgcaagatgttttacatatggtggtagcaagaacagcgcattacatgatcctagaattctgccacgtgatagcttgtcgaaggaaaagtacatgtccaaggaagagaagcagacatcaatcaatcattttcatgagaagctttttaaactgaaggacatgatgaagacagaggccgggaaaaggagagctgagaaaaggcataggttcatggaggaatttgtggctgaattctacgaagagtggagtggcagggcttgaggttgaacaaccagattttgagcctgtgtcaaagtgtgcagttggcgaaccatttctcaacaacccatgatgatgttgtctacctggcctacttttttgccgatgaagccaggcaaataaacaatggtttgtccagcctattagattggctggacaaatcatacggtcctgtgataagctatcaacccactaccaattccgtggatgaagctggatttttttttccaaacagatgccatggcatcttgctgctgttgtattgaaataatactgctacaatattaccggttacatcacctgaaggtcaagcgttttgccaacacatatacatatgtatctatacatatatatagaagttctatactagatgtaaatgaaacaaatgaagagccctgcttctttcatactgtatatctctcttcagtctcagagtcttattggcaagctcagctcggcaccaacagttcagagcttggtcttgtctctcttggtcagcgtgaccttgaggccgtacttcatgtacatggtgagcgccatcttgggcgcgacggggtggccctcgacgacgtcgacgcggtagcggcggaggatggaggcggcggcgaacttcatctggtagtaggcgaagtccttgccgaggcacaggcgcgggccgccgttgaaggcggtgaacttgtaggcggactcgctcatgaagcggccgtcccggagccaccgctccggcctgtactcccggcagtcgtcgccccagatgctctccatccgccccatggagtacatggcgtagaccaccttggtgcccttcttcagcaccgtcccgtccggaaacacctcgtcctccacgacctgccgtgcgttgcgtcagtactggctggaatcagttactgttaccaataatgatctactattgtctcaaattgaaagtcctatctgcacagtgcataattaagcttcttgatttagttatcgg

SEQ ID NO: 9987 - DNA, 1833 bp, Zea Mays
gctgttggaggttggagccagcctagaactccacttccgtgttagctttgccctcgtgcgagactctggtactcaatttctgaaggtcgaggcgtgaaagaaaaactccggaggtcgaaatggcggcggcggtgcggcgagcggaggagctggtggagagggagatgggcgggcgcgatgcctcccacgacgccgcgcacgcgctccgcgtccgagaccttgcgctctcgctcgcagccgaagagggcctctccgctcccgaccgcctcctcaccgtggaactggccgctctcctgcacgacgttgattacaagtataccaagtaagggagcttctagtgttttgttaagttcattccttgtatttccgaagggtggaagtggaaggaaattgaattagagaacaatgtggaggatataagcgtcgttgagatgtttcttcaagaggtaggattggatgaaggccaaaaggatgaaatagtggcaattattaaggggatggggttcaaaaatgaagtttcaaataaatctattgttgagcccactcttgaatttgcaattgtacaagatgcagatcgcttggatgcaattggggcaattggtattgcaagatgttttacatatggtggtagcaagaacagcgcattacatgatcctagaattctgccacgtgatagcttgtcgaaggaaaagtacatgtccaaggaagagaagcagacatcaatcaatcattttcatgagaagctttttaaactgaaggacatgatgaagacagaggccgggaaaaggagagctgagaaaaggcataggttcatggaggaatttgtggctgaattctacgaagagtggagtggcagggcttgaggttgaacaaccagattttgagcctgtgtcaaagtgtgcagttggcgaaccatttctcaacaacccatgatgatgttgtctacctggcctacttttttgccgatgaagccaggcaaataaacaatggtttgtccagcctattagattggctggacaaatcatacggtcctgtgataagctatcaacccactaccaattccgtggatgaagctggatttttttttccaaacagatgccatggcatcttgctgctgttgtattgaaataatactgctacaatattaccggttacatcacctgaaggtcaagcgttttgccaacacatatacatatgtatctatacatatatatagaagttctatactagatgtaaatgaaacaaatgaagagccctgcttctttcatactgtatatctctcttcagtctcagagtcttattggcaagctcagctcggcaccaacagttcagagcttggtcttgtctctcttggtcagcgtgaccttgaggccgtacttcatgtacatggtgagcgccatcttgggcgcgacggggtggccctcgacgacgtcgacgcggtagcggcggaggatggaggcggcggcgaacttcatctggtagtaggcgaagtccttgccgaggcacaggcgcgggccgccgttgaaggcggtgaacttgtaggcggactcgctcatgaagcggccgtcccggagccaccgctccggcctgtactcccggcagtcgtcgccccagatgctctccatccgccccatggagtacatggcgtagaccaccttggtgcccttcttcagcaccgtcccgtccggaaacacctcgtcctccacgacctgccgtgcgttgcgtcagtactggctggaatcagttactgttaccaataatgatctactattgtctcaaattgaaagtcctatctgcacagtgcataattaagcttcttgatttagttatcgg

SEQ ID NO: 9988 - DNA, 1778 bp, Zea Mays
tgctgttggagtcggcgtaaaactgctgttggaggttggagccagcctagaactccacttccgtgttagctttgccctcgtgcgagactctggtactcaatttctgaaggtcgaggcgtgaaagaaaaactccggaggtcgaaatggcggcggcggtgcggcgagcggaggagctggtggagagggagatgggcgggcgcgatgcctcccacgacgccgcgcacgcgctccgcgtccgagaccttgcgctctcgctcgcagccgaagagggcctctccgctcccgaccgcctcctcaccgtggaactggccgctctcctgcacgacgagattacaagtataccaagaacaatgtggaggatataagcgtcgttgagatgtttcttcaagaggtaggattggatgaaggccaaaaggatgaaatagtggcaattattaaggggatggggttcaaaaatgaagtttcaaataaatctattgttgagcccactcttgaatttgcaattgtacaagatgcagatcgcttggatgcaattggggcaattggtattgcaagatgttttacatatggtggtagcaagaacagcgcattacatgatcctagaattctgccacgtgatagcttgtcgaaggaaaagtacatgtccaaggaagagaagcagacatcaatcaatcattttcatgagaagctttttaaactgaaggacatgatgaagacagaggccgggaaaaggagagctgagaaaaggcataggttcatggaggaatttgtggctgaattctacgaagagtggagtggcagggcttgaggttgaacaaccagattttgagcctgtgtcaaagtgtgcagttggcgaaccatttctcaacaacccatgatgatgttgtctacctggcctacttttttgccgatgaagccaggcaaataaacaatggtttgtccagcctattagattggctggacaaatcatacggtcctgtgataagctatcaacccactaccaattccgtggatgaagctggatttttttttccaaacagatgccatggcatcttgctgctgttgtattgaaataatactgctacaatattaccggttacatcacctgaaggtcaagcgttttgccaacacatatacatatgtatctatacatatatatagaagttctatactagatgtaaatgaaacaaatgaagagccctgcttctttcatactgtatatctctcttcagtctcagagtcttattggcaagctcagctcggcaccaacagttcagagcttggtcttgtctctcttggtcagcgtgaccttgaggccgtacttcatgtacatggtgagcgccatcttgggcgcgacggggtggccctcgacgacgtcgacgcggtagcggcggaggatggaggcggcggcgaacttcatctggtagtaggcgaagtccttgccgaggcacaggcgcgggccgccgttgaaggcggtgaacttgtaggcggactcgctcatgaagcggccgtcccggagccaccgctccggcctgtactcccggcagtcgtcgccccagatgctctccatccgccccatggagtacatggcgtagaccaccttggtgcccttcttcagcaccgtcccgtccggaaacacctcgtcctccacgacctgccgtgcgttgcgtcagtactggctggaatcagttactgttaccaataatgatctactattgtctcaaattgaaagtcctatctgcacagtgcataattaagcttcttgatttagttatcgg

SEQ ID NO: 9989 - DNA, 5340 bp, Zea Mays
ggcgccacccacacccaccgcctcacgcacttcgccttctcgcccagttcagctcctctctcccccttccgccgtgtctcgctcctcctggctatgccgatttataaacccccaccgcgccatgcgctccccaccgccacagccactccacccgcaccgaaccaatggcggacgccgccacctccgaggatgccgacctgccgcccccacctccgccggcgcagctcccgcctcctcgccgcccgcacaagcggcttcagccgcgggggtaccaggtggaggtgttcgctgcggcgctgcgcgggaacaccatcgcggtgctagacactggctctgggaaaaccatggtcgctatcatgctcgcgcgggagcacgtcctccgcgcgcgcgctggggaggcgctgcgccggatcgtggtattcctcgcgcccaccgtgcacctcgtccaccagcaattcgaggtgattcgggagtatacagacctcgacgcggtggagtgccatggggcatcgggggttggccactggaacgccaagcgctggaaggaagcaattgggactaaggagattgttgttatgacaccacagatactattggatgctctcaggcatgcttttctaacaatgcgtgtgatgagcttgttaatatttgatgaatgccatcgtgcttgtggaaaccatccatactcactaataatgaaggaattttacattgattcggagtggaggccagctatatttggaatgacggcgtctccagtttctaaaaagggagcttctactatagaagattgtgaagcacagattgctcaacttgagctagtattggatgccaaggtatatattgttgaagataggaatgaacttgagagcttttcaactggtgcaaaagttgtgaataaatactatgacccttacttgtttgatttggataatctggaatcaaagttacagatgctgtttgaggagtttgatggtttgttggttagactgcaagaatcatctcctaataaatttgaagacactgatagtatattggagatgtcgagaaagagcttgtccagatgccatgggaagatattgtacgaactaaatactcttggtccaattgttactttggaggtggtgaagatatataatgaaagcattaataccatagatgattctgaagattgcgtattttctaaagagagcctcaacttacaggtttcctatttcaaagaagctttatttttgattgaagattttttgccacagggttatggggagctgatgaaatcagaatctggttctgcggaactaactaagaagggatatatttcttctaaagtggagtcactgatcaacattttcaaatcgtttggctcgtcagaggaagtgctttgcatgatttttgtagaaagaattacgacagccaaagctgttgaaaggtttatgagaggaaatgtgaacttctctcgtttttcaatttcatacttgactggagggagtacatcaaaagatgctttgagcccagcagtacaaagatttactttggatttgttccgagctgggaaggtgaatttgctttttacaacagatgtcactgaagagggtattgatgtacctaactgttcctgtgtgatacgttttgacttacccagaactgtttgtagctatgtccagtctcgtgggcgtgccagaaaaagcagttcaagttatgttcttatgattgaaaggggtaacttggcgcagcaggaacacatatttcgtataatacgaactgaatactatgttaaaacctttgcactgcataaacaaccaaatactccatcacttgatttgcctctccaagagaagtacatataccatgttgaatcaacaggagcaactatcaccgcagaatgctgtgtcaacctaatttataaatattgtgagaagcttcctaaagataggtattacttgccaaagccttgctttgaggtgggtcttaaggatgggtcatatcaatgtaccttgacaatgcctcacaatgctgcatttcgaagtatagttggtcctccaagtagttcatgtaatttagccaagcagcttgtatgcctggaggcatgcaagaaactgcacgagctgggagaactcgatgatcatctagtacccttgactgaagagcctatggatattgatacagacacaacagataaaaaatgtgtttctggaccaggaacaactaaacgaaaggagcttcatggaacgataaatgttcatggtctatctggaaactggatccatgaaagtgaaactgtgattctgaatgcttacacatttgattttcgttgtgatcaagaaggtgaactttatgctgggttcgttctcttaatggaatcagtacttgatgatgatgtggcacgttcagagatagatctcttccttatacctaataaaatggtgtacaccaccatgactccttgtggaaaaattcaactgaacaaagagcagctgtgtaaaggaaaattattccaagaattcttcttcaatggtatatttggtagattatttcatggttcccgaacggatgaactgcaaagggaatttattttcacaaaaggtcatgaaatacaatggggctcagacaacatgtacttacttttgcctttgaggaactcttcacagatacaacatgatccaaacatatactgggaagccgttgagtcttgctctggtacagtagagcagttgagaaatttgtatctagaagatggaaatctcaaccatgaaaacttatgttcacataaaagaagcaacaagggagaagacatcattcatctggccaataaatctcttcatttttccacagtcaaagattcagttgtactatctcttcatactgggaggatctattctgttcttgacttgattttagataaaactgcagatgactcatttgatgagatgtataatgggaaagcttcaccatttgcttcatttgtggactactaccatcaaaagtatggtattgttattcaacatccagggcaacctttgttgctgttaaagcaaagtcacaatgcacacaacttacttttttcaaaaatgaagtaccaagatggttcaactggcaatcctctgctcgtagaaaaagagcaaattcatgcccgagttccacctgaactactcatccatattgatgtcgcaactgatattctcaaatcattttacttgctcccttctgtaatgcatcgggttcagtctttaatgttagccagccagcttcgcagcaacattagttacattcaacgcataccaagttctctgattttggaagctataacaactttaaggtgctgcgagtccttttctctggagcggttagagttattaggagactcagtactgaaatatgtaataggatgtgatctgttcctaagatacccaatgaaacatgaaggccatctctctgatatgagatccaaggcggtatgcaatgcgacactgcataaacatggaatatggcaatccctgcagggttatatacgtgatgctgcatttgaccctcgtcgttgggttgctcctggacagatatcattgcgcccttttccttgtaattgtggaatcgaaactgcatttgttccttttaatggaggttatatcagtgacgatccatcttttgttgtgggaaaaccatgtgacagaggccacagatggatgtgctcaaaaacagtatctgattgtgttgaagcactagttggagcatattatgttggtggtggcatcgctgctgcaatttgggttatgaggtggtttggtattgatgtcaggtgtgatatggaactagtgcagaaagcaaaatataattctaatgcatctcgaatgtgctatttatcaaaaataaaagatattgaggaactggaagcaaaactgaagtacaacttctcggtcaaaggccttctgcttgaagccatatcacatccatctgtacaggaattaggagttgactattgttaccagcgtctggaatttcttggtgattctgtgctggatctattaatcacacagcatctctatgctacccacactgatgttgatcctggagaattgacagacctgcgttccgcttcggttagtaatgagaattttgcacaagcagttgtaagaaacaatattcataatcatctacagcatggatctggaatacttttggaacaagtaacagaatatgtcaggtccaacttggagtaccatggtaaagagaatcaattccttcaacaagctacatgcaaagcacctaaggttcttggagacatcatggaaagtattactggtgcaatatttatagatgtaaattttgatgttgatctggtttggaagattgttgaaccgttactttctccaatgattacccctgataagcttgcgttgccaccttatcgggagttgctggagttatgtagtcaccttggttgcttcatagagtcaaaatgtactagtgaaggagaagagttaattattgagatgaaggtgcagttgcgagatgaacaactgatagcacaaggacatgacagaaatggtaaaaccgcaaaggcaaatgcagcagcccgaattttggtcgacatgaagaaacggggtctctctcttaaacaatgcatctcgaaggctaatcaattggatattgtctcttcaaaactgcaatcagaattgacaaattatcgcatctctgtagttggaatcgcgacatgattgtcctcacatgaatggcactcttagcctaggtctttcctcagcgagagcagcagttgttcttcctctcaaaatggacaaaggtggacctcggactgcactttttaggctatgcaagagtttacagtggccaattccagaatttgaatttgtggaacaaaggtttaggactcctattgttctggatggggttacaactacaaacttcaatagcttcgtttcaactatcaccttgcacatacctgatgtgacggtcattacacttcaaggtgagccccggactgacaagaagaggtctcaagactcagcgtctctgctaatgcttaagaaattcgaagaactcggagtctgcatatgcgagacgcagccaagcaacatggataataataataatgccagttaatggacaacactgattaatgttggggttactatctccctcccaatgtgatttctgttgaaaatgtttgtgagacactcgatactccgtaaagtatttgctggtacagtacattgccatttattgacttagactgagcttaccaatatgaataaatggagatgcaaaacactgttagggctagtttggaaactcaaatccgcttcgggattgaaaaggattagagag

SEQ ID NO: 9990 - DNA, 5355 bp, Zea Mays
cagccaacgaacgaacacaggccacggccacggcgccacccacacccaccgcctcacgcacttcgccttctcgcccagttcagctcctctctcccccttccgccgtgtctcgctcctcctggctatgccgatttataaacccccaccgcgccatgcgctccccaccgccacagccactccacccgcaccgaaccaatggcggacgccgccacctccgaggatgccgacctgccgcccccacctccgccggcgcagctcccgcctcctcgccgcccgcacaagcggcttcagccgcgggggtaccaggtggaggtgttcgctgcggcgctgcgcgggaacaccatcgcggtgctagacactggctctgggaaaaccatggtcgctatcatgctcgcgcgggagcacgtcctccgcgcgcgcgctggggaggcgctgcgccggatcgtggtattcctcgcgcccaccgtgcacctcgtccaccagcaattcgaggtgattcgggagtatacagacctcgacgcggtggagtgccatggggcatcgggggttggccactggaacgccaagcgctggaaggaagcaattgggactaaggagattgttgttatgacaccacagatactattggatgctctcaggcatgcttttctaacaatgcgtgtgatgagcttgttaatatttgatgaatgccatcgtgcttgtggaaaccatccatactcactaataatgaaggaattttacattgattcggagtggaggccagctatatttggaatgacggcgtctccagtttctaaaaagggagcttctactatagaagattgtgaagcacagattgctcaacttgagctagtattggatgccaaggtatatattgttgaagataggaatgaacttgagagcttttcaactggtgcaaaagttgtgaataaatactatgacccttacttgtttgatttggataatctggaatcaaagttacagatgctgtttgaggagtttgatggtttgttggttagactgcaagaatcatctcctaataaatttgaagacactgatagtatattggagatgtcgagaaagagcttgtccagatgccatgggaagatattgtacgaactaaatactcttggtccaattgttactttggaggtggtgaagatatataatgaaagcattaataccatagatgattctgaagattgcgtattttctaaagagagcctcaacttacaggtttcctatttcaaagaagctttatttttgattgaagattttttgccacagggttatggggagctgatgaaatcagaatctggttctgcggaactaactaagaagggatatatttcttctaaagtggagtcactgatcaacattttcaaatcgtttggctcgtcagaggaagtgctttgcatgatttttgtagaaagaattacgacagccaaagctgttgaaaggtttatgagaggaaatgtgaacttctctcgtttttcaatttcatacttgactggagggagtacatcaaaagatgctttgagcccagcagtacaaagatttactttggatttgttccgagctgggaaggtgaatttgctttttacaacagatgtcactgaagagggtattgatgtacctaactgttcctgtgtgatacgttttgacttacccagaactgtttgtagctatgtccagtctcgtgggcgtgccagaaaaagcagttcaagttatgttcttatgattgaaaggggtaacttggcgcagcaggaacacatatttcgtataatacgaactgaatactatgttaaaacctttgcactgcataaacaaccaaatactccatcacttgatttgcctctccaagagaagtacatataccatgttgaatcaacaggagcaactatcaccgcagaatgctgtgtcaacctaatttataaatattgtgagaagcttcctaaagataggtattacttgccaaagccttgctttgaggtgggtcttaaggatgggtcatatcaatgtaccttgacaatgcctcacaatgctgcatttcgaagtatagttggtcctccaagtagttcatgtaatttagccaagcagcttgtatgcctggaggcatgcaagaaactgcacgagctgggagaactcgatgatcatctagtacccttgactgaagagcctatggatattgatacagacacaacagataaaaaatgtgtttctggaccaggaacaactaaacgaaaggagcttcatggaacgataaatgttcatggtctatctggaaactggatccatgaaagtgaaactgtgattctgaatgcttacacatttgattttcgttgtgatcaagaaggtgaactttatgctgggttcgttctcttaatggaatcagtacttgatgatgatgtggcacgttcagagatagatctcttccttatacctaataaaatggtgtacaccaccatgactccttgtggaaaaattcaactgaacaaagagcagctgtgtaaaggaaaattattccaagaattcttcttcaatggtatatttggtagattatttcatggttcccgaacggatgaactgcaaagggaatttattttcacaaaaggtcatgaaatacaatggggctcagacaacatgtacttacttttgcctttgaggaactcttcacagatacaacatgatccaaacatatactgggaagccgttgagtcttgctctggtacagtagagcagttgagaaatttgtatctagaagatggaaatctcaaccatgaaaacttatgttcacataaaagaagcaacaagggagaagacatcattcatctggccaataaatctcttcatttttccacagtcaaagattcagttgtactatctcttcatactgggaggatctattctgttcttgacttgattttagataaaactgcagatgactcatttgatgagatgtataatgggaaagcttcaccatttgcttcatttgtggactactaccatcaaaagtatggtattgttattcaacatccagggcaacctttgttgctgttaaagcaaagtcacaatgcacacaacttacttttttcaaaaatgaagtaccaagatggttcaactggcaatcctctgctcgtagaaaaagagcaaattcatgcccgagttccacctgaactactcatccatattgatgtcgcaactgatattctcaaatcattttacttgctcccttctgtaatgcatcgggttcagtctttaatgttagccagccagcttcgcagcaacattagttacattcaacgcataccaagttctctgattttggaagctataacaactttaaggtgctgcgagtccttttctctggagcggttagagttattaggagactcagtactgaaatatgtaataggatgtgatctgttcctaagatacccaatgaaacatgaaggccatctctctgatatgagatccaaggcggtatgcaatgcgacactgcataaacatggaatatggcaatccctgcagggttatatacgtgatgctgcatttgaccctcgtcgttgggttgctcctggacagatatcattgcgcccttttccttgtaattgtggaatcgaaactgcatttgttccttttaatggaggttatatcagtgacgatccatcttttgttgtgggaaaaccatgtgacagaggccacagatggatgtgctcaaaaacagtatctgattgtgttgaagcactagttggagcatattatgttggtggtggcatcgctgctgcaatttgggttatgaggtggtttggtattgatgtcaggtgtgatatggaactagtgcagaaagcaaaatataattctaatgcatctcgaatgtgctatttatcaaaaataaaagatattgaggaactggaagcaaaactgaagtacaacttctcggtcaaaggccttctgcttgaagccatatcacatccatctgtacaggaattaggagttgactattgttaccagcgtctggaatttcttggtgattctgtgctggatctattaatcacacagcatctctatgctacccacactgatgttgatcctggagaattgacagacctgcgttccgcttcggttagtaatgagaattttgcacaagcagttgtaagaaacaatattcataatcatctacagcatggatctggaatacttttggaacaagtaacagaatatgtcaggtccaacttggagtaccatggtaaagagaatcaattccttcaacaagctacatgcaaagcacctaaggttcttggagacatcatggaaagtattactggtgcaatatttatagatgtaaattttgatgttgatctggtttggaagattgttgaaccgttactttctccaatgattacccctgataagcttgcgttgccaccttatcgggagttgctggagttatgtagtcaccttggttgcttcatagagtcaaaatgtactagtgaaggagaagagttaattattgagatgaaggtgcagttgcgagatgaacaactgatagcacaaggacatgacagaaatggtaaaaccgcaaaggcaaatgcagcagcccgaattttggtcgacatgaagaaacggggtctctctcttaaacaatgcatctcgaaggctaatcaattggatattgtctcttcaaaactgcaatcagaattgacaaatttggaatcgcgacatgattgtcctcacatgaatggcactcttagcctaggtctttcctcagcgagagcagcagttgttcttcctctcaaaatggacaaaggtggacctcggactgcactttttaggctatgcaagagtttacagtggccaattccagaatttgaatttgtggaacaaaggtttaggactcctattgttctggatggggttacaactacaaacttcaatagcttcgtttcaactatcaccttgcacatacctgatgtgacggtcattacacttcaaggtgagccccggactgacaagaagaggtctcaagactcagcgtctctgctaatgcttaagaaattcgaagaactcggagtctgcatatgcgagacgcagccaagcaacatggataataataataatgccagttaatggacaacactgattaatgttggggttactatctccctcccaatgtgatttctgttgaaaatgtttgtgagacactcgatactccgtaaagtatttgctggtacagtacattgccatttattgacttagactgagcttaccaatatgaataaatggagatgcaaaacactgttagggctagtttggaaactcaaatccgcttcgggattgaaaaggattagagag

SEQ ID NO: 9991 - DNA, 2217 bp, Zea Mays
gacagatgggcagaggagcgtgaggaatgggacgatcgaaggttgaaggagatcctgacaggaaacaggacggccctgatgtcatcagatgccagtgagaattgccaaatgctacatgtcatctctgttgcaactccaggctgctgtttatagagaagactacaggactgctcataaactgaggctggctattgctgctacatcaaaaaatgacgctgtgggcagagctatctcggacttaaatatggccatagatgaggagcgctacaaggatgcagcatatatcagagatcatgctggcgcaggactgacagctggcttctgacagccctggtctccctatatttgaaatatactttgcagaggcaaatggtggatataacctacaggcagtgcatctgaaaccagatggtagcgattctgaccaagtgccaaacatgttaagggagaaacttggcattgacagtataaacatatctagcagtccattagggtctaagcatgaagaatttgatggaagtgtaaacatggatgataaagatagtgatgatagcaacatcgctgctggccctggttcgaaaaacttgtcaagcgatctaactgcagttcccaggattaaaatcttgaaagtggtacccatgcagaatgttgatcatgactacataatcaatatctttgatcagatttcagaggaagatgatgacaatgatgatcatgaagttgaaaatgaatcttcagaagatgttgataatgatgataacagtggagtagcagaaacagtttctgcagaagagaatggtgatgaatctggtgacgaaagtgatattgaaaccttggtttcatttgattttgtcagtgagaataacgtctatgcttctcgtccatctgctgaagcttttgaacgaatgccggctagattagaaaaaagagatcgcttctcattttccttctatactgaagaatacagtaaaaagctagatgctggaaaggcccggcagacttcaaaggaaacagttggtttgcatgccgatcagcaggattatgatggttttgtccagcttgatcgtgtaaagttgagtggcagcaacaaaaaactatcgatactacaacttggcatcaagcaaaataacaaggttcagcaaaaactgcatggagttacccactttagtcgtattcagatgcctatattttcagatcctcttaccggtttatatgtgaccacatcaggatttgactcagaaattcttagtttgcaacgaaaatttggtcaatggcgggatgatggttcatctgaggagcatagtgacctattgttctatgagcatgttgaagctgtaaaattaacaggggacaatctcatgccagctggtcaggttgtcttccgtgcaaaagttggtgaacgctatcagctccctcataagggaattatccctagagaacttggagtgattgctaggtacaaggggcaaaggaaaattgcagatcctggtttccaaaaccctcgatgggttgatggagagcttttgataatagatggaaagttcatcagagatggtcctgtgatagctttcttttactggacatctaattttcatcgtttcgaattctttagacggttgaggcttcctgaatagttcccatctaaaagtagttaaagattctgatgtgaagagggcgcctggcatgaatcaaggggcatctccacccactctgaaaggctgccatgagggtggaaaatagctcacagtcgcaggaagaggaatagcatcctgccaacatgggtgagctgcgggcgcatcataccaattccgcttctgctatgctccgtccaccaggtcaccagcttgtgaccgaggcatcaaaccgccagattttgtgtttctcagagcaagtagaactaaagcacctcaaagatgtaaatttatgcactcccaaatttaggattttgagcgcaatcttggcagttttcatacatgcgaagtgaactagtacgagcaatagttttgtatagcgtgatcaaacagtggcagcaatcagtagcagaggcatacagaccaacacggccacacagatttgttaatatatctaagtttgtttaaccttgcccatttcttaagcaagaactctatttttaatttttaagctcccattcaaacaagcaaggaaaaggctgtgctgtcgcttgtcgctgcagcaatagacaagactgtattcagg

SEQ ID NO: 9992 - DNA, 2514 bp, Zea Mays
ctccatgacaaagtgaggttggccaatgacaatgttgctctcttgtggcgccaccctcgtgttccccggttgtcatgtcgagagcgccgcctaccactgcaacacggtcgatggccaagggtggatgagggagaccatactacctcgcagctcagtcggacagatgggcagaggagcgtgaggaatgggacgatcgaaggttgaaggagatcctgacaggaaacaggacggccctgatgtcatcagatgccagtgagaattgccaaatgctacatgtcatctctgttgcaactccaggctgctgtttatagagaagactacaggactgctcataaactgaggctggctattgctgctacatcaaaaaatgacgctgtgggcagagctatctcggacttaaatatggccatagatgaggagcgctacaaggatgcagcatatatcagagatcatgctggcgcaggactgctggggtggtggtctggaatttctggaaatttgtctgatccatatggtcttattattcgtataagtgctgaacatggtcgatatgtggcaagaagttatgatacaagacagctggcttctgacagccctggtctccctatatttgaaatatactttgcagaggcaaatggtggatataacctacaggcagtgcatctgaaaccagatggtagcgattctgaccaagtgccaaacatgttaagggagaaacttggcattgacagtataaacatatctagcagtccattagggtctaagcatgaagaatttgatggaagtgtaaacatggatgataaagatagtgatgatagcaacatcgctgctggccctggttcgaaaaacttgtcaagcgatctaactgcagttcccaggattaaaatcttgaaagtggtacccatgcagaatgttgatcatgactacataatcaatatctttgatcagatttcagaggaagatgatgacaatgatgatcatgaagttgaaaatgaatcttcagaagatgttgataatgatgataacagtggagtagcagaaacagtttctgcagaagagaatggtgatgaatctggtgacgaaagtgatattgaaaccttggtttcatttgattttgtcagtgagaataacgtctatgcttctcgtccatctgctgaagcttttgaacgaatgccggctagattagaaaaaagagatcgcttctcattttccttctatactgaagaatacagtaaaaagctagatgctggaaaggcccggcagacttcaaaggaaacagttggtttgcatgccgatcagcaggattatgatggttttgtccagcttgatcgtgtaaagttgagtggcagcaacaaaaaactatcgatactacaacttggcatcaagcaaaataacaaggttcagcaaaaactgcatggagttacccactttagtcgtattcagatgcctatattttcagatcctcttaccggtttatatgtgaccacatcaggatttgactcagaaattcttagtttgcaacgaaaatttggtcaatggcgggatgatggttcatctgaggagcatagtgacctattgttctatgagcatgttgaagctgtaaaattaacaggggacaatctcatgccagctggtcaggttgtcttccgtgcaaaagttggtgaacgctatcagctccctcataagggaattatccctagagaacttggagtgattgctaggtacaaggggcaaaggaaaattgcagatcctggtttccaaaaccctcgatgggttgatggagagcttttgataatagatggaaagttcatcagagatggtcctgtgatagctttcttttactggacatctaattttcatcgtttcgaattctttagacggttgaggcttcctgaatagttcccatctaaaagtagttaaaggagttgcctggcattacattttccgaggacagattctgatgtgaagagggcgcctggcatgaatcaaggggcatctccacccactctgaaaggctgccatgagggtggaaaatagctcacagtcgcaggaagaggaatagcatcctgccaacatgggtgagctgcgggcgcatcataccaattccgcttctgctatgctccgtccaccaggtcaccagcttgtgaccgaggcatcaaaccgccagattttgtgtttctcagagcaagtagaactaaagcacctcaaagatgtaaatttatgcactcccaaatttaggattttgagcgcaatcttggcagttttcatacatgcgaagtgaactagtacgagcaatagttttgtatagcgtgatcaaacagtggcagcaatcagtagcagaggcatacagaccaacacggccacacagatttgttaatatatctaagtttgtttaaccttgcccatttcttaagcaagaactctatttttaatttttaagctcccattcaaacaagcaaggaaaaggctgtgctgtcgcttgtcgctgcagcaatagacaagactgtattcagg

SEQ ID NO: 9993 - DNA, 2533 bp, Zea Mays
ctccatgacaaagtgaggttggccaatgacaatgttgctctcttgtggcgccaccctcgtgttccccggttgtcatgtcgagagcgccgcctaccactgcaacacggtcgatggccaagggtggatgagggagaccatactacctcgcagctcagtcggacagatgggcagaggagcgtgaggaatgggacgatcgaaggttgaaggagatcctgacaggaaacaggacggccctgatgtcatcagatgccagtgagaattgccaaatgctacatgtcatctctgttgcaactccaggctgctgtttatagagaagactacaggactgctcataaactgaggctggctattgctgctacatcaaaaaatgacgctgtgggcagagctatctcggacttaaatatggccatagatgaggagcgctacaaggatgcagcatatatcagagatcatgctggcgcaggactgctggggtggtggtctggaatttctggaaatttgtctgatccatatggtcttattattcgtataagtgctgaacatggtcgatatgtggcaagaagttatgatacaagacagctggcttctgacagccctggtctccctatatttgaaatatactttgcagaggcaaatggtggatataacctacaggcagtgcatctgaaaccagatggtagcgattctgaccaagtgccaaacatgttaagggagaaacttggcattgacagtataaacatatctagcagtccattagggtctaagcatgaagaatttgatggaagtgtaaacatggatgataaagatagtgatgatagcaacatcgctgctggccctggttcgaaaaacttgtcaagcgatctaactgcagttcccaggattaaaatcttgaaagtggtacccatgcagaatgttgatcatgactacataatcaatatctttgatcagatttcagaggaagatgatgacaatgatgatcatgaagttgaaaatgaatcttcagaagatgttgataatgatgataacagtggagtagcagaaacagtttctgcagaagagaatggtgatgaatctggtgacgaaagtgatattgaaaccttggtttcatttgattttgtcagtgagaataacgtctatgcttctcgtccatctgctgaagcttttgaacgaatgccggctagattagaaaaaagagatcgcttctcattttccttctatactgaagaatacagtaaaaagctagatgctggaaaggcccggcagacttcaaaggaaacagttggtttgcatgccgatcagcaggattatgatggttttgtccagcttgatcgtgtaaagttgagtggcagcaacaaaaaactatcgatactacaacttggcatcaagcaaaataacaaggttcagcaaaaactgcatggagttacccactttagtcgtattcagatgcctatattttcagatcctcttaccggtttatatgtgaccacatcaggatttgactcagaaattcttagtttgcaacgaaaatttggtcaatggcgggatgatggttcatctgaggagcatagtgacctattgttctatgagcatgttgaagctgtaaaattaacaggggacaatctcatgccagctggtcaggttgtcttccgtgcaaaagttggtgaacgctatcagctccctcataagggaattatccctagagaacttggagtgattgctaggtacaaggggcaaaggaaaattgcagatcctggtttccaaaaccctcgatgggttgatggagagcttttgataatagatggaaagttcatcagagatggtcctgtgatagctttcttttactggacatctaattttcatcgtttcgaattctttagacggttgaggcttcctgaatagttcccatctaaaagtagttaaagttgcatttggagccaacaggagttgcctggcattacattttccgaggacagattctgatgtgaagagggcgcctggcatgaatcaaggggcatctccacccactctgaaaggctgccatgagggtggaaaatagctcacagtcgcaggaagaggaatagcatcctgccaacatgggtgagctgcgggcgcatcataccaattccgcttctgctatgctccgtccaccaggtcaccagcttgtgaccgaggcatcaaaccgccagattttgtgtttctcagagcaagtagaactaaagcacctcaaagatgtaaatttatgcactcccaaatttaggattttgagcgcaatcttggcagttttcatacatgcgaagtgaactagtacgagcaatagttttgtatagcgtgatcaaacagtggcagcaatcagtagcagaggcatacagaccaacacggccacacagatttgttaatatatctaagtttgtttaaccttgcccatttcttaagcaagaactctatttttaatttttaagctcccattcaaacaagcaaggaaaaggctgtgctgtcgcttgtcgctgcagcaatagacaagactgtattcagg

SEQ ID NO: 9994 - DNA, 2557 bp, Zea Mays
ctccatgacaaagtgaggttggccaatgacaatgttgctctcttgtggcgccaccctcgtgttccccggttgtcatgtcgagagcgccgcctaccactgcaacacggtcgatggccaagggtggatgagggagaccatactacctcgcagctcagtcggacagatgggcagaggagcgtgaggaatgggacgatcgaaggttgaaggagatcctgacaggaaacaggacggccctgatgtcatcagatgccagtgagaattgccaaatgctacatgtcatctctgttgcaactccaggctgctgtttatagagaagactacaggactgctcataaactgaggctggctattgctgctacatcaaaaaatgacgctgtgggcagagctatctcggacttaaatatggccatagatgaggagcgctacaaggatgcagcatatatcagagatcatgctggcgcaggactgctggggtggtggtctggaatttctggaaatttgtctgatccatatggtcttattattcgtataagtgctgaacatggtcgatatgtggcaagaagttatgatacaagacagctggcttctgacagccctggtctccctatatttgaaatatactttgcagaggcaaatggtggatataacctacaggcagtgcatctgaaaccagatggtagcgattctgaccaagtgccaaacatgttaagggagaaacttggcattgacagtataaacatatctagcagtccattagggtctaagcatgaagaatttgatggaagtgtaaacatggatgataaagatagtgatgatagcaacatcgctgctggccctggttcgaaaaacttgtcaagcgatctaactgcagttcccaggattaaaatcttgaaagtggtacccatgcagaatgttgatcatgactacataatcaatatctttgatcagatttcagaggaagatgatgacaatgatgatcatgaagttgaaaatgaatcttcagaagatgttgataatgatgataacagtggagtagcagaaacagtttctgcagaagagaatggtgatgaatctggtgacgaaagtgatattgaaaccttggtttcatttgattttgtcagtgagaataacgtctatgcttctcgtccatctgctgaagcttttgaacgaatgccggctagattagaaaaaagagatcgcttctcattttccttctatactgaagaatacagtaaaaagctagatgctggaaaggcccggcagacttcaaaggaaacagttggtttgcatgccgatcagcaggattatgatggttttgtccagcttgatcgtgtaaagttgagtggcagcaacaaaaaactatcgatactacaacttggcatcaagcaaaataacaaggttcagcaaaaactgcatggagttacccactttagtcgtattcagatgcctatattttcagatcctcttaccggtttatatgtgaccacatcaggatttgactcagaaattcttagtttgcaacgaaaatttggtcaatggcgggatgatggttcatctgaggagcatagtgacctattgttctatgagcatgttgaagctgtaaaattaacaggggacaatctcatgccagctggtcaggttgtcttccgtgcaaaagttggtgaacgctatcagctccctcataagggaattatccctagagaacttggagtgattgctaggtacaaggggcaaaggaaaattgcagatcctggtttccaaaaccctcgatgggttgatggagagcttttgataatagatggaaagttcatcagagatggtcctgtgatagctttcttttactggacatctaattttcatcgtttcgaattctttagacggttgaggcttcctgaatagttcccatctaaaagtagttaaagcaggccattctgatttttgcatagttgcatttggagccaacaggagttgcctggcattacattttccgaggacagattctgatgtgaagagggcgcctggcatgaatcaaggggcatctccacccactctgaaaggctgccatgagggtggaaaatagctcacagtcgcaggaagaggaatagcatcctgccaacatgggtgagctgcgggcgcatcataccaattccgcttctgctatgctccgtccaccaggtcaccagcttgtgaccgaggcatcaaaccgccagattttgtgtttctcagagcaagtagaactaaagcacctcaaagatgtaaatttatgcactcccaaatttaggattttgagcgcaatcttggcagttttcatacatgcgaagtgaactagtacgagcaatagttttgtatagcgtgatcaaacagtggcagcaatcagtagcagaggcatacagaccaacacggccacacagatttgttaatatatctaagtttgtttaaccttgcccatttcttaagcaagaactctatttttaatttttaagctcccattcaaacaagcaaggaaaaggctgtgctgtcgcttgtcgctgcagcaatagacaagactgtattcagg

SEQ ID NO: 9995 - DNA, 3306 bp, Zea Mays
tgcaagcaaccaaacaacatctcttgtgaaccagactggccacatacacacaaccaaacacgctatactgcatgcactcagccagtccagtctgagccaggctcactagatacgagccaggctcacccatacaagtaaccgaacgccccctaaagttcggtcgcaacgcggccgacgccgccacaagcgcatggcggcgtagacccaaaaacaactgtccccttccgaggtccacctgtctgtcacggcctctcacggaggccgtctgctctctcgcctctcggcgagtcttatcatcccctggcctcgttctaatccacccgagagacgaggtcgagcacgactccagccgcaacgcgcgagcggcgagcctcatcaatcaaacacacgccacacgcgacaagagtacgagtacctaacatacgaatacgagtatacgaccacgagtccacgagcagacgagctcctccgccaccagtgtcatcgcgtcgccgtcgcgtccgcctcgccctcgtccatggcgtccgtgtccacggcgccgcgcgctccactcccggcggcagcgtcgtcctcgttatccgcgcggcaggtggatccgaaccctagcggcagccacttcctcgacgggcggcgcctccgcgtcgtccgccgcctcgccggcgcggccccgtcgcggcgcgctccgttggtctgctgctccgcgcgtagtccggacgcggacgccggcgacgagcgacgccggcggggttgggacgcgatgcttcacgacgccttcaagggtgccgtgcgacggtggagcgagtacgtcagcaattactggcccccaccgacctctgttaaggaggcgggtacggggaagagggttgggaggtctcacgaggaagaggtgatgaatggggatgaagaggagaggaaggttggggaggaagagggaaagtggagctgggcgaggtggaagcggcactttgctctcattgaggagagcgggcgtctcgttgatgagctccagttgcaactccaggctgctgtttatagagaagactacaggactgctcataaactgaggctggctattgctgctacatcaaaaaatgacgctgtgggcagagctatctcggacttaaatatggccatagatgaggagcgctacaaggatgcagcatatatcagagatcatgctggcgcaggactgctggggtggtggtctggaatttctggaaatttgtctgatccatatggtcttattattcgtataagtgctgaacatggtcgatatgtggcaagaagttatgatacaagacagctggcttctgacagccctggtctccctatatttgaaatatactttgcagaggcaaatggtggatataacctacaggcagtgcatctgaaaccagatggtagcgattctgaccaagtgccaaacatgttaagggagaaacttggcattgacagtataaacatatctagcagtccattagggtctaagcatgaagaatttgatggaagtgtaaacatggatgataaagatagtgatgatagcaacatcgctgctggccctggttcgaaaaacttgtcaagcgatctaactgcagttcccaggattaaaatcttgaaagtggtacccatgcagaatgttgatcatgactacataatcaatatctttgatcagatttcagaggaagatgatgacaatgatgatcatgaagttgaaaatgaatcttcagaagatgttgataatgatgataacagtggagtagcagaaacagtttctgcagaagagaatggtgatgaatctggtgacgaaagtgatattgaaaccttggtttcatttgattttgtcagtgagaataacgtctatgcttctcgtccatctgctgaagcttttgaacgaatgccggctagattagaaaaaagagatcgcttctcattttccttctatactgaagaatacagtaaaaagctagatgctggaaaggcccggcagacttcaaaggaaacagttggtttgcatgccgatcagcaggattatgatggttttgtccagcttgatcgtgtaaagttgagtggcagcaacaaaaaactatcgatactacaacttggcatcaagcaaaataacaaggttcagcaaaaactgcatggagttacccactttagtcgtattcagatgcctatattttcagatcctcttaccggtttgttccaaattgtgtacctaccacttgagcttttcgtgatgtgcatcttgtcttcttttttctttctggtattgactgaaatatattctttgggcaggtttatatgtgaccacatcaggatttgactcagaaattcttagtttgcaacgaaaatttggtcaatggcgggatgatggttcatctgaggagcatagtgacctattgttctatgagcatgttgaagctgtaaaattaacaggggacaatctcatgccagctggtcaggttgtcttccgtgcaaaagttggtgaacgctatcagctccctcataagggaattatccctagagaacttggagtgattgctaggtacaaggggcaaaggaaaattgcagatcctggtttccaaaaccctcgatgggttgatggagagcttttgataatagatggaaagttcatcagagatggtcctgtgatagctttcttttactggacatctaattttcatcgtttcgaattctttagacggttgaggcttcctgaatagttcccatctaaaagtagttaaagattctgatgtgaagagggcgcctggcatgaatcaaggggcatctccacccactctgaaaggctgccatgagggtggaaaatagctcacagtcgcaggaagaggaatagcatcctgccaacatgggtgagctgcgggcgcatcataccaattccgcttctgctatgctccgtccaccaggtcaccagcttgtgaccgaggcatcaaaccgccagattttgtgtttctcagagcaagtagaactaaagcacctcaaagatgtaaatttatgcactcccaaatttaggattttgagcgcaatcttggcagttttcatacatgcgaagtgaactagtacgagcaatagttttgtatagcgtgatcaaacagtggcagcaatcagtagcagaggcatacagaccaacacggccacacagatttgttaatatatctaagtttgtttaaccttgcccatttcttaagcaagaactctatttttaatttttaagctcccattcaaacaagcaaggaaaaggctgtgctgtcgcttgtcgctgcagcaatagacaagactgtattcagg

SEQ ID NO: 9996 - DNA, 2444 bp, Zea Mays
ctccatgacaaagtgaggttggccaatgacaatgttgctctcttgtggcgccaccctcgtgttccccggttgtcatgtcgagagcgccgcctaccactgcaacacggtcgatggccaagggtggatgagggagaccatactacctcgcagctcagtcggacagatgggcagaggagcgtgaggaatgggacgatcgaaggttgaaggagatcctgacaggaaacaggacggccctgatgtcatcagatgccagtgagaattgccaaatgctacatgtcatctctgttgcaactccaggctgctgtttatagagaagactacaggactgctcataaactgaggctggctattgctgctacatcaaaaaatgacgctgtgggcagagctatctcggacttaaatatggccatagatgaggagcgctacaaggatgcagcatatatcagagatcatgctggcgcaggactgctggggtggtggtctggaatttctggaaatttgtctgatccatatggtcttattattcgtataagtgctgaacatggtcgatatgtggcaagaagttatgatacaagacagctggcttctgacagccctggtctccctatatttgaaatatactttgcagaggcaaatggtggatataacctacaggcagtgcatctgaaaccagatggtagcgattctgaccaagtgccaaacatgttaagggagaaacttggcattgacagtataaacatatctagcagtccattagggtctaagcatgaagaatttgatggaagtgtaaacatggatgataaagatagtgatgatagcaacatcgctgctggccctggttcgaaaaacttgtcaagcgatctaactgcagttcccaggattaaaatcttgaaagtggtacccatgcagaatgttgatcatgactacataatcaatatctttgatcagatttcagaggaagatgatgacaatgatgatcatgaagttgaaaatgaatcttcagaagatgttgataatgatgataacagtggagtagcagaaacagtttctgcagaagagaatggtgatgaatctggtgacgaaagtgatattgaaaccttggtttcatttgattttgtcagtgagaataacgtctatgcttctcgtccatctgctgaagcttttgaacgaatgccggctagattagaaaaaagagatcgcttctcattttccttctatactgaagaatacagtaaaaagctagatgctggaaaggcccggcagacttcaaaggaaacagttggtttgcatgccgatcagcaggattatgatggttttgtccagcttgatcgtgtaaagttgagtggcagcaacaaaaaactatcgatactacaacttggcatcaagcaaaataacaaggttcagcaaaaactgcatggagttacccactttagtcgtattcagatgcctatattttcagatcctcttaccggtttatatgtgaccacatcaggatttgactcagaaattcttagtttgcaacgaaaatttggtcaatggcgggatgatggttcatctgaggagcatagtgacctattgttctatgagcatgttgaagctgtaaaattaacaggggacaatctcatgccagctggtcaggttgtcttccgtgcaaaagttggtgaacgctatcagctccctcataagggaattatccctagagaacttggagtgattgctaggtacaaggggcaaaggaaaattgcagatcctggtttccaaaaccctcgatgggttgatggagagcttttgataatagatggaaagttcatcagagatggtcctgtgatagctttcttttactggacatctaattttcatcgtttcgaattctttagacggttgaggcttcctgaatagttcccatctaaaagtagttaaaggtaaactgcatttcatctggtactggtttactgtttggcattattattctaccataaagtactccagtattgttatattttaattttactgttgtgtgttcttgtgcttgccaaatttcaatatttgtcaactatttgttcagaggtagtgcttgttggctgttgcaggccatcattgatccaaatttggccttttcagcgtgtggggatagatatacacccagatactagcaatatgtgttccaagaaaactcgcattagactatctccagcagactccctgtttcaaactctactctgcaaacagtgcaatttacagtgtaaaacggtactttgcaccggcctgctggagatggcattaagcccgtacttcccggggcccatgccctggggagccatgtcatgttctgaccatatttcaggccctcctggtttttgaggcccaaatcctgagcccctcgtatggtctagagttctccaggcctaccagggtccttcatggctctttgggccaggggccaa

SEQ ID NO: 9997 - DNA, 941 bp, Zea Mays
tgcacttgtcgctcgagatggccttactttagaaaaaaaaaatcctgaccgggcatccctcggctgcagagtcgacctcatccaagttccatttattattttctccgaggaagccctttccccaggcacagatccggctcctcgccgccgccatggccgcccgcctccccctcctggtcctcgccgttgtcgctgcgtccctcctcgctgccgacgcgcggccgtgccacaccttcttcgtcgccttccgcgccgaccccaaccccagcagaggcgacgacgctgtaccccaccacctcggcgccccgcatgtcgctacagtcatcaccgtcttccgtgtccgccgtctcggtccgcacgtcccccacggccaccgtaaccaccaccacctccactccatccccgccaacggccggatttggtggcgctcgtgctcccgggaggtagggcaagttcctgaagtgggttggcctatggccatatgttgagtgaatcgtaatgtctgtatgacaatgtgatgcgcagttgggacttgggagccttaggggtttgccctccatgtgaatatgatcgtgaagcatgcttaagctaccaaatgtgcttgtttctgacgaacctatcaatcaatgttatgcaccactgtgaaactgttcatttgatctgctatctaatgtattatggcctggcttcgagatcagagttatacaatgtgatgggtggttgggacttgggaaccttagagctagtttgggagccacaaacccggttgattttagcccctccaatcccctctggttttgtggctcccaaactggcccttagggttttcctgtttgcttttagcagttttgtgttccaattataggtgttatataatggcttgtctgtcctgatgtaccaaagcttggcttatcggttgtttgaagattatgtggtttgag

SEQ ID NO: 9998 - DNA, 1916 bp, Zea Mays
cagagtcagagcttccccttctcacttctcagagagagagagagagaagagagagagaggagagccctccacagctcccctgtcctgccctcaggcattctttgtcacagggggcgagggctgaagatcatcacatggtggccttttttgggtctgtggcctttggtcttttagtgcttcttccttttacctcctcatgacatgaaccccctttttaaaacctccctcaaaatcaaatcaccctcctgctcctttaagagccctcaaccccttcccctcattttccttcatccctcagcctttgcacaaagggcaagaataacgcagtatgatcacctgatctcctcccgccgccatcacaatcccacacgtacgtgagacaaaggtaacagacgcaagaagctagcagctgcaggagattgctcagcccatctccatggaggttgccatggtcgtcagcgcaagagccagcctgctgatcctcgtcatctccctctgctctccgtacaaattcatacagagccccatggacctgggccccctgaacctgctccccaccaccagcaccgcggccgcgtccagcgacttcggcaggatactcttccgcgccccggccgcggtgctgaggccccagtcgccgagggacatctccatgctgctcagcttcctctccggctcgccctcgctgagcagggtcacggtggcggccaggggggcaggccactccatccacgggcaggcgcaggccccggacggcattgtggtggagacgcgctccttgcccggcgagatggagttccaccacgtccgcgggggaggcgaagggcgtgcctcctacgccgacgtgggcggcggggttctgtggatcgagctcctggagcggagcctgaagcttgggctggctcccaggtcctggaccgactacctctacctcactgtcggcgggacgctgtccaatgccggcatcagcgggcagacgttcaagcacgggccacagatcagcaacgtcctccagctggaggtagtcacaggacgaggggagattgtggaatgctcacccagcaaggaggccgacctgttcaatgccgtcctgggaggcctaggccagttcggcatcataaccagggccaggatcctgctgcaggaggctccggagaaggtgacgtgggtgagggccttctacgacgacttgggcgccttcaccagggaccaggagctgctggtgtcgattccggattcggtggactacgtggaagggttcatggtcctgaacgagcggtccctccacagctcctccatcgccttccccgcgagcgtggacttcagcccggatttcggcaccaggagcagccctaggatctactactgcgtcgagttcgcggtgcaccaccaccacggttaccagaagcagtctcaggcggccgtggaggccatctcgaggcggatgagccacatggcgtcccagctgtacagcgtggaggtgtcctacttggacttcctgaaccgggtcaggatggaggaggtgagcctgcggagcgccgggatgtgggaggaggtgcaccacccgtggctcaacatgttcgtgcccaagcccggggtcgctggcttcagggatctgctcatggacaacgtctcgccggatagctttcagggcctcatcctcatctacccactcctcagagacaacttccaagaagtccaagttgggcaagcaagcatttctttgcattatccacagcaagttgcctccttgcgctgcctacagtggtaacgacatgggtactgtttggtttccgagtaatagcgggatatgaagccgccccgctcttaatttgttgtttttagattgattttatataggagatagggactttaaaatatatatttaaatattgaaccatttatctttagaaaat

SEQ ID NO: 9999 - DNA, 1863 bp, Zea Mays
ccctggaagctgtttcttccttccacatggtgctagaatatataacaaactgatgaactttatgcgaaaacagtacagagatagaggataccaagaggtgttgagcccaaatatttacaatatgcaactttgggaaacttccggacatgctgcaaactacaaggagaacatgtttgtttttgagattgagaaacaggaatttgggcttaagccaatgaattgtcctggccactgtctaatgtttgctaatagggtccggtcatacagagttgcctcttcgcatggctgatttcggagtgcttcatagaaatgagcttagtggtgcacttactggtttgacacgggttagaagattccagcaggatgatgctcatatcttctgcagagaggaccaaatcaaggacgaggttaaggctgttttggaattcatcaattatgtttacgagatatttggcttcaaatatgagttggagttgtctacgagaccagagaagtatctaggtgaaattgaaacttggaacaaagcagaacaacaattgacagaagctttgaatgagtttgggaagccgtggaagattaatgaaggggatggtgctttctacggtccaaaaattgatattggtgtgtttgatgcccttaagaggaaatttcaatgtgcaaccttacagctggattttcagctgcccattcggttcaagctgacttattctgctgaggatgaagcaaaaattgaaaggcctgtgatgatacacagggcaatcctaggttctgttgaaaggatgtttgccattcttttggagcattacaatggcaaatggcccttatggctaagccctcgccaggccattgtttgttcagtatcttctggttcagtggaatatgcgaaacaggttcttgccatgctacatgaagctgatttccatgttgatattgatgtgagtgacaggacaatacaaaagaaggtacgggaagcccaggtagctcaattcaactacattcttgtcgtaggcgcacaggaggccgagactggaaatgtctgcgttagggtaagagataatgccgacctggccacaatgagcgttgatggcctcatcacacgtttgagggaggaaatcgtagccttcaaatgattttgatgctgcataatttcctagcacttcgcaatcattgactgttcatttgtgattttgattgagttttcagggaacagtactgagttcctccaaggctccaagtgtattcttgttggtacggttggaagctactaagggcatatttagaagcacctagtttttaataaactggtttataaaaactgagatggttccaaacatatcggtttatatcctagtttttaataatctggtttataaaaactggatttctagtttcttaaaaattaagaagctagtctctcttagctaaaaccaatttatgaaaattaaggtagttctaaacatcataaaccaatttttttcttcataatccagtttctacaaactagagataaaaactaggttgcttctaaatagggtctaaacattgtctttttttattaattatatagatgtgaagttaaatgctacctatagtaaaaagttcctagtaaatactacctgtagtgtcaaaacagcttgttgtatttgactttgcatggtcttaaacatatatattgaccactaaattcttttgtacaatcttaaaatgatgagatcatatgcaacttacatgttcttaaactgttttttttggaaatattgatgtttgtatagttttaaaggtttgatgttatataagattttcctgaccgggaggaacatattagttttatgttatataaatttctttgtttcttttatttag

SEQ ID NO: 10000 - DNA, 1830 bp, Zea Mays
aagaaacgtgatcataggatactagggaaatcacaggaactcttctttttccatgaacttaggtgttgagcccaaatatttacaatatgcaactttgggaaacttccggacatgctgcaaactacaaggagaacatgtttgtttttgagattgagaaacaggaatttgggcttaagccaatgaattgtcctggccactgtctaatgtttgctaatagggtccggtcatacagagagttgcctcttcgcatggctgatttcggagtgcttcatagaaatgagcttagtggtgcacttactggtttgacacgggttagaagattccagcaggatgatgctcatatcttctgcagagaggaccaaatcaaggacgaggttaaggctgttttggaattcatcaattatgtttacgagatatttggcttcaaatatgagttggagttgtctacgagaccagagaagtatctaggtgaaattgaaacttggaacaaagcagaacaacaattgacagaagctttgaatgagtttgggaagccgtggaagattaatgaaggggatggtgctttctacggtccaaaaattgatattggtgtgtttgatgcccttaagaggaaatttcaatgtgcaaccttacagctggattttcagctgcccattcggttcaagctgacttattctgctgaggatgaagcaaaaattgaaaggcctgtgatgatacacagggcaatcctaggttctgttgaaaggatgtttgccattcttttggagcattacaatggcaaatggcccttatggctaagccctcgccaggccattgtttgttcagtatcttctggttcagtggaatatgcgaaacaggttcttgccatgctacatgaagctgatttccatgttgatattgatgtgagtgacaggacaatacaaaagaaggtacgggaagcccaggtagctcaattcaactacattcttgtcgtaggcgcacaggaggccgagactggaaatgtctgcgttagggtaagagataatgccgacctggccacaatgagcgttgatggcctcatcacacgtttgagggaggaaatcgtagccttcaaatgattttgatgctgcataatttcctagcacttcgcaatcattgactgttcatttgtgattttgattgagttttcagggaacagtactgagttcctccaaggctccaagtgtattcttgttggtacggttggaagctactaagggcatatttagaagcacctagtttttaataaactggtttataaaaactgagatggttccaaacatatcggtttatatcctagtttttaataatctggtttataaaaactggatttctagtttcttaaaaattaagaagctagtctctcttagctaaaaccaatttatgaaaattaaggtagttctaaacatcataaaccaatttttttcttcataatccagtttctacaaactagagataaaaactaggttgcttctaaatagggtctaaacattgtctttttttattaattatatagatgtgaagttaaatgctacctatagtaaaaagttcctagtaaatactacctgtagtgtcaaaacagcttgttgtatttgactttgcatggtcttaaacatatatattgaccactaaattcttttgtacaatcttaaaatgatgagatcatatgcaacttacatgttcttaaactgttttttttggaaatattgatgtttgtatagttttaaaggtttgatgttatataagattttcctgaccgggaggaacatattagttttatgttatataaatttctttgtttcttttatttag

SEQ ID NO: 10001 - DNA, 2981 bp, Zea Mays
ccggagagtgccatatcccgcgacgccgcagcatccgcttgactccactttatgcaagtgtgcctccggcgaggcctctcgctagttcggcagcacacctcccgcgtccttcccccactgtctctccaccctacccgcttcttccttcaccaatccgcgtccgacccgatgggtgagggttccgttcctggtaaggacgccaaggggaaggggaaggccaagcaccccgcccaggcttcggccctggtcgctcgcgacgactcctacctggaggccgtcacacataagaggattcgcttgttcgaggagatccaggcaaggcaggccgtcgagcggctgaatatcggcggcgaagttatcaagataactctgcctgatggtgcaatcaaagaagggaagaaatggataacaaccccaatggatattgctaaggagatatcaagtggatttgcagctagttgtttgatagctcaagtggacgaaacactctgggatatggggaggccactggaaggtgactgcaaattgcaaatgttcaagtttgataccaatgaaggccgtgacaccttctggcactcaagtgctcatattcttggagaatctcttgagagagcatatggctgcaagctgtgtattgggccttgcaccacaagaggggagggtttctactatgatgcttactacaatgagctgacattaaacgaggagcactttggtgtcattgaaaaccaagctaaaaaggctgttgcggaaaagcaaccatttgaacgcatcgaggtcagcagggcagaagctcttgaaatgtttgttgaaattattaatgagttgcccgaggacaagaccattacagtatacaggtgtggtcctttagttgacctatgccgtgggccacatatcccgaatacttccttcgtcaaagctttcgcttgtctgaaggcttcatcatcatattggagaggaaaagcagaccgtgaaagcctgcagagagtatatgggaatatctttccctgattctcgacgtctcacggaatataaacattttctagaggaagctaagaaacgtgatcataggatactagggaaatcacaggaactcttctttttccatgaacttagccctggaagctgtttcttccttccacatggtgctagaatatataacaaactgatgaactttatgcgaaaacagtacagagatagaggataccaagaggtgttgagcccaaatatttacaatatgcaactttgggaaacttccggacatgctgcaaactacaaggagaacatgtttgtttttgagattgagaaacaggaatttgggcttaagccaatgaattgtcctggccactgtctaatgtttgctaatagggtccggtcatacagagagttgcctcttcgcatggctgatttcggagtgcttcatagaaatgagcttagtggtgcacttactggtttgacacgggttagaagattccagcaggatgatgctcatatcttctgcagagaggaccaaatcaaggacgaggttaaggctgttttggaattcatcaattatgtttacgagatatttggcttcaaatatgagttggagttgtctacgagaccagagaagtatctaggtgaaattgaaacttggaacaaagcagaacaacaattgacagaagctttgaatgagtttgggaagccgtggaagattaatgaaggggatggtgctttctacggtccaaaaattgatattggtgtgtttgatgcccttaagaggaaatttcaatgtgcaaccttacagctggattttcagctgcccattcggttcaagctgacttattctgctgaggatgaagcaaaaattgaaaggcctgtgatgatacacagggcaatcctaggttctgttgaaaggatgtttgccattcttttggagcattacaatggcaaatggcccttatggctaagccctcgccaggccattgtttgttcagtatcttctggttcagtggaatatgcgaaacaggttcttgccatgctacatgaagctgatttccatgttgatattgatgtgagtgacaggacaatacaaaagaaggtacgggaagcccaggtagctcaattcaactacattcttgtcgtaggcgcacaggaggccgagactggaaatgtctgcgttagggtaagagataatgccgacctggccacaatgagcgttgatggcctcatcacacgtttgagggaggaaatcgtagccttcaaatgattttgatgctgcataatttcctagcacttcgcaatcattgactgttcatttgtgattttgattgagttttcagggaacagtactgagttcctccaaggctccaagtgtattcttgttggtacggttggaagctactaagggcatatttagaagcacctagtttttaataaactggtttataaaaactgagatggttccaaacatatcggtttatatcctagtttttaataatctggtttataaaaactggatttctagtttcttaaaaattaagaagctagtctctcttagctaaaaccaatttatgaaaattaaggtagttctaaacatcataaaccaatttttttcttcataatccagtttctacaaactagagataaaaactaggttgcttctaaatagggtctaaacattgtctttttttattaattatatagatgtgaagttaaatgctacctatagtaaaaagttcctagtaaatactacctgtagtgtcaaaacagcttgttgtatttgactttgcatggtcttaaacatatatattgaccactaaattcttttgtacaatcttaaaatgatgagatcatatgcaacttacatgttcttaaactgttttttttggaaatattgatgtttgtatagttttaaaggtttgatgttatataagattttcctgaccgggaggaacatattagttttatgttatataaatttctttgtttcttttatttag

SEQ ID NO: 10002 - DNA, 2988 bp, Zea Mays
cgagaccggagagtgccatatcccgcgacgccgcagcatccgcttgactccactttatgcaagtgtgcctccggcgaggcctctcgctagttcggcagcacacctcccgcgtccttcccccactgtctctccaccctacccgcttcttccttcaccaatccgcgtccgacccgatgggtgagggttccgttcctggtaaggacgccaaggggaaggggaaggccaagcaccccgcccaggcttcggccctggtcgctcgcgacgactcctacctggaggccgtcacacataagaggattcgcttgttcgaggagatccaggcaaggcaggccgtcgagcggctgaatatcggcggcgaagttatcaagataactctgcctgatggtgcaatcaaagaagggaagaaatggataacaaccccaatggatattgctaaggagatatcaagtggatttgcagctagttgtttgatagctcaagtggacgaaacactctgggatatggggaggccactggaaggtgactgcaaattgcaaatgttcaagtttgataccaatgaaggccgtgacaccttctggcactcaagtgctcatattcttggagaatctcttgagagagcatatggctgcaagctgtgtattgggccttgcaccacaagaggggagggtttctactatgatgcttactacaatgagctgacattaaacgaggagcactttggtgtcattgaaaaccaagctaaaaaggctgttgcggaaaagcaaccatttgaacgcatcgaggtcagcagggcagaagctcttgaaatgtttgctgaaaataaattcaaggttgaaattattaatgagttgcccgaggacaagaccattacagtatacaggtgtggtcctttagttgacctatgccgtgggccacatatcccgaatacttccttcgtcaaagctttcgcttgtctgaaggcttcatcatcatattggagaggaaaagcagaccgtgaaagcctgcagagagtatatgggaatatctttccctgattctcgacgtctcacggaatataaacattttctagaggaagctaagaaacgtgatcataggatactagggaaatcacaggaactcttctttttccatgaacttagccctggaagctgtttcttccttccacatggtgctagaatatataacaaactgatgaactttatgcgaaaacagtacagagatagaggataccaagaggtgttgagcccaaatatttacaatatgcaactttgggaaacttccggacatgctgcaaactacaaggagaacatgtttgtttttgagattgagaaacaggaatttgggcttaagccaatgaattgtcctggccactgtctaatgtttgctaataggagttgcctcttcgcatggctgatttcggagtgcttcatagaaatgagcttagtggtgcacttactggtttgacacgggttagaagattccagcaggatgatgctcatatcttctgcagagaggaccaaatcaaggacgaggttaaggctgttttggaattcatcaattatgtttacgagatatttggcttcaaatatgagttggagttgtctacgagaccagagaagtatctaggtgaaattgaaacttggaacaaagcagaacaacaattgacagaagctttgaatgagtttgggaagccgtggaagattaatgaaggggatggtgctttctacggtccaaaaattgatattggtgtgtttgatgcccttaagaggaaatttcaatgtgcaaccttacagctggattttcagctgcccattcggttcaagctgacttattctgctgaggatgaagcaaaaattgaaaggcctgtgatgatacacagggcaatcctaggttctgttgaaaggatgtttgccattcttttggagcattacaatggcaaatggcccttatggctaagccctcgccaggccattgtttgttcagtatcttctggttcagtggaatatgcgaaacaggttcttgccatgctacatgaagctgatttccatgttgatattgatgtgagtgacaggacaatacaaaagaaggtacgggaagcccaggtagctcaattcaactacattcttgtcgtaggcgcacaggaggccgagactggaaatgtctgcgttagggtaagagataatgccgacctggccacaatgagcgttgatggcctcatcacacgtttgagggaggaaatcgtagccttcaaatgattttgatgctgcataatttcctagcacttcgcaatcattgactgttcatttgtgattttgattgagttttcagggaacagtactgagttcctccaaggctccaagtgtattcttgttggtacggttggaagctactaagggcatatttagaagcacctagtttttaataaactggtttataaaaactgagatggttccaaacatatcggtttatatcctagtttttaataatctggtttataaaaactggatttctagtttcttaaaaattaagaagctagtctctcttagctaaaaccaatttatgaaaattaaggtagttctaaacatcataaaccaatttttttcttcataatccagtttctacaaactagagataaaaactaggttgcttctaaatagggtctaaacattgtctttttttattaattatatagatgtgaagttaaatgctacctatagtaaaaagttcctagtaaatactacctgtagtgtcaaaacagcttgttgtatttgactttgcatggtcttaaacatatatattgaccactaaattcttttgtacaatcttaaaatgatgagatcatatgcaacttacatgttcttaaactgttttttttggaaatattgatgtttgtatagttttaaaggtttgatgttatataagattttcctgaccgggaggaacatattagttttatgttatataaatttctttgtttcttttatttag

SEQ ID NO: 10003 - DNA, 3005 bp, Zea Mays
cgagaccggagagtgccatatcccgcgacgccgcagcatccgcttgactccactttatgcaagtgtgcctccggcgaggcctctcgctagttcggcagcacacctcccgcgtccttcccccactgtctctccaccctacccgcttcttccttcaccaatccgcgtccgacccgatgggtgagggttccgttcctggtaaggacgccaaggggaaggggaaggccaagcaccccgcccaggcttcggccctggtcgctcgcgacgactcctacctggaggccgtcacacataagaggattcgcttgttcgaggagatccaggcaaggcaggccgtcgagcggctgaatatcggcggcgaagttatcaagataactctgcctgatggtgcaatcaaagaagggaagaaatggataacaaccccaatggatattgctaaggagatatcaagtggatttgcagctagttgtttgatagctcaagtggacgaaacactctgggatatggggaggccactggaaggtgactgcaaattgcaaatgttcaagtttgataccaatgaaggccgtgacaccttctggcactcaagtgctcatattcttggagaatctcttgagagagcatatggctgcaagctgtgtattgggccttgcaccacaagaggggagggtttctactatgatgcttactacaatgagctgacattaaacgaggagcactttggtgtcattgaaaaccaagctaaaaaggctgttgcggaaaagcaaccatttgaacgcatcgaggtcagcagggcagaagctcttgaaatgtttgctgaaaataaattcaaggttgaaattattaatgagttgcccgaggacaagaccattacagtatacaggtgtggtcctttagttgacctatgccgtgggccacatatcccgaatacttccttcgtcaaagctttcgcttgtctgaaggcttcatcatcatattggagaggaaaagcagaccgtgaaagcctgcagagagtatatgggaatatctttccctgattctcgacgtctcacggaatataaacattttctagaggaagctaagaaacgtgatcataggatactagggaaatcacaggaactcttctttttccatgaacttaggccctggaagctgtttcttccttccacatggtgctagaatatataacaaactgatgaactttatgcgaaaacagtacagagatagaggataccaagaggtgttgagcccaaatatttacaatatgcaactttgggaaacttccggacatgctgcaaactacaaggagaacatgtttgtttttgagattgagaaacaggaatttgggcttaagccaatgaattgtcctggccactgtctaatgtttgctaatagggtccggtcatacagagagttgcctcttcgcatggctgatttcggagtgcttcatagaaatgagcttagtggtgcacttactggtttgacacgggttagaagattccagcaggatgatgctcatatcttctgcagagaggaccaaatcaaggacgaggttaaggctgttttggaattcatcaattatgtttacgagatatttggcttcaaatatgagttggagttgtctacgagaccagagaagtatctaggtgaaattgaaacttggaacaaagcagaacaacaattgacagaagctttgaatgagtttgggaagccgtggaagattaatgaaggggatggtgctttctacggtccaaaaattgatattggtgtgtttgatgcccttaagaggaaatttcaatgtgcaaccttacagctggattttcagctgcccattcggttcaagctgacttattctgctgaggatgaagcaaaaattgaaaggcctgtgatgatacacagggcaatcctaggttctgttgaaaggatgtttgccattcttttggagcattacaatggcaaatggcccttatggctaagccctcgccaggccattgtttgttcagtatcttctggttcagtggaatatgcgaaacaggttcttgccatgctacatgaagctgatttccatgttgatattgatgtgagtgacaggacaatacaaaagaaggtacgggaagcccaggtagctcaattcaactacattcttgtcgtaggcgcacaggaggccgagactggaaatgtctgcgttagggtaagagataatgccgacctggccacaatgagcgttgatggcctcatcacacgtttgagggaggaaatcgtagccttcaaatgattttgatgctgcataatttcctagcacttcgcaatcattgactgttcatttgtgattttgattgagttttcagggaacagtactgagttcctccaaggctccaagtgtattcttgttggtacggttggaagctactaagggcatatttagaagcacctagtttttaataaactggtttataaaaactgagatggttccaaacatatcggtttatatcctagtttttaataatctggtttataaaaactggatttctagtttcttaaaaattaagaagctagtctctcttagctaaaaccaatttatgaaaattaaggtagttctaaacatcataaaccaatttttttcttcataatccagtttctacaaactagagataaaaactaggttgcttctaaatagggtctaaacattgtctttttttattaattatatagatgtgaagttaaatgctacctatagtaaaaagttcctagtaaatactacctgtagtgtcaaaacagcttgttgtatttgactttgcatggtcttaaacatatatattgaccactaaattcttttgtacaatcttaaaatgatgagatcatatgcaacttacatgttcttaaactgttttttttggaaatattgatgtttgtatagttttaaaggtttgatgttatataagattttcctgaccgggaggaacatattagttttatgttatataaatttctttgtttcttttatttag

SEQ ID NO: 10004 - DNA, 3045 bp, Zea Mays
tatttttctcctccggccaccccgcccgcccaacctataggcgagaccggagagtgccatatcccgcgacgccgcagcatccgcttgactccactttatgcaagtgtgcctccggcgaggcctctcgctagttcggcagcacacctcccgcgtccttcccccactgtctctccaccctacccgcttcttccttcaccaatccgcgtccgacccgatgggtgagggttccgttcctggtaaggacgccaaggggaaggggaaggccaagcaccccgcccaggcttcggccctggtcgctcgcgacgactcctacctggaggccgtcacacataagaggattcgcttgttcgaggagatccaggcaaggcaggccgtcgagcggctgaatatcggcggcgaagttatcaagataactctgcctgatggtgcaatcaaagaagggaagaaatggataacaaccccaatggatattgctaaggagatatcaagtggatttgcagctagttgtttgatagctcaagtggacgaaacactctgggatatggggaggccactggaaggtgactgcaaattgcaaatgttcaagtttgataccaatgaaggccgtgacaccttctggcactcaagtgctcatattcttggagaatctcttgagagagcatatggctgcaagctgtgtattgggccttgcaccacaagaggggagggtttctactatgatgcttactacaatgagctgacattaaacgaggagcactttggtgtcattgaaaaccaagctaaaaaggctgttgcggaaaagcaaccatttgaacgcatcgaggtcagcagggcagaagctcttgaaatgtttgctgaaaataaattcaaggttgaaattattaatgagttgcccgaggacaagaccattacagtatacaggtgtggtcctttagttgacctatgccgtgggccacatatcccgaatacttccttcgtcaaagctttcgcttgtctgaaggcttcatcatcatattggagaggaaaagcagaccgtgaaagcctgcagagagtatatgggaatatctttccctgattctcgacgtctcacggaatataaacattttctagaggaagctaagaaacgtgatcataggatactagggaaatcacaggaactcttctttttccatgaacttagccctggaagctgtttcttccttccacatggtgctagaatatataacaaactgatgaactttatgcgaaaacagtacagagatagaggataccaagaggtgttgagcccaaatatttacaatatgcaactttgggaaacttccggacatgctgcaaactacaaggagaacatgtttgtttttgagattgagaaacaggaatttgggcttaagccaatgaattgtcctggccactgtctaatgtttgctaatagggtccggtcatacagagagttgcctcttcgcatggctgatttcggagtgcttcatagaaatgagcttagtggtgcacttactggtttgacacgggttagaagattccagcaggatgatgctcatatcttctgcagagaggaccaaatcaaggacgaggttaaggctgttttggaattcatcaattatgtttacgagatatttggcttcaaatatgagttggagttgtctacgagaccagagaagtatctaggtgaaattgaaacttggaacaaagcagaacaacaattgacagaagctttgaatgagtttgggaagccgtggaagattaatgaaggggatggtgctttctacggtccaaaaattgatattggtgtgtttgatgcccttaagaggaaatttcaatgtgcaaccttacagctggattttcagctgcccattcggttcaagctgacttattctgctgaggatgaagcaaaaattgaaaggcctgtgatgatacacagggcaatcctaggttctgttgaaaggatgtttgccattcttttggagcattacaatggcaaatggcccttatggctaagccctcgccaggccattgtttgttcagtatcttctggttcagtggaatatgcgaaacaggttcttgccatgctacatgaagctgatttccatgttgatattgatgtgagtgacaggacaatacaaaagaaggtacgggaagcccaggtagctcaattcaactacattcttgtcgtaggcgcacaggaggccgagactggaaatgtctgcgttagggtaagagataatgccgacctggccacaatgagcgttgatggcctcatcacacgtttgagggaggaaatcgtagccttcaaatgattttgatgctgcataatttcctagcacttcgcaatcattgactgttcatttgtgattttgattgagttttcagggaacagtactgagttcctccaaggctccaagtgtattcttgttggtacggttggaagctactaagggcatatttagaagcacctagtttttaataaactggtttataaaaactgagatggttccaaacatatcggtttatatcctagtttttaataatctggtttataaaaactggatttctagtttcttaaaaattaagaagctagtctctcttagctaaaaccaatttatgaaaattaaggtagttctaaacatcataaaccaatttttttcttcataatccagtttctacaaactagagataaaaactaggttgcttctaaatagggtctaaacattgtctttttttattaattatatagatgtgaagttaaatgctacctatagtaaaaagttcctagtaaatactacctgtagtgtcaaaacagcttgttgtatttgactttgcatggtcttaaacatatatattgaccactaaattcttttgtacaatcttaaaatgatgagatcatatgcaacttacatgttcttaaactgttttttttggaaatattgatgtttgtatagttttaaaggtttgatgttatataagattttcctgaccgggaggaacatattagttttatgttatataaatttctttgtttcttttatttag

SEQ ID NO: 10005 - DNA, 3925 bp, Zea Mays
cttttctacgtttctttgcctgatggatagagacggcacttcgttttttcaggtagcgacggcgtgagaagggtccgtttgagtgtttgacaaaggggaagtggtggtcggaggcggagaggacgggtgcgtggtggagttttgctttcggtgctggtcggtggccgtgcaacgatggcagcagccgtagcgatgcggagcgggagcagcgatggcggcggcgggtacgagaagagcgggatggacacgggcaagtacgtgcggtacacgccggagcaggtggaggcgctggagcgggtgtacgccgagtgccccaagcccagctccgcgcgcaggcagcagctgctacgcgagtgccccatcctctcaaacatcgaggccaagcagattaaagtctggttccagaaccggaggtgccgtgacaagcaacgcaatgagtcttcgaggctccagtccgtgaacagaaagttgactgcaatgaacaagcttctcatggaggagaatgagcgattgcagaagcaggtttcccagctggttcacgagaatgcgtacatgaagcagcagctgcagaatccgtcactggcaactgatgcgagctgtgagtcaaatgcgaccactcctgcaaacctaagggatgcgagtaacccatcagggctccttgcaattgcagaggagaccttgacagagttcctctcaaaggctacagggactgctattgattgggtccagatgcctgggatgaagcctggtccggattcttttggtattgtgaccatttcacatggtggccgtggtgtcgctgcccgtgcctgtggtctggtgaacctagaaccaacaaagatagtggaaatcttgaaagatcgtccatcttggtttcgtgattgtcggagtcttgaagtctatacaatgttaccagctggaaatggtggaaccattgaacttgtttacatgcagatgtatgctcctactactttagttcctgcacgtgacttttggacactgagatacacaaccactatggaggacggcagtcttgtggtctgtgagagatccttaagtggttcaggagatggtcaaagtgctgccacaacacaacaatttgtaagagctgagatgcttcctagtggctatttagttcgccaatgtgagggtgggggctcgattgtgcgaatagtggaccatctggatcttgacgcttggagtgttcctgaagttcttcgtcccctctacgagtcgtctcgggtggttgcccagaagatgacaaccacagcgctacggcaccttagacaaattgctcaagaaacaagtggagaggttgtatatgcgctaggaaggcagccagctgttctacggacatttagtcagaggctgagtagaggctttaatgatgctataagtggtttcaatgatgatggttggtccgttatgtgtggagatggcatggaagatgttatcattgcttgcaactcgaagaagatcaggagcagtagcaatcctgctactggttttggagcccctggacctggaggtatcatatgcgctaaagcatcaatgttgctgcagagtgttccaccagcagtccttgttaggttcctgagggaacatcgatctgagtgggcagattataactttgatgcgtattcagcttcagcattgaaaacaagcccttgttcccttcctgggttgcggcctatgaggttttctgggagtcagatcatcatgccccttgctcacacggtggagaatgaggagatcttagaagttgttcgtcttgaaggacagactcttacacatgacgagggccttttgtctagagatatacatctgcttcagctttgcactggaatggacgagaaatcaatgggatcctgcttccagcttgtctttgcaccaatcgatgagcttttccctgatgatgctccattggtatcttcaggctttcgcgtgatcccgttggacataaaaacagacggaccaccctctggaagaacgttggatttggcctctagccttgaagttggcgcaaccacgcaacaagtggcagggaatggatctcaggacgtttgcaacctgagatctgtgctgacaattgcctttcagtttccctatgaaacacatctccaggacaccgttgcagctatggcccggcaatatgttcgaagcatcgtttctgcggttcaaagagtatcaatggccatttctccctcccattctggcttgaatactgctgggcagaagttaatttctggctcccccgaagctgctacacttgttcgctggatttgccaaagctaccggtatcacttgggggtggatttggtcagccactcggatcaagctggggaatcacttttgagaatgttctgggaccatcaagacgctgtcttgtgctgctctttcaaggaaaagcctgtgtttactttcggcaaccagatgggagttgacatgttagaaacgactttagtcgctctgcaagatctcacccttgacaagatctttgacgagcctggtagaaaggcactacatgcggaggttccgaaactgatggaacagggctatgcgtacctgccggctggggtgtgcctgtctgggatgggccgccatgtctcctacgagcaagctgttgcttggaaagttctcggtgaggacggcaacgtgcattgcctcgctttctgtttcgtcaactggtccttcatctgatgtgatccaagtgcgccgcggaaactttacgatcagcgtccatttttgcattctctgtagacgagaatggtgcggtgttgctgctactgttagctagacaacggcatgttcaggtagtcttggggaaagccagtattgtgaagatgtaaatttgcgcccgtttccgctaatttaacccgctggacttgctgttgtttgttaaggccaggggcactcgtacgtgagataaaatgttgtgaaattgtatgtgctgaaacataggtttacattgaaattggcatatagaatgttgtgcatgtgtgctaaactgctaataaatagtttcgatattaattaaggggtgtttgaaagcactagagctaaggtgttattttttagataatggaaaaccatcattggagactttctctaccatgcagagtatgaccaacattacatcaccatataacaaatatcaccgaactgaatttaacagagaacaaaacaactaggagaaacaaaacagactttgacgatatctaaacagtagtgatcctattcataaatcttcagccaaaatgagcgaatatttggacagacgtcgtcttcaatcgccaacataccacctttattaaattctcttcgtccttacgaagtttagtccaaagtctaagccaaagcgtcatttgaaacatcatctgcaaataagtaaccataggggatttgtcaaaaactaaattattcctactagtctagatagtccaacataatgctacgataagccaagatccaaaaacatgtttcactgatctaggtatactgaggccaaaacaacagtgagcgagcctccaacagaatcgagcaaaatggcacttaaaaaacaagtgttgtatatactcatctgaatcacaaaacacatattttttattgtcataccaattacgcctagctaggttatctttttgtgaaaataacccctttgagtaagtaacacataaaaacctttatcttcaatggtactttaagattccacaaaggtttgtgataaaaaccttggcattattcattaaaaaactatacatggacttaacagaaaatattcctgaaggtaataaattccatttgaaaatatcattctcttcactaagttgaatatgagcaatactggcaaccagcctattccatttccttaaattttccccaccaaagatctttagaaagaaatttgtaaaggaacactagcaaa

SEQ ID NO: 10006 - DNA, 3926 bp, Zea Mays
cgccccttttctctcctcggttttgatcggtgtgtgagaaggtggaattgcaggtagcgacggcgtgagaagggtccgtttgagtgtttgacaaaggggaagtggtggtcggaggcggagaggacgggtgcgtggtggagttttgctttcggtgctggtcggtggccgtgcaacgatggcagcagccgtagcgatgcggagcgggagcagcgatggcggcggcgggtacgagaagagcgggatggacacgggcaagtacgtgcggtacacgccggagcaggtggaggcgctggagcgggtgtacgccgagtgccccaagcccagctccgcgcgcaggcagcagctgctacgcgagtgccccatcctctcaaacatcgaggccaagcagattaaagtctggttccagaaccggaggtgccgtgacaagcaacgcaatgagtcttcgaggctccagtccgtgaacagaaagttgactgcaatgaacaagcttctcatggaggagaatgagcgattgcagaagcaggtttcccagctggttcacgagaatgcgtacatgaagcagcagctgcagaatccgtcactggcaactgatgcgagctgtgagtcaaatgcgaccactcctgcaaacctaagggatgcgagtaacccatcagggctccttgcaattgcagaggagaccttgacagagttcctctcaaaggctacagggactgctattgattgggtccagatgcctgggatgaagcctggtccggattcttttggtattgtgaccatttcacatggtggccgtggtgtcgctgcccgtgcctgtggtctggtgaacctagaaccaacaaagatagtggaaatcttgaaagatcgtccatcttggtttcgtgattgtcggagtcttgaagtctatacaatgttaccagctggaaatggtggaaccattgaacttgtttacatgcagatgtatgctcctactactttagttcctgcacgtgacttttggacactgagatacacaaccactatggaggacggcagtcttgtggtctgtgagagatccttaagtggttcaggagatggtcaaagtgctgccacaacacaacaatttgtaagagctgagatgcttcctagtggctatttagttcgccaatgtgagggtgggggctcgattgtgcgaatagtggaccatctggatcttgacgcttggagtgttcctgaagttcttcgtcccctctacgagtcgtctcgggtggttgcccagaagatgacaaccacagcgctacggcaccttagacaaattgctcaagaaacaagtggagaggttgtatatgcgctaggaaggcagccagctgttctacggacatttagtcagaggctgagtagaggctttaatgatgctataagtggtttcaatgatgatggttggtccgttatgtgtggagatggcatggaagatgttatcattgcttgcaactcgaagaagatcaggagcagtagcaatcctgctactggttttggagcccctggacctggaggtatcatatgcgctaaagcatcaatgttgctgcagagtgttccaccagcagtccttgttaggttcctgagggaacatcgatctgagtgggcagattataactttgatgcgtattcagcttcagcattgaaaacaagcccttgttcccttcctgggttgcggcctatgaggttttctgggagtcagatcatcatgccccttgctcacacggtggagaatgaggagatcttagaagttgttcgtcttgaaggacagactcttacacatgacgagggccttttgtctagagatatacatctgcttcagctttgcactggaatggacgagaaatcaatgggatcctgcttccagcttgtctttgcaccaatcgatgagcttttccctgatgatgctccattggtatcttcaggctttcgcgtgatcccgttggacataaaaacagacggaccaccctctggaagaacgttggatttggcctctagccttgaagttggcgcaaccacgcaacaagtggcagggaatggatctcaggacgtttgcaacctgagatctgtgctgacaattgcctttcagtttccctatgaaacacatctccaggacaccgttgcagctatggcccggcaatatgttcgaagcatcgtttctgcggttcaaagagtatcaatggccatttctccctcccattctggcttgaatactgctgggcagaagttaatttctggctcccccgaagctgctacacttgttcgctggatttgccaaagctaccggtatcacttgggggtggatttggtcagccactcggatcaagctggggaatcacttttgagaatgttctgggaccatcaagacgctgtcttgtgctgctctttcaaggaaaagcctgtgtttactttcggcaaccagatgggagttgacatgttagaaacgactttagtcgctctgcaagatctcacccttgacaagatctttgacgagcctggtagaaaggcactacatgcggaggttccgaaactgatggaacagggctatgcgtacctgccggctggggtgtgcctgtctgggatgggccgccatgtctcctacgagcaagctgttgcttggaaagttctcggtgaggacggcaacgtgcattgcctcgctttctgtttcgtcaactggtccttcatctgatgtgatccaagtgcgccgcggaaactttacgatcagcgtccatttttgcattctctgtagacgagaatggtgcggtgttgctgctactgttagctagacaacggcatgttcaggtagtcttggggaaagccagtattgtgaagatgtaaatttgcgcccgtttccgctaatttaacccgctggacttgctgttgtttgttaaggccaggggcactcgtacgtgagataaaatgttgtgaaattgtatgtgctgaaacataggtttacattgaaattggcatatagaatgttgtgcatgtgtgctaaactgctaataaatagtttcgatattaattaaggggtgtttgaaagcactagagctaaggtgttattttttagataatggaaaaccatcattggagactttctctaccatgcagagtatgaccaacattacatcaccatataacaaatatcaccgaactgaatttaacagagaacaaaacaactaggagaaacaaaacagactttgacgatatctaaacagtagtgatcctattcataaatcttcagccaaaatgagcgaatatttggacagacgtcgtcttcaatcgccaacataccacctttattaaattctcttcgtccttacgaagtttagtccaaagtctaagccaaagcgtcatttgaaacatcatctgcaaataagtaaccataggggatttgtcaaaaactaaattattcctactagtctagatagtccaacataatgctacgataagccaagatccaaaaacatgtttcactgatctaggtatactgaggccaaaacaacagtgagcgagcctccaacagaatcgagcaaaatggcacttaaaaaacaagtgttgtatatactcatctgaatcacaaaacacatattttttattgtcataccaattacgcctagctaggttatctttttgtgaaaataacccctttgagtaagtaacacataaaaacctttatcttcaatggtactttaagattccacaaaggtttgtgataaaaaccttggcattattcattaaaaaactatacatggacttaacagaaaatattcctgaaggtaataaattccatttgaaaatatcattctcttcactaagttgaatatgagcaatactggcaaccagcctattccatttccttaaattttccccaccaaagatctttagaaagaaatttgtaaaggaacactagcaaa

SEQ ID NO: 10007 - DNA, 4013 bp, Zea Mays
cgctgtgatgccggtcagcagctggcgacggtgcccgtgcgtctcttggctgctggtgcgcgcgcgcggaaagctgaacaggttttgatcggtgtgtgagaaggtggaattgcaggtagcgacggcgtgagaagggtccgtttgagtgtttgacaaaggggaagtggtggtcggaggcggagaggacgggtgcgtggtggagttttgctttcggtgctggtcggtggccgtgcaacgatggcagcagccgtagcgatgcggagcgggagcagcgatggcggcggcgggtacgagaagagcgggatggacacgggcaagtacgtgcggtacacgccggagcaggtggaggcgctggagcgggtgtacgccgagtgccccaagcccagctccgcgcgcaggcagcagctgctacgcgagtgccccatcctctcaaacatcgaggccaagcagattaaagtctggttccagaaccggaggtgccgtgacaagcaacgcaatgagtcttcgaggctccagtccgtgaacagaaagttgactgcaatgaacaagcttctcatggaggagaatgagcgattgcagaagcaggtttcccagctggttcacgagaatgcgtacatgaagcagcagctgcagaatccgtcactggcaactgatgcgagctgtgagtcaaatgcgaccactcctgcaaacctaagggatgcgagtaacccatcagggctccttgcaattgcagaggagaccttgacagagttcctctcaaaggctacagggactgctattgattgggtccagatgcctgggatgaagcctggtccggattcttttggtattgtgaccatttcacatggtggccgtggtgtcgctgcccgtgcctgtggtctggtgaacctagaaccaacaaagatagtggaaatcttgaaagatcgtccatcttggtttcgtgattgtcggagtcttgaagtctatacaatgttaccagctggaaatggtggaaccattgaacttgtttacatgcagatgtatgctcctactactttagttcctgcacgtgacttttggacactgagatacacaaccactatggaggacggcagtcttgtggtctgtgagagatccttaagtggttcaggagatggtcaaagtgctgccacaacacaacaatttgtaagagctgagatgcttcctagtggctatttagttcgccaatgtgagggtgggggctcgattgtgcgaatagtggaccatctggatcttgacgcttggagtgttcctgaagttcttcgtcccctctacgagtcgtctcgggtggttgcccagaagatgacaaccacagcgctacggcaccttagacaaattgctcaagaaacaagtggagaggttgtatatgcgctaggaaggcagccagctgttctacggacatttagtcagaggctgagtagaggctttaatgatgctataagtggtttcaatgatgatggttggtccgttatgtgtggagatggcatggaagatgttatcattgcttgcaactcgaagaagatcaggagcagtagcaatcctgctactggttttggagcccctggacctggaggtatcatatgcgctaaagcatcaatgttgctgcagagtgttccaccagcagtccttgttaggttcctgagggaacatcgatctgagtgggcagattataactttgatgcgtattcagcttcagcattgaaaacaagcccttgttcccttcctgggttgcggcctatgaggttttctgggagtcagatcatcatgccccttgctcacacggtggagaatgaggaggttgttccctaccatcaatatgcagatcttagaagttgttcgtcttgaaggacagactcttacacatgacgagggccttttgtctagagatatacatctgcttcagctttgcactggaatggacgagaaatcaatgggatcctgcttccagcttgtctttgcaccaatcgatgagcttttccctgatgatgctccattggtatcttcaggctttcgcgtgatcccgttggacataaaaacagacggaccaccctctggaagaacgttggatttggcctctagccttgaagttggcgcaaccacgcaacaagtggcagggaatggatctcaggacgtttgcaacctgagatctgtgctgacaattgcctttcagtttccctatgaaacacatctccaggacaccgttgcagctatggcccggcaatatgttcgaagcatcgtttctgcggttcaaagagtatcaatggccatttctccctcccattctggcttgaatactgctgggcagaagttaatttctggctcccccgaagctgctacacttgttcgctggatttgccaaagctaccggtatcacttgggggtggatttggtcagccactcggatcaagctggggaatcacttttgagaatgttctgggaccatcaagacgctgtcttgtgctgctctttcaaggaaaagcctgtgtttactttcggcaaccagatgggagttgacatgttagaaacgactttagtcgctctgcaagatctcacccttgacaagatctttgacgagcctggtagaaaggcactacatgcggaggttccgaaactgatggaacagggctatgcgtacctgccggctggggtgtgcctgtctgggatgggccgccatgtctcctacgagcaagctgttgcttggaaagttctcggtgaggacggcaacgtgcattgcctcgctttctgtttcgtcaactggtccttcatctgatgtgatccaagtgcgccgcggaaactttacgatcagcgtccatttttgcattctctgtagacgagaatggtgcggtgttgctgctactgttagctagacaacggcatgttcaggtagtcttggggaaagccagtattgtgaagatgtaaatttgcgcccgtttccgctaatttaacccgctggacttgctgttgtttgttaaggccaggggcactcgtacgtgagataaaatgttgtgaaattgtatgtgctgaaacataggtttacattgaaattggcatatagaatgttgtgcatgtgtgctaaactgctaataaatagtttcgatattaattaaggggtgtttgaaagcactagagctaaggtgttattttttagataatggaaaaccatcattggagactttctctaccatgcagagtatgaccaacattacatcaccatataacaaatatcaccgaactgaatttaacagagaacaaaacaactaggagaaacaaaacagactttgacgatatctaaacagtagtgatcctattcataaatcttcagccaaaatgagcgaatatttggacagacgtcgtcttcaatcgccaacataccacctttattaaattctcttcgtccttacgaagtttagtccaaagtctaagccaaagcgtcatttgaaacatcatctgcaaataagtaaccataggggatttgtcaaaaactaaattattcctactagtctagatagtccaacataatgctacgataagccaagatccaaaaacatgtttcactgatctaggtatactgaggccaaaacaacagtgagcgagcctccaacagaatcgagcaaaatggcacttaaaaaacaagtgttgtatatactcatctgaatcacaaaacacatattttttattgtcataccaattacgcctagctaggttatctttttgtgaaaataacccctttgagtaagtaacacataaaaacctttatcttcaatggtactttaagattccacaaaggtttgtgataaaaaccttggcattattcattaaaaaactatacatggacttaacagaaaatattcctgaaggtaataaattccatttgaaaatatcattctcttcactaagttgaatatgagcaatactggcaaccagcctattccatttccttaaattttccccaccaaagatctttagaaagaaatttgtaaaggaacactagcaaa

SEQ ID NO: 10008 - DNA, 3916 bp, Zea Mays
gtttgcgcggacgcggtggtacgctgtgatgccggtcagcagctggcgacggtgcccgtgcgtctcttggctgctggtgcgcgcgcgcggaaagctgaacaggttttgatcggtgtgtgagaaggtggaattgcaggtagcgacggcgtgagaagggtccgtttgagtgtttgacaaaggggaagtggtggtcggaggcggagaggacgggtgcgtggtggagttttgctttcggtgctggtcggtggccgtgcaacgatggcagcagccgtagcgatgcggagcgggagcagcgatggcggcggcgggtacgagaagagcgggatggacacgggcaagtacgtgcggtacacgccggagcaggtggaggcgctggagcgggtgtacgccgagtgccccaagcccagctccgcgcgcaggcagcagctgctacgcgagtgccccatcctctcaaacatcgaggccaagcagattaaagtctggttccagaaccggaggtgccgtgacaagcaacgcaatgagtcttcgaggctccagtccgtgaacagaaagttgactgcaatgaacaagcttctcatggaggagaatgagcgattgcagaagcaggtttcccagctggttcacgagaatgcgtacatgaagcagcagctgcagaatccgtcactggcaactgatgcgagctgtgagtcaaatgcgaccactcctgcaaacctaagggatgcgagtaacccatcagggctccttgcaattgcagaggagaccttgacagagttcctctcaaaggctacagggactgctattgattgggtccagatgcctgggatgaagcctggtccggattcttttggtattgtgaccatttcacatggtggccgtggtgtcgctgcccgtgcctgtggtctggtgaacctagaaccaacaaagatagtggaaatcttgaaagatcgtccatcttggtttcgtgattgtcggagtcttgaagtctatacaatgttaccagctggaaatggtggaaccattgaacttgtttacatgcagatgtatgctcctactactttagttcctgcacgtgacttttggacactgagatacacaaccactatggaggacggcagtcttgtggtctgtgagagatccttaagtggttcaggagatggtcaaagtgctgccacaacacaacaatttgcttggagtgttcctgaagttcttcgtcccctctacgagtcgtctcgggtggttgcccagaagatgacaaccacagcgctacggcaccttagacaaattgctcaagaaacaagtggagaggttgtatatgcgctaggaaggcagccagctgttctacggacatttagtcagaggctgagtagaggctttaatgatgctataagtggtttcaatgatgatggttggtccgttatgtgtggagatggcatggaagatgttatcattgcttgcaactcgaagaagatcaggagcagtagcaatcctgctactggttttggagcccctggacctggaggtatcatatgcgctaaagcatcaatgttgctgcagagtgttccaccagcagtccttgttaggttcctgagggaacatcgatctgagtgggcagattataactttgatgcgtattcagcttcagcattgaaaacaagcccttgttcccttcctgggttgcggcctatgaggttttctgggagtcagatcatcatgccccttgctcacacggtggagaatgaggagatcttagaagttgttcgtcttgaaggacagactcttacacatgacgagggccttttgtctagagatatacatctgcttcagctttgcactggaatggacgagaaatcaatgggatcctgcttccagcttgtctttgcaccaatcgatgagcttttccctgatgatgctccattggtatcttcaggctttcgcgtgatcccgttggacataaaaacagacggaccaccctctggaagaacgttggatttggcctctagccttgaagttggcgcaaccacgcaacaagtggcagggaatggatctcaggacgtttgcaacctgagatctgtgctgacaattgcctttcagtttccctatgaaacacatctccaggacaccgttgcagctatggcccggcaatatgttcgaagcatcgtttctgcggttcaaagagtatcaatggccatttctccctcccattctggcttgaatactgctgggcagaagttaatttctggctcccccgaagctgctacacttgttcgctggatttgccaaagctaccggtatcacttgggggtggatttggtcagccactcggatcaagctggggaatcacttttgagaatgttctgggaccatcaagacgctgtcttgtgctgctctttcaaggaaaagcctgtgtttactttcggcaaccagatgggagttgacatgttagaaacgactttagtcgctctgcaagatctcacccttgacaagatctttgacgagcctggtagaaaggcactacatgcggaggttccgaaactgatggaacagggctatgcgtacctgccggctggggtgtgcctgtctgggatgggccgccatgtctcctacgagcaagctgttgcttggaaagttctcggtgaggacggcaacgtgcattgcctcgctttctgtttcgtcaactggtccttcatctgatgtgatccaagtgcgccgcggaaactttacgatcagcgtccatttttgcattctctgtagacgagaatggtgcggtgttgctgctactgttagctagacaacggcatgttcaggtagtcttggggaaagccagtattgtgaagatgtaaatttgcgcccgtttccgctaatttaacccgctggacttgctgttgtttgttaaggccaggggcactcgtacgtgagataaaatgttgtgaaattgtatgtgctgaaacataggtttacattgaaattggcatatagaatgttgtgcatgtgtgctaaactgctaataaatagtttcgatattaattaaggggtgtttgaaagcactagagctaaggtgttattttttagataatggaaaaccatcattggagactttctctaccatgcagagtatgaccaacattacatcaccatataacaaatatcaccgaactgaatttaacagagaacaaaacaactaggagaaacaaaacagactttgacgatatctaaacagtagtgatcctattcataaatcttcagccaaaatgagcgaatatttggacagacgtcgtcttcaatcgccaacataccacctttattaaattctcttcgtccttacgaagtttagtccaaagtctaagccaaagcgtcatttgaaacatcatctgcaaataagtaaccataggggatttgtcaaaaactaaattattcctactagtctagatagtccaacataatgctacgataagccaagatccaaaaacatgtttcactgatctaggtatactgaggccaaaacaacagtgagcgagcctccaacagaatcgagcaaaatggcacttaaaaaacaagtgttgtatatactcatctgaatcacaaaacacatattttttattgtcataccaattacgcctagctaggttatctttttgtgaaaataacccctttgagtaagtaacacataaaaacctttatcttcaatggtactttaagattccacaaaggtttgtgataaaaaccttggcattattcattaaaaaactatacatggacttaacagaaaatattcctgaaggtaataaattccatttgaaaatatcattctcttcactaagttgaatatgagcaatactggcaaccagcctattccatttccttaaattttccccaccaaagatctttagaaagaaatttgtaaaggaacactagcaaa

SEQ ID NO: 10009 - DNA, 3953 bp, Zea Mays
gcggtttgcgcggacgcggtggtacgctgtgatgccggtcagcagctggcgacggtgcccgtgcgtctcttggctgctggtgcgcgcgcgcggaaagctgaacaggttttgatcggtgtgtgagaaggtggaattgcaggtagcgacggcgtgagaagggtccgtttgagtgtttgacaaaggggaagtggtggtcggaggcggagaggacgggtgcgtggtggagttttgctttcggtgctggtcggtggccgtgcaacgatggcagcagccgtagcgatgcggagcgggagcagcgatggcggcggcgggtacgagaagagcgggatggacacgggcaagtacgtgcggtacacgccggagcaggtggaggcgctggagcgggtgtacgccgagtgccccaagcccagctccgcgcgcaggcagcagctgctacgcgagtgccccatcctctcaaacatcgaggccaagcagattaaagtctggttccagaaccggaggtgccgtgacaagcaacgcaatgagtcttcgaggctccagtccgtgaacagaaagttgactgcaatgaacaagcttctcatggaggagaatgagcgattgcagaagcaggtttcccagctggttcacgagaatgcgtacatgaagcagcagctgcagaatccgtcactggcaactgatgcgagctgtgagtcaaatgcgaccactcctgcaaacctaagggatgcgagtaacccatcagggctccttgcaattgcagaggagaccttgacagagttcctctcaaaggctacagggactgctattgattgggtccagatgcctgggatgaagcctggtccggattcttttggtattgtgaccatttcacatggtggccgtggtgtcgctgcccgtgcctgtggtctggtgaacctagaaccaacaaagatagtggaaatcttgaaagatcgtccatcttggtttcgtgattgtcggagtcttgaagtctatacaatgttaccagctggaaatggtggaaccattgaacttgtttacatgcagatgtatgctcctactactttagttcctgcacgtgacttttggacactgagatacacaaccactatggaggacggcagtcttgtggtctgtgagagatccttaagtggttcaggagatggtcaaagtgctgccacaacacaacaatttgtaagagctgagatgcttcctagtggctatttagttcgccaatgtgagggtgggggctcgattgtgcgaatagtggaccatctggatcttgacgcttggagtgttcctgaagttcttcgtcccctctacgagtcgtctcgggtggttgcccagaagatgacaaccacagcgctacggcaccttagacaaattgctcaagaaacaagtggagaggttgtatatgcgctaggaaggcagccagctgttctacggacatttagtcagaggctgagtagatggcatggaagatgttatcattgcttgcaactcgaagaagatcaggagcagtagcaatcctgctactggttttggagcccctggacctggaggtatcatatgcgctaaagcatcaatgttgctgcagagtgttccaccagcagtccttgttaggttcctgagggaacatcgatctgagtgggcagattataactttgatgcgtattcagcttcagcattgaaaacaagcccttgttcccttcctgggttgcggcctatgaggttttctgggagtcagatcatcatgccccttgctcacacggtggagaatgaggagatcttagaagttgttcgtcttgaaggacagactcttacacatgacgagggccttttgtctagagatatacatctgcttcagctttgcactggaatggacgagaaatcaatgggatcctgcttccagcttgtctttgcaccaatcgatgagcttttccctgatgatgctccattggtatcttcaggctttcgcgtgatcccgttggacataaaaacagacggaccaccctctggaagaacgttggatttggcctctagccttgaagttggcgcaaccacgcaacaagtggcagggaatggatctcaggacgtttgcaacctgagatctgtgctgacaattgcctttcagtttccctatgaaacacatctccaggacaccgttgcagctatggcccggcaatatgttcgaagcatcgtttctgcggttcaaagagtatcaatggccatttctccctcccattctggcttgaatactgctgggcagaagttaatttctggctcccccgaagctgctacacttgttcgctggatttgccaaagctaccggtatcacttgggggtggatttggtcagccactcggatcaagctggggaatcacttttgagaatgttctgggaccatcaagacgctgtcttgtgctgctctttcaaggaaaagcctgtgtttactttcggcaaccagatgggagttgacatgttagaaacgactttagtcgctctgcaagatctcacccttgacaagatctttgacgagcctggtagaaaggcactacatgcggaggttccgaaactgatggaacagggctatgcgtacctgccggctggggtgtgcctgtctgggatgggccgccatgtctcctacgagcaagctgttgcttggaaagttctcggtgaggacggcaacgtgcattgcctcgctttctgtttcgtcaactggtccttcatctgatgtgatccaagtgcgccgcggaaactttacgatcagcgtccatttttgcattctctgtagacgagaatggtgcggtgttgctgctactgttagctagacaacggcatgttcaggtagtcttggggaaagccagtattgtgaagatgtaaatttgcgcccgtttccgctaatttaacccgctggacttgctgttgtttgttaaggccaggggcactcgtacgtgagataaaatgttgtgaaattgtatgtgctgaaacataggtttacattgaaattggcatatagaatgttgtgcatgtgtgctaaactgctaataaatagtttcgatattaattaaggggtgtttgaaagcactagagctaaggtgttattttttagataatggaaaaccatcattggagactttctctaccatgcagagtatgaccaacattacatcaccatataacaaatatcaccgaactgaatttaacagagaacaaaacaactaggagaaacaaaacagactttgacgatatctaaacagtagtgatcctattcataaatcttcagccaaaatgagcgaatatttggacagacgtcgtcttcaatcgccaacataccacctttattaaattctcttcgtccttacgaagtttagtccaaagtctaagccaaagcgtcatttgaaacatcatctgcaaataagtaaccataggggatttgtcaaaaactaaattattcctactagtctagatagtccaacataatgctacgataagccaagatccaaaaacatgtttcactgatctaggtatactgaggccaaaacaacagtgagcgagcctccaacagaatcgagcaaaatggcacttaaaaaacaagtgttgtatatactcatctgaatcacaaaacacatattttttattgtcataccaattacgcctagctaggttatctttttgtgaaaataacccctttgagtaagtaacacataaaaacctttatcttcaatggtactttaagattccacaaaggtttgtgataaaaaccttggcattattcattaaaaaactatacatggacttaacagaaaatattcctgaaggtaataaattccatttgaaaatatcattctcttcactaagttgaatatgagcaatactggcaaccagcctattccatttccttaaattttccccaccaaagatctttagaaagaaatttgtaaaggaacactagcaaa

SEQ ID NO: 10010 - DNA, 4062 bp, Zea Mays
cgcgcgtgttttgcagtcgatggccgaggctccgtgcaccgtcgcggggggcggtttgcgcggacgcggtggtacgctgtgatgccggtcagcagctggcgacggtgcccgtgcgtctcttggctgctggtgcgcgcgcgcggaaagctgaacaggttttgatcggtgtgtgagaaggtggaattgcaggtagcgacggcgtgagaagggtccgtttgagtgtttgacaaaggggaagtggtggtcggaggcggagaggacgggtgcgtggtggagttttgctttcggtgctggtcggtggccgtgcaacgatggcagcagccgtagcgatgcggagcgggagcagcgatggcggcggcgggtacgagaagagcgggatggacacgggcaagtacgtgcggtacacgccggagcaggtggaggcgctggagcgggtgtacgccgagtgccccaagcccagctccgcgcgcaggcagcagctgctacgcgagtgccccatcctctcaaacatcgaggccaagcagattaaagtctggttccagaaccggaggtgccgtgacaagcaacgcaatgagtcttcgaggctccagtccgtgaacagaaagttgactgcaatgaacaagcttctcatggaggagaatgagcgattgcagaagcaggtttcccagctggttcacgagaatgcgtacatgaagcagcagctgcagaatccgtcactggcaactgatgcgagctgtgagtcaaatgcgaccactcctgcaaacctaagggatgcgagtaacccatcagggctccttgcaattgcagaggagaccttgacagagttcctctcaaaggctacagggactgctattgattgggtccagatgcctgggatgaagcctggtccggattcttttggtattgtgaccatttcacatggtggccgtggtgtcgctgcccgtgcctgtggtctggtgaacctagaaccaacaaagatagtggaaatcttgaaagatcgtccatcttggtttcgtgattgtcggagtcttgaagtctatacaatgttaccagctggaaatggtggaaccattgaacttgtttacatgcagatgtatgctcctactactttagttcctgcacgtgacttttggacactgagatacacaaccactatggaggacggcagtcttgtggtctgtgagagatccttaagtggttcaggagatggtcaaagtgctgccacaacacaacaatttgtaagagctgagatgcttcctagtggctatttagttcgccaatgtgagggtgggggctcgattgtgcgaatagtggaccatctggatcttgacgcttggagtgttcctgaagttcttcgtcccctctacgagtcgtctcgggtggttgcccagaagatgacaaccacagcgctacggcaccttagacaaattgctcaagaaacaagtggagaggttgtatatgcgctaggaaggcagccagctgttctacggacatttagtcagaggctgagtagaggctttaatgatgctataagtggtttcaatgatgatggttggtccgttatgtgtggagatggcatggaagatgttatcattgcttgcaactcgaagaagatcaggagcagtagcaatcctgctactggttttggagcccctggacctggaggtatcatatgcgctaaagcatcaatgttgctgcagagtgttccaccagcagtccttgttaggttcctgagggaacatcgatctgagtgggcagattataactttgatgcgtattcagcttcagcattgaaaacaagcccttgttcccttcctgggttgcggcctatgaggttttctgggagtcagatcatcatgccccttgctcacacggtggagaatgaggagatcttagaagttgttcgtcttgaaggacagactcttacacatgacgagggccttttgtctagagatatacatctgcttcagctttgcactggaatggacgagaaatcaatgggatcctgcttccagcttgtctttgcaccaatcgatgagcttttccctgatgatgctccattggtatcttcaggctttcgcgtgatcccgttggacataaaaacagacggaccaccctctggaagaacgttggatttggcctctagccttgaagttggcgcaaccacgcaacaagtggcagggaatggatctcaggacgtttgcaacctgagatctgtgctgacaattgcctttcagtttccctatgaaacacatctccaggacaccgttgcagctatggcccggcaatatgttcgaagcatcgtttctgcggttcaaagagtatcaatggccatttctccctcccattctggcttgaatactgctgggcagaagttaatttctggctcccccgaagctgctacacttgttcgctggatttgccaaagctaccggtatcacttgggggtggatttggtcagccactcggatcaagctggggaatcacttttgagaatgttctgggaccatcaagacgctgtcttgtgctgctctttcaaggaaaagcctgtgtttactttcggcaaccagatgggagttgacatgttagaaacgactttagtcgctctgcaagatctcacccttgacaagatctttgacgagcctggtagaaaggcactacatgcggaggttccgaaactgatggaacagggctatgcgtacctgccggctggggtgtgcctgtctgggatgggccgccatgtctcctacgagcaagctgttgcttggaaagttctcggtgaggacggcaacgtgcattgcctcgctttctgtttcgtcaactggtccttcatctgatgtgatccaagtgcgccgcggaaactttacgatcagcgtccatttttgcattctctgtagacgagaatggtgcggtgttgctgctactgttagctagacaacggcatgttcaggtagtcttggggaaagccagtattgtgaagatgtaaatttgcgcccgtttccgctaatttaacccgctggacttgctgttgtttgttaaggccaggggcactcgtacgtgagataaaatgttgtgaaattgtatgtgctgaaacataggtttacattgaaattggcatatagaatgttgtgcatgtgtgctaaactgctaataaatagtttcgatattaattaaggggtgtttgaaagcactagagctaaggtgttattttttagataatggaaaaccatcattggagactttctctaccatgcagagtatgaccaacattacatcaccatataacaaatatcaccgaactgaatttaacagagaacaaaacaactaggagaaacaaaacagactttgacgatatctaaacagtagtgatcctattcataaatcttcagccaaaatgagcgaatatttggacagacgtcgtcttcaatcgccaacataccacctttattaaattctcttcgtccttacgaagtttagtccaaagtctaagccaaagcgtcatttgaaacatcatctgcaaataagtaaccataggggatttgtcaaaaactaaattattcctactagtctagatagtccaacataatgctacgataagccaagatccaaaaacatgtttcactgatctaggtatactgaggccaaaacaacagtgagcgagcctccaacagaatcgagcaaaatggcacttaaaaaacaagtgttgtatatactcatctgaatcacaaaacacatattttttattgtcataccaattacgcctagctaggttatctttttgtgaaaataacccctttgagtaagtaacacataaaaacctttatcttcaatggtactttaagattccacaaaggtttgtgataaaaaccttggcattattcattaaaaaactatacatggacttaacagaaaatattcctgaaggtaataaattccatttgaaaatatcattctcttcactaagttgaatatgagcaatactggcaaccagcctattccatttccttaaattttccccaccaaagatctttagaaagaaatttgtaaaggaacactagcaaa

SEQ ID NO: 10011 - DNA, 3777 bp, Zea Mays
cctcctagtcggctcctcctgaacccgctgggttcctcgtctgtcgtctccttctgtttcgacattatccggcaaccgggcgggctagccagcactgctggttctgggaggcgtcgctgggcggcgatgcggagcgggagcagcgatggcggcggcgggtacgagaagagcgggatggacacgggcaagtacgtgcggtacacgccggagcaggtggaggcgctggagcgggtgtacgccgagtgccccaagcccagctccgcgcgcaggcagcagctgctacgcgagtgccccatcctctcaaacatcgaggccaagcagattaaagtctggttccagaaccggaggtgccgtgacaagcaacgcaatgagtcttcgaggctccagtccgtgaacagaaagttgactgcaatgaacaagcttctcatggaggagaatgagcgattgcagaagcaggtttcccagctggttcacgagaatgcgtacatgaagcagcagctgcagaatccgtcactggcaactgatgcgagctgtgagtcaaatgcgaccactcctgcaaacctaagggatgcgagtaacccatcagggctccttgcaattgcagaggagaccttgacagagttcctctcaaaggctacagggactgctattgattgggtccagatgcctgggatgaagcctggtccggattcttttggtattgtgaccatttcacatggtggccgtggtgtcgctgcccgtgcctgtggtctggtgaacctagaaccaacaaagatagtggaaatcttgaaagatcgtccatcttggtttcgtgattgtcggagtcttgaagtctatacaatgttaccagctggaaatggtggaaccattgaacttgtttacatgcagatgtatgctcctactactttagttcctgcacgtgacttttggacactgagatacacaaccactatggaggacggcagtcttgtggtctgtgagagatccttaagtggttcaggagatggtcaaagtgctgccacaacacaacaatttgtaagagctgagatgcttcctagtggctatttagttcgccaatgtgagggtgggggctcgattgtgcgaatagtggaccatctggatcttgacgcttggagtgttcctgaagttcttcgtcccctctacgagtcgtctcgggtggttgcccagaagatgacaaccacagcgctacggcaccttagacaaattgctcaagaaacaagtggagaggttgtatatgcgctaggaaggcagccagctgttctacggacatttagtcagaggctgagtagaggctttaatgatgctataagtggtttcaatgatgatggttggtccgttatgtgtggagatggcatggaagatgttatcattgcttgcaactcgaagaagatcaggagcagtagcaatcctgctactggttttggagcccctggacctggaggtatcatatgcgctaaagcatcaatgttgctgcagcttcagcattgaaaacaagcccttgttcccttcctgggttgcggcctatgaggttttctgggagtcagatcatcatgccccttgctcacacggtggagaatgaggagatcttagaagttgttcgtcttgaaggacagactcttacacatgacgagggccttttgtctagagatatacatctgcttcagctttgcactggaatggacgagaaatcaatgggatcctgcttccagcttgtctttgcaccaatcgatgagcttttccctgatgatgctccattggtatcttcaggctttcgcgtgatcccgttggacataaaaacagacggaccaccctctggaagaacgttggatttggcctctagccttgaagttggcgcaaccacgcaacaagtggcagggaatggatctcaggacgtttgcaacctgagatctgtgctgacaattgcctttcagtttccctatgaaacacatctccaggacaccgttgcagctatggcccggcaatatgttcgaagcatcgtttctgcggttcaaagagtatcaatggccatttctccctcccattctggcttgaatactgctgggcagaagttaatttctggctcccccgaagctgctacacttgttcgctggatttgccaaagctaccggtatcacttgggggtggatttggtcagccactcggatcaagctggggaatcacttttgagaatgttctgggaccatcaagacgctgtcttgtgctgctctttcaaggaaaagcctgtgtttactttcggcaaccagatgggagttgacatgttagaaacgactttagtcgctctgcaagatctcacccttgacaagatctttgacgagcctggtagaaaggcactacatgcggaggttccgaaactgatggaacagggctatgcgtacctgccggctggggtgtgcctgtctgggatgggccgccatgtctcctacgagcaagctgttgcttggaaagttctcggtgaggacggcaacgtgcattgcctcgctttctgtttcgtcaactggtccttcatctgatgtgatccaagtgcgccgcggaaactttacgatcagcgtccatttttgcattctctgtagacgagaatggtgcggtgttgctgctactgttagctagacaacggcatgttcaggtagtcttggggaaagccagtattgtgaagatgtaaatttgcgcccgtttccgctaatttaacccgctggacttgctgttgtttgttaaggccaggggcactcgtacgtgagataaaatgttgtgaaattgtatgtgctgaaacataggtttacattgaaattggcatatagaatgttgtgcatgtgtgctaaactgctaataaatagtttcgatattaattaaggggtgtttgaaagcactagagctaaggtgttattttttagataatggaaaaccatcattggagactttctctaccatgcagagtatgaccaacattacatcaccatataacaaatatcaccgaactgaatttaacagagaacaaaacaactaggagaaacaaaacagactttgacgatatctaaacagtagtgatcctattcataaatcttcagccaaaatgagcgaatatttggacagacgtcgtcttcaatcgccaacataccacctttattaaattctcttcgtccttacgaagtttagtccaaagtctaagccaaagcgtcatttgaaacatcatctgcaaataagtaaccataggggatttgtcaaaaactaaattattcctactagtctagatagtccaacataatgctacgataagccaagatccaaaaacatgtttcactgatctaggtatactgaggccaaaacaacagtgagcgagcctccaacagaatcgagcaaaatggcacttaaaaaacaagtgttgtatatactcatctgaatcacaaaacacatattttttattgtcataccaattacgcctagctaggttatctttttgtgaaaataacccctttgagtaagtaacacataaaaacctttatcttcaatggtactttaagattccacaaaggtttgtgataaaaaccttggcattattcattaaaaaactatacatggacttaacagaaaatattcctgaaggtaataaattccatttgaaaatatcattctcttcactaagttgaatatgagcaatactggcaaccagcctattccatttccttaaattttccccaccaaagatctttagaaagaaatttgtaaaggaacactagcaaa

SEQ ID NO: 10012 - DNA, 4009 bp, Zea Mays
gagcagctcgctgcagtgcttgctgccactcttctgtctcctcttgctgcttctcgctcgctcgtctttaaagctgtcgccttttgccgctctcggcgactcggctcctgcctcctgcctcccctcctcctagtcggctcctcctgaacccgctgggttcctcgtctgtcgtctccttctgtttcgacattatccggcaaccgggcgggctagccagcactgctggttctgggaggcgtcgctgggcggcgatgcggagcgggagcagcgatggcggcggcgggtacgagaagagcgggatggacacgggcaagtacgtgcggtacacgccggagcaggtggaggcgctggagcgggtgtacgccgagtgccccaagcccagctccgcgcgcaggcagcagctgctacgcgagtgccccatcctctcaaacatcgaggccaagcagattaaagtctggttccagaaccggaggtgccgtgacaagcaacgcaatgagtcttcgaggctccagtccgtgaacagaaagttgactgcaatgaacaagcttctcatggaggagaatgagcgattgcagaagcaggtttcccagctggttcacgagaatgcgtacatgaagcagcagctgcagaatccgtcactggcaactgatgcgagctgtgagtcaaatgcgaccactcctgcaaacctaagggatgcgagtaacccatcagggctccttgcaattgcagaggagaccttgacagagttcctctcaaaggctacagggactgctattgattgggtccagatgcctgggatgaagcctggtccggattcttttggtattgtgaccatttcacatggtggccgtggtgtcgctgcccgtgcctgtggtctggtgaacctagaaccaacaaagatagtggaaatcttgaaagatcgtccatcttggtttcgtgattgtcggagtcttgaagtctatacaatgttaccagctggaaatggtggaaccattgaacttgtttacatgcagatgtatgctcctactactttagttcctgcacgtgacttttggacactgagatacacaaccactatggaggacggcagtcttgtggtctgtgagagatccttaagtggttcaggagatggtcaaagtgctgccacaacacaacaatttgtaagagctgagatgcttcctagtggctatttagttcgccaatgtgagggtgggggctcgattgtgcgaatagtggaccatctggatcttgacgcttggagtgttcctgaagttcttcgtcccctctacgagtcgtctcgggtggttgcccagaagatgacaaccacagcgctacggcaccttagacaaattgctcaagaaacaagtggagaggttgtatatgcgctaggaaggcagccagctgttctacggacatttagtcagaggctgagtagaggctttaatgatgctataagtggtttcaatgatgatggttggtccgttatgtgtggagatggcatggaagatgttatcattgcttgcaactcgaagaagatcaggagcagtagcaatcctgctactggttttggagcccctggacctggaggtatcatatgcgctaaagcatcaatgttgctgcagagtgttccaccagcagtccttgttaggttcctgagggaacatcgatctgagtgggcagattataactttgatgcgtattcagcttcagcattgaaaacaagcccttgttcccttcctgggttgcggcctatgaggttttctgggagtcagatcatcatgccccttgctcacacggtggagaatgaggaggttgttccctaccatcaatatgcagatcttagaagttgttcgtcttgaaggacagactcttacacatgacgagggccttttgtctagagatatacatctgcttcagctttgcactggaatggacgagaaatcaatgggatcctgcttccagcttgtctttgcaccaatcgatgagcttttccctgatgatgctccattggtatcttcaggctttcgcgtgatcccgttggacataaaaacagacggaccaccctctggaagaacgttggatttggcctctagccttgaagttggcgcaaccacgcaacaagtggcagggaatggatctcaggacgtttgcaacctgagatctgtgctgacaattgcctttcagtttccctatgaaacacatctccaggacaccgttgcagctatggcccggcaatatgttcgaagcatcgtttctgcggttcaaagagtatcaatggccatttctccctcccattctggcttgaatactgctgggcagaagttaatttctggctcccccgaagctgctacacttgttcgctggatttgccaaagctaccggtatcacttgggggtggatttggtcagccactcggatcaagctggggaatcacttttgagaatgttctgggaccatcaagacgctgtcttgtgctgctctttcaaggaaaagcctgtgtttactttcggcaaccagatgggagttgacatgttagaaacgactttagtcgctctgcaagatctcacccttgacaagatctttgacgagcctggtagaaaggcactacatgcggaggttccgaaactgatggaacagggctatgcgtacctgccggctggggtgtgcctgtctgggatgggccgccatgtctcctacgagcaagctgttgcttggaaagttctcggtgaggacggcaacgtgcattgcctcgctttctgtttcgtcaactggtccttcatctgatgtgatccaagtgcgccgcggaaactttacgatcagcgtccatttttgcattctctgtagacgagaatggtgcggtgttgctgctactgttagctagacaacggcatgttcaggtagtcttggggaaagccagtattgtgaagatgtaaatttgcgcccgtttccgctaatttaacccgctggacttgctgttgtttgttaaggccaggggcactcgtacgtgagataaaatgttgtgaaattgtatgtgctgaaacataggtttacattgaaattggcatatagaatgttgtgcatgtgtgctaaactgctaataaatagtttcgatattaattaaggggtgtttgaaagcactagagctaaggtgttattttttagataatggaaaaccatcattggagactttctctaccatgcagagtatgaccaacattacatcaccatataacaaatatcaccgaactgaatttaacagagaacaaaacaactaggagaaacaaaacagactttgacgatatctaaacagtagtgatcctattcataaatcttcagccaaaatgagcgaatatttggacagacgtcgtcttcaatcgccaacataccacctttattaaattctcttcgtccttacgaagtttagtccaaagtctaagccaaagcgtcatttgaaacatcatctgcaaataagtaaccataggggatttgtcaaaaactaaattattcctactagtctagatagtccaacataatgctacgataagccaagatccaaaaacatgtttcactgatctaggtatactgaggccaaaacaacagtgagcgagcctccaacagaatcgagcaaaatggcacttaaaaaacaagtgttgtatatactcatctgaatcacaaaacacatattttttattgtcataccaattacgcctagctaggttatctttttgtgaaaataacccctttgagtaagtaacacataaaaacctttatcttcaatggtactttaagattccacaaaggtttgtgataaaaaccttggcattattcattaaaaaactatacatggacttaacagaaaatattcctgaaggtaataaattccatttgaaaatatcattctcttcactaagttgaatatgagcaatactggcaaccagcctattccatttccttaaattttccccaccaaagatctttagaaagaaatttgtaaaggaacactagcaaa

SEQ ID NO: 10013 - DNA, 2675 bp, Zea Mays
ccgaggcctcccacctcataattccaacccactgtgtgtgccgctgtagcagcgcgcgccaccaccgtcaacttctccccacctcgccgccgtctagatttcgtctcctgggctcgagcaaccgaagcaggcttggggtgttctcggagagaatcgttgcctcggccgatgccggccctgatgtaggtttctgctctgctttgcccggtgccaacgtctctcccggagtagcggttccgccgccccatgatctgccagttggaacacatgggcgttcacggaggaggttgctctgctggacagtgaccgcatttggtagcggtggaggaagacgacgaagaggaggaggagtaggccatgaaggaggtggccgaggaaaggtgccttgacccgcagctgtggcacgcgtgcgctggcggcatggtgcagatgccgcccgtgcgctcccgtgtctactacttcccgcagggtcacgcggagcacgcgcatggcggcggggccgcggacctcgccggggcgcgagcgctcccgtcgctcgtgctctgcagcgtcaccggggtgcgcttcctggccgatccggagaccgacgaggtcttcgccaagatccgcctggtgccggtcgcgcccggcgaggtggagttccgagagcccgatgagttcagcgtcgaccccgcggacgcccgggagaagctttcttccttcgccaagacgctgacgcagtccgacgccaacaacggtggcggcttctcggtgccgcgctactgcgccgagaccatcttccccaagctcgactaccgggccgacccgccggtgcagacggtgcttgccaaggacgtgcacggggaggtctggaagttccgccacatttaccggggcacgccgcgccggcatttgctcaccacgggatggagcacgttcgtcaaccagaagaagctcgtcgccggggactccatcgtcttcctgcgcactgagcatggcgagctgtgcgtcgggatacggcgtgtcaagcgggtgtcctgtggtggcatggagtgcatgtctgggtggaacgccccggggtatggggccttgtcggcattcttgaaggatgaggagggtaagatgatgaagagtcatggtgggtacatgagaggtagggggaaggtgaagatcacggatgttgtcaacgccgcaagtctagcagcgagcggacaaccatttgaagttgtgtactacccgagagctagcacaccggagtttgttgtgaaggctgcatcggtacagaacgcgatgaggaaccagtggtgcccggggatgaggttcaagatggcatttgagacagaggattcgtcaaggatcagttggtttatggggacgatagcttctgctcaggttgctgacccaatcagatggccaaattcaccgtggaggcttcttcaggtggcatgggatgaaccggacttgctgcagaacgtgaaatgtgtgaacccatggctcgtggagatcgtatcaagcattccaccgatccacctgggaccattttctccacctaggaagaagctgcgggtgccccaccatccggacttcccgttcgacggccagctgttgaatccgattttccacggcaacccactcggtccgagcaacggcggcggtgctcttcgctgtttctcggacatcgctcctgcaggcatacagggagccaggcatgctcagttcggtctaccactaacagaccgccagcttaacaagctgcacctcggtctgttccaaggcggcggttttaagcggcggcttgacgctatcactccaccatgccctatatccaggggctttgtgatcggcagtgcaccggtcgacgagagcgtctcttgcgtgctgacgatcggcacgccacgggccgcagagagatctgacgacaggaagaaaccacatctaatgctgttcggaaagcctatccttaccgagcagcagatgagctctagagggtcaagggaaacactctcccctgaggccactgggaacagttccgatggcagtgttcagaaaacgggaaacgtatccgatggctccggctcgtcgatctgcatcggttcctcgtcccgaggccgcgaggcttctaggctcgggttcgaatttgaagccgggcactgcaaggtatttgtggagtcggaggatgtcggtcgcaccatcgacctgtccgtctttggctcgtacgaagagctgtacggtcagttggccgacatgtttggaatcgagaaggcagaggtaatgagccacctttgttaccgtgatgctgctggcgctgtcaagcgtactggcgacgagccgttctgtgacttcatgaaagtggcacggaggctcaccatagtagagagcaccgaggggaggctgcagaaacctctcgtcgagtacatggcttgattgcatgactgttcgataaggcactctgaagcttgaggaagactgaagcttggagcgaatatgttttcgtttgcgtttgtctgccgtgaagcggaatcgcgatgtctgtctcgtcgtgtgaaagaaactcgtgtatcggattttcgtctgtcgtgacttggtcgttagaactctgtcgtggtcagttgtgttgcgcttgcgcttgggtcgaagttgatagatggcctctttgatgaactagcttggaataaagttcgagttgtggttaagaa

SEQ ID NO: 10014 - DNA, 2560 bp, Zea Mays
ggaggggcccccgagggatcggttttcggcgggggagccagcggccgcgggcgaatggctggcggcgaggtagcggtcgtggaggaaacggcggtgggggcgccgactgcgacggcgacgccgcctgacttggcggcgcatgccgcggccggtggcggggaggaggcgatgcggatggagggctggctgtacctgatccgatccaaccgatttgggatgcagtactcgcgcaagcgctacttcgtgctcgaggacgccgcgctccgctgcttcaagtccacgccatcctccaagcgcgaggatcctgtcagaagtgcaataattgactcttgtattcgtgtgacagacaatggcagagaaagtgtacataggagtgacttttacatattcacactatataattcttccaatcattatgatcaacttaagttgggtgcgagaagttcagaagaagcagctaggtggatcaggtgcttaatggagtctgccttaaagtcacctagaaaagatgagcacattgttgcttgttcacacagaagatggcaggctttcaggttgagccgccgcaatagccgtatgcactcaatagattggactttattttcatctgctcataacgatccaatggcatctgatgtcattgcaccttctccatggacaatatttggctgtacaaacgggttacgtttgtttaccgaggcaaacgatggtggctctcatgggaagtattgggatgatcatccggctataatggcagttggtgtggttgatgcgaattccgaggctgtctttcagactctaatgtcccttggccaatcaagatctgaatgggacttctgtttgcgggaaggaaaggtaatcgagcatcttgatgggcatacagacataatccaaaagaaattaagaagcgactggttaccatggggaatgagaaagagagatctattacttagacgatattggaggcgagaagatgatggaacttatgtaattctataccactctgttttccactacaaatgtcgtcccgagaaaggctacatccgtgcatgtcttaaaagtggaggttatgtaatatcaccagtcaatcaaggaagacaatcagttgtaaagcacatgcttgccatagattggaaattctggaagtcttatctgtttacatcatctgccaaatatatcactatacgaatgttaggcagagtagcagcactacgagaattcttccgagcgaaaaatggtaattgttcttgcatggagttctcatctggagagttgaccagggacacgggattacctcaaggtgaaaatcagcgaataaatttggaaatgcagcaagaaaatgagaacggaagacttgaaggtcctactgaaggatcactgggtggttctaacaggcacttaagcagtactggttcctttgttcaactcaatgatgcagcagatgagttctttgacgtgccagacgaatcagaatatgatcagagagaagttatgtttccttctgatgagagcttgcatgctgcggaccagcgtcacgctaaactgtccactgctgctgtttttgtaaaaaggttgcatgatcttgcagttcagaaaagaggatacattgacttacagggagctgcagatgctgataatgggccatgttgctatggatatactcttcccaaagattcgagctatacagtgccttctacttgggcaatgacagatcctacaacattcttaatccggggagagacttatttgcacgatcgtataaagatcaaggcaaatagtaccctgatgcaaatggtaggtgctgactggataaaatctgataagcgtgaggatgatctagctggtcgccctggggggctagtccagaaatgtgcagcacaagggggcacccgattcttcttcattgtaaacattcaggttcctggttcaaccacatacagcttagctttgtattatatgatggatacaccattagaaaaggtccctctgcttgaaagatttgtaaatggagatgatgcattcagaaattcaaggttcaagctcattccttacatctcaaagggatcttggattgttaaacagagtgtgggcaagaaagcttgcttggttggacaagcattagaaatcaattattttcgtggaagaaactatttggagcttggagttgatattggttcatcaacggtggcacgaggtgtggtgagcctagtgcttggctacttgaacaatcttgtgatcgaaatggccttcttggtacagggaaacacaaatgaagaactcccggaattcctcctaggtacctgccgactgaattacctggatgcctccaaggcagtgtccatagacgagtgctaggaccccaactgacctcattttttaaagccaagtacaccaaaagacaaaaaaaaaaggctgaatccccattccttgctgccgacacaatcggcaaccctagcccagatgcccattttattgcctcaccgcaaaagtgggggatccattgcaaccgttgtacattctcttcttgccgactgctcaggcgaggtgcgctcggcttgtg

SEQ ID NO: 10015 - DNA, 2699 bp, Zea Mays
ggaggggcccccgagggatcggttttcggcgggggagccagcggccgcgggcgaatggctggcggcgaggtagcggtcgtggaggaaacggcggtgggggcgccgactgcgacggcgacgccgcctgacttggcggcgcatgccgcggccggtggcggggaggaggcgatgcggatggagggctggctgtacctgatccgatccaaccgatttgggatgcagtactcgcgcaagcgctacttcgtgctcgaggacgccgcgctccgctgcttcaagtccacgccatcctccaagcgcgaggatcctgtcagaagtgcaataattgactcttgtattcgtgtgacagacaatggcagagaaagtgtacataggagtgacttttacatattcacactatataattcttccaatcattatgatcaacttaagttgggtgcgagaagttcagaagaagcagctaggtggatcaggtgcttaatggagtctgccttaaagtcacctagaaaagatgagcacattgttgcttgttcacacagaagatggcaggctttcaggttgagccgccgcaatagccgtatgcactcaatagattggactttattttcatctgctcataacgatccaatggcatctgatgtcattgcaccttctccatggacaatatttggctgtacaaacgggttacgtttgtttaccgaggcaaacgatggtggctctcatgggaagtattgggatgatcatccggctataatggcagttggtgtggttgatgcgaattccgaggctgtctttcagactctaatgtcccttggccaatcaagatctgaatgggacttctgtttgcgggaaggaaaggtaatcgagcatcttgatgggcatacagacataatccaaaagaaattaagaagcgactggttaccatgttttcaggggaatgagaaagagagatctattacttagacgatattggaggcgagaagatgatggaacttatgtaattctataccactctgttttccactacaaatgtcgtcccgagaaaggctacatccgtgcatgtcttaaaagtggaggttatgtaatatcaccagtcaatcaaggaagacaatcagttgtaaagcacatgcttgccatagattggaaattctggaagtcttatctgtttacatcatctgccaaatatatcactatacgaatgttaggcagagtagcagcactacgagaattcttccgagcgaaaaatggtaattgttcttgcatggagttctcatctggagagttgaccagggacacgggattacctcaaggtgaaaatcagcgaataaatttggaaatgcagcaagaaaatgagaacggaagacttgaaggtcctactgaaggatcactgggtggttctaacaggcacttaagcagtactggttcctttgttcaactcaatgatgcagcagatgagttctttgacgtgccagacgaatcagaatatgatcagagagaagttatgtttccttctgatgagagcttgcatgctgcggaccagcgtcacgctaaactgtccactgctgctgtttttgtaaaaaggttgcatgatcttgcagttcagaaaagaggatacattgacttacagggagctgcagatgctgataatgggccatgttgctatggatatactcttcccaaagattcgagctatacagtgccttctacttgggcaatgacagatcctacaacattcttaatccggggagagacttatttgcacgatcgtataaagatcaaggcaaatagtaccctgatgcaaatggtaggtgctgactggataaaatctgataagcgtgaggatgatctagctggtcgccctggggggctagtccagaaatgtgcagcacaagggggcacccgattcttcttcattgtaaacattcaggttcctggttcaaccacatacagcttagctttgtattatatgatggatacaccattagaaaaggtccctctgcttgaaagatttgtaaatggagatgatgcattcagaaattcaaggttcaagctcattccttacatctcaaagggatcttggattgttaaacagagtgtgggcaagaaagcttgcttggttggacaagcattagaaatcaattattttcgtggaagaaactatttggagcttggagttgatattggttcatcaacggtggcacgaggtgtggtgagcctagtgcttggctacttgaacaatcttgtgatcgaaatggccttcttggtacagggaaacacaaatgaagaactcccggaattcctcctaggtacctgccgactgaattacctggatgcctccaaggcagtgtccatagacgagtgctaggaccccaactgacctcattttttaaagccaagtacaccaaaagacaaaaaaaaaaggctgaatccccattccttgctgccgacacaatcggcaaccctagcccagatgcccattttattgcctcaccgcaaaagtgggggatccattgcaaccgttgtacattctcttcttgccgactgctcaggtattgtgttgtaatgatgatagcaatccatgataaaagccccctcattctttggcatcttatcaccacggcaaaaacggaaagaaaaagtgtattctaccatgccgtctcttctgaccgaatgacgtcagatggtcggatctaacagcaagc

SEQ ID NO: 10016 - DNA, 2697 bp, Zea Mays
ggaggggcccccgagggatcggttttcggcgggggagccagcggccgcgggcgaatggctggcggcgaggtagcggtcgtggaggaaacggcggtgggggcgccgactgcgacggcgacgccgcctgacttggcggcgcatgccgcggccggtggcggggaggaggcgatgcggatggagggctggctgtacctgatccgatccaaccgatttgggatgcagtactcgcgcaagcgctacttcgtgctcgaggacgccgcgctccgctgcttcaagtccacgccatcctccaagcgcgaggatcctgtcagaagtgcaataattgactcttgtattcgtgtgacagacaatggcagagaaagtgtacataggagtgacttttacatattcacactatataattcttccaatcattatgatcaacttaagttgggtgcgagaagttcagaagaagcagctaggtggatcaggtgcttaatggagtctgccttaaagtcacctagaaaagatgagcacattgttgcttgttcacacagaagatggcaggctttcaggttgagccgccgcaatagccgtatgcactcaatagattggactttattttcatctgctcataacgatccaatggcatctgatgtcattgcaccttctccatggacaatatttggctgtacaaacgggttacgtttgtttaccgaggcaaacgatggtggctctcatgggaagtattgggatgatcatccggctataatggcagttggtgtggttgatgcgaattccgaggctgtctttcagactctaatgtcccttggccaatcaagatctgaatgggacttctgtttgcgggaaggaaaggtaatcgagcatcttgatgggcatacagacataatccaaaagaaattaagaagcgactggttaccatggggaatgagaaagagagatctattacttagacgatattggaggcgagaagatgatggaacttatgtaattctataccactctgttttccactacaaatgtcgtcccgagaaaggctacatccgtgcatgtcttaaaagtaatgtggaggttatgtaatatcaccagtcaatcaaggaagacaatcagttgtaaagcacatgcttgccatagattggaaattctggaagtcttatctgtttacatcatctgccaaatatatcactatacgaatgttaggcagagtagcagcactacgagaattcttccgagcgaaaaatggtaattgttcttgcatggagttctcatctggagagttgaccagggacacgggattacctcaaggtgaaaatcagcgaataaatttggaaatgcagcaagaaaatgagaacggaagacttgaaggtcctactgaaggatcactgggtggttctaacaggcacttaagcagtactggttcctttgttcaactcaatgatgcagcagatgagttctttgacgtgccagacgaatcagaatatgatcagagagaagttatgtttccttctgatgagagcttgcatgctgcggaccagcgtcacgctaaactgtccactgctgctgtttttgtaaaaaggttgcatgatcttgcagttcagaaaagaggatacattgacttacagggagctgcagatgctgataatgggccatgttgctatggatatactcttcccaaagattcgagctatacagtgccttctacttgggcaatgacagatcctacaacattcttaatccggggagagacttatttgcacgatcgtataaagatcaaggcaaatagtaccctgatgcaaatggtaggtgctgactggataaaatctgataagcgtgaggatgatctagctggtcgccctggggggctagtccagaaatgtgcagcacaagggggcacccgattcttcttcattgtaaacattcaggttcctggttcaaccacatacagcttagctttgtattatatgatggatacaccattagaaaaggtccctctgcttgaaagatttgtaaatggagatgatgcattcagaaattcaaggttcaagctcattccttacatctcaaagggatcttggattgttaaacagagtgtgggcaagaaagcttgcttggttggacaagcattagaaatcaattattttcgtggaagaaactatttggagcttggagttgatattggttcatcaacggtggcacgaggtgtggtgagcctagtgcttggctacttgaacaatcttgtgatcgaaatggccttcttggtacagggaaacacaaatgaagaactcccggaattcctcctaggtacctgccgactgaattacctggatgcctccaaggcagtgtccatagacgagtgctaggaccccaactgacctcattttttaaagccaagtacaccaaaagacaaaaaaaaaaggctgaatccccattccttgctgccgacacaatcggcaaccctagcccagatgcccattttattgcctcaccgcaaaagtgggggatccattgcaaccgttgtacattctcttcttgccgactgctcaggtattgtgttgtaatgatgatagcaatccatgataaaagccccctcattctttggcatcttatcaccacggcaaaaacggaaagaaaaagtgtattctaccatgccgtctcttctgaccgaatgacgtcagatggtcggatctaacagcaagc

SEQ ID NO: 10017 - DNA, 2739 bp, Zea Mays
cgcggagctgaggggcgctactgcggggccgtccttggcgagaggaggggaggggcccccgagggatcggttttcggcgggggagccagcggccgcgggcgaatggctggcggcgaggtagcggtcgtggaggaaacggcggtgggggcgccgactgcgacggcgacgccgcctgacttggcggcgcatgccgcggccggtggcggggaggaggcgatgcggatggagggctggctgtacctgatccgatccaaccgatttgggatgcagtactcgcgcaagcgctacttcgtgctcgaggacgccgcgctccgctgcttcaagtccacgccatcctccaagcgcgaggatcctgtcagaagtgcaataattgactcttgtattcgtgtgacagacaatggcagagaaagtgtacataggagtgacttttacatattcacactatataattcttccaatcattatgatcaacttaagttgggtgcgagaagttcagaagaagcagctaggtggatcaggtgcttaatggagtctgccttaaagtcacctagaaaagatgagcacattgttgcttgttcacacagaagatggcaggctttcaggttgagccgccgcaatagccgtatgcactcaatagattggactttattttcatctgctcataacgatccaatggcatctgatgtcattgcaccttctccatggacaatatttggctgtacaaacgggttacgtttgtttaccgaggcaaacgatggtggctctcatgggaagtattgggatgatcatccggctataatggcagttggtgtggttgatgcgaattccgaggctgtctttcagactctaatgtcccttggccaatcaagatctgaatgggacttctgtttgcgggaaggaaaggtaatcgagcatcttgatgggcatacagacataatccaaaagaaattaagaagcgactggttaccatggggaatgagaaagagagatctattacttagacgatattggaggcgagaagatgatggaacttatgtaattctataccactctgttttccactacaaatgtcgtcccgagaaaggctacatccgtgcatgtcttaaagtggaggttatgtaatatcaccagtcaatcaaggaagacaatcagttgtaaagcacatgcttgccatagattggaaattctggaagtcttatctgtttacatcatctgccaaatatatcactatacgaatgttaggcagagtagcagcactacgagaattcttccgagcgaaaaatggtaattgttcttgcatggagttctcatctggagagttgaccagggacacgggattacctcaaggtgaaaatcagcgaataaatttggaaatgcagcaagaaaatgagaacggaagacttgaaggtcctactgaaggatcactgggtggttctaacaggcacttaagcagtactggttcctttgttcaactcaatgatgcagcagatgagttctttgacgtgccagacgaatcagaatatgatcagagagaagttatgtttccttctgatgagagcttgcatgctgcggaccagcgtcacgctaaactgtccactgctgctgtttttgtaaaaaggttgcatgatcttgcagttcagaaaagaggatacattgacttacagggagctgcagatgctgataatgggccatgttgctatggatatactcttcccaaagattcgagctatacagtgccttctacttgggcaatgacagatcctacaacattcttaatccggggagagacttatttgcacgatcgtataaagatcaaggcaaatagtaccctgatgcaaatggtaggtgctgactggataaaatctgataagcgtgaggatgatctagctggtcgccctggggggctagtccagaaatgtgcagcacaagggggcacccgattcttcttcattgtaaacattcaggttcctggttcaaccacatacagcttagctttgtattatatgatggatacaccattagaaaaggtccctctgcttgaaagatttgtaaatggagatgatgcattcagaaattcaaggttcaagctcattccttacatctcaaagggatcttggattgttaaacagagtgtgggcaagaaagcttgcttggttggacaagcattagaaatcaattattttcgtggaagaaactatttggagcttggagttgatattggttcatcaacggtggcacgaggtgtggtgagcctagtgcttggctacttgaacaatcttgtgatcgaaatggccttcttggtacagggaaacacaaatgaagaactcccggaattcctcctaggtacctgccgactgaattacctggatgcctccaaggcagtgtccatagacgagtgctaggaccccaactgacctcattttttaaagccaagtacaccaaaagacaaaaaaaaaaggctgaatccccattccttgctgccgacacaatcggcaaccctagcccagatgcccattttattgcctcaccgcaaaagtgggggatccattgcaaccgttgtacattctcttcttgccgactgctcaggtattgtgttgtaatgatgatagcaatccatgataaaagccccctcattctttggcatcttatcaccacggcaaaaacggaaagaaaaagtgtattctaccatgccgtctcttctgaccgaatgacgtcagatggtcggatctaacagcaagc

SEQ ID NO: 10018 - DNA, 1699 bp, Zea Mays
tgcgagcgcgaggcaagaggagggggagaaggcgacgcggcgcgatcatgcgagcgacggcgggcgtttgagctaacccgcgccaccccccttcctcggagtcggagcgagtcgaggaacggctcgtctgcctctcccgttctccttcctctcctccccagaagatccgatccatcatcgaggactcgccgggaagaatcaaggatatatagataatatacaaacaaaggttcctccagagcccagagcaggagggaagtcaccggccgtcggcggggaggagatgtcggacggcgcgggctcccggacgggcgtcgctggcgcgctgggcctctcggtcacctcgtcggtggccatcgtcatctgcaacaagtacctcatcagcactctaggcttcttcttcgcgacgacgctgacgagctggcacctcatggtgaccttcttcacgctgtacgttgcgcagcggctgcgcttcttcgagccaaagccgatcgacgcgcgcaccgtcatctccttcggcctgctcaacggcatctccattggcctcctcaacctctgcctcgggttcaactctgttggcttctaccagatgaccaagctggccatcatacccttcaccatagtcttggaaaccctctttctgagcaagaagttcagccagagcatcaaggcctccctcatggttctgctgctgggagtcgggatcgcgtcggtcacggatctccagctcaacctcctcggctcgatcatcgccgtgctcaccatcgctgcgacatgcgtcgggcagattctgaccaaccaaatccagaggaggctgaaggtttcgtcgacgcagctgctgtaccagtcgtcgccgtaccagtccgcggtgctgctcgtcaccgggcctttcgtggacaagctcctcaccaagcgtgacgtcttcgcgttcagctacaccacccaagtcgtggtgttcatcctgctgtcgtgctcgatcgcggtgtgcgtaaacttcagcacgttcctggtgatcggcacgacgtcgcccgtgacgtaccaggtgctgggccacctcaagacgtgtttggtgctctccttcggctacatcatcctcaaagaccccttcagcgcgcgcaacgtggtgggcatcctcatcgccatcttcggcatgggcctctactcctactactccgtcgtcgagagcaggaagaagaccgaggacgctagctcgctgccggtcgccgcgcagatgagcgagaaggactcggcgccactcctcggcgccaagagctcgccgcggacagagaacaaggccgaggaaaccttcgactacatgccgaggacggccaagagcgcgttcaccggccggtgagcgcgtagcttgtaaggagtacgtatctttctagagttgtgggtagacgacgagcaacaaggcgggaatgtgttagtgaaagatgtaacggcggcaagtgacattccaattatcatttttgcgatttctcctctagggtggtctgcgtggtcatggtttaccagagcataaacagcagaatgtgtggtctactggtcttgaccgagcttgaaatagtagattggattggtgataatacaactatacaagacgtgcgaaatgtgtaaggtttgtgcccgttaggccatgttcgggtggggattagaggaaattaaaattccttctgttcaattttaaataaaaaat

SEQ ID NO: 10019 - DNA, 1831 bp, Zea Mays
gacaccacacgtcctacactgcgagcgcgaggcaagaggagggggagaaggcgacgcggcgcgatcatgcgagcgacggcgggcgtttgagctgttcgccacctacccctccctccttcctttcatttttctggaagacttcttcggcctcacgcatctcctcctccaatccaattcacaaacacacacgggcaatcaattagcagaacccgcgccaccccccttcctcggagtcggagcgagtcgaggaacggctcgtctgcctctcccgttctccttcctctcctccccagaagatccgatccatcatcgaggactcgccgggaagaatcaaggatatatagataatatacaaacaaaggttcctccagagcccagagcaggagggaagtcaccggccgtcggcggggaggagatgtcggacggcgcgggctcccggacgggcgtcgctggcgcgctgggcctctcggtcacctcgtcggtggccatcgtcatctgcaacaagtacctcatcagcactctaggcttcttcttcggtcacgacgacgctgacgagctggcacctcatggtgaccttcttcacgctgtacgttgcgcagcggctgcgcttcttcgagccaaagccgatcgacgcgcgcaccgtcatctccttcggcctgctcaacggcatctccattggcctcctcaacctctgcctcgggttcaactctgttggcttctaccagatgaccaagctggccatcatacccttcaccatagtcttggaaaccctctttctgagcaagaagttcagagcatcaaggcctccctcatggttctgctgctgggagtcgggatcgcgtcggtcacggatctccagctcaacctcctcggctcgatcatcgccgtgctcaccatcgctgcgacatgcgtcgggcagattctgaccaaccaaatccagaggaggctgaaggtttcgtcgacgcagctgctgtaccagtcgtcgccgtaccagtccgcggtgctgctcgtcaccgggcctttcgtggacaagctcctcaccaagcgtgacgtcttcgcgttcagctacaccacccaagtcgtggtgttcatcctgctgtcgtgctcgatcgcggtgtgcgtaaacttcagcacgttcctggtgatcggcacgacgtcgcccgtgacgtaccaggtgctgggccacctcaagacgtgtttggtgctctccttcggctacatcatcctcaaagaccccttcagcgcgcgcaacgtggtgggcatcctcatcgccatcttcggcatgggcctctactcctactactccgtcgtcgagagcaggaagaagaccgaggacgctagctcgctgccggtcgccgcgcagatgagcgagaaggactcggcgccactcctcggcgccaagagctcgccgcggacagagaacaaggccgaggaaaccttcgactacatgccgaggacggccaagagcgcgttcaccggccggtgagcgcgtagcttgtaaggagtacgtatctttctagagttgtgggtagacgacgagcaacaaggcgggaatgtgttagtgaaagatgtaacggcggcaagtgacattccaattatcatttttgcgatttctcctctagggtggtctgcgtggtcatggtttaccagagcataaacagcagaatgtgtggtctactggtcttgaccgagcttgaaatagtagattggattggtgataatacaactatacaagacgtgcgaaatgtgtaaggtttgtgcccgttaggccatgttcgggtggggattagaggaaattaaaattccttctgttcaattttaaataaaaaat

SEQ ID NO: 10020 - DNA, 2022 bp, Zea Mays
ttccactcccatcgtcgtttctctctctccggcggctgcgcggcggcttggatcacatcctcgtcggagctaccatggctgggaagcttattgcaaacctgattgtcatgggctctacgattataggaagagctatgcttcaggcatatcgtaaagcacttgataatgcaaataaaactggtgtggcccatgaggcaataaacaatattcgtagagcaagcaaaacaatgaccgaacaggaagcgaggcagatactgggtgtctcagagaattcgacgtgggaagagatcgtacagcgatacgataacttgtttgaaaggaacggcaaatctgggagcttttacctccaatcgaaggttcaccgggccaaggagtgcctagaaacagtgtaccaaaagaacaaacaagatgagcctcctaactgaaatcccgccccttgagtctgctgttgacattcttttccccctcataagagaactgtacataccaacaacggtcgctgctgttgtaccagtagtatgcaatgcggaaccaataagctttgtgtgcagcgactgaaactcctacatgtcaggagggaagtcaccggccgtcggcggggaggagatgtcggacggcgcgggctcccggacgggcgtcgctggcgcgctgggcctctcggtcacctcgtcggtggccatcgtcatctgcaacaagtacctcatcagcactctaggcttcttcttcggtcacgacgacgctgacgagctggcacctcatggtgaccttcttcacgctgtacgttgcgcagcggctgcgcttcttcgagccaaagccgatcgacgcgcgcaccgtcatctccttcggcctgctcaacggcatctccattggcctcctcaacctctgcctcgggttcaactctgttggcttctaccagatgaccaagctggccatcatacccttcaccatagtcttggaaaccctctttctgagcaagaagttcagagcatcaaggcctccctcatggttctgctgctgggagtcgggatcgcgtcggtcacggatctccagctcaacctcctcggctcgatcatcgccgtgctcaccatcgctgcgacatgcgtcgggcagattctgaccaaccaaatccagaggaggctgaaggtttcgtcgacgcagctgctgtaccagtcgtcgccgtaccagtccgcggtgctgctcgtcaccgggcctttcgtggacaagctcctcaccaagcgtgacgtcttcgcgttcagctacaccacccaagtcgtggtgttcatcctgctgtcgtgctcgatcgcggtgtgcgtaaacttcagcacgttcctggtgatcggcacgacgtcgcccgtgacgtaccaggtgctgggccacctcaagacgtgtttggtgctctccttcggctacatcatcctcaaagaccccttcagcgcgcgcaacgtggtgggcatcctcatcgccatcttcggcatgggcctctactcctactactccgtcgtcgagagcaggaagaagaccgaggacgctagctcgctgccggtcgccgcgcagatgagcgagaaggactcggcgccactcctcggcgccaagagctcgccgcggacagagaacaaggccgaggaaaccttcgactacatgccgaggacggccaagagcgcgttcaccggccggtgagcgcgtagcttgtaaggagtacgtatctttctagagttgtgggtagacgacgagcaacaaggcgggaatgtgttagtgaaagatgtaacggcggcaagtgacattccaattatcatttttgcgatttctcctctagggtggtctgcgtggtcatggtttaccagagcataaacagcagaatgtgtggtctactggtcttgaccgagcttgaaatagtagattggattggtgataatacaactatacaagacgtgcgaaatgtgtaaggtttgtgcccgttaggccatgttcgggtggggattagaggaaattaaaattccttctgttcaattttaaataaaaaat

SEQ ID NO: 10021 - DNA, 2052 bp, Zea Mays
cacgaaacgaaccaatcgcgtaccaccccctcccttccactcccatcgtcgtttctctctctccggcggctgcgcggcggcttggatcacatcctcgtcggagctaccatggctgggaagcttattgcaaacctgattgtcatgggctctacgattataggaagagctatgcttcaggcatatcgtaaagcacttgataatgcaaataaaactggtgtggcccatgaggcaataaacaatattcgtagagcaagcaaaacaatgaccgaacaggaagcgaggcagatactgggtgtctcagagaattcgacgtgggaagagatcgtacagcgatacgataacttgtttgaaaggaacggcaaatctgggagcttttacctccaatcgaaggttcaccgggccaaggagtgcctagaaacagtgtaccaaaagaacaaacaagatgagcctcctaactgaaatcccgccccttgagtctgctgttgacattcttttccccctcataagagaactgtacataccaacaacggtcgctgctgttgtaccagtagtatgcaatgcggaaccaataagctttgtgtgcagcgactgaaactcctacatgtcaggagggaagtcaccggccgtcggcggggaggagatgtcggacggcgcgggctcccggacgggcgtcgctggcgcgctgggcctctcggtcacctcgtcggtggccatcgtcatctgcaacaagtacctcatcagcactctaggcttcttcttcgcgacgacgctgacgagctggcacctcatggtgaccttcttcacgctgtacgttgcgcagcggctgcgcttcttcgagccaaagccgatcgacgcgcgcaccgtcatctccttcggcctgctcaacggcatctccattggcctcctcaacctctgcctcgggttcaactctgttggcttctaccagatgaccaagctggccatcatacccttcaccatagtcttggaaaccctctttctgagcaagaagttcagagcatcaaggcctccctcatggttctgctgctgggagtcgggatcgcgtcggtcacggatctccagctcaacctcctcggctcgatcatcgccgtgctcaccatcgctgcgacatgcgtcgggcagattctgaccaaccaaatccagaggaggctgaaggtttcgtcgacgcagctgctgtaccagtcgtcgccgtaccagtccgcggtgctgctcgtcaccgggcctttcgtggacaagctcctcaccaagcgtgacgtcttcgcgttcagctacaccacccaagtcgtggtgttcatcctgctgtcgtgctcgatcgcggtgtgcgtaaacttcagcacgttcctggtgatcggcacgacgtcgcccgtgacgtaccaggtgctgggccacctcaagacgtgtttggtgctctccttcggctacatcatcctcaaagaccccttcagcgcgcgcaacgtggtgggcatcctcatcgccatcttcggcatgggcctctactcctactactccgtcgtcgagagcaggaagaagaccgaggacgctagctcgctgccggtcgccgcgcagatgagcgagaaggactcggcgccactcctcggcgccaagagctcgccgcggacagagaacaaggccgaggaaaccttcgactacatgccgaggacggccaagagcgcgttcaccggccggtgagcgcgtagcttgtaaggagtacgtatctttctagagttgtgggtagacgacgagcaacaaggcgggaatgtgttagtgaaagatgtaacggcggcaagtgacattccaattatcatttttgcgatttctcctctagggtggtctgcgtggtcatggtttaccagagcataaacagcagaatgtgtggtctactggtcttgaccgagcttgaaatagtagattggattggtgataatacaactatacaagacgtgcgaaatgtgtaaggtttgtgcccgttaggccatgttcgggtggggattagaggaaattaaaattccttctgttcaattttaaataaaaaat

SEQ ID NO: 10022 - DNA, 751 bp, Zea Mays
caacccctcctagtcctagctgcactgcacctgcattgcatgcacatgcaccgagaggtcgggctgctgaacgtggacggctactacaactcgctgctgaccttcatcgacaaggccgtggaggagggcttcatcaaccccagcgcccgccgcatcatcgtgctcgcgcccaccgcgcaggagctcatggacaagctcgaggagtacgagccttaccacgacagggtggcgtccacgctcaactgggagaccacgatggaccacctggcctactgacgcccacgctgccagagccgccagcaggcgactgggacgacatctctgatccatcgatgccattcaggaaacaagcttttagcttgccgtcagattggggcttttgtttcgtttttaactgcatgcagatcggttttatttggagtgccggagggagagagaaaaaaaaaacaggttgattattcggttcgcgtagcaggagtacgtagtacgtgcttgttttgtgtatatggtgccttgtgtttgcttcccaccaacggggatgattgatggcttgcagtgttgtctctgtaccagttcaaaaaaaaaaaacccgaccggtttcccctagcttccctgctgtacgctctggtataatagtactagtcgcttgcgcgcgctagcgcgcgtacacctgcaggttttacatcaacaaaaatagacacagccatacaaatttaaaagagcagaaaaggaccatttataaaactccaga

SEQ ID NO: 10023 - DNA, 943 bp, Zea Mays
ggacatgccacttgacgcatgaaaaacaagtcggccgtacgtactgatggccgggactcgggagatcagagccggccgataagcggcgagacagtcggggaggtgcgggcggtggccgacatgcaccagaggaaggcggagatggcgcggcagtccgacgcattcgtcgccctgcctggagggtatggcacgctggaggagctgctggaggtcatcacgtgggcgcagctgggcatccaccacaagccggtcgggctgctgaacgtggacggctactacaactcgctgctgaccttcatcgacaaggccgtggaggagggcttcatcaaccccagcgcccgccgcatcatcgtgctcgcgcccaccgcgcaggagctcatggacaagctcgaggagtacgagccttaccacgacagggtggcgtccacgctcaactgggagaccacgatggaccacctggcctactgacgcccacgctgccagagccgccagcaggcgactgggacgacatctctgatccatcgatgccattcaggaaacaagcttttagcttgccgtcagattggggcttttgtttcgtttttaactgcatgcagatcggttttatttggagtgccggagggagagagaaaaaaaaaacaggttgattattcggttcgcgtagcaggagtacgtagtacgtgcttgttttgtgtatatggtgccttgtgtttgcttcccaccaacggggatgattgatggcttgcagtgttgtctctgtaccagttcaaaaaaaaaaaacccgaccggtttcccctagcttccctgctgtacgctctggtataatagtactagtcgcttgcgcgcgctagcgcgcgtacacctgcaggttttacatcaacaaaaatagacacagccatacaaatttaaaagagcagaaaaggaccatttataaaactccaga

SEQ ID NO: 10024 - DNA, 1201 bp, Zea Mays
gcatcagctgcgctgctcaccaggaaggccatctcatccatccttcattgtattgtagtggcatcaccaggaacagcccagccgcaagaagacagacgacagcagcgagtggggatcggaagaaagaggaagcggagacgaaggtgagagagagaggcaaaagggcagccatgacgatgaagcagtcgaggttcaagaggatctgcgtcttctgtggcagcagccaggggaagaaggcgagctaccatgacgccgccgttgagctcggcaaccagctggttgcccggagcatcgacctggtgtacggcggcggcagcatcgggctcatgggcctcgtctcccaggccgtctacggcggcggacggcacgtcatcggggtcattcccaagacgctcatgacaccagagataagcggcgagacagtcggggaggtgcgggcggtggccgacatgcaccagaggaaggcggagatggcgcggcagtccgacgcattcgtcgccctgcctggtcgggctgctgaacgtggacggctactacaactcgctgctgaccttcatcgacaaggccgtggaggagggcttcatcaaccccagcgcccgccgcatcatcgtgctcgcgcccaccgcgcaggagctcatggacaagctcgaggagtacgagccttaccacgacagggtggcgtccacgctcaactgggagaccacgatggaccacctggcctactgacgcccacgctgccagagccgccagcaggcgactgggacgacatctctgatccatcgatgccattcaggaaacaagcttttagcttgccgtcagattggggcttttgtttcgtttttaactgcatgcagatcggttttatttggagtgccggagggagagagaaaaaaaaaacaggttgattattcggttcgcgtagcaggagtacgtagtacgtgcttgttttgtgtatatggtgccttgtgtttgcttcccaccaacggggatgattgatggcttgcagtgttgtctctgtaccagttcaaaaaaaaaaaacccgaccggtttcccctagcttccctgctgtacgctctggtataatagtactagtcgcttgcgcgcgctagcgcgcgtacacctgcaggttttacatcaacaaaaatagacacagccatacaaatttaaaagagcagaaaaggaccatttataaaactccaga

SEQ ID NO: 10025 - DNA, 1172 bp, Zea Mays
gcatcagctgcgctgctcaccaggaaggccatctcatccatccttcattgtattgtagtggcatcaccaggaacagcccagccgcaagaagacagacgacagcagcgagtggggatcggaagaaagaggaagcggagacgaaggtgagagagagaggcaaaagggcagccatgacgatgaagcagtcgaggttcaagaggatctgcgtcttctgtggcagcagccaggggaagaaggcgagctaccatgacgccgccgttgagctcggcaaccagctggttgcccggagcatcgacctggtgtacggcggcggcagcatcgggctcatgggcctcgtctcccaggccgtctacggcggcggacggcacgtcatcggggtcattcccaagacgctcatgacaccagaggagggtatggcacgctggaggagctgctggaggtcatcacgtgggcgcagctgggcatccaccacaagccggtcgggctgctgaacgtggacggctactacaactcgctgctgaccttcatcgacaaggccgtggaggagggcttcatcaaccccagcgcccgccgcatcatcgtgctcgcgcccaccgcgcaggagctcatggacaagctcgaggagtacgagccttaccacgacagggtggcgtccacgctcaactgggagaccacgatggaccacctggcctactgacgcccacgctgccagagccgccagcaggcgactgggacgacatctctgatccatcgatgccattcaggaaacaagcttttagcttgccgtcagattggggcttttgtttcgtttttaactgcatgcagatcggttttatttggagtgccggagggagagagaaaaaaaaaacaggttgattattcggttcgcgtagcaggagtacgtagtacgtgcttgttttgtgtatatggtgccttgtgtttgcttcccaccaacggggatgattgatggcttgcagtgttgtctctgtaccagttcaaaaaaaaaaaacccgaccggtttcccctagcttccctgctgtacgctctggtataatagtactagtcgcttgcgcgcgctagcgcgcgtacacctgcaggttttacatcaacaaaaatagacacagccatacaaatttaaaagagcagaaaaggaccatttataaaactccaga

SEQ ID NO: 10026 - DNA, 1188 bp, Zea Mays
ctcccccgcctctatataggccatgggtggcgcactcggtgccgggcatcagctgcgctgctcaccaggaaggccatctcatccatccttcattgtattgtagtggcatcaccaggaacagcccagccgcaagaagacagacgacagcagcgagtggggatcggaagaaagaggaagcggagacgaaggtgagagagagaggcaaaagggcagccatgacgatgaagcagtcgaggttcaagaggatctgcgtcttctgtggcagcagccaggggaagaaggcgagctaccatgacgccgccgttgagctcggcaaccagctgataagcggcgagacagtcggggaggtgcgggcggtggccgacatgcaccagaggaaggcggagatggcgcggcagtccgacgcattcgtcgccctgcctggagggtatggcacgctggaggagctgctggaggtcatcacgtgggcgcagctgggcatccaccacaagccggtcgggctgctgaacgtggacggctactacaactcgctgctgaccttcatcgacaaggccgtggaggagggcttcatcaaccccagcgcccgccgcatcatcgtgctcgcgcccaccgcgcaggagctcatggacaagctcgaggagtacgagccttaccacgacagggtggcgtccacgctcaactgggagaccacgatggaccacctggcctactgacgcccacgctgccagagccgccagcaggcgactgggacgacatctctgatccatcgatgccattcaggaaacaagcttttagcttgccgtcagattggggcttttgtttcgtttttaactgcatgcagatcggttttatttggagtgccggagggagagagaaaaaaaaaacaggttgattattcggttcgcgtagcaggagtacgtagtacgtgcttgttttgtgtatatggtgccttgtgtttgcttcccaccaacggggatgattgatggcttgcagtgttgtctctgtaccagttcaaaaaaaaaaaacccgaccggtttcccctagcttccctgctgtacgctctggtataatagtactagtcgcttgcgcgcgctagcgcgcgtacacctgcaggttttacatcaacaaaaatagacacagccatacaaatttaaaagagcagaaaaggaccatttataaaactccaga

SEQ ID NO: 10027 - DNA, 1105 bp, Zea Mays
ccaccagccacccgaccctcccccgcctctatataggccatgggtggcgcactcggtgccgggcatcagctgcgctgctcaccaggaaggccatctcatccatccttcattgtattgtagtggcatcaccaggaacagcccagccgcaagaagacagacgacagcagcgagtggggatcggaagaaagaggaagcggagacgaaggtgagagagagaggcaaaagggcagccatgacgatgaagcagtcgaggttcaagaggatctgcgtcttctgtggcagcagccaggggaagaaggcgagctaccatgacgccgccgttgagctcggcaaccagctggagggtatggcacgctggaggagctgctggaggtcatcacgtgggcgcagctgggcatccaccacaagccggtcgggctgctgaacgtggacggctactacaactcgctgctgaccttcatcgacaaggccgtggaggagggcttcatcaaccccagcgcccgccgcatcatcgtgctcgcgcccaccgcgcaggagctcatggacaagctcgaggagtacgagccttaccacgacagggtggcgtccacgctcaactgggagaccacgatggaccacctggcctactgacgcccacgctgccagagccgccagcaggcgactgggacgacatctctgatccatcgatgccattcaggaaacaagcttttagcttgccgtcagattggggcttttgtttcgtttttaactgcatgcagatcggttttatttggagtgccggagggagagagaaaaaaaaaacaggttgattattcggttcgcgtagcaggagtacgtagtacgtgcttgttttgtgtatatggtgccttgtgtttgcttcccaccaacggggatgattgatggcttgcagtgttgtctctgtaccagttcaaaaaaaaaaaacccgaccggtttcccctagcttccctgctgtacgctctggtataatagtactagtcgcttgcgcgcgctagcgcgcgtacacctgcaggttttacatcaacaaaaatagacacagccatacaaatttaaaagagcagaaaaggaccatttataaaactccaga

SEQ ID NO: 10028 - DNA, 1209 bp, Zea Mays
cgaacgctcctgactcctacttctactgctgctgccgccaccgctgccaccagccacccgaccctcccccgcctctatataggccatgggtggcgcactcggtgccgggcatcagctgcgctgctcaccaggaaggccatctcatccatccttcattgtattgtagtggcatcaccaggaacagcccagccgcaagaagacagacgacagcagcgagtggggatcggaagaaagaggaagcggagacgaaggtgagagagagaggcaaaagggcagccatgacgatgaagcagtcgaggttcaagaggatctgcgtcttctgtggcagcagccaggggaagaaggcgagctaccatgacgccgccgttgagctcggcaaccagctggttgcccggagcatcgacctggtgtacggcggcggcagcatcgggctcatgggcctcgtctcccaggccgtctacggcggcggacggcacgtcatcggggtcattcccaagacgctcatgacaccagaggtcgggctgctgaacgtggacggctactacaactcgctgctgaccttcatcgacaaggccgtggaggagggcttcatcaaccccagcgcccgccgcatcatcgtgctcgcgcccaccgcgcaggagctcatggacaagctcgaggagtacgagccttaccacgacagggtggcgtccacgctcaactgggagaccacgatggaccacctggcctactgacgcccacgctgccagagccgccagcaggcgactgggacgacatctctgatccatcgatgccattcaggaaacaagcttttagcttgccgtcagattggggcttttgtttcgtttttaactgcatgcagatcggttttatttggagtgccggagggagagagaaaaaaaaaacaggttgattattcggttcgcgtagcaggagtacgtagtacgtgcttgttttgtgtatatggtgccttgtgtttgcttcccaccaacggggatgattgatggcttgcagtgttgtctctgtaccagttcaaaaaaaaaaaacccgaccggtttcccctagcttccctgctgtacgctctggtataatagtactagtcgcttgcgcgcgctagcgcgcgtacacctgcaggttttacatcaacaaaaatagacacagccatacaaatttaaaagagcagaaaaggaccatttataaaactccaga

SEQ ID NO: 10029 - DNA, 1542 bp, Zea Mays
caaggaggcaggaaagcttgatgcattcatggaaaagcggcggaggaagaatgcctccaaagatcatcggttcatgctgtaccgacgctcagcaacaacgagctgcgcggccgcctccccgccggcctctccggcctccgcgacctgcagtacctgatcttggagaacaaccccatgggcggcgtcccgctgccgcccgagctgggcaacatccccaggctccaggagctccggctggccaactccggctactcgggccccataccggacacgttcggcctcctgtccagcctcaccacgctgtcgctggagaacaacaacctcaccgggcggatcccgccggggctcagccgtctcaagcgcatgtaccacctcaacctgagcaagaacgggctgggacggcgtcgtccctttcgacgccgcgttcctcaggcggctcggccggaacctggacctgagcggcaacccggggctgtgcgtcaccgaccgggccgtcatgccgggcgtgggcgtcggagtctgcggcgacgacgtcgtcgactgcgaacggtccgccgccgcggagagctcggtcgtcgggagagtggtcaggggagaggtgacgacgggtcgctggccggccgggctgctcaggcccgccgcggttgcgctgtgcagctgccttttgctatgagctcctctgatcatccagggtcggtgcattgcatgcaattgtttgcactcgttgatctctctgtacgtaggtgtgttgctgtaactcgcgatgttgattgtttgaggtgtgtagttgggattcgtgacaagaagtccaagtgaagcgtgaagaccggggagttaggatgacgttgtttcttttgtgcgtgattggcacacgtggggtttgtcggatcacttcattcacattcggttaaccgagcgcgtgacttctgacaataatacagtcgtcaaacacgctgtccgtggttataattgccataaaacacacgtagacggtcgaccgattagtaaaacttttccttcttacaggactttttgttcttttaaagttagtttgaaaactttattttctccaaagacatttttccctaaaaataagaaaaatagaggtttttgactaataaaatttacatatctagaatatttagcctataaatatatcataaccaagtaaatatcggatattcatcgtatctttggtctcacccgctaaggactcaggagtataggtgtacattcgggtcgtccagcccggcccaagtccgaaaagggccggcacgtttaatttctggtcggcccgacccaatattaaatttgggccgtgccgtgccagcccacgggccgacccgtatatagctaaacgtgctggcctttaaacgggcggcccgaaaatagtaaaggcctgaaatacaaatttggcccgaaatacacatttgggcccgaaatacacatttggtagaccaatagctgggtcgcgctggagctcgtgagggcaggccggcagggcgcaggcgcgccgccgagcaggggcggctccggtcgcgc

SEQ ID NO: 10030 - DNA, 1583 bp, Zea Mays
gcgaaaggaagctgatgaacaagtacaatgagctcaagctcacaggaggcaggaaagcttgatgcattcatggaaaagcggcggaggaagaatgcctccaaagatcatcggttcatgctgtaccgacgctcagcaacaacgagctgcgcggccgcctccccgccggcctctccggcctccgcgacctgcagtacctgatcttggagaacaaccccatgggcggcgtcccgctgccgcccgagctgggcaacatccccaggctccaggagctccggctggccaactccggctactcgggccccataccggacacgttcggcctcctgtccagcctcaccacgctgtcgctggagaacaacaacctcaccgggcggatcccgccggggctcagccgtctcaagcgcatgtaccacctcaacctgagcaagaacgggctgggacggcgtcgtccctttcgacgccgcgttcctcaggcggctcggccggaacctggacctgagcggcaacccggggctgtgcgtcaccgaccgggccgtcatgccgggcgtgggcgtcggagtctgcggcgacgacgtcgtcgactgcgaacggtccgccgccgcggagagctcggtcgtcgggagagtggtcaggggagaggtgacgacgggtcgctggccggccgggctgctcaggcccgccgcggttgcgctgtgcagctgccttttgctatgagctcctctgatcatccagggtcggtgcattgcatgcaattgtttgcactcgttgatctctctgtacgtaggtgtgttgctgtaactcgcgatgttgattgtttgaggtgtgtagttgggattcgtgacaagaagtccaagtgaagcgtgaagaccggggagttaggatgacgttgtttcttttgtgcgtgattggcacacgtggggtttgtcggatcacttcattcacattcggttaaccgagcgcgtgacttctgacaataatacagtcgtcaaacacgctgtccgtggttataattgccataaaacacacgtagacggtcgaccgattagtaaaacttttccttcttacaggactttttgttcttttaaagttagtttgaaaactttattttctccaaagacatttttccctaaaaataagaaaaatagaggtttttgactaataaaatttacatatctagaatatttagcctataaatatatcataaccaagtaaatatcggatattcatcgtatctttggtctcacccgctaaggactcaggagtataggtgtacattcgggtcgtccagcccggcccaagtccgaaaagggccggcacgtttaatttctggtcggcccgacccaatattaaatttgggccgtgccgtgccagcccacgggccgacccgtatatagctaaacgtgctggcctttaaacgggcggcccgaaaatagtaaaggcctgaaatacaaatttggcccgaaatacacatttgggcccgaaatacacatttggtagaccaatagctgggtcgcgctggagctcgtgagggcaggccggcagggcgcaggcgcgccgccgagcaggggcggctccggtcgcgc

SEQ ID NO: 10031 - DNA, 576 bp, Zea Mays
gtgttctatcttcctcttcatggcagccatcttgctgcacatgcaagggaggaacctgcttatagatatgtttctttactatcacaattatttgaaaccactggattatagggagaaaactgttattgcttgcctccttacgggatgactcatggtacaacgtcatttgaatacatatggtcgacaatgaagtttagtattgatttctgaatcatcaaaggctcgtgcagttgcccagccttggtgctcaacgtcagaaagaactcacttctcggtagcgcgcttgccgatttttgacggccataatggcaaagatgctgctcaatatgtctatgataacttgccatgggtcatcatggaagatgatgatttatctcttgagcttaaaaagggtactccatgtgtggaagagttcaccccaaaaaattgtgaaatgttatgcaacaatacgaagcttgatcttgctactgtcgagaccgatgttgatgagaaagtcgaagataaggtatgttcttatgtggatcaacttcttgcagctatgcgagccaaagattctaccatgcacgtatgtcgccg

SEQ ID NO: 10032 - DNA, 3642 bp, Zea Mays
acacttttccttttcatacgaccacacacaagcaaaaacctcgaccggaccacacgcggcgccgccgctccgccgctaagcctccttcccatgcccgccgctaagcttccttcccatgcccgccgtcaccgctgacaagcgcactgtggcccttccgcatccataggctgccgccgcgctcccccgccacgagaccctgccccacttcggatgccctttcgaccacacatccccctccgcttcctactgcctcacctccagcaccgcattgcccgcccacccagacctccacgtagatcgctttcctactctctcgcggcggcgttgtcagcggctggaacagagtccgaggaggaggcggttgtgggtagggacgcgccgttagcccctccacgcccaggcggggcgggaagtggagcgcctgggcgtggctgggcacagcagggggcgctcgatgaggaaagtgcggagctcgagcggaaggcctctatcgtcgcacggttcaggcactgccatgagcttctgtggcagactaggtggcgggagatgcgccacgggttggcccagatggtggatgaacaaggttctgattctgctccgactctatgtgatattctgtggtgtggattcagggaatgggattcaagcagcattgtgtgggatgctctagcaaatagttatgctagagctcagatgaatcatgatgctctttatgttcttagtaaaatgaacagcctaaacatgcaaatctcaataaccacctatgatagtttattgtacagtctaagaaaggcagatgtggcactggcgatttttaaagagatggagtcatgtggtattccccccagtgattattcccatggcattctcatagatggactctgcaagcaaggtaaaattggagaagctttatctttccttcaggaaacaaggaaagaggggaaattcaaacccttgggaatgacctttaacacccttatgtccgcattgtgtaattgggggttcattcaggatgcaaaatcagttttctgcctgatgttgaagtatggattaaatccaagcaggcacacatattcaaccattatacatggtctatgtaaagtaggttctgtaaatgaagcattcgatatttttcagagtgtgacagaagaaggaatggaacttgatattgtcacttgcaacagccttattaatggctttcgcttgcatgggcatacaagagaaattccaaaaatgattgagatgatgaggggcctaggtgtcgaacccgatgttgttacttatactatacttattactggccactgtgaaggcggtgatgtcgaagaagggatgaggataagaaaggacatcttaggccaaggtatagagttgaatattgtcacatatagcgtccttatcaatgctctcttcaagaagggcctgttctatgaggtcgaaaacctatttggtgagatatgcagtattggtctggaattggatgtcattgcatattccatcctcatccatgggttctgcaagctaggagaaattggaagagcacttcaagtctggaatctaatgtgctgttctcagagggtaattccaacttcagtaaaccatgtatctattcttctaggcctttgcaagaaaggattccttgatgaagcgaggtcatatttggaaactgtggctagcaaatatcagccatccgatgtagtcctctacaatgtagttattgatggttatgcaaaagtgggtgatattggtaatgctgttcagctgtatgatgcgattattatggctggtatgtgcccaaccattgtaacatgcaactctcttctatatggctactgcaaatttggggatctacatatggcagaaagctattttatggctattcagttaagtgacctgctgccaacaacagttacctacactactttgatggatgcactctctgaagctgggaaagttcattccatgctaagtatttttaaagaaatgactggaaaaggtatcagaccaaatgcaataacttacagtgtagttattaaaggactttgtaagcagttaatgttccacgatgccaaaaatgttcttgatgatatgtatagagaaggttttgatgctgatccaataccttacaacacgcttatacaaggtttttgtgaaactcaggatgctaaaaatgctttctacgtgtatgaactaatggtatgtcgtggagtgatgccctctcctgttacttataacttgcttgttaatgtgctgtgcttaaagggactagttattcacgctgaaatgaaactggagtccttcagaaaacagggtgccgagctgagaaaatttgcatatacaacacttatcaaagctcaatgtgcaaaagggatgccttacaaggctattatgtgggttggcaagcttctagatgcagggtttgaggcatctattgaagacttcagtgcggcaatcaaccgactatgcaaaagacagttcaccagagaagctttgatgctcatatcgatcatgttatctgttggtgtttatccagatattcaactataccgtgtactgggtacagctgtacagaagaaaaatgagtcattctatctacccatattgcaagcccttgctatcaaaactggtatttagtactttgagtctgaagggcaggcctggtgcagtggtgatagctgtctgactaagtcaccatgtcacgggttcgaagcagcctctccgcatctgcggaggaaggcttgccttggtttatcccgtcgcatctgcggaggtggtgctgctgtgcatcgctgtgggctgtgaggcggaggcactgcatctcgctgtgaagtggactgctccatcctctctatgatcctgcaccatcaggggttcgggtgacctttgaggatggtggttaactggttaccttgaagatcccggtgccattgattctttgctacttggcctctccactgctggcaacagacccagggaatgaattagatacctattcttgaccccttcccgcccaaggaggagcaggcaggaactccggtatatggtggtaattggtggcacctttatgtacttctttaggggcagcctaccatggcaggggctgaaagcaggatcaagaagcagaaatatgacaaaaattagtgcgaaatggatactcccatggaggataccagttttgactggaccattttgaagtatcctcagataggctgcaacctgcggatgaaggcaagtgacagaactagtggaggtgttggaccttcaatggatacaattgagaagaccccaggaggtgtccgatagaaggaatcctagtggttatgtgaatccgagtggcaattatgcccaatgaccacgtgagaacatatgtatgtcattgaacgaaattgtaaactgaaactgtcgctgcaacaattcttcttgtgatcgttgctccttgccaattcatcgatctgagatcttagtgccaacgtcttctgtgaaaggaggcagcatatcaattggaggttctcttcagcttcttggtttctgcacctttgaggcttgtgttggcatattggccgtcaatcatgaagatgagatctcagtacattcctgaggaagcgagaagcacaatcatgaacttcttccgcataccactca

SEQ ID NO: 10033 - DNA, 4592 bp, Zea Mays
acacttttccttttcatacgaccacacacaagcaaaaacctcgaccggaccacacgcggcgccgccgctccgccgctaagcctccttcccatgcccgccgctaagcttccttcccatgcccgccgtcaccgctgacaagcgcactgtggcccttccgcatccataggctgccgccgcgctcccccgccacgagaccctgccccacttcggatgccctttcgaccacacatccccctccgcttcctactgcctcacctccagcaccgcattgcccgcccacccagacctccacgtagatcgctttcctactctctcgcggcggcgttgtcagcggctggaacagagtccgaggaggaggcggttgtgggtagggacgcgccgttagcccctccacgcccaggcggggcgggaagtggagcgcctgggcgtggctgggcacagcagggggcgctcgatgaggaaagtgcggagctcgagcggaaggcctctatcgtcgcacggttcaggcactgccatgagcttctgtggcagactaggtggcgggagatgcgccacgggttggcccagatggtggatgaacaaggttctgattctgctccgactctatgtgatattctgtggtgtggattcagggaatgggattcaagcagcattgtgtgggatgctctagcaaatagttatgctagagctcagatgaatcatgatgctctttatgttcttagtaaaatgaacagcctaaacatgcaaatctcaataaccacctatgatagtttattgtacagtctaagaaaggcagatgtggcactggcgatttttaaagagatggagtcatgtggtattccccccagtgattattcccatggcattctcatagatggactctgcaagcaaggtaaaattggagaagctttatctttccttcaggaaacaaggaaagaggggaaattcaaacccttgggaatgacctttaacacccttatgtccgcattgtgtaattgggggttcattcaggatgcaaaatcagttttctgcctgatgttgaagtatggattaaatccaagcaggcacacatattcaaccattatacatggtctatgtaaagtaggttctgtaaatgaagcattcgatatttttcagagtgtgacagaagaaggaatggaacttgatattgtcacttgcaacagccttattaatggctttcgcttgcatgggcatacaagagaaattccaaaaatgattgagatgatgaggggcctaggtgtcgaacccgatgttgttacttatactatacttattactggccactgtgaaggcggtgatgtcgaagaagggatgaggataagaaaggacatcttaggccaaggtatagagttgaatattgtcacatatagcgtccttatcaatgctctcttcaagaagggcctgttctatgaggtcgaaaacctatttggtgagatatgcagtattggtctggaattggatgtcattgcatattccatcctcatccatgggttctgcaagctaggagaaattggaagagcacttcaagtctggaatctaatgtgctgttctcagagggtaattccaacttcagtaaaccatgtatctattcttctaggcctttgcaagaaaggattccttgatgaagcgaggtcatatttggaaactgtggctagcaaatatcagccatccgatgtagtcctctacaatgtagttattgatggttatgcaaaagtgggtgatattggtaatgctgttcagctgtatgatgcgattattatggctggtatgtgcccaaccattgtaacatgcaactctcttctatatggctactgcaaatttggggatctacatatggcagaaagctattttatggctattcagttaagtgacctgctgccaacaacagttacctacactactttgatggatgcactctctgaagctgggaaagttcattccatgctaagtatttttaaagaaatgactggaaaaggtatcagaccaaatgcaataacttacagtgtagttattaaaggactttgtaagcagttaatgttccacgatgccaaaaatgttcttgatgatatgtatagagaaggttttgatgctgatccaataccttacaacacgcttatacaaggtttttgtgaaactcaggatgctaaaaatgctttctacgtgtatgaactaatggtatgtcgtggagtgatgccctctcctgttacttataacttgcttgttaatgtgctgtgcttaaagggactagttattcacgctgaaatgaaactggagtccttcagaaaacagggtgccgagctgagaaaatttgcatatacaacacttatcaaagctcaatgtgcaaaagggatgccttacaaggctattatgtgggttggcaagcttctagatgcagggtttgaggcatctattgaagacttcagtgcggcaatcaaccgactatgcaaaagacagttcaccagagaagctttgatgctcatatcgatcatgttatctgttggtgtttatccagatattcaactataccgtgtactgggtacagctgtacagaagaaaaatgagtcattctatctacccatattgcaagcccttgctatcaaaactggtatttagtactttgagtctgaagggcaggcctggtgcagtggtgatagctgtctgactaagtcaccatgtcacgggttcgaagcagcctctccgcatctgcggaggaaggcttgccttggtttatcccgtcgcatctgcggaggtggtgctgctgtgcatcgctgtgggctgtgaggcggaggcactgcatctcgctgtgaagtggactgctccatcctctctatgatcctgcaccatcaggggttcgggtgacctttgaggatggtggttaactggttaccttgaagatcccggtgccattgattctttgctacttggcctctccactgctggcaacagacccagcatggaccagggaatgaattagatacctattcttgaccccttcccgcccaaggaggagcaggcaggaactccggtatatggtggtaattggtggcacctttatgtacttctttaggggcagcctaccatggcaggggctgaaagcaggatcaagaagcagaaatatgacaaaaattagtgcgaaatggatactcccatggaggataccagttttgactggaccattttgaagtatcctcagataggctgcaacctgcggatgaaggcaagtgacagaactagtggaggtgttggaccttcaatggatacaattgagaagaccccaggaggtgtccgatagaaggaatcctagtggttatgtgaatccgagtggcaattatgcccaatgaccacgtgagaacatatgtatgtcattgaacgaaattggctgctgtttagggttcgtgtggatcctgctggtcgttcagcgcgttgggagtgctggagggtgcgcactacctcacaactggcaagttggaggtgctttcggagcaggagttcgtcaactgcgaccacgaggtaaactgaaactgtcgctgcaacaattcttcttgtgatcgttgctccttgccaattcatcgatctgagtttatcgacgtcgcccagatcgactccattgcctctcaccatctccaaaatttgtggccgagcgctcgccatcaccagagctgcaggggttcctcgccgcctcaaccacccacacctttctccatcggcgcgacggcttcagagccttctccaaaatctgtggcagagcgctcaccgatgccagagccacaatgcttccttgccgcctcaaaatcggtttggttttagtttcatttcacgtcaaaggttgtcatgacatttattcatcgtttgataaatatgttgaagttgaacatctagaggatgataacaagtgtaacgaaccatcttttatggttcgttaagataaaagtccagagcatggacatgacacaaggtgatggtgatgcagctacgtcgatcatgattcatttaggattgaatgaagttactggtgtgaccttgtcgagactgaagtaaggagggatagagctaaaaactctcttgacagtaagttctagataccttagttttgtgctcatgaatcttctctcttgtgctgctactctataaaccttagttttatgctcatgaaccttctttcttaagctgctactctataatataagtgccacctatagtaatgtcttagccaaatacatttattattttcttagacaaaaaataaagccacatgttctctctccatgatctgataggtggcacttattcttccaaaaactggtagctctgccattacctaatacctactgcagtagctctgccttttagatatatatgcctaatcttcagtagatcattccacacaggagagttttttttattattctgcttaagatgagaaacaactcgcttctttaattgtgtacagtttcctgccatattcccttcccattttccatcaccacttgcaaaggagactaatattcattcttctcaaatctttgacccctaaaccccctttctctttgggtttattaatcttgatccac

SEQ ID NO: 10034 - DNA, 4555 bp, Zea Mays
acacttttccttttcatacgaccacacacaagcaaaaacctcgaccggaccacacgcggcgccgccgctccgccgctaagcctccttcccatgcccgccgctaagcttccttcccatgcccgccgtcaccgctgacaagcgcactgtggcccttccgcatccataggctgccgccgcgctcccccgccacgagaccctgccccacttcggatgccctttcgaccacacatccccctccgcttcctactgcctcacctccagcaccgcattgcccgcccacccagacctccacgtagatcgctttcctactctctcgcggcggcgttgtcagcggctggaacagagtccgaggaggaggcggttgtgggtagggacgcgccgttagcccctccacgcccaggcggggcgggaagtggagcgcctgggcgtggctgggcacagcagggggcgctcgatgaggaaagtgcggagctcgagcggaaggcctctatcgtcgcacggttcaggcactgccatgagcttctgtggcagactaggtggcgggagatgcgccacgggttggcccagatggtggatgaacaaggttctgattctgctccgactctatgtgatattctgtggtgtggattcagggaatgggattcaagcagcattgtgtgggatgctctagcaaatagttatgctagagctcagatgaatcatgatgctctttatgttcttagtaaaatgaacagcctaaacatgcaaatctcaataaccacctatgatagtttattgtacagtctaagaaaggcagatgtggcactggcgatttttaaagagatggagtcatgtggtattccccccagtgattattcccatggcattctcatagatggactctgcaagcaaggtaaaattggagaagctttatctttccttcaggaaacaaggaaagaggggaaattcaaacccttgggaatgacctttaacacccttatgtccgcattgtgtaattgggggttcattcaggatgcaaaatcagttttctgcctgatgttgaagtatggattaaatccaagcaggcacacatattcaaccattatacatggtctatgtaaagtaggttctgtaaatgaagcattcgatatttttcagagtgtgacagaagaaggaatggaacttgatattgtcacttgcaacagccttattaatggctttcgcttgcatgggcatacaagagaaattccaaaaatgattgagatgatgaggggcctaggtgtcgaacccgatgttgttacttatactatacttattactggccactgtgaaggcggtgatgtcgaagaagggatgaggataagaaaggacatcttaggccaaggtatagagttgaatattgtcacatatagcgtccttatcaatgctctcttcaagaagggcctgttctatgaggtcgaaaacctatttggtgagatatgcagtattggtctggaattggatgtcattgcatattccatcctcatccatgggttctgcaagctaggagaaattggaagagcacttcaagtctggaatctaatgtgctgttctcagagggtaattccaacttcagtaaaccatgtatctattcttctaggcctttgcaagaaaggattccttgatgaagcgaggtcatatttggaaactgtggctagcaaatatcagccatccgatgtagtcctctacaatgtagttattgatggttatgcaaaagtgggtgatattggtaatgctgttcagctgtatgatgcgattattatggctggtatgtgcccaaccattgtaacatgcaactctcttctatatggctactgcaaatttggggatctacatatggcagaaagctattttatggctattcagttaagtgacctgctgccaacaacagttacctacactactttgatggatgcactctctgaagctgggaaagttcattccatgctaagtatttttaaagaaatgactggaaaaggtatcagaccaaatgcaataacttacagtgtagttattaaaggactttgtaagcagttaatgttccacgatgccaaaaatgttcttgatgatatgtatagagaaggttttgatgctgatccaataccttacaacacgcttatacaaggtttttgtgaaactcaggatgctaaaaatgctttctacgtgtatgaactaatggtatgtcgtggagtgatgccctctcctgttacttataacttgcttgttaatgtgctgtgcttaaagggactagttattcacgctgaaatgaaactggagtccttcagaaaacagggtgccgagctgagaaaatttgcatatacaacacttatcaaagctcaatgtgcaaaagggatgccttacaaggctattatgtgggttggcaagcttctagatgcagggtttgaggcatctattgaagacttcagtgcggcaatcaaccgactatgcaaaagacagttcaccagagaagctttgatgctcatatcgatcatgttatctgttggtgtttatccagatattcaactataccgtgtactgggtacagctgtacagaagaaaaatgagtcattctatctacccatattgcaagcccttgctatcaaaactggtatttagtactttgagtctgtaagtgaaactgcctggtaaccgttcttaacaattcatgtcccacaggctgactaacccctttagtattttgtatccatgtttgttgctcttcaggaagggcaggcctggtgcagtggtgatagctgtctgactaagtcaccatgtcacgggttcgaagcagcctctccgcatctgcggaggaaggcttgccttggtttatcccgtcgcatctgcggaggtggtgctgctgtgcatcgctgtgggctgtgaggcggaggcactgcatctcgctgtgaagtggactgctccatcctctctatgatcctgcaccatcaggggttcgggtgacctttgaggatggtggttaactggttaccttgaagatcccggtgccattgattctttgctacttggcctctccactgctggcaacagacccagcatggaccagggaatgaattagatacctattcttgaccccttcccgcccaaggaggagcaggcaggaactccggtatatggtggtaattggtggcacctttatgtacttctttaggggcagcctaccatggcaggggctgaaagcaggatcaagaagcagaaatatgacaaaaattagtgcgaaatggatactcccatggaggataccagttttgactggaccattttgaagtatcctcagataggctgcaacctgcggatgaaggcaagtgacagaactagtggaggtgttggaccttcaatggatacaattgagaagaccccaggaggtgtccgatagaaggaatcctagtggttatgtgaatccgagtggcaattatgcccaatgaccacgtgagaacatatgtatgtcattgaacgaaattgtaaactgaaactgtcgctgcaacaattcttcttgtgatcgttgctccttgccaattcatcgatctgagtttatcgacgtcgcccagatcgactccattgcctctcaccatctccaaaatttgtggccgagcgctcgccatcaccagagctgcaggggttcctcgccgcctcaaccacccacacctttctccatcggcgcgacggcttcagagccttctccaaaatctgtggcagagcgctcaccgatgccagagccacaatgcttccttgccgcctcaaaatcggtttggttttagtttcatttcacgtcaaaggttgtcatgacatttattcatcgtttgataaatatgttgaagttgaacatctagaggatgataacaagtgtaacgaaccatcttttatggttcgttaagataaaagtccagagcatggacatgacacaaggtgatggtgatgcagctacgtcgatcatgattcatttaggattgaatgaagttactggtgtgaccttgtcgagactgaagtaaggagggatagagctaaaaactctcttgacagtaagttctagataccttagttttgtgctcatgaatcttctctcttgtgctgctactctataaaccttagttttatgctcatgaaccttctttcttaagctgctactctataatataagtgccacctatagtaatgtcttagccaaatacatttattattttcttagacaaaaaataaagccacatgttctctctccatgatctgataggtggcacttattcttccaaaaactggtagctctgccattacctaatacctactgcagtagctctgccttttagatatatatgcctaatcttcagtagatcattccacacaggagagttttttttattattctgcttaagatgagaaacaactcgcttctttaattgtgtacagtttcctgccatattcccttcccattttccatcaccacttgcaaaggagactaatattcattcttctcaaatctttgacccctaaaccccctttctctttgggtttattaatcttgatccac

SEQ ID NO: 10035 - DNA, 3969 bp, Zea Mays
attttcacacttttccttttcatacgaccacacacaagcaaaaacctcgaccggaccacacgcggcgccgccgctccgccgctaagcctccttcccatgcccgccgctaagcttccttcccatgcccgccgtcaccgctgacaagcgcactgtggcccttccgcatccataggctgccgccgcgctcccccgccacgagaccctgccccacttcggatgccctttcgaccacacatccccctccgcttcctactgcctcacctccagcaccgcattgcccgcccacccagacctccacgtagatcgctttcctactctctcgcggcggcgttgtcagcggctggaacagagtccgaggaggaggcggttgtgggtagggacgcgccgttagcccctccacgcccaggcggggcgggaagtggagcgcctgggcgtggctgggcacagcagggggcgctcgatgaggaaagtgcggagctcgagcggaaggcctctatcgtcgcacggttcaggcactgccatgagcttctgtggcagactaggtggcgggagatgcgccacgggttggcccagatggtggatgaacaagaaagcaagctcagaacaggatcacaggtgtggaaattttgcagattgtcacttaatgtatgcatagatgttcattcacatgtcttgaaaatggttctgattctgctccgactctatgtgatattctgtggtgtggattcagggaatgggattcaagcagcattgtgtgggatgctctagcaaatagttatgctagagctcagatgaatcatgatgctctttatgttcttagtaaaatgaacagcctaaacatgcaaatctcaataaccacctatgatagtttattgtacagtctaagaaaggcagatgtggcactggcgatttttaaagagatggagtcatgtggtattccccccagtgattattcccatggcattctcatagatggactctgcaagcaaggtaaaattggagaagctttatctttccttcaggaaacaaggaaagaggggaaattcaaacccttgggaatgacctttaacacccttatgtccgcattgtgtaattgggggttcattcaggatgcaaaatcagttttctgcctgatgttgaagtatggattaaatccaagcaggcacacatattcaaccattatacatggtctatgtaaagtaggttctgtaaatgaagcattcgatatttttcagagtgtgacagaagaaggaatggaacttgatattgtcacttgcaacagccttattaatggctttcgcttgcatgggcatacaagagaaattccaaaaatgattgagatgatgaggggcctaggtgtcgaacccgatgttgttacttatactatacttattactggccactgtgaaggcggtgatgtcgaagaagggatgaggataagaaaggacatcttaggccaaggtatagagttgaatattgtcacatatagcgtccttatcaatgctctcttcaagaagggcctgttctatgaggtcgaaaacctatttggtgagatatgcagtattggtctggaattggatgtcattgcatattccatcctcatccatgggttctgcaagctaggagaaattggaagagcacttcaagtctggaatctaatgtgctgttctcagagggtaattccaacttcagtaaaccatgtatctattcttctaggcctttgcaagaaaggattccttgatgaagcgaggtcatatttggaaactgtggctagcaaatatcagccatccgatgtagtcctctacaatgtagttattgatggttatgcaaaagtgggtgatattggtaatgctgttcagctgtatgatgcgattattatggctggtatgtgcccaaccattgtaacatgcaactctcttctatatggctactgcaaatttggggatctacatatggcagaaagctattttatggctattcagttaagtgacctgctgccaacaacagttacctacactactttgatggatgcactctctgaagctgggaaagttcattccatgctaagtatttttaaagaaatgactggaaaaggtatcagaccaaatgcaataacttacagtgtagttattaaaggactttgtaagcagttaatgttccacgatgccaaaaatgttcttgatgatatgtatagagaaggttttgatgctgatccaataccttacaacacgcttatacaaggtttttgtgaaactcaggatgctaaaaatgctttctacgtgtatgaactaatggtatgtcgtggagtgatgccctctcctgttacttataacttgcttgttaatgtgctgtgcttaaagggactagttattcacgctgaaatgaaactggagtccttcagaaaacagggtgccgagctgagaaaatttgcatatacaacacttatcaaagctcaatgtgcaaaagggatgccttacaaggctattatgtgggttggcaagcttctagatgcagggtttgaggcatctattgaagacttcagtgcggcaatcaaccgactatgcaaaagacagttcaccagagaagctttgatgctcatatcgatcatgttatctgttggtgtttatccagatattcaactataccgtgtactgggtacagctgtacagaagaaaaatgagtcattctatctacccatattgcaagcccttgctatcaaaactggtatttagtactttgagtctgaagggcaggcctggtgcagtggtgatagctgtctgactaagtcaccatgtcacgggttcgaagcagcctctccgcatctgcggaggaaggcttgccttggtttatcccgtcgcatctgcggaggtggtgctgctgtgcatcgctgtgggctgtgaggcggaggcactgcatctcgctgtgaagtggactgctccatcctctctatgatcctgcaccatcaggggttcgggtgacctttgaggatggtggttaactggttaccttgaagatcccggtgccattgattctttgctacttggcctctccactgctggcaacagacccagcatggaccagggaatgaattagatacctattcttgaccccttcccgcccaaggaggagcaggcaggaactccggtatatggtggtaattggtggcacctttatgtacttctttaggggcagcctaccatggcaggggctgaaagcaggatcaagaagcagaaatatgacaaaaattagtgcgaaatggatactcccatggaggataccagttttgactggaccattttgaagtatcctcagataggctgcaacctgcggatgaaggcaagtgacagaactagtggaggtgttggaccttcaatggatacaattgagaagaccccaggaggtgtccgatagaaggaatcctagtggttatgtgaatccgagtggcaattatgcccaatgaccacgtgagaacatatgtatgtcattgaacgaaattgtaaactgaaactgtcgctgcaacaattcttcttgtgatcgttgctccttgccaattcatcgatctgagtttatcgacgtcgcccagatcgactccattgcctctcaccatctccaaaatttgtggccgagcgctcgccatcaccagagctgcaggggttcctcgccgcctcaaccacccacacctttctccatcggcgcgacggcttcagagccttctccaaaatctgtggcagagcgctcaccgatgccagagccacaatgcttccttgccgcctcaaaatcggtttggttttagtttcatttcacgtcaaaggttgtcatgacatttattcatcgtttgataaatatgttgaagttgaacatctagaggatgataacaagtgtaacgaaccatcttttatggttcgttaagataaaagtccagagcatggacatgacacaaggtgatggtgatgcagctacgtcgatcat

SEQ ID NO: 10036 - DNA, 3406 bp, Zea Mays
acacttttccttttcatacgaccacacacaagcaaaaacctcgaccggaccacacgcggcgccgccgctccgccgctaagcctccttcccatgcccgccgctaagcttccttcccatgcccgccgtcaccgctgacaagcgcactgtggcccttccgcatccataggctgccgccgcgctcccccgccacgagaccctgccccacttcggatgccctttcgaccacacatccccctccgcttcctactgcctcacctccagcaccgcattgcccgcccacccagacctccacgtagatcgctttcctactctctcgcggcggcgttgtcagcggctggaacagagtccgaggaggaggcggttgtgggtagggacgcgccgttagcccctccacgcccaggcggggcgggaagtggagcgcctgggcgtggctgggcacagcagggggcgctcgatgaggaaagtgcggagctcgagcggaaggcctctatcgtcgcacggttcaggcactgccatgagcttctgtggcagactaggtggcgggagatgcgccacgggttggcccagatggtggatgaacaaggttctgattctgctccgactctatgtgatattctgtggtgtggattcagggaatgggattcaagcagcattgtgtgggatgctctagcaaatagttatgctagagctcagatgaatcatgatgctctttatgttcttagtaaaatgaacagcctaaacatgcaaatctcaataaccacctatgatagtttattgtacagtctaagaaaggcagatgtggcactggcgatttttaaagagatggagtcatgtggtattccccccagtgattattcccatggcattctcatagatggactctgcaagcaaggtaaaattggagaagctttatctttccttcaggaaacaaggaaagaggggaaattcaaacccttgggaatgacctttaacacccttatgtccgcattgtgtaattgggggttcattcaggatgcaaaatcagttttctgcctgatgttgaagtatggattaaatccaagcaggcacacatattcaaccattatacatggtctatgtaaagtaggttctgtaaatgaagcattcgatatttttcagagtgtgacagaagaaggaatggaacttgatattgtcacttgcaacagccttattaatggctttcgcttgcatgggcatacaagagaaattccaaaaatgattgagatgatgaggggcctaggtgtcgaacccgatgttgttacttatactatacttattactggccactgtgaaggcggtgatgtcgaagaagggatgaggataagaaaggacatcttaggccaaggtatagagttgaatattgtcacatatagcgtccttatcaatgctctcttcaagaagggcctgttctatgaggtcgaaaacctatttggtgagatatgcagtattggtctggaattggatgtcattgcatattccatcctcatccatgggttctgcaagctaggagaaattggaagagcacttcaagtctggaatctaatgtgctgttctcagagggtaattccaacttcagtaaaccatgtatctattcttctaggcctttgcaagaaaggattccttgatgaagcgaggtcatatttggaaactgtggctagcaaatatcagccatccgatgtagtcctctacaatgtagttattgatggttatgcaaaagtgggtgatattggtaatgctgttcagctgtatgatgcgattattatggctggtatgtgcccaaccattgtaacatgcaactctcttctatatggctactgcaaatttggggatctacatatggcagaaagctattttatggctattcagttaagtgacctgctgccaacaacagttacctacactactttgatggatgcactctctgaagctgggaaagttcattccatgctaagtatttttaaagaaatgactggaaaaggtatcagaccaaatgcaataacttacagtgtagttattaaaggactttgtaagcagttaatgttccacgatgccaaaaatgttcttgatgatatgtatagagaaggttttgatgctgatccaataccttacaacacgcttatacaaggtttttgtgaaactcaggatgctaaaaatgctttctacgtgtatgaactaatggtatgtcgtggagtgatgccctctcctgttacttataacttgcttgttaatgtgctgtgcttaaagggactagttattcacgctgaaatgaaactggagtccttcagaaaacagggtgccgagctgagaaaatttgcatatacaacacttatcaaagctcaatgtgcaaaagggatgccttacaaggctattatgtgggttggcaagcttctagatgcagggtttgaggcatctattgaagacttcagtgcggcaatcaaccgactatgcaaaagacagttcaccagagaagctttgatgctcatatcgatcatgttatctgttggtgtttatccagatattcaactataccgtgtactgggtacagctgtacagaagaaaaatgagtcattctatctacccatattgcaagcccttgctatcaaaactggaagggcaggcctggtgcagtggtgatagctgtctgactaagtcaccatgtcacgggttcgaagcagcctctccgcatctgcggaggaaggcttgccttggtttatcccgtcgcatctgcggaggtggtgctgctgtgcatcgctgtgggctgtgaggcggaggcactgcatctcgctgtgaagtggactgctccatcctctctatgatcctgcaccatcaggggttcgggtgacctttgaggatggtggttaactggttaccttgaagatcccggtgccattgattctttgctacttggcctctccactgctggcaacagacccagggaatgaattagatacctattcttgaccccttcccgcccaaggaggagcaggcaggaactccggtatatggtggtaattggtggcacctttatgtacttctttaggggcagcctaccatggcaggggctgaaagcaggatcaagaagcagaaatatgacaaaaattagtgcgaaatggatactcccatggaggataccagttttgactggaccattttgaagtatcctcagataggctgcaacctgcggatgaaggcaagtgacagaactagtggaggtgttggaccttcaatggatacaattgagaagaccccaggaggtgtccgatagaaggaatcctagtggttatgtgaatccgagtggcaattatgcccaatgaccacgtgagaacatatgtatgtcattgaacgaaattggttcgtgtggatcctgctggtcgttcagcgcgttggg

SEQ ID NO: 10037 - DNA, 3439 bp, Zea Mays
acacttttccttttcatacgaccacacacaagcaaaaacctcgaccggaccacacgcggcgccgccgctccgccgctaagcctccttcccatgcccgccgctaagcttccttcccatgcccgccgtcaccgctgacaagcgcactgtggcccttccgcatccataggctgccgccgcgctcccccgccacgagaccctgccccacttcggatgccctttcgaccacacatccccctccgcttcctactgcctcacctccagcaccgcattgcccgcccacccagacctccacgtagatcgctttcctactctctcgcggcggcgttgtcagcggctggaacagagtccgaggaggaggcggttgtgggtagggacgcgccgttagcccctccacgcccaggcggggcgggaagtggagcgcctgggcgtggctgggcacagcagggggcgctcgatgaggaaagtgcggagctcgagcggaaggcctctatcgtcgcacggttcaggcactgccatgagcttctgtggcagactaggtggcgggagatgcgccacgggttggcccagatggtggatgaacaaggttctgattctgctccgactctatgtgatattctgtggtgtggattcagggaatgggattcaagcagcattgtgtgggatgctctagcaaatagttatgctagagctcagatgaatcatgatgctctttatgttcttagtaaaatgaacagcctaaacatgcaaatctcaataaccacctatgatagtttattgtacagtctaagaaaggcagatgtggcactggcgatttttaaagagatggagtcatgtggtattccccccagtgattattcccatggcattctcatagatggactctgcaagcaaggtaaaattggagaagctttatctttccttcaggaaacaaggaaagaggggaaattcaaacccttgggaatgacctttaacacccttatgtccgcattgtgtaattgggggttcattcaggatgcaaaatcagttttctgcctgatgttgaagtatggattaaatccaagcaggcacacatattcaaccattatacatggtctatgtaaagtaggttctgtaaatgaagcattcgatatttttcagagtgtgacagaagaaggaatggaacttgatattgtcacttgcaacagccttattaatggctttcgcttgcatgggcatacaagagaaattccaaaaatgattgagatgatgaggggcctaggtgtcgaacccgatgttgttacttatactatacttattactggccactgtgaaggcggtgatgtcgaagaagggatgaggataagaaaggacatcttaggccaaggtatagagttgaatattgtcacatatagcgtccttatcaatgctctcttcaagaagggcctgttctatgaggtcgaaaacctatttggtgagatatgcagtattggtctggaattggatgtcattgcatattccatcctcatccatgggttctgcaagctaggagaaattggaagagcacttcaagtctggaatctaatgtgctgttctcagagggtaattccaacttcagtaaaccatgtatctattcttctaggcctttgcaagaaaggattccttgatgaagcgaggtcatatttggaaactgtggctagcaaatatcagccatccgatgtagtcctctacaatgtagttattgatggttatgcaaaagtgggtgatattggtaatgctgttcagctgtatgatgcgattattatggctggtatgtgcccaaccattgtaacatgcaactctcttctatatggctactgcaaatttggggatctacatatggcagaaagctattttatggctattcagttaagtgacctgctgccaacaacagttacctacactactttgatggatgcactctctgaagctgggaaagttcattccatgctaagtatttttaaagaaatgactggaaaaggtatcagaccaaatgcaataacttacagtgtagttattaaaggactttgtaagcagttaatgttccacgatgccaaaaatgttcttgatgatatgtatagagaaggttttgatgctgatccaataccttacaacacgcttatacaaggtttttgtgaaactcaggatgctaaaaatgctttctacgtgtatgaactaatggtatgtcgtggagtgatgccctctcctgttacttataacttgcttgttaatgtgctgtgcttaaagggactagttattcacgctgaaatgaaactggagtccttcagaaaacagggtgccgagctgagaaaatttgcatatacaacacttatcaaagctcaatgtgcaaaagggatgccttacaaggctattatgtgggttggcaagcttctagatgcagggtttgaggcatctattgaagacttcagtgcggcaatcaaccgactatgcaaaagacagttcaccagagaagctttgatgctcatatcgatcatgttatctgttggtgtttatccagatattcaactataccgtgtactgggtacagctgtacagaagaaaaatgagtcattctatctacccatattgcaagcccttgctatcaaaactggtatttagtactttgagtctgaagggcaggcctggtgcagtggtgatagctgtctgactaagtcaccatgtcacgggttcgaagcagcctctccgcatctgcggaggaaggcttgccttggtttatcccgtcgcatctgcggaggtggtgctgctgtgcatcgctgtgggctgtgaggcggaggcactgcatctcgctgtgaagtggactgctccatcctctctatgatcctgcaccatcaggggttcgggtgacctttgaggatggtggttaactggttaccttgaagatcccggtgccattgattctttgctacttggcctctccactgctggcaacagacccagggaatgaattagatacctattcttgaccccttcccgcccaaggaggagcaggcaggaactccggtatatggtggtaattggtggcacctttatgtacttctttaggggcagcctaccatggcaggggctgaaagcaggatcaagaagcagaaatatgacaaaaattagtgcgaaatggatactcccatggaggtggcccatacatgataccagttttgactggaccattttgaagtatcctcagataggctgcaacctgcggatgaaggcaagtgacagaactagtggaggtgttggaccttcaatggatacaattgagaagaccccaggaggtgtccgatagaaggaatcctagtggttatgtgaatccgagtggcaattatgcccaatgaccacgtgagaacatatgtatgtcattgaacgaaattggttcgtgtggatcctgctggtcgttcagcgcgttggg

SEQ ID NO: 10038 - DNA, 3430 bp, Zea Mays
acacttttccttttcatacgaccacacacaagcaaaaacctcgaccggaccacacgcggcgccgccgctccgccgctaagcctccttcccatgcccgccgctaagcttccttcccatgcccgccgtcaccgctgacaagcgcactgtggcccttccgcatccataggctgccgccgcgctcccccgccacgagaccctgccccacttcggatgccctttcgaccacacatccccctccgcttcctactgcctcacctccagcaccgcattgcccgcccacccagacctccacgtagatcgctttcctactctctcgcggcggcgttgtcagcggctggaacagagtccgaggaggaggcggttgtgggtagggacgcgccgttagcccctccacgcccaggcggggcgggaagtggagcgcctgggcgtggctgggcacagcagggggcgctcgatgaggaaagtgcggagctcgagcggaaggcctctatcgtcgcacggttcaggcactgccatgagcttctgtggcagactaggtggcgggagatgcgccacgggttggcccagatggtggatgaacaaggttctgattctgctccgactctatgtgatattctgtggtgtggattcagggaatgggattcaagcagcattgtgtgggatgctctagcaaatagttatgctagagctcagatgaatcatgatgctctttatgttcttagtaaaatgaacagcctaaacatgcaaatctcaataaccacctatgatagtttattgtacagtctaagaaaggcagatgtggcactggcgatttttaaagagatggagtcatgtggtattccccccagtgattattcccatggcattctcatagatggactctgcaagcaaggtaaaattggagaagctttatctttccttcaggaaacaaggaaagaggggaaattcaaacccttgggaatgacctttaacacccttatgtccgcattgtgtaattgggggttcattcaggatgcaaaatcagttttctgcctgatgttgaagtatggattaaatccaagcaggcacacatattcaaccattatacatggtctatgtaaagtaggttctgtaaatgaagcattcgatatttttcagagtgtgacagaagaaggaatggaacttgatattgtcacttgcaacagccttattaatggctttcgcttgcatgggcatacaagagaaattccaaaaatgattgagatgatgaggggcctaggtgtcgaacccgatgttgttacttatactatacttattactggccactgtgaaggcggtgatgtcgaagaagggatgaggataagaaaggacatcttaggccaaggtatagagttgaatattgtcacatatagcgtccttatcaatgctctcttcaagaagggcctgttctatgaggtcgaaaacctatttggtgagatatgcagtattggtctggaattggatgtcattgcatattccatcctcatccatgggttctgcaagctaggagaaattggaagagcacttcaagtctggaatctaatgtgctgttctcagagggtaattccaacttcagtaaaccatgtatctattcttctaggcctttgcaagaaaggattccttgatgaagcgaggtcatatttggaaactgtggctagcaaatatcagccatccgatgtagtcctctacaatgtagttattgatggttatgcaaaagtgggtgatattggtaatgctgttcagctgtatgatgcgattattatggctggtatgtgcccaaccattgtaacatgcaactctcttctatatggctactgcaaatttggggatctacatatggcagaaagctattttatggctattcagttaagtgacctgctgccaacaacagttacctacactactttgatggatgcactctctgaagctgggaaagttcattccatgctaagtatttttaaagaaatgactggaaaaggtatcagaccaaatgcaataacttacagtgtagttattaaaggactttgtaagcagttaatgttccacgatgccaaaaatgttcttgatgatatgtatagagaaggttttgatgctgatccaataccttacaacacgcttatacaaggtttttgtgaaactcaggatgctaaaaatgctttctacgtgtatgaactaatggtatgtcgtggagtgatgccctctcctgttacttataacttgcttgttaatgtgctgtgcttaaagggactagttattcacgctgaaatgaaactggagtccttcagaaaacagggtgccgagctgagaaaatttgcatatacaacacttatcaaagctcaatgtgcaaaagggatgccttacaaggctattatgtgggttggcaagcttctagatgcagggtttgaggcatctattgaagacttcagtgcggcaatcaaccgactatgcaaaagacagttcaccagagaagctttgatgctcatatcgatcatgttatctgttggtgtttatccagatattcaactataccgtgtactgggtacagctgtacagaagaaaaatgagtcattctatctacccatattgcaagcccttgctatcaaaactggtatttagtactttgagtctgaagggcaggcctggtgcagtggtgatagctgtctgactaagtcaccatgtcacgggttcgaagcagcctctccgcatctgcggaggaaggcttgccttggtttatcccgtcgcatctgcggaggtggtgctgctgtgcatcgctgtgggctgtgaggcggaggcactgcatctcgctgtgaagtggactgctccatcctctctatgatcctgcaccatcaggggttcgggtgacctttgaggatggtggttaactggttaccttgaagatcccggtgccattgattctttgctacttggcctctccactgctggcaacagacccagggaatgaattagatacctattcttgaccccttcccgcccaaggaggagcaggcaggaactccggtatatggtggtaattggtggcacctttatgtacttctttaggggcagcctaccatggcaggggctgaaagcaggatcaagaagcagaaatatgacaaaaattagtgcgaaatggatactcccatggaggataccagttttgactggaccattttgaagtatcctcagataggctgcaacctgcggatgaaggcaagtgacagaactagtggaggtgttggaccttcaatggatacaattgagaagaccccaggaggtgtccgatagaaggaatcctagtggttatgtgaatccgagtggcaattatgcccaatgaccacgtgagaacatatgtatgtcattgaacgaaattggatggctcggtccgtgctccaccgtgttgcgtcggcggcgc

SEQ ID NO: 10039 - DNA, 6676 bp, Zea Mays
acacttttccttttcatacgaccacacacaagcaaaaacctcgaccggaccacacgcggcgccgccgctccgccgctaagcctccttcccatgcccgccgctaagcttccttcccatgcccgccgtcaccgctgacaagcgcactgtggcccttccgcatccataggctgccgccgcgctcccccgccacgagaccctgccccacttcggatgccctttcgaccacacatccccctccgcttcctactgcctcacctccagcaccgcattgcccgcccacccagacctccacgtagatcgctttcctactctctcgcggcggcgttgtcagcggctggaacagagtccgaggaggaggcggttgtgggtagggacgcgccgttagcccctccacgcccaggcggggcgggaagtggagcgcctgggcgtggctgggcacagcagggggcgctcgatgaggaaagtgcggagctcgagcggaaggcctctatcgtcgcacggttcaggcactgccatgagcttctgtggcagactaggtggcgggagatgcgccacgggttggcccagatggtggatgaacaagggaatgggattcaagcagcattgtgtgggatgctctagcaaatagttatgctagagctcagatgaatcatgatgctctttatgttcttagtaaaatgaacagcctaaacatgcaaatctcaataaccacctatgatagtttattgtacagtctaagaaaggcagatgtggcactggcgatttttaaagagatggagtcatgtggtattccccccagtgattattcccatggcattctcatagatggactctgcaagcaaggtaaaattggagaagctttatctttccttcaggaaacaaggaaagaggggaaattcaaacccttgggaatgacctttaacacccttatgtccgcattgtgtaattgggggttcattcaggatgcaaaatcagttttctgcctgatgttgaagtatggattaaatccaagcaggcacacatattcaaccattatacatggtctatgtaaagtaggttctgtaaatgaagcattcgatatttttcagagtgtgacagaagaaggaatggaacttgatattgtcacttgcaacagccttattaatggctttcgcttgcatgggcatacaagagaaattccaaaaatgattgagatgatgaggggcctaggtgtcgaacccgatgttgttacttatactatacttattactggccactgtgaaggcggtgatgtcgaagaagggatgaggataagaaaggacatcttaggccaaggtatagagttgaatattgtcacatatagcgtccttatcaatgctctcttcaagaagggcctgttctatgaggtcgaaaacctatttggtgagatatgcagtattggtctggaattggatgtcattgcatattccatcctcatccatgggttctgcaagctaggagaaattggaagagcacttcaagtctggaatctaatgtgctgttctcagagggtaattccaacttcagtaaaccatgtatctattcttctaggcctttgcaagaaaggattccttgatgaagcgaggtcatatttggaaactgtggctagcaaatatcagccatccgatgtagtcctctacaatgtagttattgatggttatgcaaaagtgggtgatattggtaatgctgttcagctgtatgatgcgattattatggctggtatgtgcccaaccattgtaacatgcaactctcttctatatggctactgcaaatttggggatctacatatggcagaaagctattttatggctattcagttaagtgacctgctgccaacaacagttacctacactactttgatggatgcactctctgaagctgggaaagttcattccatgctaagtatttttaaagaaatgactggaaaaggtatcagaccaaatgcaataacttacagtgtagttattaaaggactttgtaagcagttaatgttccacgatgccaaaaatgttcttgatgatatgtatagagaaggttttgatgctgatccaataccttacaacacgcttatacaaggtttttgtgaaactcaggatgctaaaaatgctttctacgtgtatgaactaatggtatgtcgtggagtgatgccctctcctgttacttataacttgcttgttaatgtgctgtgcttaaagggactagttattcacgctgaaatgaaactggagtccttcagaaaacagggtgccgagctgagaaaatttgcatatacaacacttatcaaagctcaatgtgcaaaagggatgccttacaaggctattatgtgggttggcaagcttctagatgcagggtttgaggcatctattgaagacttcagtgcggcaatcaaccgactatgcaaaagacagttcaccagagaagctttgatgctcatatcgatcatgttatctgttggtgtttatccagatattcaactataccgtgtactgggtacagctgtacagaagaaaaatgagtcattctatctacccatattgcaagcccttgctatcaaaactggtatttagtactttgagtctgaagggcaggcctggtgcagtggtgatagctgtctgactaagtcaccatgtcacgggttcgaagcagcctctccgcatctgcggaggaaggcttgccttggtttatcccgtcgcatctgcggaggtggtgctgctgtgcatcgctgtgggctgtgaggcggaggcactgcatctcgctgtgaagtggactgctccatcctctctatgatcctgcaccatcaggggttcgggtgacctttgaggatggtggttaactggttaccttgaagatcccggtgccattgattctttgctacttggcctctccactgctggcaacagacccagggaatgaattagatacctattcttgaccccttcccgcccaaggaggagcaggcaggaactccggtatatggtggtaattggtggcacctttatgtacttctttaggggcagcctaccatggcaggggctgaaagcaggatcaagaagcagaaatatgacaaaaattagtgcgaaatggatactcccatggaggataccagttttgactggaccattttgaagtatcctcagataggctgcaacctgcggatgaaggcaagtgacagaactagtggaggtgttggaccttcaatggatacaattgagaagaccccaggaggtgtccgatagaaggaatcctagtggttatgtgaatccgagtggcaattatgcccaatgaccacgtgagaacatatgtatgtcattgaacgaaattgtaagttaaatttccctccgcgccttgtatgatcgatgaacattcactgctgttgtatcttccctcatgctaggggcggatccaaggggtgggccatggccccaccttaatttttttaacctcttatacctaggtttaggtacacaccaaaataaacaattttttgtatagttagcgtggacaaatctaataaaaactaggttttgatctatttttctgtcgacgcttcactgctcagtccactcttcacctgagccatttgattctcttccctagcgcaagcccagttgtggctcactcgcttcttcgatcatcgactgaccagtaagtcggtgacctaacccgcctgctgcagcgcaccttgccttctcatcactcatcagctcgtcgtctcgtcaggatcctatagacaatgttgatattttgactcctagtccgcaccagtagatgggcaagttgttggtgggaccgtggcgtcacctgtccctcgctgactcattagagtcccatcgcgccgttgcaacacgacaatgggtgtcgcttgccgtcaccgtcatctatcgctaccttgcttcctgcactcgctcctcctagctgtcgtcgtctcaccaacaccatctcacgacaatttcgatgactcgccagaacgacgcgccgatgcggctgctccgccctagtgcctcgtcctcagtcagtgcacctattttttttctctctagctctccttttggtagccaaaaaagttttttggtattcatatcattttggaaacactagatattatcattaatctatatttatggtctagtctggtgatttgtctcttgcactttcggccccacctagaattttgttctgcgtccgccactgcctcatgcagtcctcgcacatctcatgagtttttcctgcacatgttgtgttacttgtagctgtactgacactcttgctatacaggataaatatgtagccgcactcttgtacagaattggttgatgactataaaattagcagttctagagctatttgtgttttccttgattggtagctcatgccctgtattcctggatagaagaactttgtcaagaactgtacaattcgtagatggcaagctgtctgaacttttatcgtagagcagttccattttatagcattgatctgtgttttcgcacgaacacctgtgtgtcatgtgtggcatattagttgttttagtttctttttccctataaatctgtaataggtaccaactcaccacgtatagtgttctacacgaccttttaattagctggtgattacttcctattttgtggtatcttatgcgcacaacgctctttctgaggatcaaaccttctaatcacaattaacagttgggctgtcctagtgataataccgctgaaggcgctgttttcatattcgttgacagtaggtttacatacgagtgtccagtgagtacatctgctgatgtgtttgtttaagggttttgtgggctttctataaagtttgttggaagccatgttaggaccattgattgatcggtaacccctttgttgatgagtgcaatgtgtgaaaagaaaattgttgctcctcggttcaatccctggcaaaaagaagaaaaatgacaagcgctgttgactgtgttgagatccctaattcattcgtgcttcataggttgattctataatgtcttgtgatgtatatttgtaataattgatgaactccatatttgtgcgttttctgttttttagaagaaaaaaatataattgttctcatgtcatatagttttttgtgcagccatgcactattcaacacggtaagggctcgtttggttgcatgataaattggaggtaagaatcctctccaagtcccacgcgaccaaacaagccctaatgaatttgtagtgcggctgcttaattcacatgcgagagcccacggattcatatacttagggcttgtttggataattttggattggagtggattgaggtggtataaggtgtattgaagtgtaatataaactaatttccctttcaatccctaaaatacacttcaatccacttcaatctctctttatccaaacaaggccctttgcttacttgtctggtgggcaacgcttgctgtgatggccatttaatagagtaggatcagcccgtggagtcgaaacggatcagaggtggatcggatagagctgaataaaatcagtatgggttagagtggtattgggctcagtcccaaatagccgatacggttggagtggggttgggggttggatcctgacccattatcaggccttataactgtcttatcttttagatacataaccacacattattatatattttttgtaatatctaactaactacagatctatgattgtactgtgtggtacacagctcttactaataggaacaattttctgtatatcctggtgcaccatcaagtattcagcgatagcaattaaagcatgggaaaatgaagtgccacatgccattccatacctttctgttttgctcctgttcaagggtcagaatgtgtgtctgctttcgatgagcagagtttaggagtcccctgtatctggaaaaggaatacgtgttctcttcttcataaaaccgtcaatggcacaggctggctgatggcgctaagaatttactctgagctatcagcatcagccaccgctctcacgtcggtgactggagtttgcaatctctactacttattaagtaagcaatagtagtctgcctctgacgtgttctgccgttctgccgtctacgtgttctgccatctacgtgcgcccccagggccagcaaaaatttacacgtactcacgagttgaatctagatagttcagccactaaacacataacaacagagttcttattgttgcgtccgagccaacgcttataagccgctctatgtctcctttactagccagtatggtactaatttttttttgcaagacacaacaccacagcagtaccggcgctctgggctgaaattttggtgcggcccatacgtttggggcggcccatactccaccgcagcagtcttcttccgcacgacgtcgcgcccaaccgctcggtcagctcgtggagagcccggaggagagttccactacgcaattcgctacctcggcttcgacatcggcgacgtgcagagcccggaggacatcgtcgccgcggaacggctcgtttttttcccggtgtcggcgccttcggctccgccatggacgtcctcaacaggacgggcatgggccgacgcactccgtgagtacatccaaagggaccgccccttcctaggcatctgcctcggtctccattctctccactcgctccccacacctctct

SEQ ID NO: 10040 - DNA, 6748 bp, Zea Mays
acacttttccttttcatacgaccacacacaagcaaaaacctcgaccggaccacacgcggcgccgccgctccgccgctaagcctccttcccatgcccgccgctaagcttccttcccatgcccgccgtcaccgctgacaagcgcactgtggcccttccgcatccataggctgccgccgcgctcccccgccacgagaccctgccccacttcggatgccctttcgaccacacatccccctccgcttcctactgcctcacctccagcaccgcattgcccgcccacccagacctccacgtagatcgctttcctactctctcgcggcggcgttgtcagcggctggaacagagtccgaggaggaggcggttgtgggtagggacgcgccgttagcccctccacgcccaggcggggcgggaagtggagcgcctgggcgtggctgggcacagcagggggcgctcgatgaggaaagtgcggagctcgagcggaaggcctctatcgtcgcacggttcaggcactgccatgagcttctgtggcagactaggtggcgggagatgcgccacgggttggcccagatggtggatgaacaaggttctgattctgctccgactctatgtgatattctgtggtgtggattcagggaatgggattcaagcagcattgtgtgggatgctctagcaaatagttatgctagagctcagatgaatcatgatgctctttatgttcttagtaaaatgaacagcctaaacatgcaaatctcaataaccacctatgatagtttattgtacagtctaagaaaggcagatgtggcactggcgatttttaaagagatggagtcatgtggtattccccccagtgattattcccatggcattctcatagatggactctgcaagcaaggtaaaattggagaagctttatctttccttcaggaaacaaggaaagaggggaaattcaaacccttgggaatgacctttaacacccttatgtccgcattgtgtaattgggggttcattcaggatgcaaaatcagttttctgcctgatgttgaagtatggattaaatccaagcaggcacacatattcaaccattatacatggtctatgtaaagtaggttctgtaaatgaagcattcgatatttttcagagtgtgacagaagaaggaatggaacttgatattgtcacttgcaacagccttattaatggctttcgcttgcatgggcatacaagagaaattccaaaaatgattgagatgatgaggggcctaggtgtcgaacccgatgttgttacttatactatacttattactggccactgtgaaggcggtgatgtcgaagaagggatgaggataagaaaggacatcttaggccaaggtatagagttgaatattgtcacatatagcgtccttatcaatgctctcttcaagaagggcctgttctatgaggtcgaaaacctatttggtgagatatgcagtattggtctggaattggatgtcattgcatattccatcctcatccatgggttctgcaagctaggagaaattggaagagcacttcaagtctggaatctaatgtgctgttctcagagggtaattccaacttcagtaaaccatgtatctattcttctaggcctttgcaagaaaggattccttgatgaagcgaggtcatatttggaaactgtggctagcaaatatcagccatccgatgtagtcctctacaatgtagttattgatggttatgcaaaagtgggtgatattggtaatgctgttcagctgtatgatgcgattattatggctggtatgtgcccaaccattgtaacatgcaactctcttctatatggctactgcaaatttggggatctacatatggcagaaagctattttatggctattcagttaagtgacctgctgccaacaacagttacctacactactttgatggatgcactctctgaagctgggaaagttcattccatgctaagtatttttaaagaaatgactggaaaaggtatcagaccaaatgcaataacttacagtgtagttattaaaggactttgtaagcagttaatgttccacgatgccaaaaatgttcttgatgatatgtatagagaaggttttgatgctgatccaataccttacaacacgcttatacaaggtttttgtgaaactcaggatgctaaaaatgctttctacgtgtatgaactaatggtatgtcgtggagtgatgccctctcctgttacttataacttgcttgttaatgtgctgtgcttaaagggactagttattcacgctgaaatgaaactggagtccttcagaaaacagggtgccgagctgagaaaatttgcatatacaacacttatcaaagctcaatgtgcaaaagggatgccttacaaggctattatgtgggttggcaagcttctagatgcagggtttgaggcatctattgaagacttcagtgcggcaatcaaccgactatgcaaaagacagttcaccagagaagctttgatgctcatatcgatcatgttatctgttggtgtttatccagatattcaactataccgtgtactgggtacagctgtacagaagaaaaatgagtcattctatctacccatattgcaagcccttgctatcaaaactggtatttagtactttgagtctgaagggcaggcctggtgcagtggtgatagctgtctgactaagtcaccatgtcacgggttcgaagcagcctctccgcatctgcggaggaaggcttgccttggtttatcccgtcgcatctgcggaggtggtgctgctgtgcatcgctgtgggctgtgaggcggaggcactgcatctcgctgtgaagtggactgctccatcctctctatgatcctgcaccatcaggggttcgggtgacctttgaggatggtggttaactggttaccttgaagatcccggtgccattgattctttgctacttggcctctccactgctggcaacagacccagcatggaccagggaatgaattagatacctattcttgaccccttcccgcccaaggaggagcaggcaggaactccggtatatggtggtaattggtggcacctttatgtacttctttaggggcagcctaccatggcaggggctgaaagcaggatcaagaagcagaaatatgacaaaaattagtgcgaaatggatactcccatggaggtggcccatacatgataccagttttgactggaccattttgaagtatcctcagataggctgcaacctgcggatgaaggcaagtgacagaactagtggaggtgttggaccttcaatggatacaattgagaagaccccaggaggtgtccgatagaaggaatcctagtggttatgtgaatccgagtggcaattatgcccaatgaccacgtgagaacatatgtatgtcattgaacgaaattgtaagttaaatttccctccgcgccttgtatgatcgatgaacattcactgctgttgtatcttccctcatgctaggggcggatccaaggggtgggccatggccccaccttaatttttttaacctcttatacctaggtttaggtacacaccaaaataaacaattttttgtatagttagcgtggacaaatctaataaaaactaggttttgatctatttttctgtcgacgcttcactgctcagtccactcttcacctgagccatttgattctcttccctagcgcaagcccagttgtggctcactcgcttcttcgatcatcgactgaccagtaagtcggtgacctaacccgcctgctgcagcgcaccttgccttctcatcactcatcagctcgtcgtctcgtcaggatcctatagacaatgttgatattttgactcctagtccgcaccagtagatgggcaagttgttggtgggaccgtggcgtcacctgtccctcgctgactcattagagtcccatcgcgccgttgcaacacgacaatgggtgtcgcttgccgtcaccgtcatctatcgctaccttgcttcctgcactcgctcctcctagctgtcgtcgtctcaccaacaccatctcacgacaatttcgatgactcgccagaacgacgcgccgatgcggctgctccgccctagtgcctcgtcctcagtcagtgcacctattttttttctctctagctctccttttggtagccaaaaaagttttttggtattcatatcattttggaaacactagatattatcattaatctatatttatggtctagtctggtgatttgtctcttgcactttcggccccacctagaattttgttctgcgtccgccactgcctcatgcagtcctcgcacatctcatgagtttttcctgcacatgttgtgttacttgtagctgtactgacactcttgctatacaggataaatatgtagccgcactcttgtacagaattggttgatgactataaaattagcagttctagagctatttgtgttttccttgattggtagctcatgccctgtattcctggatagaagaactttgtcaagaactgtacaattcgtagatggcaagctgtctgaacttttatcgtagagcagttccattttatagcattgatctgtgttttcgcacgaacacctgtgtgtcatgtgtggcatattagttgttttagtttctttttccctataaatctgtaataggtaccaactcaccacgtatagtgttctacacgaccttttaattagctggtgattacttcctattttgtggtatcttatgcgcacaacgctctttctgaggatcaaaccttctaatcacaattaacagttgggctgtcctagtgataataccgctgaaggcgctgttttcatattcgttgacagtaggtttacatacgagtgtccagtgagtacatctgctgatgtgtttgtttaagggttttgtgggctttctataaagtttgttggaagccatgttaggaccattgattgatcggtaacccctttgttgatgagtgcaatgtgtgaaaagaaaattgttgctcctcggttcaatccctggcaaaaagaagaaaaatgacaagcgctgttgactgtgttgagatccctaattcattcgtgcttcataggttgattctataatgtcttgtgatgtatatttgtaataattgatgaactccatatttgtgcgttttctgttttttagaagaaaaaaatataattgttctcatgtcatatagttttttgtgcagccatgcactattcaacacggtaagggctcgtttggttgcatgataaattggaggtaagaatcctctccaagtcccacgcgaccaaacaagccctaatgaatttgtagtgcggctgcttaattcacatgcgagagcccacggattcatatacttagggcttgtttggataattttggattggagtggattgaggtggtataaggtgtattgaagtgtaatataaactaatttccctttcaatccctaaaatacacttcaatccacttcaatctctctttatccaaacaaggccctttgcttacttgtctggtgggcaacgcttgctgtgatggccatttaatagagtaggatcagcccgtggagtcgaaacggatcagaggtggatcggatagagctgaataaaatcagtatgggttagagtggtattgggctcagtcccaaatagccgatacggttggagtggggttgggggttggatcctgacccattatcaggccttataactgtcttatcttttagatacataaccacacattattatatattttttgtaatatctaactaactacagatctatgattgtactgtgtggtacacagctcttactaataggaacaattttctgtatatcctggtgcaccatcaagtattcagcgatagcaattaaagcatgggaaaatgaagtgccacatgccattccatacctttctgttttgctcctgttcaagggtcagaatgtgtgtctgctttcgatgagcagagtttaggagtcccctgtatctggaaaaggaatacgtgttctcttcttcataaaaccgtcaatggcacaggctggctgatggcgctaagaatttactctgagctatcagcatcagccaccgctctcacgtcggtgactggagtttgcaatctctactacttattaagtaagcaatagtagtctgcctctgacgtgttctgccgttctgccgtctacgtgttctgccatctacgtgcgcccccagggccagcaaaaatttacacgtactcacgagttgaatctagatagttcagccactaaacacataacaacagagttcttattgttgcgtccgagccaacgcttataagccgctctatgtctcctttactagccagtatggtactaatttttttttgcaagacacaacaccacagcagtaccggcgctctgggctgaaattttggtgcggcccatacgtttggggcggcccatactccaccgcagcagtcttcttccgcacgacgtcgcgcccaaccgctcggtcagctcgtggagagcccggaggagagttccactacgcaattcgctacctcggcttcgacatcggcgacgtgcagagcccggaggacatcgtcgccgcggaacggctcgtttttttcccggtgtcggcgccttcggctccgccatggacgtcctcaacaggacgggcatgggccgacgcactccgtgagtacatccaaagggaccgccccttcctaggcatctgcctcggtctccattctctccactcgctccccacacctctct

SEQ ID NO: 10041 - DNA, 6738 bp, Zea Mays
acacttttccttttcatacgaccacacacaagcaaaaacctcgaccggaccacacgcggcgccgccgctccgccgctaagcctccttcccatgcccgccgctaagcttccttcccatgcccgccgtcaccgctgacaagcgcactgtggcccttccgcatccataggctgccgccgcgctcccccgccacgagaccctgccccacttcggatgccctttcgaccacacatccccctccgcttcctactgcctcacctccagcaccgcattgcccgcccacccagacctccacgtagatcgctttcctactctctcgcggcggcgttgtcagcggctggaacagagtccgaggaggaggcggttgtgggtagggacgcgccgttagcccctccacgcccaggcggggcgggaagtggagcgcctgggcgtggctgggcacagcagggggcgctcgatgaggaaagtgcggagctcgagcggaaggcctctatcgtcgcacggttcaggcactgccatgagcttctgtggcagactaggtggcgggagatgcgccacgggttggcccagatggtggatgaacaaggttctgattctgctccgactctatgtgatattctgtggtgtggattcagggaatgggattcaagcagcattgtgtgggatgctctagcaaatagttatgctagagctcagatgaatcatgatgctctttatgttcttagtaaaatgaacagcctaaacatgcaaatctcaataaccacctatgatagtttattgtacagtctaagaaaggcagatgtggcactggcgatttttaaagagatggagtcatgtggtattccccccagtgattattcccatggcattctcatagatggactctgcaagcaaggtaaaattggagaagctttatctttccttcaggaaacaaggaaagaggggaaattcaaacccttgggaatgacctttaacacccttatgtccgcattgtgtaattgggggttcattcaggatgcaaaatcagttttctgcctgatgttgaagtatggattaaatccaagcaggcacacatattcaaccattatacatggtctatgtaaagtaggttctgtaaatgaagcattcgatatttttcagagtgtgacagaagaaggaatggaacttgatattgtcacttgcaacagccttattaatggctttcgcttgcatgggcatacaagagaaattccaaaaatgattgagatgatgaggggcctaggtgtcgaacccgatgttgttacttatactatacttattactggccactgtgaaggcggtgatgtcgaagaagggatgaggataagaaaggacatcttaggccaaggtatagagttgaatattgtcacatatagcgtccttatcaatgctctcttcaagaagggcctgttctatgaggtcgaaaacctatttggtgagatatgcagtattggtctggaattggatgtcattgcatattccatcctcatccatgggttctgcaagctaggagaaattggaagagcacttcaagtctggaatctaatgtgctgttctcagagggtaattccaacttcagtaaaccatgtatctattcttctaggcctttgcaagaaaggattccttgatgaagcgaggtcatatttggaaactgtggctagcaaatatcagccatccgatgtagtcctctacaatgtagttattgatggttatgcaaaagtgggtgatattggtaatgctgttcagctgtatgatgcgattattatggctggtatgtgcccaaccattgtaacatgcaactctcttctatatggctactgcaaatttggggatctacatatggcagaaagctattttatggctattcagttaagtgacctgctgccaacaacagttacctacactactttgatggatgcactctctgaagctgggaaagttcattccatgctaagtatttttaaagaaatgactggaaaaggtatcagaccaaatgcaataacttacagtgtagttattaaaggactttgtaagcagttaatgttccacgatgccaaaaatgttcttgatgatatgtatagagaaggttttgatgctgatccaataccttacaacacgcttatacaaggtttttgtgaaactcaggatgctaaaaatgctttctacgtgtatgaactaatggtatgtcgtggagtgatgccctctcctgttacttataacttgcttgttaatgtgctgtgcttaaagggactagttattcacgctgaaatgaaactggagtccttcagaaaacagggtgccgagctgagaaaatttgcatatacaacacttatcaaagctcaatgtgcaaaagggatgccttacaaggctattatgtgggttggcaagcttctagatgcagggtttgaggcatctattgaagacttcagtgcggcaatcaaccgactatgcaaaagacagttcaccagagaagctttgatgctcatatcgatcatgttatctgttggtgtttatccagatattcaactataccgtgtactgggtacagctgtacagaagaaaaatgagtcattctatctacccatattgcaagcccttgctatcaaaactggtatttagtactttgagtctgaagggcaggcctggtgcagtggtgatagctgtctgactaagtcaccatgtcacgggttcgaagcagcctctccgcatctgcggaggaaggcttgccttggtttatcccgtcgcatctgcggaggtggtgctgctgtgcatcgctgtgggctgtgaggcggaggcactgcatctcgctgtgaagtggactgctccatcctctctatgatcctgcaccatcaggggttcgggtgacctttgaggatggtggttaactggttaccttgaagatcccggtgccattgattctttgctacttggcctctccactgctggcaacagacccagggaatgaattagatacctattcttgaccccttcccgcccaaggaggagcaggcaggaactccggtatatggtggtaattggtggcacctttatgtacttctttaggggcagcctaccatggcaggggctgaaagcaggatcaagaagcagaaatatgacaaaaattagtgcgaaatggatactcccatggaggtggcccatacatgataccagttttgactggaccattttgaagtatcctcagataggctgcaacctgcggatgaaggcaagtgacagaactagtggaggtgttggaccttcaatggatacaattgagaagaccccaggaggtgtccgatagaaggaatcctagtggttatgtgaatccgagtggcaattatgcccaatgaccacgtgagaacatatgtatgtcattgaacgaaattgtaagttaaatttccctccgcgccttgtatgatcgatgaacattcactgctgttgtatcttccctcatgctaggggcggatccaaggggtgggccatggccccaccttaatttttttaacctcttatacctaggtttaggtacacaccaaaataaacaattttttgtatagttagcgtggacaaatctaataaaaactaggttttgatctatttttctgtcgacgcttcactgctcagtccactcttcacctgagccatttgattctcttccctagcgcaagcccagttgtggctcactcgcttcttcgatcatcgactgaccagtaagtcggtgacctaacccgcctgctgcagcgcaccttgccttctcatcactcatcagctcgtcgtctcgtcaggatcctatagacaatgttgatattttgactcctagtccgcaccagtagatgggcaagttgttggtgggaccgtggcgtcacctgtccctcgctgactcattagagtcccatcgcgccgttgcaacacgacaatgggtgtcgcttgccgtcaccgtcatctatcgctaccttgcttcctgcactcgctcctcctagctgtcgtcgtctcaccaacaccatctcacgacaatttcgatgactcgccagaacgacgcgccgatgcggctgctccgccctagtgcctcgtcctcagtcagtgcacctattttttttctctctagctctccttttggtagccaaaaaagttttttggtattcatatcattttggaaacactagatattatcattaatctatatttatggtctagtctggtgatttgtctcttgcactttcggccccacctagaattttgttctgcgtccgccactgcctcatgcagtcctcgcacatctcatgagtttttcctgcacatgttgtgttacttgtagctgtactgacactcttgctatacaggataaatatgtagccgcactcttgtacagaattggttgatgactataaaattagcagttctagagctatttgtgttttccttgattggtagctcatgccctgtattcctggatagaagaactttgtcaagaactgtacaattcgtagatggcaagctgtctgaacttttatcgtagagcagttccattttatagcattgatctgtgttttcgcacgaacacctgtgtgtcatgtgtggcatattagttgttttagtttctttttccctataaatctgtaataggtaccaactcaccacgtatagtgttctacacgaccttttaattagctggtgattacttcctattttgtggtatcttatgcgcacaacgctctttctgaggatcaaaccttctaatcacaattaacagttgggctgtcctagtgataataccgctgaaggcgctgttttcatattcgttgacagtaggtttacatacgagtgtccagtgagtacatctgctgatgtgtttgtttaagggttttgtgggctttctataaagtttgttggaagccatgttaggaccattgattgatcggtaacccctttgttgatgagtgcaatgtgtgaaaagaaaattgttgctcctcggttcaatccctggcaaaaagaagaaaaatgacaagcgctgttgactgtgttgagatccctaattcattcgtgcttcataggttgattctataatgtcttgtgatgtatatttgtaataattgatgaactccatatttgtgcgttttctgttttttagaagaaaaaaatataattgttctcatgtcatatagttttttgtgcagccatgcactattcaacacggtaagggctcgtttggttgcatgataaattggaggtaagaatcctctccaagtcccacgcgaccaaacaagccctaatgaatttgtagtgcggctgcttaattcacatgcgagagcccacggattcatatacttagggcttgtttggataattttggattggagtggattgaggtggtataaggtgtattgaagtgtaatataaactaatttccctttcaatccctaaaatacacttcaatccacttcaatctctctttatccaaacaaggccctttgcttacttgtctggtgggcaacgcttgctgtgatggccatttaatagagtaggatcagcccgtggagtcgaaacggatcagaggtggatcggatagagctgaataaaatcagtatgggttagagtggtattgggctcagtcccaaatagccgatacggttggagtggggttgggggttggatcctgacccattatcaggccttataactgtcttatcttttagatacataaccacacattattatatattttttgtaatatctaactaactacagatctatgattgtactgtgtggtacacagctcttactaataggaacaattttctgtatatcctggtgcaccatcaagtattcagcgatagcaattaaagcatgggaaaatgaagtgccacatgccattccatacctttctgttttgctcctgttcaagggtcagaatgtgtgtctgctttcgatgagcagagtttaggagtcccctgtatctggaaaaggaatacgtgttctcttcttcataaaaccgtcaatggcacaggctggctgatggcgctaagaatttactctgagctatcagcatcagccaccgctctcacgtcggtgactggagtttgcaatctctactacttattaagtaagcaatagtagtctgcctctgacgtgttctgccgttctgccgtctacgtgttctgccatctacgtgcgcccccagggccagcaaaaatttacacgtactcacgagttgaatctagatagttcagccactaaacacataacaacagagttcttattgttgcgtccgagccaacgcttataagccgctctatgtctcctttactagccagtatggtactaatttttttttgcaagacacaacaccacagcagtaccggcgctctgggctgaaattttggtgcggcccatacgtttggggcggcccatactccaccgcagcagtcttcttccgcacgacgtcgcgcccaaccgctcggtcagctcgtggagagcccggaggagagttccactacgcaattcgctacctcggcttcgacatcggcgacgtgcagagcccggaggacatcgtcgccgcggaacggctcgtttttttcccggtgtcggcgccttcggctccgccatggacgtcctcaacaggacgggcatgggccgacgcactccgtgagtacatccaaagggaccgccccttcctaggcatctgcctcggtctccattctctccactcgctccccacacctctct

SEQ ID NO: 10042 - DNA, 4937 bp, Zea Mays
acacttttccttttcatacgaccacacacaagcaaaaacctcgaccggaccacacgcggcgccgccgctccgccgctaagcctccttcccatgcccgccgctaagcttccttcccatgcccgccgtcaccgctgacaagcgcactgtggcccttccgcatccataggctgccgccgcgctcccccgccacgagaccctgccccacttcggatgccctttcgaccacacatccccctccgcttcctactgcctcacctccagcaccgcattgcccgcccacccagacctccacgtagatcgctttcctactctctcgcggcggcgttgtcagcggctggaacagagtccgaggaggaggcggttgtgggtagggacgcgccgttagcccctccacgcccaggcggggcgggaagtggagcgcctgggcgtggctgggcacagcagggggcgctcgatgaggaaagtgcggagctcgagcggaaggcctctatcgtcgcacggttcaggcactgccatgagcttctgtggcagactaggtggcgggagatgcgccacgggttggcccagatggtggatgaacaaggttctgattctgctccgactctatgtgatattctgtggtgtggattcagggaatgggattcaagcagcattgtgtgggatgctctagcaaatagttatgctagagctcagatgaatcatgatgctctttatgttcttagtaaaatgaacagcctaaacatgcaaatctcaataaccacctatgatagtttattgtacagtctaagaaaggcagatgtggcactggcgatttttaaagagatggagtcatgtggtattccccccagtgattattcccatggcattctcatagatggactctgcaagcaaggtaaaattggagaagctttatctttccttcaggaaacaaggaaagaggggaaattcaaacccttgggaatgacctttaacacccttatgtccgcattgtgtaattgggggttcattcaggatgcaaaatcagttttctgcctgatgttgaagtatggattaaatccaagcaggcacacatattcaaccattatacatggtctatgtaaagtaggttctgtaaatgaagcattcgatatttttcagagtgtgacagaagaaggaatggaacttgatattgtcacttgcaacagccttattaatggctttcgcttgcatgggcatacaagagaaattccaaaaatgattgagatgatgaggggcctaggtgtcgaacccgatgttgttacttatactatacttattactggccactgtgaaggcggtgatgtcgaagaagggatgaggataagaaaggacatcttaggccaaggtatagagttgaatattgtcacatatagcgtccttatcaatgctctcttcaagaagggcctgttctatgaggtcgaaaacctatttggtgagatatgcagtattggtctggaattggatgtcattgcatattccatcctcatccatgggttctgcaagctaggagaaattggaagagcacttcaagtctggaatctaatgtgctgttctcagagggtaattccaacttcagtaaaccatgtatctattcttctaggcctttgcaagaaaggattccttgatgaagcgaggtcatatttggaaactgtggctagcaaatatcagccatccgatgtagtcctctacaatgtagttattgatggttatgcaaaagtgggtgatattggtaatgctgttcagctgtatgatgcgattattatggctggtatgtgcccaaccattgtaacatgcaactctcttctatatggctactgcaaatttggggatctacatatggcagaaagctattttatggctattcagttaagtgacctgctgccaacaacagttacctacactactttgatggatgcactctctgaagctgggaaagttcattccatgctaagtatttttaaagaaatgactggaaaaggtatcagaccaaatgcaataacttacagtgtagttattaaaggactttgtaagcagttaatgttccacgatgccaaaaatgttcttgatgatatgtatagagaaggttttgatgctgatccaataccttacaacacgcttatacaaggtttttgtgaaactcaggatgctaaaaatgctttctacgtgtatgaactaatggtatgtcgtggagtgatgccctctcctgttacttataacttgcttgttaatgtgctgtgcttaaagggactagttattcacgctgaaatgaaactggagtccttcagaaaacagggtgccgagctgagaaaatttgcatatacaacacttatcaaagctcaatgtgcaaaagggatgccttacaaggctattatgtgggttggcaagcttctagatgcagggtttgaggcatctattgaagacttcagtgcggcaatcaaccgactatgcaaaagacagttcaccagagaagctttgatgctcatatcgatcatgttatctgttggtgtttatccagatattcaactataccgtgtactgggtacagctgtacagaagaaaaatgagtcattctatctacccatattgcaagcccttgctatcaaaactggtatttagtactttgagtctgaagggcaggcctggtgcagtggtgatagctgtctgactaagtcaccatgtcacgggttcgaagcagcctctccgcatctgcggaggaaggcttgccttggtttatcccgtcgcatctgcggaggtggtgctgctgtgcatcgctgtgggctgtgaggcggaggcactgcatctcgctgtgaagtggactgctccatcctctctatgatcctgcaccatcaggggttcgggtgacctttgaggatggtggttaactggttaccttgaagatcccggtgccattgattctttgctacttggcctctccactgctggcaacagacccagggaatgaattagatacctattcttgaccccttcccgcccaaggaggagcaggcaggaactccggtatatggtggtaattggtggcacctttatgtacttctttaggggcagcctaccatggcaggggctgaaagcaggatcaagaagcagaaatatgacaaaaattagtgcgaaatggatactcccatggaggataccagttttgactggaccattttgaagtatcctcagataggctgcaacctgcggatgaaggcaagtgacagaactagtggaggtgttggaccttcaatggatacaattgagaagaccccaggaggtgtccgatagaaggaatcctagtggttatgtgaatccgagtggcaattatgcccaatgaccacgtgagaacatatgtatgtcattgaacgaaattccatgcactattcaacacggtaagggctcgtttggttgcatgataaattggaggtaagaatcctctccaagtcccacgcgaccaaacaagccctaatgaatttgtagtgcggctgcttaattcacatgcgagagcccacggattcatatacttagggcttgtttggataattttggattggagtggattgaggtggtataaggtgtattgaagtgtaatataaactaatttccctttcaatccctaaaatacacttcaatccacttcaatctctctttatccaaacaaggccctttgcttacttgtctggtgggcaacgcttgctgtgatggccatttaatagagtaggatcagcccgtggagtcgaaacggatcagaggtggatcggatagagctgaataaaatcagtatgggttagagtggtattgggctcagtcccaaatagccgatacggttggagtggggttgggggttggatcctgacccattatcaggccttataactgtcttatcttttagatacataaccacacattattatatattttttgtaatatctaactaactacagatctatgattgtactgtgtggtacacagctcttactaataggaacaattttctgtatatcctggtgcaccatcaagtattcagcgatagcaattaaagcatgggaaaatgaagtgccacatgccattccatacctttctgttttgctcctgttcaagggtcagaatgtgtgtctgctttcgatgagcagagtttaggagtcccctgtatctggaaaaggaatacgtgttctcttcttcataaaaccgtcaatggcacaggctggctgatggcgctaagaatttactctgagctatcagcatcagccaccgctctcacgtcggtgactggagtttgcaatctctactacttattaagtaagcaatagtagtctgcctctgacgtgttctgccgttctgccgtctacgtgttctgccatctacgtgcgcccccagggccagcaaaaatttacacgtactcacgagttgaatctagatagttcagccactaaacacataacaacagagttcttattgttgcgtccgagccaacgcttataagccgctctatgtctcctttactagccagtatggtactaatttttttttgcaagacacaacaccacagcagtaccggcgctctgggctgaaattttggtgcggcccatacgtttggggcggcccatactccaccgcagcagtcttcttccgcacgacgtcgcgcccaaccgctcggtcagctcgtggagagcccggaggagagttccactacgcaattcgctacctcggcttcgacatcggcgacgtgcagagcccggaggacatcgtcgccgcggaacggctcgtttttttcccggtgtcggcgccttcggctccgccatggacgtcctcaacaggacgggcatgggccgacgcactccgtgagtacatccaaagggaccgccccttcctaggcatctgcctcggtctccattctctccactcgctccccacacctctct

SEQ ID NO: 10043 - DNA, 6555 bp, Zea Mays
acacttttccttttcatacgaccacacacaagcaaaaacctcgaccggaccacacgcggcgccgccgctccgccgctaagcctccttcccatgcccgccgctaagcttccttcccatgcccgccgtcaccgctgacaagcgcactgtggcccttccgcatccataggctgccgccgcgctcccccgccacgagaccctgccccacttcggatgccctttcgaccacacatccccctccgcttcctactgcctcacctccagcaccgcattgcccgcccacccagacctccacgtagatcgctttcctactctctcgcggcggcgttgtcagcggctggaacagagtccgaggaggaggcggttgtgggtagggacgcgccgttagcccctccacgcccaggcggggcgggaagtggagcgcctgggcgtggctgggcacagcagggggcgctcgatgaggaaagtgcggagctcgagcggaaggcctctatcgtcgcacggttcaggcactgccatgagcttctgtggcagactaggtggcgggagatgcgccacgggttggcccagatggtggatgaacaaggttctgattctgctccgactctatgtgatattctgtggtgtggattcagggaatgggattcaagcagcattgtgtgggatgctctagcaaatagttatgctagagctcagatgaatcatgatgctctttatgttcttagtaaaatgaacagcctaaacatgcaaatctcaataaccacctatgatagtttattgtacagtctaagaaaggcagatgtggcactggcgatttttaaagagatggagtcatgtggtattccccccagtgattattcccatggcattctcatagatggactctgcaagcaaggtaaaattggagaagctttatctttccttcaggaaacaaggaaagaggggaaattcaaacccttgggaatgacctttaacacccttatgtccgcattgtgtaattgggggttcattcaggatgcaaaatcagttttctgcctgatgttgaagtatggattaaatccaagcaggcacacatattcaaccattatacatggtctatgtaaagtaggttctgtaaatgaagcattcgatatttttcagagtgtgacagaagaaggaatggaacttgatattgtcacttgcaacagccttattaatggctttcgcttgcatgggcatacaagagaaattccaaaaatgattgagatgatgaggggcctaggtgtcgaacccgatgttgttacttatactatacttattactggccactgtgaaggcggtgatgtcgaagaagggatgaggataagaaaggacatcttaggccaaggtatagagttgaatattgtcacatatagcgtccttatcaatgctctcttcaagaagggcctgttctatgaggtcgaaaacctatttggtgagatatgcagtattggtctggaattggatgtcattgcatattccatcctcatccatgggttctgcaagctaggagaaattggaagagcacttcaagtctggaatctaatgtgctgttctcagagggtaattccaacttcagtaaaccatgtatctattcttctaggcctttgcaagaaaggattccttgatgaagcgaggtcatatttggaaactgtggctagcaaatatcagccatccgatgtagtcctctacaatgtagttattgatggttatgcaaaagtgggtgatattggtaatgctgttcagctgtatgatgcgattattatggctggtatgtgcccaaccattgtaacatgcaactctcttctatatggctactgcaaatttggggatctacatatggcagaaagctattttatggctattcagttaagtgacctgctgccaacaacagttacctacactactttgatggatgcactctctgaagctgggaaagttcattccatgctaagtatttttaaagaaatgactggaaaagggactagttattcacgctgaaatgaaactggagtccttcagaaaacagggtgccgagctgagaaaatttgcatatacaacacttatcaaagctcaatgtgcaaaagggatgccttacaaggctattatgtgggttggcaagcttctagatgcagggtttgaggcatctattgaagacttcagtgcggcaatcaaccgactatgcaaaagacagttcaccagagaagctttgatgctcatatcgatcatgttatctgttggtgtttatccagatattcaactataccgtgtactgggtacagctgtacagaagaaaaatgagtcattctatctacccatattgcaagcccttgctatcaaaactggtatttagtactttgagtctgtaagtgaaactgcctggtaaccgttcttaacaattcatgtcccacaggctgactaacccctttagtattttgtatccatgtttgttgctcttcaggaagggcaggcctggtgcagtggtgatagctgtctgactaagtcaccatgtcacgggttcgaagcagcctctccgcatctgcggaggaaggcttgccttggtttatcccgtcgcatctgcggaggtggtgctgctgtgcatcgctgtgggctgtgaggcggaggcactgcatctcgctgtgaagtggactgctccatcctctctatgatcctgcaccatcaggggttcgggtgacctttgaggatggtggttaactggttaccttgaagatcccggtgccattgattctttgctacttggcctctccactgctggcaacagacccagggaatgaattagatacctattcttgaccccttcccgcccaaggaggagcaggcaggaactccggtatatggtggtaattggtggcacctttatgtacttctttaggggcagcctaccatggcaggggctgaaagcaggatcaagaagcagaaatatgacaaaaattagtgcgaaatggatactcccatggaggataccagttttgactggaccattttgaagtatcctcagataggctgcaacctgcggatgaaggcaagtgacagaactagtggaggtgttggaccttcaatggatacaattgagaagaccccaggaggtgtccgatagaaggaatcctagtggttatgtgaatccgagtggcaattatgcccaatgaccacgtgagaacatatgtatgtcattgaacgaaattgtaagttaaatttccctccgcgccttgtatgatcgatgaacattcactgctgttgtatcttccctcatgctaggggcggatccaaggggtgggccatggccccaccttaatttttttaacctcttatacctaggtttaggtacacaccaaaataaacaattttttgtatagttagcgtggacaaatctaataaaaactaggttttgatctatttttctgtcgacgcttcactgctcagtccactcttcacctgagccatttgattctcttccctagcgcaagcccagttgtggctcactcgcttcttcgatcatcgactgaccagtaagtcggtgacctaacccgcctgctgcagcgcaccttgccttctcatcactcatcagctcgtcgtctcgtcaggatcctatagacaatgttgatattttgactcctagtccgcaccagtagatgggcaagttgttggtgggaccgtggcgtcacctgtccctcgctgactcattagagtcccatcgcgccgttgcaacacgacaatgggtgtcgcttgccgtcaccgtcatctatcgctaccttgcttcctgcactcgctcctcctagctgtcgtcgtctcaccaacaccatctcacgacaatttcgatgactcgccagaacgacgcgccgatgcggctgctccgccctagtgcctcgtcctcagtcagtgcacctattttttttctctctagctctccttttggtagccaaaaaagttttttggtattcatatcattttggaaacactagatattatcattaatctatatttatggtctagtctggtgatttgtctcttgcactttcggccccacctagaattttgttctgcgtccgccactgcctcatgcagtcctcgcacatctcatgagtttttcctgcacatgttgtgttacttgtagctgtactgacactcttgctatacaggataaatatgtagccgcactcttgtacagaattggttgatgactataaaattagcagttctagagctatttgtgttttccttgattggtagctcatgccctgtattcctggatagaagaactttgtcaagaactgtacaattcgtagatggcaagctgtctgaacttttatcgtagagcagttccattttatagcattgatctgtgttttcgcacgaacacctgtgtgtcatgtgtggcatattagttgttttagtttctttttccctataaatctgtaataggtaccaactcaccacgtatagtgttctacacgaccttttaattagctggtgattacttcctattttgtggtatcttatgcgcacaacgctctttctgaggatcaaaccttctaatcacaattaacagttgggctgtcctagtgataataccgctgaaggcgctgttttcatattcgttgacagtaggtttacatacgagtgtccagtgagtacatctgctgatgtgtttgtttaagggttttgtgggctttctataaagtttgttggaagccatgttaggaccattgattgatcggtaacccctttgttgatgagtgcaatgtgtgaaaagaaaattgttgctcctcggttcaatccctggcaaaaagaagaaaaatgacaagcgctgttgactgtgttgagatccctaattcattcgtgcttcataggttgattctataatgtcttgtgatgtatatttgtaataattgatgaactccatatttgtgcgttttctgttttttagaagaaaaaaatataattgttctcatgtcatatagttttttgtgcagccatgcactattcaacacggtaagggctcgtttggttgcatgataaattggaggtaagaatcctctccaagtcccacgcgaccaaacaagccctaatgaatttgtagtgcggctgcttaattcacatgcgagagcccacggattcatatacttagggcttgtttggataattttggattggagtggattgaggtggtataaggtgtattgaagtgtaatataaactaatttccctttcaatccctaaaatacacttcaatccacttcaatctctctttatccaaacaaggccctttgcttacttgtctggtgggcaacgcttgctgtgatggccatttaatagagtaggatcagcccgtggagtcgaaacggatcagaggtggatcggatagagctgaataaaatcagtatgggttagagtggtattgggctcagtcccaaatagccgatacggttggagtggggttgggggttggatcctgacccattatcaggccttataactgtcttatcttttagatacataaccacacattattatatattttttgtaatatctaactaactacagatctatgattgtactgtgtggtacacagctcttactaataggaacaattttctgtatatcctggtgcaccatcaagtattcagcgatagcaattaaagcatgggaaaatgaagtgccacatgccattccatacctttctgttttgctcctgttcaagggtcagaatgtgtgtctgctttcgatgagcagagtttaggagtcccctgtatctggaaaaggaatacgtgttctcttcttcataaaaccgtcaatggcacaggctggctgatggcgctaagaatttactctgagctatcagcatcagccaccgctctcacgtcggtgactggagtttgcaatctctactacttattaagtaagcaatagtagtctgcctctgacgtgttctgccgttctgccgtctacgtgttctgccatctacgtgcgcccccagggccagcaaaaatttacacgtactcacgagttgaatctagatagttcagccactaaacacataacaacagagttcttattgttgcgtccgagccaacgcttataagccgctctatgtctcctttactagccagtatggtactaatttttttttgcaagacacaacaccacagcagtaccggcgctctgggctgaaattttggtgcggcccatacgtttggggcggcccatactccaccgcagcagtcttcttccgcacgacgtcgcgcccaaccgctcggtcagctcgtggagagcccggaggagagttccactacgcaattcgctacctcggcttcgacatcggcgacgtgcagagcccggaggacatcgtcgccgcggaacggctcgtttttttcccggtgtcggcgccttcggctccgccatggacgtcctcaacaggacgggcatgggccgacgcactccgtgagtacatccaaagggaccgccccttcctaggcatctgcctcggtctccattctctccactcgctccccacacctctct

SEQ ID NO: 10044 - DNA, 6346 bp, Zea Mays
acacttttccttttcatacgaccacacacaagcaaaaacctcgaccggaccacacgcggcgccgccgctccgccgctaagcctccttcccatgcccgccgctaagcttccttcccatgcccgccgtcaccgctgacaagcgcactgtggcccttccgcatccataggctgccgccgcgctcccccgccacgagaccctgccccacttcggatgccctttcgaccacacatccccctccgcttcctactgcctcacctccagcaccgcattgcccgcccacccagacctccacgtagatcgctttcctactctctcgcggcggcgttgtcagcggctggaacagagtccgaggaggaggcggttgtgggtagggacgcgccgttagcccctccacgcccaggcggggcgggaagtggagcgcctgggcgtggctgggcacagcagggggcgctcgatgaggaaagtgcggagctcgagcggaaggcctctatcgtcgcacggttcaggcactgccatgagcttctgtggcagactaggtggcgggagatgcgccacgggttggcccagatggtggatgaacaaggttctgattctgctccgactctatgtgatattctgtggtgtggattcagggaatgggattcaagcagcattgtgtgggatgctctagcaaatagttatgctagagctcagatgaatcatgatgctctttatgttcttagtaaaatgaacagcctaaacatgcaaatctcaataaccacctatgatagtttattgtacagtctaagaaaggcagatgtggcactggcgatttttaaagagatggagtcatgtggtattccccccagtgattattcccatggcattctcatagatggactctgcaagcaaggtaaaattggagaagctttatctttccttcaggaaacaaggaaagaggggaaattcaaacccttgggaatgacctttaacacccttatgtccgcattgtgtaattgggggttcattcaggatgcaaaatcagttttctgcctgatgttgaagtatggattaaatccaagcaggcacacatattcaaccattatacatggtctatgtaaagtaggttctgtaaatgaagcattcgatatttttcagagtgtgacagaagaaggaatggaacttgatattgtcacttgcaacagccttattaatggctttcgcttgcatgggcatacaagagaaattccaaaaatgattgagatgatgaggggcctaggtgtcgaacccgatgttgttacttatactatacttattactggccactgtgaaggcggtgatgtcgaagaagggatgaggataagaaaggacatcttaggccaaggtatagagttgaatattgtcacatatagcgtccttatcaatgctctcttcaagaagggcctgttctatgaggtcgaaaacctatttggtgagatatgcagtattggtctggaattggatgtcattgcatattccatcctcatccatgggttctgcaagctaggagaaattggaagagcacttcaagtctggaatctaatgtgctgttctcagagggtaattccaacttcagtaaaccatgtatctattcttctaggcctttgcaagaaaggattccttgatgaagcgaggtcatatttggaaactgtggctagcaaatatcagccatccgatgtagtcctctacaatgtagttattgatggttatgcaaaagtgggtgatattggtaatgctgttcagctgtatgatgcgattattatggctggtatgtgcccaaccattgtaacatgcaactctcttctatatggctactgcaaatttggggatctacatatggcagaaagctattttatggctattcaggactagttattcacgctgaaatgaaactggagtccttcagaaaacagggtgccgagctgagaaaatttgcatatacaacacttatcaaagctcaatgtgcaaaagggatgccttacaaggctattatgtgggttggcaagcttctagatgcagggtttgaggcatctattgaagacttcagtgcggcaatcaaccgactatgcaaaagacagttcaccagagaagctttgatgctcatatcgatcatgttatctgttggtgtttatccagatattcaactataccgtgtactgggtacagctgtacagaagaaaaatgagtcattctatctacccatattgcaagcccttgctatcaaaactggtatttagtactttgagtctgaagggcaggcctggtgcagtggtgatagctgtctgactaagtcaccatgtcacgggttcgaagcagcctctccgcatctgcggaggaaggcttgccttggtttatcccgtcgcatctgcggaggtggtgctgctgtgcatcgctgtgggctgtgaggcggaggcactgcatctcgctgtgaagtggactgctccatcctctctatgatcctgcaccatcaggggttcgggtgacctttgaggatggtggttaactggttaccttgaagatcccggtgccattgattctttgctacttggcctctccactgctggcaacagacccagggaatgaattagatacctattcttgaccccttcccgcccaaggaggagcaggcaggaactccggtatatggtggtaattggtggcacctttatgtacttctttaggggcagcctaccatggcaggggctgaaagcaggatcaagaagcagaaatatgacaaaaattagtgcgaaatggatactcccatggaggataccagttttgactggaccattttgaagtatcctcagataggctgcaacctgcggatgaaggcaagtgacagaactagtggaggtgttggaccttcaatggatacaattgagaagaccccaggaggtgtccgatagaaggaatcctagtggttatgtgaatccgagtggcaattatgcccaatgaccacgtgagaacatatgtatgtcattgaacgaaattgtaagttaaatttccctccgcgccttgtatgatcgatgaacattcactgctgttgtatcttccctcatgctaggggcggatccaaggggtgggccatggccccaccttaatttttttaacctcttatacctaggtttaggtacacaccaaaataaacaattttttgtatagttagcgtggacaaatctaataaaaactaggttttgatctatttttctgtcgacgcttcactgctcagtccactcttcacctgagccatttgattctcttccctagcgcaagcccagttgtggctcactcgcttcttcgatcatcgactgaccagtaagtcggtgacctaacccgcctgctgcagcgcaccttgccttctcatcactcatcagctcgtcgtctcgtcaggatcctatagacaatgttgatattttgactcctagtccgcaccagtagatgggcaagttgttggtgggaccgtggcgtcacctgtccctcgctgactcattagagtcccatcgcgccgttgcaacacgacaatgggtgtcgcttgccgtcaccgtcatctatcgctaccttgcttcctgcactcgctcctcctagctgtcgtcgtctcaccaacaccatctcacgacaatttcgatgactcgccagaacgacgcgccgatgcggctgctccgccctagtgcctcgtcctcagtcagtgcacctattttttttctctctagctctccttttggtagccaaaaaagttttttggtattcatatcattttggaaacactagatattatcattaatctatatttatggtctagtctggtgatttgtctcttgcactttcggccccacctagaattttgttctgcgtccgccactgcctcatgcagtcctcgcacatctcatgagtttttcctgcacatgttgtgttacttgtagctgtactgacactcttgctatacaggataaatatgtagccgcactcttgtacagaattggttgatgactataaaattagcagttctagagctatttgtgttttccttgattggtagctcatgccctgtattcctggatagaagaactttgtcaagaactgtacaattcgtagatggcaagctgtctgaacttttatcgtagagcagttccattttatagcattgatctgtgttttcgcacgaacacctgtgtgtcatgtgtggcatattagttgttttagtttctttttccctataaatctgtaataggtaccaactcaccacgtatagtgttctacacgaccttttaattagctggtgattacttcctattttgtggtatcttatgcgcacaacgctctttctgaggatcaaaccttctaatcacaattaacagttgggctgtcctagtgataataccgctgaaggcgctgttttcatattcgttgacagtaggtttacatacgagtgtccagtgagtacatctgctgatgtgtttgtttaagggttttgtgggctttctataaagtttgttggaagccatgttaggaccattgattgatcggtaacccctttgttgatgagtgcaatgtgtgaaaagaaaattgttgctcctcggttcaatccctggcaaaaagaagaaaaatgacaagcgctgttgactgtgttgagatccctaattcattcgtgcttcataggttgattctataatgtcttgtgatgtatatttgtaataattgatgaactccatatttgtgcgttttctgttttttagaagaaaaaaatataattgttctcatgtcatatagttttttgtgcagccatgcactattcaacacggtaagggctcgtttggttgcatgataaattggaggtaagaatcctctccaagtcccacgcgaccaaacaagccctaatgaatttgtagtgcggctgcttaattcacatgcgagagcccacggattcatatacttagggcttgtttggataattttggattggagtggattgaggtggtataaggtgtattgaagtgtaatataaactaatttccctttcaatccctaaaatacacttcaatccacttcaatctctctttatccaaacaaggccctttgcttacttgtctggtgggcaacgcttgctgtgatggccatttaatagagtaggatcagcccgtggagtcgaaacggatcagaggtggatcggatagagctgaataaaatcagtatgggttagagtggtattgggctcagtcccaaatagccgatacggttggagtggggttgggggttggatcctgacccattatcaggccttataactgtcttatcttttagatacataaccacacattattatatattttttgtaatatctaactaactacagatctatgattgtactgtgtggtacacagctcttactaataggaacaattttctgtatatcctggtgcaccatcaagtattcagcgatagcaattaaagcatgggaaaatgaagtgccacatgccattccatacctttctgttttgctcctgttcaagggtcagaatgtgtgtctgctttcgatgagcagagtttaggagtcccctgtatctggaaaaggaatacgtgttctcttcttcataaaaccgtcaatggcacaggctggctgatggcgctaagaatttactctgagctatcagcatcagccaccgctctcacgtcggtgactggagtttgcaatctctactacttattaagtaagcaatagtagtctgcctctgacgtgttctgccgttctgccgtctacgtgttctgccatctacgtgcgcccccagggccagcaaaaatttacacgtactcacgagttgaatctagatagttcagccactaaacacataacaacagagttcttattgttgcgtccgagccaacgcttataagccgctctatgtctcctttactagccagtatggtactaatttttttttgcaagacacaacaccacagcagtaccggcgctctgggctgaaattttggtgcggcccatacgtttggggcggcccatactccaccgcagcagtcttcttccgcacgacgtcgcgcccaaccgctcggtcagctcgtggagagcccggaggagagttccactacgcaattcgctacctcggcttcgacatcggcgacgtgcagagcccggaggacatcgtcgccgcggaacggctcgtttttttcccggtgtcggcgccttcggctccgccatggacgtcctcaacaggacgggcatgggccgacgcactccgtgagtacatccaaagggaccgccccttcctaggcatctgcctcggtctccattctctccactcgctccccacacctctct

SEQ ID NO: 10045 - DNA, 6736 bp, Zea Mays
cacacttttccttttcatacgaccacacacaagcaaaaacctcgaccggaccacacgcggcgccgccgctccgccgctaagcctccttcccatgcccgccgctaagcttccttcccatgcccgccgtcaccgctgacaagcgcactgtggcccttccgcatccataggctgccgccgcgctcccccgccacgagaccctgccccacttcggatgccctttcgaccacacatccccctccgcttcctactgcctcacctccagcaccgcattgcccgcccacccagacctccacgtagatcgctttcctactctctcgcggcggcgttgtcagcggctggaacagagtccgaggaggaggcggttgtgggtagggacgcgccgttagcccctccacgcccaggcggggcgggaagtggagcgcctgggcgtggctgggcacagcagggggcgctcgatgaggaaagtgcggagctcgagcggaaggcctctatcgtcgcacggttcaggcactgccatgagcttctgtggcagactaggtggcgggagatgcgccacgggttggcccagatggtggatgaacaaggttctgattctgctccgactctatgtgatattctgtggtgtggattcagggaatgggattcaagcagcattgtgtgggatgctctagcaaatagttatgctagagctcagatgaatcatgatgctctttatgttcttagtaaaatgaacagcctaaacatgcaaatctcaataaccacctatgatagtttattgtacagtctaagaaaggcagatgtggcactggcgatttttaaagagatggagtcatgtggtattccccccagtgattattcccatggcattctcatagatggactctgcaagcaaggtaaaattggagaagctttatctttccttcaggaaacaaggaaagaggggaaattcaaacccttgggaatgacctttaacacccttatgtccgcattgtgtaattgggggttcattcaggatgcaaaatcagttttctgcctgatgttgaagtatggattaaatccaagcaggcacacatattcaaccattatacatggtctatgtaaagtaggttctgtaaatgaagcattcgatatttttcagagtgtgacagaagaaggaatggaacttgatattgtcacttgcaacagccttattaatggctttcgcttgcatgggcatacaagagaaattccaaaaatgattgagatgatgaggggcctaggtgtcgaacccgatgttgttacttatactatacttattactggccactgtgaaggcggtgatgtcgaagaagggatgaggataagaaaggacatcttaggccaaggtatagagttgaatattgtcacatatagcgtccttatcaatgctctcttcaagaagggcctgttctatgaggtcgaaaacctatttggtgagatatgcagtattggtctggaattggatgtcattgcatattccatcctcatccatgggttctgcaagctaggagaaattggaagagcacttcaagtctggaatctaatgtgctgttctcagagggtaattccaacttcagtaaaccatgtatctattcttctaggcctttgcaagaaaggattccttgatgaagcgaggtcatatttggaaactgtggctagcaaatatcagccatccgatgtagtcctctacaatgtagttattgatggttatgcaaaagtgggtgatattggtaatgctgttcagctgtatgatgcgattattatggctggtatgtgcccaaccattgtaacatgcaactctcttctatatggctactgcaaatttggggatctacatatggcagaaagctattttatggctattcagttaagtgacctgctgccaacaacagttacctacactactttgatggatgcactctctgaagctgggaaagttcattccatgctaagtatttttaaagaaatgactggaaaaggtatcagaccaaatgcaataacttacagtgtagttattaaaggactttgtaagcagttaatgttccacgatgccaaaaatgttcttgatgatatgtatagagaaggttttgatgctgatccaataccttacaacacgcttatacaaggtttttgtgaaactcaggatgctaaaaatgctttctacgtgtatgaactaatggtatgtcgtggagtgatgccctctcctgttacttataacttgcttgttaatgtgctgtgcttaaagggactagttattcacgctgaaatgaaactggagtccttcagaaaacagggtgccgagctgagaaaatttgcatatacaacacttatcaaagctcaatgtgcaaaagggatgccttacaaggctattatgtgggttggcaagcttctagatgcagggtttgaggcatctattgaagacttcagtgcggcaatcaaccgactatgcaaaagacagttcaccagagaagctttgatgctcatatcgatcatgttatctgttggtgtttatccagatattcaactataccgtgtactgggtacagctgtacagaagaaaaatgagtcattctatctacccatattgcaagcccttgctatcaaaactggtatttagtactttgagtctgaagggcaggcctggtgcagtggtgatagctgtctgactaagtcaccatgtcacgggttcgaagcagcctctccgcatctgcggaggaaggcttgccttggtttatcccgtcgcatctgcggaggtggtgctgctgtgcatcgctgtgggctgtgaggcggaggcactgcatctcgctgtgaagtggactgctccatcctctctatgatcctgcaccatcaggggttcgggtgacctttgaggatggtggttaactggttaccttgaagatcccggtgccattgattctttgctacttggcctctccactgctggcaacagacccagcatggaccagggaatgaattagatacctattcttgaccccttcccgcccaaggaggagcaggcaggaactccggtatatggtggtaattggtggcacctttatgtacttctttaggggcagcctaccatggcaggggctgaaagcaggatcaagaagcagaaatatgacaaaaattagtgcgaaatggatactcccatggaggataccagttttgactggaccattttgaagtatcctcagataggctgcaacctgcggatgaaggcaagtgacagaactagtggaggtgttggaccttcaatggatacaattgagaagaccccaggaggtgtccgatagaaggaatcctagtggttatgtgaatccgagtggcaattatgcccaatgaccacgtgagaacatatgtatgtcattgaacgaaattgtaagttaaatttccctccgcgccttgtatgatcgatgaacattcactgctgttgtatcttccctcatgctaggggcggatccaaggggtgggccatggccccaccttaatttttttaacctcttatacctaggtttaggtacacaccaaaataaacaattttttgtatagttagcgtggacaaatctaataaaaactaggttttgatctatttttctgtcgacgcttcactgctcagtccactcttcacctgagccatttgattctcttccctagcgcaagcccagttgtggctcactcgcttcttcgatcatcgactgaccagtaagtcggtgacctaacccgcctgctgcagcgcaccttgccttctcatcactcatcagctcgtcgtctcgtcaggatcctatagacaatgttgatattttgactcctagtccgcaccagtagatgggcaagttgttggtgggaccgtggcgtcacctgtccctcgctgactcattagagtcccatcgcgccgttgcaacacgacaatgggtgtcgcttgccgtcaccgtcatctatcgctaccttgcttcctgcactcgctcctcctagctgtcgtcgtctcaccaacaccatctcacgacaatttcgatgactcgccagaacgacgcgccgatgcggctgctccgccctagtgcctcgtcctcagtcagtgcacctattttttttctctctagctctccttttggtagccaaaaaagttttttggtattcatatcattttggaaacactagatattatcattaatctatatttatggtctagtctggtgatttgtctcttgcactttcggccccacctagaattttgttctgcgtccgccactgcctcatgcagtcctcgcacatctcatgagtttttcctgcacatgttgtgttacttgtagctgtactgacactcttgctatacaggataaatatgtagccgcactcttgtacagaattggttgatgactataaaattagcagttctagagctatttgtgttttccttgattggtagctcatgccctgtattcctggatagaagaactttgtcaagaactgtacaattcgtagatggcaagctgtctgaacttttatcgtagagcagttccattttatagcattgatctgtgttttcgcacgaacacctgtgtgtcatgtgtggcatattagttgttttagtttctttttccctataaatctgtaataggtaccaactcaccacgtatagtgttctacacgaccttttaattagctggtgattacttcctattttgtggtatcttatgcgcacaacgctctttctgaggatcaaaccttctaatcacaattaacagttgggctgtcctagtgataataccgctgaaggcgctgttttcatattcgttgacagtaggtttacatacgagtgtccagtgagtacatctgctgatgtgtttgtttaagggttttgtgggctttctataaagtttgttggaagccatgttaggaccattgattgatcggtaacccctttgttgatgagtgcaatgtgtgaaaagaaaattgttgctcctcggttcaatccctggcaaaaagaagaaaaatgacaagcgctgttgactgtgttgagatccctaattcattcgtgcttcataggttgattctataatgtcttgtgatgtatatttgtaataattgatgaactccatatttgtgcgttttctgttttttagaagaaaaaaatataattgttctcatgtcatatagttttttgtgcagccatgcactattcaacacggtaagggctcgtttggttgcatgataaattggaggtaagaatcctctccaagtcccacgcgaccaaacaagccctaatgaatttgtagtgcggctgcttaattcacatgcgagagcccacggattcatatacttagggcttgtttggataattttggattggagtggattgaggtggtataaggtgtattgaagtgtaatataaactaatttccctttcaatccctaaaatacacttcaatccacttcaatctctctttatccaaacaaggccctttgcttacttgtctggtgggcaacgcttgctgtgatggccatttaatagagtaggatcagcccgtggagtcgaaacggatcagaggtggatcggatagagctgaataaaatcagtatgggttagagtggtattgggctcagtcccaaatagccgatacggttggagtggggttgggggttggatcctgacccattatcaggccttataactgtcttatcttttagatacataaccacacattattatatattttttgtaatatctaactaactacagatctatgattgtactgtgtggtacacagctcttactaataggaacaattttctgtatatcctggtgcaccatcaagtattcagcgatagcaattaaagcatgggaaaatgaagtgccacatgccattccatacctttctgttttgctcctgttcaagggtcagaatgtgtgtctgctttcgatgagcagagtttaggagtcccctgtatctggaaaaggaatacgtgttctcttcttcataaaaccgtcaatggcacaggctggctgatggcgctaagaatttactctgagctatcagcatcagccaccgctctcacgtcggtgactggagtttgcaatctctactacttattaagtaagcaatagtagtctgcctctgacgtgttctgccgttctgccgtctacgtgttctgccatctacgtgcgcccccagggccagcaaaaatttacacgtactcacgagttgaatctagatagttcagccactaaacacataacaacagagttcttattgttgcgtccgagccaacgcttataagccgctctatgtctcctttactagccagtatggtactaatttttttttgcaagacacaacaccacagcagtaccggcgctctgggctgaaattttggtgcggcccatacgtttggggcggcccatactccaccgcagcagtcttcttccgcacgacgtcgcgcccaaccgctcggtcagctcgtggagagcccggaggagagttccactacgcaattcgctacctcggcttcgacatcggcgacgtgcagagcccggaggacatcgtcgccgcggaacggctcgtttttttcccggtgtcggcgccttcggctccgccatggacgtcctcaacaggacgggcatgggccgacgcactccgtgagtacatccaaagggaccgccccttcctaggcatctgcctcggtctccattctctccactcgctccccacacctctct

SEQ ID NO: 10046 - DNA, 6726 bp, Zea Mays
cacacttttccttttcatacgaccacacacaagcaaaaacctcgaccggaccacacgcggcgccgccgctccgccgctaagcctccttcccatgcccgccgctaagcttccttcccatgcccgccgtcaccgctgacaagcgcactgtggcccttccgcatccataggctgccgccgcgctcccccgccacgagaccctgccccacttcggatgccctttcgaccacacatccccctccgcttcctactgcctcacctccagcaccgcattgcccgcccacccagacctccacgtagatcgctttcctactctctcgcggcggcgttgtcagcggctggaacagagtccgaggaggaggcggttgtgggtagggacgcgccgttagcccctccacgcccaggcggggcgggaagtggagcgcctgggcgtggctgggcacagcagggggcgctcgatgaggaaagtgcggagctcgagcggaaggcctctatcgtcgcacggttcaggcactgccatgagcttctgtggcagactaggtggcgggagatgcgccacgggttggcccagatggtggatgaacaaggttctgattctgctccgactctatgtgatattctgtggtgtggattcagggaatgggattcaagcagcattgtgtgggatgctctagcaaatagttatgctagagctcagatgaatcatgatgctctttatgttcttagtaaaatgaacagcctaaacatgcaaatctcaataaccacctatgatagtttattgtacagtctaagaaaggcagatgtggcactggcgatttttaaagagatggagtcatgtggtattccccccagtgattattcccatggcattctcatagatggactctgcaagcaaggtaaaattggagaagctttatctttccttcaggaaacaaggaaagaggggaaattcaaacccttgggaatgacctttaacacccttatgtccgcattgtgtaattgggggttcattcaggatgcaaaatcagttttctgcctgatgttgaagtatggattaaatccaagcaggcacacatattcaaccattatacatggtctatgtaaagtaggttctgtaaatgaagcattcgatatttttcagagtgtgacagaagaaggaatggaacttgatattgtcacttgcaacagccttattaatggctttcgcttgcatgggcatacaagagaaattccaaaaatgattgagatgatgaggggcctaggtgtcgaacccgatgttgttacttatactatacttattactggccactgtgaaggcggtgatgtcgaagaagggatgaggataagaaaggacatcttaggccaaggtatagagttgaatattgtcacatatagcgtccttatcaatgctctcttcaagaagggcctgttctatgaggtcgaaaacctatttggtgagatatgcagtattggtctggaattggatgtcattgcatattccatcctcatccatgggttctgcaagctaggagaaattggaagagcacttcaagtctggaatctaatgtgctgttctcagagggtaattccaacttcagtaaaccatgtatctattcttctaggcctttgcaagaaaggattccttgatgaagcgaggtcatatttggaaactgtggctagcaaatatcagccatccgatgtagtcctctacaatgtagttattgatggttatgcaaaagtgggtgatattggtaatgctgttcagctgtatgatgcgattattatggctggtatgtgcccaaccattgtaacatgcaactctcttctatatggctactgcaaatttggggatctacatatggcagaaagctattttatggctattcagttaagtgacctgctgccaacaacagttacctacactactttgatggatgcactctctgaagctgggaaagttcattccatgctaagtatttttaaagaaatgactggaaaaggtatcagaccaaatgcaataacttacagtgtagttattaaaggactttgtaagcagttaatgttccacgatgccaaaaatgttcttgatgatatgtatagagaaggttttgatgctgatccaataccttacaacacgcttatacaaggtttttgtgaaactcaggatgctaaaaatgctttctacgtgtatgaactaatggtatgtcgtggagtgatgccctctcctgttacttataacttgcttgttaatgtgctgtgcttaaagggactagttattcacgctgaaatgaaactggagtccttcagaaaacagggtgccgagctgagaaaatttgcatatacaacacttatcaaagctcaatgtgcaaaagggatgccttacaaggctattatgtgggttggcaagcttctagatgcagggtttgaggcatctattgaagacttcagtgcggcaatcaaccgactatgcaaaagacagttcaccagagaagctttgatgctcatatcgatcatgttatctgttggtgtttatccagatattcaactataccgtgtactgggtacagctgtacagaagaaaaatgagtcattctatctacccatattgcaagcccttgctatcaaaactggtatttagtactttgagtctgaagggcaggcctggtgcagtggtgatagctgtctgactaagtcaccatgtcacgggttcgaagcagcctctccgcatctgcggaggaaggcttgccttggtttatcccgtcgcatctgcggaggtggtgctgctgtgcatcgctgtgggctgtgaggcggaggcactgcatctcgctgtgaagtggactgctccatcctctctatgatcctgcaccatcaggggttcgggtgacctttgaggatggtggttaactggttaccttgaagatcccggtgccattgattctttgctacttggcctctccactgctggcaacagacccagggaatgaattagatacctattcttgaccccttcccgcccaaggaggagcaggcaggaactccggtatatggtggtaattggtggcacctttatgtacttctttaggggcagcctaccatggcaggggctgaaagcaggatcaagaagcagaaatatgacaaaaattagtgcgaaatggatactcccatggaggataccagttttgactggaccattttgaagtatcctcagataggctgcaacctgcggatgaaggcaagtgacagaactagtggaggtgttggaccttcaatggatacaattgagaagaccccaggaggtgtccgatagaaggaatcctagtggttatgtgaatccgagtggcaattatgcccaatgaccacgtgagaacatatgtatgtcattgaacgaaattgtaagttaaatttccctccgcgccttgtatgatcgatgaacattcactgctgttgtatcttccctcatgctaggggcggatccaaggggtgggccatggccccaccttaatttttttaacctcttatacctaggtttaggtacacaccaaaataaacaattttttgtatagttagcgtggacaaatctaataaaaactaggttttgatctatttttctgtcgacgcttcactgctcagtccactcttcacctgagccatttgattctcttccctagcgcaagcccagttgtggctcactcgcttcttcgatcatcgactgaccagtaagtcggtgacctaacccgcctgctgcagcgcaccttgccttctcatcactcatcagctcgtcgtctcgtcaggatcctatagacaatgttgatattttgactcctagtccgcaccagtagatgggcaagttgttggtgggaccgtggcgtcacctgtccctcgctgactcattagagtcccatcgcgccgttgcaacacgacaatgggtgtcgcttgccgtcaccgtcatctatcgctaccttgcttcctgcactcgctcctcctagctgtcgtcgtctcaccaacaccatctcacgacaatttcgatgactcgccagaacgacgcgccgatgcggctgctccgccctagtgcctcgtcctcagtcagtgcacctattttttttctctctagctctccttttggtagccaaaaaagttttttggtattcatatcattttggaaacactagatattatcattaatctatatttatggtctagtctggtgatttgtctcttgcactttcggccccacctagaattttgttctgcgtccgccactgcctcatgcagtcctcgcacatctcatgagtttttcctgcacatgttgtgttacttgtagctgtactgacactcttgctatacaggataaatatgtagccgcactcttgtacagaattggttgatgactataaaattagcagttctagagctatttgtgttttccttgattggtagctcatgccctgtattcctggatagaagaactttgtcaagaactgtacaattcgtagatggcaagctgtctgaacttttatcgtagagcagttccattttatagcattgatctgtgttttcgcacgaacacctgtgtgtcatgtgtggcatattagttgttttagtttctttttccctataaatctgtaataggtaccaactcaccacgtatagtgttctacacgaccttttaattagctggtgattacttcctattttgtggtatcttatgcgcacaacgctctttctgaggatcaaaccttctaatcacaattaacagttgggctgtcctagtgataataccgctgaaggcgctgttttcatattcgttgacagtaggtttacatacgagtgtccagtgagtacatctgctgatgtgtttgtttaagggttttgtgggctttctataaagtttgttggaagccatgttaggaccattgattgatcggtaacccctttgttgatgagtgcaatgtgtgaaaagaaaattgttgctcctcggttcaatccctggcaaaaagaagaaaaatgacaagcgctgttgactgtgttgagatccctaattcattcgtgcttcataggttgattctataatgtcttgtgatgtatatttgtaataattgatgaactccatatttgtgcgttttctgttttttagaagaaaaaaatataattgttctcatgtcatatagttttttgtgcagccatgcactattcaacacggtaagggctcgtttggttgcatgataaattggaggtaagaatcctctccaagtcccacgcgaccaaacaagccctaatgaatttgtagtgcggctgcttaattcacatgcgagagcccacggattcatatacttagggcttgtttggataattttggattggagtggattgaggtggtataaggtgtattgaagtgtaatataaactaatttccctttcaatccctaaaatacacttcaatccacttcaatctctctttatccaaacaaggccctttgcttacttgtctggtgggcaacgcttgctgtgatggccatttaatagagtaggatcagcccgtggagtcgaaacggatcagaggtggatcggatagagctgaataaaatcagtatgggttagagtggtattgggctcagtcccaaatagccgatacggttggagtggggttgggggttggatcctgacccattatcaggccttataactgtcttatcttttagatacataaccacacattattatatattttttgtaatatctaactaactacagatctatgattgtactgtgtggtacacagctcttactaataggaacaattttctgtatatcctggtgcaccatcaagtattcagcgatagcaattaaagcatgggaaaatgaagtgccacatgccattccatacctttctgttttgctcctgttcaagggtcagaatgtgtgtctgctttcgatgagcagagtttaggagtcccctgtatctggaaaaggaatacgtgttctcttcttcataaaaccgtcaatggcacaggctggctgatggcgctaagaatttactctgagctatcagcatcagccaccgctctcacgtcggtgactggagtttgcaatctctactacttattaagtaagcaatagtagtctgcctctgacgtgttctgccgttctgccgtctacgtgttctgccatctacgtgcgcccccagggccagcaaaaatttacacgtactcacgagttgaatctagatagttcagccactaaacacataacaacagagttcttattgttgcgtccgagccaacgcttataagccgctctatgtctcctttactagccagtatggtactaatttttttttgcaagacacaacaccacagcagtaccggcgctctgggctgaaattttggtgcggcccatacgtttggggcggcccatactccaccgcagcagtcttcttccgcacgacgtcgcgcccaaccgctcggtcagctcgtggagagcccggaggagagttccactacgcaattcgctacctcggcttcgacatcggcgacgtgcagagcccggaggacatcgtcgccgcggaacggctcgtttttttcccggtgtcggcgccttcggctccgccatggacgtcctcaacaggacgggcatgggccgacgcactccgtgagtacatccaaagggaccgccccttcctaggcatctgcctcggtctccattctctccactcgctccccacacctctct

SEQ ID NO: 10047 - DNA, 1615 bp, Zea Mays
cgtgggcggtgggccagcgcccacagcgtcaagcgtcacgccgtcacttgcgagtctcctgcctaaagacacaccaaccaatcagagccaacatagcacactgacgtcaggggcccgctggtgtcgggccaattgtcagttactgataagcacgctgtcattatcggggcgtgtgacagtggattcccaaggcttccccgtcacagcgacgttgttaaatagtggccacccattgccgcgttctcttcgctatcccttggttgccgcagcctccaaagccactcccaaacccccgcttccagaaccttctcgaagctccccgccgcctcctccactcgcaccgatggcgaaggaaccaatgcgcgtgctcgtcactggcgccgcaggacaaattggatatgccctggttcccatgattgctaggggtgttatgcttggtgcagaccagcctgttattctgcacatgcttgacattccgccagcagctgaagcccttaatggtgttaagatggagttggttgatgctgcgtttcctcttctgaagggagttgttgctacaactgatgttgtggaagcctgcactggggtcaatgtggccgtcatggttggtggattccccaggaaggagggaatggaaaggaaagatgttatgtcgaaaaatgtttcaatctacaaatcccaagcatctgcccttgaagcccatgcagctcccaactgcaaggttctggtggttgccaacccagcaaacaccaatgctcttatcttgaaagaatttgctccatctattccagagaagaacgttacttgcctgacccgtctggaccacaacagggctcttggccagatttctgagagacttaatgtccaagttagtgatgtgaagaatgttatcatctggggcttaatggtgaattcatcacaactgtccaacagcgtggtgctgcaatcattaaagcgagaaagttctccagtgctctctcggctgctagctctgcttgtgaccacattcgtgattgggttcttggaacacctgagggtacatttgtttccatgggtgtgtactctgatggttcatacggtgttccttctggactcatttattcattcccagtaacatgcagtggtggtgaatggaaaatcgttcaaggcctcccgattgatgagttctcaaggaagaagatggatgccactgcccaagagctgacggaggagaagacgcttgcttactcatgcctcgagtaaattctaccacacccagagagcaattgccaccccaatgttttgaataaaaaaagaaactccaactcgattcatagattctcactcagaactgctgcacgtcgcagtgcaggcgtgttgctggcttcgcccagcttctttttttgcctgtgatttgcacgacatttatatttattgaaatcttgcagaatcgcttgacgatgaaagtggtagcatacttttgttgctttcctggtgcctaactatcttttaaagtttcatttagatcttttctggattccgtagatcccccctcgattctacagtttattagcctgttggaaaattcattgtgtccctaacgaaacctttattgttgggtgcgtcccccccatcc

SEQ ID NO: 10048 - DNA, 688 bp, Zea Mays
ctgaaatcgcggattcagattgttgcttgctgttctaccagggcggatttccatgggcgccatgggatcctggggcgtaaaagctgacttgcccacccccacacctttgttcttttgtcatcgaatatacgagcctcgacgtcgccaagggagagctggggtgagcgcagggaggaactgagcgtcgtcgtgagcagagagaagtggagggaaccgaccgtcgtggtgattgggccatcggcatagctgaatccatggagatcggtttgggcgcttcgccgagtctccccgagtctttaggagggtcctcgaggtcttcgcaaacgacaggatacaccggggttgttcttctgtcgcagtggcgatcttcactgtggatcggatgcaaggctacgccatcgttgacgggcaagtgattgaggagcccggagcacagaaggttgaagactctaagcaggagctcactgaaggcaagttgtgtcgttgatcactcttctttacccaataatgttcttgttaaccactatggtatgctcaggctaattttatgggacctaataggttatcctagtttggtttacttcacaccttgcttaccactaaactattgggtagtatctgctattgctctatgtggttttgggtgttaagatacatatgatttatgatcaggctttattatcgttac

SEQ ID NO: 10049 - DNA, 1911 bp, Zea Mays
ctcccatccaacttggctattttttgcggttattacaacgcttccaccagaatctgctagtagagccctggagctaatctgccagccagtaatcaatcccttgcaagaattaatccagcaaggtgatcaagttcttcaacaagtccctgctcggcatttaactgtacatatagaccgactatcaagcattttcagcaatgtgaaacaaccagaagtagttgctgaagctgtatatagatattggccgacactcaagagtatctttgatcaacgagcatgggatacccgtaccatggagtcaatatgccgatcttgcaaatttgctgtaaggacatgtggaagggtcatgggaatgacgattggtgcaatgcttgaagaaatccaaactctctaccaacaacacaaacagtcttgttttctttacttgtccagtgaagttatcaagatttttggatctgatccatcttgtgcgggctatcttactaacttgatacaaatacttttcagccatacagtgcaacttctcagaacgattcaagattttactgccagaccagatatagctgatgattgctatttgttagcatcaagatgtatccgttactgtcctgatctatttatacctacagaaatgtttcaaagattggttgactgtgcaatggctggtataactatacaacacagggaagcctgtaaatcgatattgtcttttctatctgatgtcattgaccttccaaactcatctgacgggggacagtaccgtaaagttattaacacaatcatacttcaccgtggcgcaacccttactagaataatgattgctgccttaacaggggcgctaccatctggtcgtctggaggaggtttcttatgttctgctgtcacttagcagagtctttggtgagaacatgctgaactgggcaagggaaagcattaatcttataccgccacaagccctaacagatgcagaacgtttgcgcttcttcaacaccatatctgatgctgcttctgggtccagtctccataccataacagatagatttggtgaaatctcagatgtctgtagacgaaacaaaacagtgcaggacctagttcagagtgccttgcggcctcacgatttgaccttcacagtggttccacaacagatgtgacaactggatgtctctgcaaggcaagtttagagagccagttcatgcatagtttcaagttgagaaaagccaccgagtcggtgttgatgcaaggctagctcactgtcatcttcggaattttttctctctcagttcatacaggtttgagttgcggcggcatacagttcagatttgttcagagcatagataggtcagtaagcatcgtaattctttcgtgtttctcctttgtacatgtgccgtaaattgtgtatttggggagggagataagttgtgttgtattatctcaacaacaaagtgtgatacgctggcagatcacgcggaatggtgatctaccatgggcctgattttgcgttggccggtcagcttgtttttgtaaagtgaggtggccatcgattttatcatataagcttataccggctgttgaaggaagatcaagtttgtgtaccctttatgatccccaaatgtgatggccttctggtttgatgatcagaacggctgcagtgttaagctcaccttgaatcagggcagacgtttgagctaatttggctagttgcatctattcgttaactagtgtgtcctcgacaaggtttcgtcccgtgcttgcaggatgacagcaacaggtagcatcgctatcaccatcgttgaaataacaatgagcatggcgacccatacgacaaccactcgatgtgactcaaagcaagcatcgtgcgtgccagatcgccggttggagttggacgaaggggagagcagaaggcggacgaaca

SEQ ID NO: 10050 - DNA, 1962 bp, Zea Mays
ccatattgcaatcagtggagttggtggttataaagtttcttcagaggactcgttgcatttggttgaagccctaagtgcggttattacaacgcttccaccagaatctgctagtagagccctggagctaatctgccagccagtaatcaatcccttgcaagaattaatccagcaaggtgatcaagttcttcaacaagtccctgctcggcatttaactgtacatatagaccgactatcaagcattttcagcaatgtgaaacaaccagaagtagttgctgaagctgtatatagatattggccgacactcaagagtatctttgatcaacgagcatgggatacccgtaccatggagtcaatatgccgatcttgcaaatttgctgtaaggacatgtggaagggtcatgggaatgacgattggtgcaatgcttgaagaaatccaaactctctaccaacaacacaaacagtcttgttttctttacttgtccagtgaagttatcaagatttttggatctgatccatcttgtgcgggctatcttactaacttgatacaaatacttttcagccatacagtgcaacttctcagaacgattcaagattttactgccagaccagatatagctgatgattgctatttgttagcatcaagatgtatccgttactgtcctgatctatttatacctacagaaatgtttcaaagattggttgactgtgcaatggctggtataactatacaacacagggaagcctgtaaatcgatattgtcttttctatctgatgtcattgaccttccaaactcatctgacgggggacagtaccgtaaagttattaacacaatcatacttcaccgtggcgcaacccttactagaataatgattgctgccttaacaggggcgctaccatctggtcgtctggaggaggtttcttatgttctgctgtcacttagcagagtctttggtgagaacatgctgaactgggcaagggaaagcattaatcttataccgccacaagccctaacagatgcagaacgtttgcgcttcttcaacaccatatctgatgctgcttctgggtccagtctccataccataacagatagatttggtgaaatctcagatgtctgtagacgaaacaaaacagtgcaggacctagttcagagtgccttgcggcctcacgatttgaccttcacagtggttccacaacagatgtgacaactggatgtctctgcaaggcaagtttagagagccagttcatgcatagtttcaagttgagaaaagccaccgagtcggtgttgatgcaaggctagctcactgtcatcttcggaattttttctctctcagttcatacaggtttgagttgcggcggcatacagttcagatttgttcagagcatagataggtcagtaagcatcgtaattctttcgtgtttctcctttgtacatgtgccgtaaattgtgtatttggggagggagataagttgtgttgtattatctcaacaacaaagtgtgatacgctggcagatcacgcggaatggtgatctaccatgggcctgattttgcgttggccggtcagcttgtttttgtaaagtgaggtggccatcgattttatcatataagcttataccggctgttgaaggaagatcaagtttgtgtaccctttatgatccccaaatgtgatggccttctggtttgatgatcagaacggctgcagtgttaagctcaccttgaatcagggcagacgtttgagctaatttggctagttgcatctattcgttaactagtgtgtcctcgacaaggtttcgtcccgtgcttgcaggatgacagcaacaggtagcatcgctatcaccatcgttgaaataacaatgagcatggcgacccatacgacaaccactcgatgtgactcaaagcaagcatcgtgcgtgccagatcgccggttggagttggacgaaggggagagcagaaggcggacgaaca

SEQ ID NO: 10051 - DNA, 2364 bp, Zea Mays
tgatcacccagcctccattgatctggcatatgggagctgcaacaatgagcagaaccccaagtggcaacctgtagaggctgctctgttctgtatacaagcaattgcgagatcagtctcaattgaggagagggaaattttaccacaggttatgtcactgcttccctgccttcctcaccatgagcagttgctacaaacagtttgttcaaccattggagcattttcaaaatggattgatgctgcaccagctgaattatctattctaccacctttagttgatattctcaataagggtatgagtacatcggaggatacagctgcggctgcttctatggcctttaagtacatatgtgaagactgtaggagaaagttctcagggtccctggatggcctcttccagatataccatattgcaatcagtggagttggtggttataaagtttcttcagaggactcgttgcatttggttgaagccctaagtgcggttattacaacgcttccaccagaatctgctagtagagccctggagctaatctgccagccagtaatcaatcccttgcaagaattaatccagcaaggtgatcaagttcttcaacaagtccctgctcggcatttaactgtacatatagaccgactatcaagcattttcagcaatgtgaaacaaccagaagtagttgctgaagctgtatatagatattggccgacactcaagagtatctttgatcaacgagcatgggatacccgtaccatggagtcaatatgccgatcttgcaaatttgctgtaaggacatgtggaagggtcatgggaatgacgattggtgcaatgcttgaagaaatccaaactctctaccaacaacacaaacagtcttgttttctttacttgtccagtgaagttatcaagatttttggatctgatccatcttgtgcgggctatcttactaacttgatacaaatacttttcagccatacagtgcaacttctcagaacgattcaagattttactgccagaccagatatagctgatgattgctatttgttagcatcaagatgtatccgttactgtcctgatctatttatacctacagaaatgtttcaaagattggttgactgtgcaatggctggtataactatacaacacagggaagcctgtaaatcgatattgtcttttctatctgatgtcattgaccttccaaactcatctgacgggggacagtaccgtaaagttattaacacaatcatacttcaccgtggcgcaacccttactagaataatgattgctgccttaacaggggcgctaccatctggtcgtctggaggaggtttcttatgttctgctgtcacttagcagagtctttggtgagaacatgctgaactgggcaagggaaagcattaatcttataccgccacaagccctaacagatgcagaacgtttgcgcttcttcaacaccatatctgatgctgcttctgggtccagtctccataccataacagatagatttggtgaaatctcagatgtctgtagacgaaacaaaacagtgcaggacctagttcagagtgccttgcggcctcacgatttgaccttcacagtggttccacaacagatgtgacaactggatgtctctgcaaggcaagtttagagagccagttcatgcatagtttcaagttgagaaaagccaccgagtcggtgttgatgcaaggctagctcactgtcatcttcggaattttttctctctcagttcatacaggtttgagttgcggcggcatacagttcagatttgttcagagcatagataggtcagtaagcatcgtaattctttcgtgtttctcctttgtacatgtgccgtaaattgtgtatttggggagggagataagttgtgttgtattatctcaacaacaaagtgtgatacgctggcagatcacgcggaatggtgatctaccatgggcctgattttgcgttggccggtcagcttgtttttgtaaagtgaggtggccatcgattttatcatataagcttataccggctgttgaaggaagatcaagtttgtgtaccctttatgatccccaaatgtgatggccttctggtttgatgatcagaacggctgcagtgttaagctcaccttgaatcagggcagacgtttgagctaatttggctagttgcatctattcgttaactagtgtgtcctcgacaaggtttcgtcccgtgcttgcaggatgacagcaacaggtagcatcgctatcaccatcgttgaaataacaatgagcatggcgacccatacgacaaccactcgatgtgactcaaagcaagcatcgtgcgtgccagatcgccggttggagttggacgaaggggagagcagaaggcggacgaaca

SEQ ID NO: 10052 - DNA, 3066 bp, Zea Mays
ggcttcctagggttatggagctgccatgcttgttggctgttgccaagactggattccaaaagctgccatctcctttacgtgccattgccttccaccaaagtccacgttgtttcctccagccgcagagctgcttcattttacatctgaactgatacatgctactgtatctcatggctctggtgctattgctgagcgaatgccgctcattcaaattcttgtccctcatattatgggtctgaaagagcagctcaaagatccatctaaggatgaagaagatgtaaaagctattgctcgtttatatgcagacatgggtgaatcctatgttgacttgattgccacaggttcagatgattcaattcaaatagtgaacgcattgctagaagttacttcacttctggaatttgatatttcgtctatgacatttaatttctggcaccgtcttaagcgtaacctgatcaagagggactcttatgtatcatatggatcagaggtggcaatcgaagctgagaaaaacagaagattacaagtatttcgtccaaagtttgaaactctggtctctctggtcagttttcgagttgaataccctgaggactatcacaccttttccgaggaagaccgcagggattttagacatgttagatatgctgttagtgatgtgctacttgatgcaactgaagttcttgggggtgactcgacgctaaagctactttccaccaagctagctcaggcatatgggagctgcaacaatgagcagaaccccaagtggcaacctgtagaggctgctctgttctgtatacaagcaattgcgagatcagtctcaattgaggagagggaaattttaccacaggttatgtcactgcttccctgccttcctcaccatgagcagttgctacaaacagtttgttcaaccattggagcattttcaaaatggattgatgctgcaccagctgaattatctattctaccacctttagttgatattctcaataagggtatgagtacatcggaggatacagctgcggctgcttctatggcctttaagtacatatgtgaagactgtaggagaaagttctcagggtccctggatggcctcttccagatataccatattgcaatcagtggagttggtggttataaagtttcttcagaggactcgttgcatttggttgaagccctaagtgcggttattacaacgcttccaccagaatctgctagtagagccctggagctaatctgccagccagtaatcaatcccttgcaagaattaatccagcaaggtgatcaagttcttcaacaagtccctgctcggcatttaactgtacatatagaccgactatcaagcattttcagcaatgtgaaacaaccagaagtagttgctgaagctgtatatagatattggccgacactcaagagtatctttgatcaacgagcatgggatacccgtaccatggagtcaatatgccgatcttgcaaatttgctgtaaggacatgtggaagggtcatgggaatgacgattggtgcaatgcttgaagaaatccaaactctctaccaacaacacaaacagtcttgttttctttacttgtccagtgaagttatcaagatttttggatctgatccatcttgtgcgggctatcttactaacttgatacaaatacttttcagccatacagtgcaacttctcagaacgattcaagattttactgccagaccagatatagctgatgattgctatttgttagcatcaagatgtatccgttactgtcctgatctatttatacctacagaaatgtttcaaagattggttgactgtgcaatggctggtataactatacaacacagggaagcctgtaaatcgatattgtcttttctatctgatgtcattgaccttccaaactcatctgacgggggacagtaccgtaaagttattaacacaatcatacttcaccgtggcgcaacccttactagaataatgattgctgccttaacaggggcgctaccatctggtcgtctggaggaggtttcttatgttctgctgtcacttagcagagtctttggtgagaacatgctgaactgggcaagggaaagcattaatcttataccgccacaagccctaacagatgcagaacgtttgcgcttcttcaacaccatatctgatgctgcttctgggtccagtctccataccataacagatagatttggtgaaatctcagatgtctgtagacgaaacaaaacagtgcaggacctagttcagagtgccttgcggcctcacgatttgaccttcacagtggttccacaacagatgtgacaactggatgtctctgcaaggcaagtttagagagccagttcatgcatagtttcaagttgagaaaagccaccgagtcggtgttgatgcaaggctagctcactgtcatcttcggaattttttctctctcagttcatacaggtttgagttgcggcggcatacagttcagatttgttcagagcatagataggtcagtaagcatcgtaattctttcgtgtttctcctttgtacatgtgccgtaaattgtgtatttggggagggagataagttgtgttgtattatctcaacaacaaagtgtgatacgctggcagatcacgcggaatggtgatctaccatgggcctgattttgcgttggccggtcagcttgtttttgtaaagtgaggtggccatcgattttatcatataagcttataccggctgttgaaggaagatcaagtttgtgtaccctttatgatccccaaatgtgatggccttctggtttgatgatcagaacggctgcagtgttaagctcaccttgaatcagggcagacgtttgagctaatttggctagttgcatctattcgttaactagtgtgtcctcgacaaggtttcgtcccgtgcttgcaggatgacagcaacaggtagcatcgctatcaccatcgttgaaataacaatgagcatggcgacccatacgacaaccactcgatgtgactcaaagcaagcatcgtgcgtgccagatcgccggttggagttggacgaaggggagagcagaaggcggacgaaca

SEQ ID NO: 10053 - DNA, 2974 bp, Zea Mays
caggtgccccgaggagactattggaagttcagaactggctgctatttacatctgaactgatacatgctactgtatctcatggctctggtgctattgctgagcgaatgccgctcattcaaattcttgtccctcatattatgggtctgaaagagcagctcaaagatccatctaaggatgaagaagatgtaaaagctattgctcgtttatatgcagacatgggtgaatcctatgttgacttgattgccacaggttcagatgattcaattcaaatagtgaacgcattgctagaagttacttcacttctggaatttgatatttcgtctatgacatttaatttctggcaccgtcttaagcgtaacctgatcaagagggactcttatgtatcatatggatcagaggtggcaatcgaagctgagaaaaacagaagattacaagtatttcgtccaaagtttgaaactctggtctctctggtcagttttcgagttgaataccctgaggactatcacaccttttccgaggaagaccgcagggattttagacatgttagatatgctgttagtgatgtgctacttgatgcaactgaagttcttgggggtgactcgacgctaaagctactttccaccaagctagctcaggcatatgggagctgcaacaatgagcagaaccccaagtggcaacctgtagaggctgctctgttctgtatacaagcaattgcgagatcagtctcaattgaggagagggaaattttaccacaggttatgtcactgcttccctgccttcctcaccatgagcagttgctacaaacagtttgttcaaccattggagcattttcaaaatggattgatgctgcaccagctgaattatctattctaccacctttagttgatattctcaataagggtatgagtacatcggaggatacagctgcggctgcttctatggcctttaagtacatatgtgaagactgtaggagaaagttctcagggtccctggatggcctcttccagatataccatattgcaatcagtggagttggtggttataaagtttcttcagaggactcgttgcatttggttgaagccctaagtgcggttattacaacgcttccaccagaatctgctagtagagccctggagctaatctgccagccagtaatcaatcccttgcaagaattaatccagcaaggtgatcaagttcttcaacaagtccctgctcggcatttaactgtacatatagaccgactatcaagcattttcagcaatgtgaaacaaccagaagtagttgctgaagctgtatatagatattggccgacactcaagagtatctttgatcaacgagcatgggatacccgtaccatggagtcaatatgccgatcttgcaaatttgctgtaaggacatgtggaagggtcatgggaatgacgattggtgcaatgcttgaagaaatccaaactctctaccaacaacacaaacagtcttgttttctttacttgtccagtgaagttatcaagatttttggatctgatccatcttgtgcgggctatcttactaacttgatacaaatacttttcagccatacagtgcaacttctcagaacgattcaagattttactgccagaccagatatagctgatgattgctatttgttagcatcaagatgtatccgttactgtcctgatctatttatacctacagaaatgtttcaaagattggttgactgtgcaatggctggtataactatacaacacagggaagcctgtaaatcgatattgtcttttctatctgatgtcattgaccttccaaactcatctgacgggggacagtaccgtaaagttattaacacaatcatacttcaccgtggcgcaacccttactagaataatgattgctgccttaacaggggcgctaccatctggtcgtctggaggaggtttcttatgttctgctgtcacttagcagagtctttggtgagaacatgctgaactgggcaagggaaagcattaatcttataccgccacaagccctaacagatgcagaacgtttgcgcttcttcaacaccatatctgatgctgcttctgggtccagtctccataccataacagatagatttggtgaaatctcagatgtctgtagacgaaacaaaacagtgcaggacctagttcagagtgccttgcggcctcacgatttgaccttcacagtggttccacaacagatgtgacaactggatgtctctgcaaggcaagtttagagagccagttcatgcatagtttcaagttgagaaaagccaccgagtcggtgttgatgcaaggctagctcactgtcatcttcggaattttttctctctcagttcatacaggtttgagttgcggcggcatacagttcagatttgttcagagcatagataggtcagtaagcatcgtaattctttcgtgtttctcctttgtacatgtgccgtaaattgtgtatttggggagggagataagttgtgttgtattatctcaacaacaaagtgtgatacgctggcagatcacgcggaatggtgatctaccatgggcctgattttgcgttggccggtcagcttgtttttgtaaagtgaggtggccatcgattttatcatataagcttataccggctgttgaaggaagatcaagtttgtgtaccctttatgatccccaaatgtgatggccttctggtttgatgatcagaacggctgcagtgttaagctcaccttgaatcagggcagacgtttgagctaatttggctagttgcatctattcgttaactagtgtgtcctcgacaaggtttcgtcccgtgcttgcaggatgacagcaacaggtagcatcgctatcaccatcgttgaaataacaatgagcatggcgacccatacgacaaccactcgatgtgactcaaagcaagcatcgtgcgtgccagatcgccggttggagttggacgaaggggagagcagaaggcggacgaaca

SEQ ID NO: 10054 - DNA, 3819 bp, Zea Mays
gaaaatttaaacaagtccgtctatactcgtcgaatcgcgcaggcacgcgcaacgcaaaccacggccggacttgtctgctcccatcctcacctagtttcaaaatttcctctgttaaaccctacccacccgacgaatccctcgccagatccaaccagctcgccggaggaatacttcgggaggttagcgtggagagagagaagtaggcggctgagggagggttagagctgggcgacgccgtcgctgtcatggaagcgcaggcgacggcgacggcgacggtgaaggaggcgctcgcggcgctgtatcaccacccggacgacgccatccgcaccgccgccgatcgctggcttcaggagttccagcacacgctcgacgcctggcaggtagctgacagtttacttcatgatgaaagcagtaatttagaaactctcatcttttgttctcagaccctcagaagcaaggtacaaagggacttcgaagagttaccctcagaagcttttcgatcattacaggattctttatatgtattgctgaaaaagtttaataagggaccacaaaaagttagaacacagatttgtattgcaattgctgccctggctgtgcatgtacctgtagaggactggggagctggtggaattgtgaattggctaagcgatgaaatgaaagctcatccagaatttattccaggcttccttgaactgcttatagttttgccgcaggaaacttctagttataaaatcgcggctcgtcctgaaaggcgcagacaatttgagattgacctttgttcatctgctaatgttgctattgatttattaactgcttgcatggccattgatcaactgaaagaacaggttttggagggtttttcttcttggcttcgtttctgtcatggaatctctgcctctgaactcgcatcacatcctttggtccatttggcactctcttcattgaactctgatcaattcttggagccagctgtaaatgttacatctgaactgatacatgctactgtatctcatggctctggtgctattgctgagcgaatgccgctcattcaaattcttgtccctcatattatgggtctgaaagagcagctcaaagatccatctaaggatgaagaagatgtaaaagctattgctcgtttatatgcagacatgggtgaatcctatgttgacttgattgccacaggttcagatgattcaattcaaatagtgaacgcattgctagaagttacttcacttctggaatttgatatttcgtctatgacatttaatttctggcaccgtcttaagcgtaacctgatcaagagggactcttatgtatcatatggatcagaggtggcaatcgaagctgagaaaaacagaagattacaagtatttcgtccaaagtttgaaactctggtctctctggtcagttttcgagttgaataccctgaggactatcacaccttttccgaggaagaccgcagggattttagacatgttagatatgctgttagtgatgtgctacttgatgcaactgaagttcttgggggtgactcgacgctaaagctactttccaccaagctagctcaggcatatgggagctgcaacaatgagcagaaccccaagtggcaacctgtagaggctgctctgttctgtatacaagcaattgcgagatcagtctcaattgaggagagggaaattttaccacaggttatgtcactgcttccctgccttcctcaccatgagcagttgctacaaacagtttgttcaaccattggagcattttcaaaatggattgatgctgcaccagctgaattatctattctaccacctttagttgatattctcaataagggtatgagtacatcggaggatacagctgcggctgcttctatggcctttaagtacatatgtgaagactgtaggagaaagttctcagggtccctggatggcctcttccagatataccatattgcaatcagtggagttggtggttataaagtttcttcagaggactcgttgcatttggttgaagccctaagtgcggttattacaacgcttccaccagaatctgctagtagagccctggagctaatctgccagccagtaatcaatcccttgcaagaattaatccagcaaggtgatcaagttcttcaacaagtccctgctcggcatttaactgtacatatagaccgactatcaagcattttcagcaatgtgaaacaaccagaagtagttgctgaagctgtatatagatattggccgacactcaagagtatctttgatcaacgagcatgggatacccgtaccatggagtcaatatgccgatcttgcaaatttgctgtaaggacatgtggaagggtcatgggaatgacgattggtgcaatgcttgaagaaatccaaactctctaccaacaacacaaacagtcttgttttctttacttgtccagtgaagttatcaagatttttggatctgatccatcttgtgcgggctatcttactaacttgatacaaatacttttcagccatacagtgcaacttctcagaacgattcaaaaatgtttcaaagattggttgactgtgcaatggctggtataactatacaacacagggaagcctgtaaatcgatattgtcttttctatctgatgtcattgaccttccaaactcatctgacgggggacagtaccgtaaagttattaacacaatcatacttcaccgtggcgcaacccttactagaataatgattgctgccttaacaggggcgctaccatctggtcgtctggaggaggtttcttatgttctgctgtcacttagcagagtctttggtgagaacatgctgaactgggcaagggaaagcattaatcttataccgccacaagccctaacagatgcagaacgtttgcgcttcttcaacaccatatctgatgctgcttctgggtccagtctccataccataacagatagatttggtgaaatctcagatgtctgtagacgaaacaaaacagtgcaggacctagttcagagtgccttgcggcctcacgatttgaccttcacagtggttccacaacagatgtgacaactggatgtctctgcaaggcaagtttagagagccagttcatgcatagtttcaagttgagaaaagccaccgagtcggtgttgatgcaaggctagctcactgtcatcttcggaattttttctctctcagttcatacaggtttgagttgcggcggcatacagttcagatttgttcagagcatagataggtcagtaagcatcgtaattctttcgtgtttctcctttgtacatgtgccgtaaattgtgtatttggggagggagataagttgtgttgtattatctcaacaacaaagtgtgatacgctggcagatcacgcggaatggtgatctaccatgggcctgattttgcgttggccggtcagcttgtttttgtaaagtgaggtggccatcgattttatcatataagcttataccggctgttgaaggaagatcaagtttgtgtaccctttatgatccccaaatgtgatggccttctggtttgatgatcagaacggctgcagtgttaagctcaccttgaatcagggcagacgtttgagctaatttggctagttgcatctattcgttaactagtgtgtcctcgacaaggtttcgtcccgtgcttgcaggatgacagcaacaggtagcatcgctatcaccatcgttgaaataacaatgagcatggcgacccatacgacaaccactcgatgtgactcaaagcaagcatcgtgcgtgccagatcgccggttggagttggacgaaggggagagcagaaggcggacgaaca

SEQ ID NO: 10055 - DNA, 3655 bp, Zea Mays
caattctcgtggcctcttgtatgaatgaacaaccatcgacaactaataagctcccatcattacgccagaccagagcccacgtgcattagacagacggccaactcacacccagcatcacaacgaaaattaattaccgcgcaaaagccaaacaaaaaagaaaggaaaatttaaacaagtccgtctatactcgtcgaatcgcgcaggcacgcgcaacgcaaaccacggccggacttgtctgctcccatcctcacctagtttcaaaatttcctctgttaaaccctacccacccgacgaatccctcgccagatccaaccagctcgccggaggaatacttcgggaggttagcgtggagagagagaagtaggcggctgagggagggttagagctgggcgacgccgtcgctgtcatggaagcgcaggcgacggcgacggcgacggtgaaggaggcgctcgcggcgctgtatcaccacccggacgacgccatccgcaccgccgccgatcgctggcttcaggagttccagcacacgctcgacgcctggcaggtagctgacagtttacttcatgatgaaagcagtaatttagaaactctcatcttttgttctcagaccctcagaagcaaggtacaaagggacttcgaagagttaccctcagaagcttttcgatcattacaggattctttatatgtattgctgaaaaagtttaataagggaccacaaaaagttagaacacagatttgtattgcaattgctgccctggctgtgcatgtacctgtagaggactggggagctggtggaattgtgaattggctaagcgatgaaatgaaagctcatccagaatttattccaggcttccttgaactgcttatagttttgccgcaggaaacttctagttataaaatcgcggctcgtcctgaaaggcgcagacaatttgagattgacctttgttcatctgctaatgttgctattgatttattaactgcttgcatggccattgatcaactgaaagaacaggttttggagggtttttcttcttggcttcgtttctgtcatggaatctctgcctctgaactcgcatcacatcctttggtccatttggcactctcttcattgaactctgatcaattcttggagccagctgtaaatgttacatctgaactgatacatgctactgtatctcatggctctggtgctattgctgagcgaatgccgctcattcaaattcttgtccctcatattatgggtctgaaagagcagctcaaagatccatctaaggatgaagaagatgtaaaagctattgctcgtttatatgcagacatgggtgaatcctatgttgacttgattgccacaggttcagatgattcaattcaaatagtgaacgcattgctagaagttacttcacttctggaatttgatatttcgtctatgacatttaatttctggcaccgtcttaagcgtaacctgatcaagagggactcttatgtatcatatggatcagaggtggcaatcgaagctgagaaaaacagaagattacaagtatttcgtccaaagtttgaaactctggtctctctggtcagttttcgagttgaataccctgaggactatcacaccttttccgaggaagaccgcagggattttagacatgttagatatgctgttagtgatgtgctacttgatgcaactgaagttcttgggggtgactcgacgctaaagctactttccaccaagctagctcaggcatatgggagctgcaacaatgagcagaaccccaagtggcaacctgtagaggctgctctgttctgtatacaagcaattgcgagatcagtctcaattgaggagagggaaattttaccacaggttatgtcactgcttccctgccttcctcaccatgagcagttgctacaaacagtttgttcaaccattggagcattttcaaaatggattgatgctgcaccagctgaattatctattctaccacctttagttgatattctcaataagggtatgagtacatcggaggatacagctgcggctgcttctatggcctttaagtacatatgtgaagactgtaggagaaagttctcagggtccctggatggcctcttccagatataccatattgcaatcagtggagttggtggttataaagtttcttcagaggactcgttgcatttggttgaagccctaagtgcggttattacaacgcttccaccagaatctgctagtagagccctggagctaatctgccagccagtaatcaatcccttgcaagaattaatccagcaaggtgatcaagttcttcaacaagtccctgctcggcatttaactgtacatatagaccgactatcaagcattttcagcaatgtgaaacaaccagaagtagttgctgaagctgtatatagatattggccgacactcaagagtatctttgatcaacgagcatgggatacccgtaccatggagtcaatatgccgatcttgcaaatttgctgtaaggacatgtggaagggtcatgggaatgacgattggtgcaatgcttgaagaaatccaaactctctaccaacaacacaaacagtcttgttttctttacttgtccagtgaagttatcaagatttttggatctgatccatcttgtgcgggctatcttactaacttgatacaaatacttttcagccatacagtgcaacttctcagaacgattcaagattttactgccagaccagatatagctgatgattgctatttgttagcatcaagatgtatccgttactgtcctgatctatttatacctacagaaatgtttcaaagattggttgactgtgcaatggctggtataactatacaacacagggaagcctgtaaatcgatattgtcttttctatctgatgtcattgaccttccaaactcatctgacgggggacagtaccgtaaagttattaacacaatcatacttcaccgtggcgcaacccttactagaataatgattgctgccttaacaggggcgctaccatctggtcgtctggaggaggtttcttatgttctgctgtcacttagcagagtctttggtgagaacatgctgaactgggcaagggaaagcattaatcttataccgccacaagccctaacagatgcagaacgtttgcgcttcttcaacaccatatctgatgctgcttctgggtccagtctccataccataacagatagatttggtgaaatctcagatgtctgtagacgaaacaaaacagtgcaggacctagttcagagtgccttgcggcctcacgatttgaccttcacagtggttccacaacagatgtgacaactggatgtctctgcaaggcaagtttagagagccagttcatgcatagtttcaagttgagaaaagccaccgagtcggtgttgatgcaaggctagctcactgtcatcttcggaattttttctctctcagttcatacaggtttgagttgcggcggcatacagttcagatttgttcagagcatagataggatgacagcaacaggtagcatcgctatcaccatcgttgaaataacaatgagcatggcgacccatacgacaaccactcgatgtgactcaaagcaagcatcgtgcgtgccagatcgccggttggagttggacgaaggggagagcagaaggcggacgaaca

SEQ ID NO: 10056 - DNA, 2462 bp, Zea Mays
aatcgcgcaggcacgcgcaacgcaaaccacggccggacttgtctgctcccatcctcacctagtttcaaaatttcctctgttaaaccctacccacccgacgaatccctcgccagatccaaccagctcgccggaggaatacttcgggaggttagcgtggagagagagaagtaggcggctgagggagggttagagctgggcgacgccgtcgctgtcatggaagcgcaggcgacggcgacggcgacggtgaaggaggcgctcgcggcgctgtatcaccacccggacgacgccatccgcaccgccgccgatcgctggcttcaggagttccagcacacgctcgacgcctggcaggtagctgacagtttacttcatgatgaaagcagtaatttagaaactctcatcttttgttctcagaccctcagaagcaaggtacaaagggacttcgaagagttaccctcagaagcttttcgatcattacaggattctttatatgtattgctgaaaaagtttaataagggaccacaaaaagttagaacacagatttgtattgcaattgctgccctggctgtgcatgtacctgtagaggactggggagctggtggaattgtgaattggctaagcgatgaaatgaaagctcatccagaatttattccaggcttccttgaactgcttatagttttgccgcaggaaacttctagttataaaatcgcggctcgtcctgaaaggcgcagacaatttgagattgacctttgttcatctgctaatgttgctattgatttattaactgcttgcatggccattgatcaactgaaagaacaggttttggagggtttttcttcttggcttcgtttctgtcatggaatctctgcctctgaactcgcatcacatcctttggtccatttggcactctcttcattgaactctgatcaattcttggagccagctgtaaatgttacatctgaactgatacatgctactgtatctcatggctctggtgctattgctgagcgaatgccgctcattcaaattcttgtccctcatattatgggtctgaaagagcagctcaaagatccatctaaggatgaagaagatgtaaaagctattgctcgtttatatgcagacatgggtgaatcctatgttgacttgattgccacaggttcagatgattcaattcaaatagtgaacgcattgctagaagttacttcacttctggaatttgatatttcgtctatgacatttaatttctggcaccgtcttaagcgtaacctgatcaagagggactcttatgtatcatatggatcagaggtggcaatcgaagctgagaaaaacagaagattacaagtatttcgtccaaagtttgaaactctggtctctctggtcagttttcgagttgaataccctgaggactatcacaccttttccgaggaagaccgcagggattttagacatgttagatatgctgttagtgatgtgctacttgatgcaactgaagttcttgggggtgactcgacgctaaagctactttccaccaagctagctcaggcatatgggagctgcaacaatgagcagaaccccaagtggcaacctgtagaggctgctctgttctgtatacaagcaattgcgagatcagtctcaattgaggagagggaaattttaccacaggttatgtcactgcttccctgccttcctcaccatgagcagttgctacaaacagtttgttcaaccattggagcattttcaaaatggattgatgctgcaccagctgaattatctattctaccacctttagttgatattctcaataagggtatgagtacatcggaggatacagctgcggctgcttctatggcctttaagtacatatgtgaagactgtaggagaaagttctcagggtccctggatggcctcttccagatataccatattgcaatcagtggagttggtggttataaagtttcttcagaggactcgttgcatttggttgaagccctaagtgcggttattacaacgcttccaccagaatctgctagtagagccctggagctaatctgccagccagtaatcaatcccttgcaagaattaatccagcaaggtgatcaagttcttcaacaagtccctgctcggcatttaactgtacatatagaccgactatcaagcattttcagcaatgtgaaacaaccagaagtagttgctgaagctgtatatagatattggccgacactcaagagtatctttgatcaacgagcatgggatacccgtaccatggagtcaatatgccgatcttgcaaatttgctgtaaggacatgtggaagggtcatgggaatgacgattggtgcaatgcttgaagaaatccaaactctctaccaacaacacaaacagtcttgttttctttacttgtccagtgaagttatcaagatttttggatctgatccatcttgtgacaattgcacattggcagcacaaat

SEQ ID NO: 10057 - DNA, 2953 bp, Zea Mays
ttcaatctgtttctgctcttgcgccgcacgtattccacttccatcacgcgtcgcactgctgtaccctgccgcagtggtgctcgtcgctgtcgcgcatttgaaccgcgtcaaattcaaagtttttttatgcgtctggttgcctaataaaaaaaagcgtcaaatccgaattttcttttccgtgtatgctctgccgcctaatccaagttcgtaagtttcggtgcgggtgaaccgaactccaagcccgcttcctccaacaagaacccccgagatcggaaccccgcaaaagggagctttatttaaaggggaaattccccgtttaattgcatattggacatgtcttgtggcgtttgattggagaatttaattcttcccaacgatttccgttcttcggaggcttccatcttggtttcagttctgcagatctgtgactgagaggggaggaattccagtcagtcgtttatgaatcctggggcctgtgcttactagagggagggcaaggcaagttaggatccgagatgagggggagaaatgactccgggaacagcaagccggttgtgctgtgctgtgtgatgatcgtgtgcctatgcctcctcttcttgtatttctcgggctccaatggacaggctgggagcaccgcatttgagtacgggaccaaattctcacggtcacttggatggggcagtgatgatggttctgaagagtccatttttggaaccggggatgcagatgatgtcaagcctaagagctttcttgtgtgtgatgaccggcactctgagctgatcccctgcttggatcggaacttgatatatcaaatgaggctgaagctggatttaaacctgatggagcactatgagaggcattgccctccacctgaaaggcgttttaattgcttgattcctccaccacatggctataaggtccctataaaatggccaaaaagtcgtgatgtagtatggaaagcaaacattccacacactcaccttgcaaaagagaagtcagaccagaactggatggttgaagctggtgaaaaaatcaagtttccaggtggtgggacccattttcaccatggagctgacaaatacatatcaaatattgcaaatatgctaaatttcaaagataacaatataaacaatgaggggatgcttcgtacagttcttgatgttggttgtggagttgctagtttcggaggataccttctttcttctaatgtgatagcaatgtctttggcaccaaacgacgtgcatcagaatcagattcagtttgcactcgaaagaggaatccctgcatatcttggtgttttgggaacaaaaaggcttccatacccgagtagatcatttgaactagcccattgttcacgttgtaggatcgactggcttcaaagagatgggattcttctgctcgaactagacagattgctacggcctggaggttattttgcttactcctctcctgaagcatatgcacaagatgaggaagatctccgaatctggaaagaaatgagtgcccttgtagaaaggatgtgctggaaaattgcagagaaaagaaaccaaactgttatttgggtgaaacccctgaacaatgattgttacaagagacgagcacatggtacaacgccacctctatgcaaaagtggcgatgatccagattcagtatggggagtgccaatggaagcttgcattactccgtatcctgaacaaatgcacagagatgggggaagtgggctagctccctggcctgctcgattaacaaccccgcctccccgtcttgctgatttgtatgttactgctgacacatttgaaaaggacacggaaatgtggcagcaacgagtagaaaaatattggagtttgttgggcccaaaggtaaaaccagacactattagaaacatcatggacatgaaagcaaattttgggtcatttgctgctgcactcaaggaaaaagacgtatgggtgatgaatgttgtgccacatgatggaccaagcaccctcaagataatctatgatagagggctgataggcagcaatcatgactggtgtgaagccttctcgacctatcctcgaacatatgatcttctccacgcatgggcagtcttctccgacctcgataaaagaggctgcagtgctgaagacctgctcctcgaaatggaccgtatcctcaggcctaccgggtttgccatcgtgagggacaagggcactgtcatcgaattcatcaagaagtacctccacgcgctccactgggaagcagtagcggctgcagatgccgagcccagctcggaatcagaggagaacgagatgatcttggtgatccggaagaagttgtggctaccagaagcaggctcgcacacgtgattcccttcccggcgtctgcagctcagaagcgaggcgccagctgcaccagccatgatttatttctagccctactgcacacatggagatagatttattatttacgaggatacggaaaatatgtggcaggcctggattaaaaaaaggctatttttttctcattctcgacagatatgggacttgatgtttgttctctagtttggttaggaaataaacattctttttcgtcttaatgttgaggctcatttaggtgtttgatgtccatcaatggaagtctgatgtagtctgtagctagtgtatttagtgtttacttgaaagaactactgtacgcggatacgtggtttgcactagagcctcaagcctgcgggtccctcagctcgagacccactcatgcagatctcaacagggataacactccaatataaacaggttacagcgcatccgacaaagttgctctgaaattacatggatttatgctatacggtcaaaattcagcagcttaactatctctatctctatatttaaactctgccctataaacattgcagtatatagtataaaggcatctccaacaacctgtcctataaaaataccatataatttaaaaataa

SEQ ID NO: 10058 - DNA, 2828 bp, Zea Mays
ctttcatccaataggccaatacccacattcgctcgctctacccgactaccccgcaagtcgaggccttccgctggctctcgctcgctcgctcgccccgcgactggttgcctctccgccccgaccctgccctgagaccggagacgaccgcgccccgcggtggcgctgcgacccgcgatacggaaattccccgtttaattgcatattggacatgtcttgtggcgtttgattggagaatttaattcttcccaacgatttccgttcttcggaggcttccatcttggtttcagttctgcagatctgtgactgagaggggaggaattccagtcagtcgtttatgaatcctggggcctgtgcttactagagggagggcaaggcaagttaggatccgagatgagggggagaaatgactccgggaacagcaagccggttgtgctgtgctgtgtgatgatcgtgtgcctatgcctcctcttcttgtatttctcgggctccaatggacaggctgggagcaccgcatttgagtacgggaccaaattctcacggtcacttggatggggcagtgatgatggttctgaagagtccatttttggaaccggggatgcagatgatgtcaagcctaagagctttcttgtgtgtgatgaccggcactctgagctgatcccctgcttggatcggaacttgatatatcaaatgaggctgaagctggatttaaacctgatggagcactatgagaggcattgccctccacctgaaaggcgttttaattgcttgattcctccaccacatggctataaggtccctataaaatggccaaaaagtcgtgatgtagtatggaaagcaaacattccacacactcaccttgcaaaagagaagtcagaccagaactggatggttgaagctggtgaaaaaatcaagtttccaggtggtgggacccattttcaccatggagctgacaaatacatatcaaatattgcaaatatgctaaatttcaaagataacaatataaacaatgaggggatgcttcgtacagttcttgatgttggttgtggagttgctagtttcggaggataccttctttcttctaatgtgatagcaatgtctttggcaccaaacgacgtgcatcagaatcagattcagtttgcactcgaaagaggaatccctgcatatcttggtgttttgggaacaaaaaggcttccatacccgagtagatcatttgaactagcccattgttcacgttgtaggatcgactggcttcaaagagatgggattcttctgctcgaactagacagattgctacggcctggaggttattttgcttactcctctcctgaagcatatgcacaagatgaggaagatctccgaatctggaaagaaatgagtgcccttgtagaaaggatgtgctggaaaattgcagagaaaagaaaccaaactgttatttgggtgaaacccctgaacaatgattgttacaagagacgagcacatggtacaacgccacctctatgcaaaagtggcgatgatccagattcagtatggggagtgccaatggaagcttgcattactccgtatcctgaacaaatgcacagagatgggggaagtgggctagctccctggcctgctcgattaacaaccccgcctccccgtcttgctgatttgtatgttactgctgacacatttgaaaaggacacggaaatgtggcagcaacgagtagaaaaatattggagtttgttgggcccaaaggtaaaaccagacactattagaaacatcatggacatgaaagcaaattttgggtcatttgctgctgcactcaaggaaaaagacgtatgggtgatgaatgttgtgccacatgatggaccaagcaccctcaagataatctatgatagagggctgataggcagcaatcatgactggtgtgaagccttctcgacctatcctcgaacatatgatcttctccacgcatgggcagtcttctccgacctcgataaaagaggctgcagtgctgaagacctgctcctcgaaatggaccgtatcctcaggcctaccgggtttgccatcgtgagggacaagggcactgtcatcgaattcatcaagaagtacctccacgcgctccactgggaagcagtagcggctgcagatgccgagcccagctcggaatcagaggagaacgagatgatcttggtgatccggaagaagttgtggctaccagaagcaggctcgcacacgtgattcccttcccggcgtctgcagctcagaagcgaggcgccagctgcaccagccatgatttatttctagccctactgcacacatggagatagatttattatttacgaggatacggaaaatatgtggcaggcctggattaaaaaaaggctatttttttctcattctcgacagatatgggacttgatgtttgttctctagtttggttaggaaataaacattctttttcgtcttaatgttgaggctcatttaggtgtttgatgtccatcaatggaagtctgatgtagtctgtagctagtgtatttagtgtttacttgaaagaactactgtacgcggatacgtggtttgcactagagcctcaagcctgcgggtccctcagctcgagacccactcatgcagatctcaacagggataacactccaatataaacaggttacagcgcatccgacaaagttgctctgaaattacatggatttatgctatacggtcaaaattcagcagcttaactatctctatctctatatttaaactctgccctataaacattgcagtatatagtataaaggcatctccaacaacctgtcctataaaaataccatataatttaaaaataa

SEQ ID NO: 10059 - DNA, 1344 bp, Zea Mays
tagcttttatattttccatccagggaagaaaacttactgaggttatctacattggtcttgatattgtgacccccttgatatctttggatcttctgaaataccctaaacttagtcgtgattattttgtgcttatatcgcacttgttggaactgtacccggaaaaggttgctcacttaaatagtgatgcttttacaaggattattggaagtcttgacttcgggctccgtaatcaggatagcgatgttgttgagaggtgcctggcagcagtaaatgctcttgcttcatacaatttcaaagaaagattaggagggagaggaagactgaactcgcagctcatggaatctgaaggatctaatggcaaactgcaggaaagcatatcaagtcacttcttgagacttctgttgcaaatacttctttttgaagatttcagatcggagttagcaggttatgctgccgatgctttgcttcctttattgttctgtgaacaggagctatatcagaggttggtccatgagttgttggataaacagcagaatccgaccgtaaaatcaaggctggcaactgcgttccataaccttacaagttcaaacaatctctcaagctcactcgaccggccaaacaggcagagattcaggaaaaacctccttagcttcatggcggatgtatcgggcttcatgcagatcaagtagatgcgatggcagggaacaggtgatgtttgaccggtcaattaaaccccgaggaagcactgcaccactgtggtaggggtgcatgtgggcaccacatgtctgtggattgatgagagcgaagactgccacgacaagtctagtagatcttgaagagctagtgtcaccagaaaagacagggagatgagctagtcttagggttggcattcatagcgcatttgctggacaagatggaggcgtccctggccacgagatcgtcgtgtaaatgcgtttgttagacgcacagaaacggtggggattttgtggtggcgactcgttttgttcaattcccacaggcagaaggtagagatgttaagttgatgtaaataccgtttgatttaaacatgccttattcgtaggagaaagcgacacggcttgctgtaacttagggtttattactctttctcgtggcataggatccccaaagaagtctttgctggggtatttgcagccaaacgatgaccagtatgattgcgagaggttttcaatcttttgtaccaaatttggcctgcagttatgatgacactgagtgccgatacaggcatgaggcattccaaaattggcgggcaccacatgtgtctgtctgctgtctcagtgggggtcactgtagagtgtaggcggt

SEQ ID NO: 10060 - DNA, 2724 bp, Zea Mays
ctttgacctgctgttttttgggccagttccagctctggtctataataaatttttccaggcagtgtttagatccaggaattagggcaaaatacttcagtccacgactaatggaggctgtgatctggttcttggccagatgggttgcaacctatttagtgccacttgacgtgagtagaggaaaagtaagcagagaaattgataatgtgggtacaaatggatcccaacattccagaaaactgctaaacagttttgcttgggaaaataaccaaggagagcttgttcttgattttgttgttctcatttcaatgttagctcttactacctatcagggagaaaatgagttgcaggtaagcttcatttttactttttaatcatgatggaattgtgcagagtgcccagacatgtttgccccagttcaatttgcagtgcctaatgcaaaaatgctcgagtaaaacatcttgatcttttgatttcattatctctttgatgtgactttagccttatcattccatcacactgtgcgattgatccaaaataccaaatactgcataacttgaccaaacattaacaatgccatcaactttcaagatttctcattagagtgttttcactagcgttagacaagataaaagtttccaatgtcccttatatgttgttttgattcctgttcacagacactgacatgccagaagctacttgctacagtcgttcgccggaaacacacatgcacttatcttgttcaactggattcatggcgtgatcttacaagagcttttgcaagtggacggtctttgctttcattgagtggacgtttacaaaggtctctagcagaaacacttgcctctgcagcttcctgcatcaaagatcctgaagcatctgcacagtacctgagggatctcatgggaccagtggcagggtgcctggtagaaaatgctagcaggagtgatctaaaatctgtggcacagcaagcagatgttatttacatggtctgttgcctattggaacgactaagaggcgctgctagagctactcaaccccgaactcaaaaagttctatttgagatggctcatactgtgatgaacccacttttgactcttctggaggtctacaaaaatcattccacagtcgtatacatgatactcaagtttgtggtggactttgttgatggtcaagctgtattcctggatgctaaagagacatcagctttggtgagcttttgcttgcaactactccagatatactcctctcataacattgggaaggtaatgctctctctttcttcaagtctgcgtaatgagtcacaagcagaaaaatataaggatctgcgagctttgcttcgtcttctgacaaatatatgttcgaaggatttggttggctttctgtctgattgtggcggtgaaggttcacctgatatcgcagaggttatctacattggtcttgatattgtgacccccttgatatctttggatcttctgaaataccctaaacttagtcgtgattattttgtgcttatatcgcacttgttggaactgtacccggaaaaggttgctcacttaaatagtgatgcttttacaaggattattggaagtcttgacttcgggctccgtaatcaggatagcgatgttgttgagaggtgcctggcagcagtaaatgctcttgcttcatacaatttcaaagaaagattaggagggagaggaagactgaactcgcagctcatggaatctgaaggatctaatggcaaactgcaggaaagcatatcaagtcacttcttgagacttctgttgcaaatacttctttttgaagatttcagatcggagttagcaggttatgctgccgatgctttgcttcctttattgttctgtgaacaggagctatatcagaggttggtccatgagttgttggataaacagcagaatccgaccgtaaaatcaaggctggcaactgcgttccataaccttacaagttcaaacaatctctcaagctcactcgaccggccaaacaggcagagattcaggaaaaacctccttagcttcatggcggatgtatcgggcttcatgcagatcaagtagatgcgatggcagggaacaggtgatgtttgaccggtcaattaaaccccgaggaagcactgcaccactgtggtaggggtgcatgtgggcaccacatgtctgtggattgatgagagcgaagactgccacgacaagtctagtagatcttgaagagctagtgtcaccagaaaagacagggagatgagctagtcttagggttggcattcatagcgcatttgctggacaagatggaggcgtccctggccacgagatcgtcgtgtaaatgcgtttgttagacgcacagaaacggtggggattttgtggtggcgactcgttttgttcaattcccacaggcagaaggtagagatgttaagttgatgtaaataccgtttgatttaaacatgccttattcgtaggagaaagcgacacggcttgctgtaacttagggtttattactctttctcgtggcataggatccccaaagaagtctttgctggggtatttgcagccaaacgatgaccagtatgattgcgagaggttttcaatcttttgtaccaaatttggcctgcagttatgatgacactgagtgccgatacaggcatgaggcattccaaaattggcgggcaccacatgtgtctgtctgctgtctcagtgggggtcactgtagagtgtaggcggt

SEQ ID NO: 10061 - DNA, 2823 bp, Zea Mays
gagccgaggtactcaactaaagctcaaattgacgaagctcctggtgtatcccaaatccttagatccctgaagcattacaggctggattccctaatgtgattgaagcagcacatcatcctgttgttacactctcctggtctataataaatttttccaggcagtgtttagatccaggaattagggcaaaatacttcagtccacgactaatggaggctgtgatctggttcttggccagatgggttgcaacctatttagtgccacttgacgtgagtagaggaaaagtaagcagagaaattgataatgtgggtacaaatggatcccaacattccagaaaactgctaaacagttttgcttgggaaaataaccaaggagagcttgttcttgattttgttgttctcatttcaatgttagctcttactacctatcagggagaaaatgagttgcaggtaagcttcatttttactttttaatcatgatggaattgtgcagagtgcccagacatgtttgccccagttcaatttgcagtgcctaatgcaaaaatgctcgagtaaaacatcttgatcttttgatttcattatctctttgatgtgactttagccttatcattccatcacactgtgcgattgatccaaaataccaaatactgcataacttgaccaaacattaacaatgccatcaactttcaagatttctcattagagtgttttcactagcgttagacaagataaaagtttccaatgtcccttatatgttgttttgattcctgttcacagacactgacatgccagaagctacttgctacagtcgttcgccggaaacacacatgcacttatcttgttcaactggattcatggcgtgatcttacaagagcttttgcaagtggacggtctttgctttcattgagtggacgtttacaaaggtctctagcagaaacacttgcctctgcagcttcctgcatcaaagatcctgaagcatctgcacagtacctgagggatctcatgggaccagtggcagggtgcctggtagaaaatgctagcaggagtgatctaaaatctgtggcacagcaagcagatgttatttacatggtctgttgcctattggaacgactaagaggcgctgctagagctactcaaccccgaactcaaaaagttctatttgagatggctcatactgtgatgaacccacttttgactcttctggaggtctacaaaaatcattccacagtcgtatacatgatactcaagtttgtggtggactttgttgatggtcaagctgtattcctggatgctaaagagacatcagctttggtgagcttttgcttgcaactactccagatatactcctctcataacattgggaaggtaatgctctctctttcttcaagtctgcgtaatgagtcacaagcagaaaaatataaggatctgcgagctttgcttcgtcttctgacaaatatatgttcgaaggatttggttggctttctgtctgattgtggcggtgaaggttcacctgatatcgcagaggttatctacattggtcttgatattgtgacccccttgatatctttggatcttctgaaataccctaaacttagtcgtgattattttgtgcttatatcgcacttgttggaactgtacccggaaaaggttgctcacttaaatagtgatgcttttacaaggattattggaagtcttgacttcgggctccgtaatcaggatagcgatgttgttgagaggtgcctggcagcagtaaatgctcttgcttcatacaatttcaaagaaagattaggagggagaggaagactgaactcgcagctcatggaatctgaaggatctaatggcaaactgcaggaaagcatatcaagtcacttcttgagacttctgttgcaaatacttctttttgaagatttcagatcggagttagcaggttatgctgccgatgctttgcttcctttattgttctgtgaacaggagctatatcagaggttggtccatgagttgttggataaacagcagaatccgaccgtaaaatcaaggctggcaactgcgttccataaccttacaagttcaaacaatctctcaagctcactcgaccggccaaacaggcagagattcaggaaaaacctccttagcttcatggcggatgtatcgggcttcatgcagatcaagtagatgcgatggcagggaacaggtgatgtttgaccggtcaattaaaccccgaggaagcactgcaccactgtggtaggggtgcatgtgggcaccacatgtctgtggattgatgagagcgaagactgccacgacaagtctagtagatcttgaagagctagtgtcaccagaaaagacagggagatgagctagtcttagggttggcattcatagcgcatttgctggacaagatggaggcgtccctggccacgagatcgtcgtgtaaatgcgtttgttagacgcacagaaacggtggggattttgtggtggcgactcgttttgttcaattcccacaggcagaaggtagagatgttaagttgatgtaaataccgtttgatttaaacatgccttattcgtaggagaaagcgacacggcttgctgtaacttagggtttattactctttctcgtggcataggatccccaaagaagtctttgctggggtatttgcagccaaacgatgaccagtatgattgcgagaggttttcaatcttttgtaccaaatttggcctgcagttatgatgacactgagtgccgatacaggcatgaggcattccaaaattggcgggcaccacatgtgtctgtctgctgtctcagtgggggtcactgtagagtgtaggcggt

SEQ ID NO: 10062 - DNA, 3196 bp, Zea Mays
atgagcgagatattcattgtgttgcagccctatggtacagttaatctgctttctgctttgacgtcagaagctgtcaagtcggttctgaataaccagagtgaagaggaaacctggggcatagattcccttgatattttgttagaaacatggaatgttcttttgggggacgtagatgccgataaaaatccaatctcaaccgatggagcacttgcatcttcaagtttgtttaagatgattgtggagtcacacttgaaggctgctgctgattctgcgttcgaggatactgatgatactgaatattttcatgtttctgtttcaagtatgcttaaattcccgacagttcatctgttctagtatctctacctcttttggattcatcaaataataatgaagtacttcttccagaacgtgatgaacagttagccttgtatgctctaatagcacgggcttctgcaaatactactattccatttcttgcacagttgttttcagaacgatttgcccggctaaatcaggtcttcttgttatcttgtaatttacctgagttattaagaaaggagaagctactaagctatactgcttcagtagccttgtacattctactgttttgtggtggtgtatttttacagttaacatttaatagatttttctaagcagagaaatggtgaaagtgatcctactcaaacactggaagagctctattggctgttgttggttactagtcatgtcctaactgactctggcgaaggagaaacactacttatccctgaagcattacaggctggattccctaatgtgattgaagcagcacatcatcctgttgttacactctcctggtctataataaatttttccaggcagtgtttagatccaggaattagggcaaaatacttcagtccacgactaatggaggctgtgatctggttcttggccagatgggttgcaacctatttagtgccacttgacgtgagtagaggaaaagtaagcagagaaattgataatgtgggtacaaatggatcccaacattccagaaaactgctaaacagttttgcttgggaaaataaccaaggagagcttgttcttgattttgttgttctcatttcaatgttagctcttactacctatcagggagaaaatgagttgcagacactgacatgccagaagctacttgctacagtcgttcgccggaaacacacatgcacttatcttgttcaactggattcatggcgtgatcttacaagagcttttgcaagtggacggtctttgctttcattgagtggacgtttacaaaggtctctagcagaaacacttgcctctgcagcttcctgcatcaaagatcctgaagcatctgcacagtacctgagggatctcatgggaccagtggcagggtgcctggtagaaaatgctagcaggagtgatctaaaatctgtggcacagcaagcagatgttatttacatggtctgttgcctattggaacgactaagaggcgctgctagagctactcaaccccgaactcaaaaagttctatttgagatggctcatactgtgatgaacccacttttgactcttctggaggtctacaaaaatcattccacagtcgtatacatgatactcaagtttgtggtggactttgttgatggtcaagctgtattcctggatgctaaagagacatcagctttggtgagcttttgcttgcaactactccagatatactcctctcataacattgggaaggtaatgctctctctttcttcaagtctgcgtaatgagtcacaagcagaaaaatataaggatctgcgagctttgcttcgtcttctgacaaatatatgttcgaaggatttggttggctttctgtctgattgtggcggtgaaggttcacctgatatcgcagaggttatctacattggtcttgatattgtgacccccttgatatctttggatcttctgaaataccctaaacttagtcgtgattattttgtgcttatatcgcacttgttggaactgtacccggaaaaggttgctcacttaaatagtgatgcttttacaaggattattggaagtcttgacttcgggctccgtaatcaggatagcgatgttgttgagaggtgcctggcagcagtaaatgctcttgcttcatacaatttcaaagaaagattaggagggagaggaagactgaactcgcagctcatggaatctgaaggatctaatggcaaactgcaggaaagcatatcaagtcacttcttgagacttctgttgcaaatacttctttttgaagatttcagatcggagttagcaggttatgctgccgatgctttgcttcctttattgttctgtgaacaggagctatatcagaggttggtccatgagttgttggataaacagcagaatccgaccgtaaaatcaaggctggcaactgcgttccataaccttacaagttcaaacaatctctcaagctcactcgaccggccaaacaggcagagattcaggaaaaacctccttagcttcatggcggatgtatcgggcttcatgcagatcaagtagatgcgatggcagggaacaggtgatgtttgaccggtcaattaaaccccgaggaagcactgcaccactgtggtaggggtgcatgtgggcaccacatgtctgtggattgatgagagcgaagactgccacgacaagtctagtagatcttgaagagctagtgtcaccagaaaagacagggagatgagctagtcttagggttggcattcatagcgcatttgctggacaagatggaggcgtccctggccacgagatcgtcgtgtaaatgcgtttgttagacgcacagaaacggtggggattttgtggtggcgactcgttttgttcaattcccacaggcagaaggtagagatgttaagttgatgtaaataccgtttgatttaaacatgccttattcgtaggagaaagcgacacggcttgctgtaacttagggtttattactctttctcgtggcataggatccccaaagaagtctttgctggggtatttgcagccaaacgatgaccagtatgattgcgagaggttttcaatcttttgtaccaaatttggcctgcagttatgatgacactgagtgccgatacaggcatgaggcattccaaaattggcgggcaccacatgtgtctgtctgctgtctcagtgggggtcactgtagagtgtaggcggt

SEQ ID NO: 10063 - DNA, 4186 bp, Zea Mays
aactatccagccaccattcacccctccgcactccgcctccgccgcctccctgccctcaactccacgcccggcagggtggccgctcgccggcagccaaaccctaggcgatcgcggaggccaaccacgcttcgggcgcgatcagccgccgccatgcagggcttccccggcggcgcccccgatccgcagcagctacaggccaccatgctcgccatcgagcaggcctgctccctcatccagctgcacatgaatccatctgaagcggaaaaagtgataacttcgctgcattcgtctctcatgccttatcaagtatgcagattcattcttgagacatcccaaaaaccaaatgcaagattccaagctgctggtgcaattggtgatgctgcggtaagggagtggggagttcttacagatgacaataaaaggagcctaataatatattgtttaaactatgttatggagcatgcaagttctcctgatggctatgtgcaatcgaaagtttccgctgtggcagctagattactgaaaagaggctgggttgagttttcggaccaagaaaaagcagctatcttctttgaggttgagcaatctatccggggcatccatgggcctaatcgacagtttgctgcaatcaatttcttggaaaccttggtttcagaattctccccttcaactgcttctgctatgagcctgcctaaggaatttcacgaacaatgtgaatactcactcgaagtgcagtttttgaagatactaagttggaatttcaaacatactgtggagcacgagagttcagatgctaagataaatttcggcttaaggattgatacgataaatctgaagaagtttgaacgttcgttggtgaagccagggtctatgtggagagagattctaatatcaagtggacaccctacctgggttttaaacttctataccaccttgcgccaaaagtactcatatgatacactgtggggtgattctccaattgctgtctcttgcagacagcttatagtgcagttatgctccttggcaggctctgtgtttcctaatgataatggggatgcacagattaaacaccttatgctgatattatctgctgttgttctatggattgaacctcctgatgtaatcacagcatcaatccgaaatgggggaagtgaaagtgagttcatagatggttgccatgccttgctttcaatcgcatctttaactactggctcactttttgacaacctcctaaaatctataaggccctatggtacagttaatctgctttctgctttgacgtcagaagctgtcaagtcggttctgaataaccagagtgaagaggaaacctggggcatagattcccttgatattttgttagaaacatggaatgttcttttgggggacgtagatgccgataaaaatccaatctcaaccgatggagcacttgcatcttcaagtttgtttaagatgattgtggagtcacacttgaaggctgctgctgattctgcgttcgaggatactgatgatactgaatattttcatgtttctgtttcaaaacgtgatgaacagttagccttgtatgctctaatagcacgggcttctgcaaatactactattccatttcttgcacagttgttttcagaacgatttgcccggctaaatcagagaaatggtgaaagtgatcctactcaaacactggaagagctctattggctgttgttggttactagtcatgtcctaactgactctggcgaaggagaaacactacttatccctgaagcattacaggctggattccctaatgtgattgaagcagcacatcatcctgttgttacactctcctggtctataataaatttttccaggcagtgtttagatccaggaattagggcaaaatacttcagtccacgactaatggaggctgtgatctggttcttggccagatgggttgcaacctatttagtgccacttgacgtgagtagaggaaaagtaagcagagaaattgataatgtgggtacaaatggatcccaacattccagaaaactgctaaacagttttgcttgggaaaataaccaaggagagcttgttcttgattttgttgttctcatttcaatgttagctcttactacctatcagggagaaaatgagttgcagacactgacatgccagaagctacttgctacagtcgttcgccggaaacacacatgcacttatcttgttcaactggattcatggcgtgatcttacaagagcttttgcaagtggacggtctttgctttcattgagtggacgtttacaaaggtctctagcagaaacacttgcctctgcagcttcctgcatcaaagatcctgaagcatctgcacagtacctgagggatctcatgggaccagtggcagggtgcctggtagaaaatgctagcaggagtgatctaaaatctgtggcacagcaagcagatgttatttacatggtctgttgcctattggaacgactaagaggcgctgctagagctactcaaccccgaactcaaaaagttctatttgagatggctcatactgtgatgaacccacttttgactcttctggaggtctacaaaaatcattccacagtcgtatacatgatactcaagtttgtggtggactttgttgatggtcaagctgtattcctggatgctaaagagacatcagctttggtgagcttttgcttgcaactactccagatatactcctctcataacattgggaaggtaatgctctctctttcttcaagtctgcgtaatgagtcacaagcagaaaaatataaggatctgcgagctttgcttcgtcttctgacaaatatatgttcgaaggatttggttggctttctgtctgattgtggcggtgaaggttcacctgatatcgcagaggttatctacattggtcttgatattgtgacccccttgatatctttggatcttctgaaataccctaaacttagtcgtgattattttgtgcttatatcgcacttgttggaactgtacccggaaaaggttgctcacttaaatagtgatgcttttacaaggattattggaagtcttgacttcgggctccgtaatcaggatagcgatgttgttgagaggtgcctggcagcagtaaatgctcttgcttcatacaatttcaaagaaagattaggagggagaggaagactgaactcgcagctcatggaatctgaaggatctaatggcaaactgcaggaaagcatatcaagtcacttcttgagacttctgttgcaaatacttctttttgaagatttcagatcggagttagcaggttatgctgccgatgctttgcttcctttattgttctgtgaacaggagctatatcagaggttggtccatgagttgttggataaacagcagaatccgaccgtaaaatcaaggctggcaactgcgttccataaccttacaagttcaaacaatctctcaagctcactcgaccggccaaacaggcagagattcaggaaaaacctccttagcttcatggcggatgtatcgggcttcatgcagatcaagtagatgcgatggcagggaacaggtgatgtttgaccggtcaattaaaccccgaggaagcactgcaccactgtggtaggggtgcatgtgggcaccacatgtctgtggattgatgagagcgaagactgccacgacaagtctagtagatcttgaagagctagtgtcaccagaaaagacagggagatgagctagtcttagggttggcattcatagcgcatttgctggacaagatggaggcgtccctggccacgagatcgtcgtgtaaatgcgtttgttagacgcacagaaacggtggggattttgtggtggcgactcgttttgttcaattcccacaggcagaaggtagagatgttaagttgatgtaaataccgtttgatttaaacatgccttattcgtaggagaaagcgacacggcttgctgtaacttagggtttattactctttctcgtggcataggatccccaaagaagtctttgctggggtatttgcagccaaacgatgaccagtatgattgcgagaggttttcaatcttttgtaccaaatttggcctgcagttatgatgacactgagtgccgatacaggcatgaggcattccaaaattggcgggcaccacatgtgtctgtctgctgtctcagtgggggtcactgtagagtgtaggcggt

SEQ ID NO: 10064 - DNA, 4285 bp, Zea Mays
aaactatccagccaccattcacccctccgcactccgcctccgccgcctccctgccctcaactccacgcccggcagggtggccgctcgccggcagccaaaccctaggcgatcgcggaggccaaccacgcttcgggcgcgatcagccgccgccatgcagggcttccccggcggcgcccccgatccgcagcagctacaggccaccatgctcgccatcgagcaggcctgctccctcatccagctgcacatgaatccatctgaagcggaaaaagtgataacttcgctgcattcgtctctcatgccttatcaaagacatcccaaaaaccaaatgcaagattccaagctgctggtgcaattggtgatgctgcggtaagggagtggggagttcttacagatgacaataaaaggagcctaataatatattgtttaaactatgttatggagcatgcaagttctcctgatggctatgtgcaatcgaaagtttccgctgtggcagctagattactgaaaagaggctgggttgagttttcggaccaagaaaaagcagctatcttctttgaggttgagcaatctatccggggcatccatgggcctaatcgacagtttgctgcaatcaatttcttggaaaccttggtttcagaattctccccttcaactgcttctgctatgagcctgcctaaggaatttcacgaacaatgtgaatactcactcgaagtgcagtttttgaaggatttttactgctgggcacaagctgctgtgttcaatactgctgacaaaatcttgaattcaactgtaacaataccggacgaaagagcatgttcagcagcattgcgcctgatgtttcagatactaagttggaatttcaaacatactgtggagcacgagagttcagatgctaagataaatttcggcttaaggattgatacgataaatctgaagaagtttgaacgttcgttggtgaagccagggtctatgtggagagagattctaatatcaagtggacaccctacctgggttttaaacttctataccaccttgcgccaaaagtactcatatgatacactgtggggtgattctccaattgctgtctcttgcagacagcttatagtgcagttatgctccttggcaggctctgtgtttcctaatgataatggggatgcacagattaaacaccttatgctgatattatctgctgttgttctatggattgaacctcctgatgtaatcacagcatcaatccgaaatgggggaagtgaaagtgagttcatagatggttgccatgccttgctttcaatcgcatctttaactactggctcactttttgacaacctcctaaaatctataaggccctatggtacagttaatctgctttctgctttgacgtcagaagctgtcaagtcggttctgaataaccagagtgaagaggaaacctggggcatagattcccttgatattttgttagaaacatggaatgttcttttgggggacgtagatgccgataaaaatccaatctcaaccgatggagcacttgcatcttcaagtttgtttaagatgattgtggagtcacacttgaaggctgctgctgattctgcgttcgaggatactgatgatactgaatattttcatgtttctgtttcaaaacgtgatgaacagttagccttgtatgctctaatagcacgggcttctgcaaatactactattccatttcttgcacagttgttttcagaacgatttgcccggctaaatcagagaaatggtgaaagtgatcctactcaaacactggaagagctctattggctgttgttggttactagtcatgtcctaactgactctggcgaaggagaaacactacttatccctgaagcattacaggctggattccctaatgtgattgaagcagcacatcatcctgttgttacactctcctggtctataataaatttttccaggcagtgtttagatccaggaattagggcaaaatacttcagtccacgactaatggaggctgtgatctggttcttggccagatgggttgcaacctatttagtgccacttgacgtgagtagaggaaaagtaagcagagaaattgataatgtgggtacaaatggatcccaacattccagaaaactgctaaacagttttgcttgggaaaataaccaaggagagcttgttcttgattttgttgttctcatttcaatgttagctcttactacctatcagggagaaaatgagttgcagacactgacatgccagaagctacttgctacagtcgttcgccggaaacacacatgcacttatcttgttcaactggattcatggcgtgatcttacaagagcttttgcaagtggacggtctttgctttcattgagtggacgtttacaaaggtctctagcagaaacacttgcctctgcagcttcctgcatcaaagatcctgaagcatctgcacagtacctgagggatctcatgggaccagtggcagggtgcctggtagaaaatgctagcaggagtgatctaaaatctgtggcacagcaagcagatgttatttacatggtctgttgcctattggaacgactaagaggcgctgctagagctactcaaccccgaactcaaaaagttctatttgagatggctcatactgtgatgaacccacttttgactcttctggaggtctacaaaaatcattccacagtcgtatacatgatactcaagtttgtggtggactttgttgatggtcaagctgtattcctggatgctaaagagacatcagctttggtgagcttttgcttgcaactactccagatatactcctctcataacattgggaaggtaatgctctctctttcttcaagtctgcgtaatgagtcacaagcagaaaaatataaggatctgcgagctttgcttcgtcttctgacaaatatatgttcgaaggatttggttggctttctgtctgattgtggcggtgaaggttcacctgatatcgcagaggttatctacattggtcttgatattgtgacccccttgatatctttggatcttctgaaataccctaaacttagtcgtgattattttgtgcttatatcgcacttgttggaactgtacccggaaaaggttgctcacttaaatagtgatgcttttacaaggattattggaagtcttgacttcgggctccgtaatcaggatagcgatgttgttgagaggtgcctggcagcagtaaatgctcttgcttcatacaatttcaaagaaagattaggagggagaggaagactgaactcgcagctcatggaatctgaaggatctaatggcaaactgcaggaaagcatatcaagtcacttcttgagacttctgttgcaaatacttctttttgaagatttcagatcggagttagcaggttatgctgccgatgctttgcttcctttattgttctgtgaacaggagctatatcagaggttggtccatgagttgttggataaacagcagaatccgaccgtaaaatcaaggctggcaactgcgttccataaccttacaagttcaaacaatctctcaagctcactcgaccggccaaacaggcagagattcaggaaaaacctccttagcttcatggcggatgtatcgggcttcatgcagatcaagtagatgcgatggcagggaacaggtgatgtttgaccggtcaattaaaccccgaggaagcactgcaccactgtggtaggggtgcatgtgggcaccacatgtctgtggattgatgagagcgaagactgccacgacaagtctagtagatcttgaagagctagtgtcaccagaaaagacagggagatgagctagtcttagggttggcattcatagcgcatttgctggacaagatggaggcgtccctggccacgagatcgtcgtgtaaatgcgtttgttagacgcacagaaacggtggggattttgtggtggcgactcgttttgttcaattcccacaggcagaaggtagagatgttaagttgatgtaaataccgtttgatttaaacatgccttattcgtaggagaaagcgacacggcttgctgtaacttagggtttattactctttctcgtggcataggatccccaaagaagtctttgctggggtatttgcagccaaacgatgaccagtatgattgcgagaggttttcaatcttttgtaccaaatttggcctgcagttatgatgacactgagtgccgatacaggcatgaggcattccaaaattggcgggcaccacatgtgtctgtctgctgtctcagtgggggtcactgtagagtgtaggcggt

SEQ ID NO: 10065 - DNA, 4049 bp, Zea Mays
caagacccaagctgcaaaactatccagccaccattcacccctccgcactccgcctccgccgcctccctgccctcaactccacgcccggcagggtggccgctcgccggcagccaaaccctaggcgatcgcggaggccaaccacgcttcgggcgcgatcagccgccgccatgcagggcttccccggcggcgcccccgatccgcagcagctacaggccaccatgctcgccatcgagcaggcctgctccctcatccagctgcacatgaatccatctgaagcggaaaaagtgataacttcgctgcattcgtctctcatgccttatcaagtatgcagattcattcttgagacatcccaaaaaccaaatgcaagattccaagctgctggtgcaattggtgatgctgcggtaagggagtggggagttcttacagatgacaataaaaggagcctaataatatattgtttaaactatgttatggagcatgcaagttctcctgatggctatgtgcaatcgaaagtttccgctgtggcagctagattactgaaaagaggctgggttgagttttcggaccaagaaaaagcagctatcttctttgaggttgagcaatctatccggggcatccatgggcctaatcgacagtttgctgcaatcaatttcttggaaaccttggtttcagaattctccccttcaactgcttctgctatgagcctgcctaaggaatttcacgaacaatgtgaatactcactcgaagtgcagtttttgaaggatttttactgctgggcacaagctgctgtgttcaatactgctgacaaaatcttgaattcaactgtaacaataccggacgaaagagcatgttcagcagcattgcgcctgatgtttcagatactaagttggaatttcaaacatactgtggagcacgagagttcagatgctaagataaatttcggcttaaggattgatacgataaatctgaagaagtttgaacgttcgttggtgaagataatggggatgcacagattaaacaccttatgctgatattatctgctgttgttctatggattgaacctcctgatgtaatcacagcatcaatccgaaatgggggaagtgaaaggccctatggtacagttaatctgctttctgctttgacgtcagaagctgtcaagtcggttctgaataaccagagtgaagaggaaacctggggcatagattcccttgatattttgttagaaacatggaatgttcttttgggggacgtagatgccgataaaaatccaatctcaaccgatggagcacttgcatcttcaagtttgtttaagatgattgtggagtcacacttgaaggctgctgctgattctgcgttcgaggatactgatgatactgaatattttcatgtttctgtttcaaaacgtgatgaacagttagccttgtatgctctaatagcacgggcttctgcaaatactactattccatttcttgcacagttgttttcagaacgatttgcccggctaaatcagagaaatggtgaaagtgatcctactcaaacactggaagagctctattggctgttgttggttactagtcatgtcctaactgactctggcgaaggagaaacactacttatccctgaagcattacaggctggattccctaatgtgattgaagcagcacatcatcctgttgttacactctcctggtctataataaatttttccaggcagtgtttagatccaggaattagggcaaaatacttcagtccacgactaatggaggctgtgatctggttcttggccagatgggttgcaacctatttagtgccacttgacgtgagtagaggaaaagtaagcagagaaattgataatgtgggtacaaatggatcccaacattccagaaaactgctaaacagttttgcttgggaaaataaccaaggagagcttgttcttgattttgttgttctcatttcaatgttagctcttactacctatcagggagaaaatgagttgcagacactgacatgccagaagctacttgctacagtcgttcgccggaaacacacatgcacttatcttgttcaactggattcatggcgtgatcttacaagagcttttgcaagtggacggtctttgctttcattgagtggacgtttacaaaggtctctagcagaaacacttgcctctgcagcttcctgcatcaaagatcctgaagcatctgcacagtacctgagggatctcatgggaccagtggcagggtgcctggtagaaaatgctagcaggagtgatctaaaatctgtggcacagcaagcagatgttatttacatggtctgttgcctattggaacgactaagaggcgctgctagagctactcaaccccgaactcaaaaagttctatttgagatggctcatactgtgatgaacccacttttgactcttctggaggtctacaaaaatcattccacagtcgtatacatgatactcaagtttgtggtggactttgttgatggtcaagctgtattcctggatgctaaagagacatcagctttggtgagcttttgcttgcaactactccagatatactcctctcataacattgggaaggtaatgctctctctttcttcaagtctgcgtaatgagtcacaagcagaaaaatataaggatctgcgagctttgcttcgtcttctgacaaatatatgttcgaaggatttggttggctttctgtctgattgtggcggtgaaggttcacctgatatcgcagaggttatctacattggtcttgatattgtgacccccttgatatctttggatcttctgaaataccctaaacttagtcgtgattattttgtgcttatatcgcacttgttggaactgtacccggaaaaggttgctcacttaaatagtgatgcttttacaaggattattggaagtcttgacttcgggctccgtaatcaggatagcgatgttgttgagaggtgcctggcagcagtaaatgctcttgcttcatacaatttcaaagaaagattaggagggagaggaagactgaactcgcagctcatggaatctgaaggatctaatggcaaactgcaggaaagcatatcaagtcacttcttgagacttctgttgcaaatacttctttttgaagatttcagatcggagttagcaggttatgctgccgatgctttgcttcctttattgttctgtgaacaggagctatatcagaggttggtccatgagttgttggataaacagcagaatccgaccgtaaaatcaaggctggcaactgcgttccataaccttacaagttcaaacaatctctcaagctcactcgaccggccaaacaggcagagattcaggaaaaacctccttagcttcatggcggatgtatcgggcttcatgcagatcaagtagatgcgatggcagggaacaggtgatgtttgaccggtcaattaaaccccgaggaagcactgcaccactgtggtaggggtgcatgtgggcaccacatgtctgtggattgatgagagcgaagactgccacgacaagtctagtagatcttgaagagctagtgtcaccagaaaagacagggagatgagctagtcttagggttggcattcatagcgcatttgctggacaagatggaggcgtccctggccacgagatcgtcgtgtaaatgcgtttgttagacgcacagaaacggtggggattttgtggtggcgactcgttttgttcaattcccacaggcagaaggtagagatgttaagttgatgtaaataccgtttgatttaaacatgccttattcgtaggagaaagcgacacggcttgctgtaacttagggtttattactctttctcgtggcataggatccccaaagaagtctttgctggggtatttgcagccaaacgatgaccagtatgattgcgagaggttttcaatcttttgtaccaaatttggcctgcagttatgatgacactgagtgccgatacaggcatgaggcattccaaaattggcgggcaccacatgtgtctgtctgctgtctcagtgggggtcactgtagagtgtaggcggt

SEQ ID NO: 10066 - DNA, 4129 bp, Zea Mays
caagacccaagctgcaaaactatccagccaccattcacccctccgcactccgcctccgccgcctccctgccctcaactccacgcccggcagggtggccgctcgccggcagccaaaccctaggcgatcgcggaggccaaccacgcttcgggcgcgatcagccgccgccatgcagggcttccccggcggcgcccccgatccgcagcagctacaggccaccatgctcgccatcgagcaggcctgctccctcatccagctgcacatgaatccatctgaagcggaaaaagtgataacttcgctgcattcgtctctcatgccttatcaagtatgcagattcattcttgagacatcccaaaaaccaaatgcaagattccaagctgctggtgcaattggtgatgctgcggtaagggagtggggagttcttacagatgacaataaaaggagcctaataatatattgtttaaactatgttatggagcatgcaagttctcctgatggctatgtgcaatcgaaagtttccgctgtggcagctagattactgaaaagaggctgggttgagttttcggaccaagaaaaagcagctatcttctttgaggttgagcaatctatccggggcatccatgggcctaatcgacagtttgctgcaatcaatttcttggaaaccttgaattctccccttcaactgcttctgctatgagcctgcctaaggaatttcacgaacaatgtgaatactcactcgaagtgcagtttttgaaggatttttactgctgggcacaagctgctgtgttcaatactgctgacaaaatcttgaattcaactgtaacaataccggacgaaagagcatgttcagcagcattgcgcctgatgtttcagatactaagttggaatttcaaacatactgtggagcacgagagttcagatgctaagataaatttcggcttaaggattgatacgataaatctgaagaagtttgaacgttcgttggtgaagataatggggatgcacagattaaacaccttatgctgatattatctgctgttgttctatggattgaacctcctgatgtaatcacagcatcaatccgaaatgggggaagtgaaagtgagttcatagatggttgccatgccttgctttcaatcgcatctttaactactggctcactttttgacaacctcctaaaatctataaggccctatggtacagttaatctgctttctgctttgacgtcagaagctgtcaagtcggttctgaataaccagagtgaagaggaaacctggggcatagattcccttgatattttgttagaaacatggaatgttcttttgggggacgtagatgccgataaaaatccaatctcaaccgatggagcacttgcatcttcaagtttgtttaagatgattgtggagtcacacttgaaggctgctgctgattctgcgttcgaggatactgatgatactgaatattttcatgtttctgtttcaaaacgtgatgaacagttagccttgtatgctctaatagcacgggcttctgcaaatactactattccatttcttgcacagttgttttcagaacgatttgcccggctaaatcagagaaatggtgaaagtgatcctactcaaacactggaagagctctattggctgttgttggttactagtcatgtcctaactgactctggcgaaggagaaacactacttatccctgaagcattacaggctggattccctaatgtgattgaagcagcacatcatcctgttgttacactctcctggtctataataaatttttccaggcagtgtttagatccaggaattagggcaaaatacttcagtccacgactaatggaggctgtgatctggttcttggccagatgggttgcaacctatttagtgccacttgacgtgagtagaggaaaagtaagcagagaaattgataatgtgggtacaaatggatcccaacattccagaaaactgctaaacagttttgcttgggaaaataaccaaggagagcttgttcttgattttgttgttctcatttcaatgttagctcttactacctatcagggagaaaatgagttgcagacactgacatgccagaagctacttgctacagtcgttcgccggaaacacacatgcacttatcttgttcaactggattcatggcgtgatcttacaagagcttttgcaagtggacggtctttgctttcattgagtggacgtttacaaaggtctctagcagaaacacttgcctctgcagcttcctgcatcaaagatcctgaagcatctgcacagtacctgagggatctcatgggaccagtggcagggtgcctggtagaaaatgctagcaggagtgatctaaaatctgtggcacagcaagcagatgttatttacatggtctgttgcctattggaacgactaagaggcgctgctagagctactcaaccccgaactcaaaaagttctatttgagatggctcatactgtgatgaacccacttttgactcttctggaggtctacaaaaatcattccacagtcgtatacatgatactcaagtttgtggtggactttgttgatggtcaagctgtattcctggatgctaaagagacatcagctttggtgagcttttgcttgcaactactccagatatactcctctcataacattgggaaggtaatgctctctctttcttcaagtctgcgtaatgagtcacaagcagaaaaatataaggatctgcgagctttgcttcgtcttctgacaaatatatgttcgaaggatttggttggctttctgtctgattgtggcggtgaaggttcacctgatatcgcagaggttatctacattggtcttgatattgtgacccccttgatatctttggatcttctgaaataccctaaacttagtcgtgattattttgtgcttatatcgcacttgttggaactgtacccggaaaaggttgctcacttaaatagtgatgcttttacaaggattattggaagtcttgacttcgggctccgtaatcaggatagcgatgttgttgagaggtgcctggcagcagtaaatgctcttgcttcatacaatttcaaagaaagattaggagggagaggaagactgaactcgcagctcatggaatctgaaggatctaatggcaaactgcaggaaagcatatcaagtcacttcttgagacttctgttgcaaatacttctttttgaagatttcagatcggagttagcaggttatgctgccgatgctttgcttcctttattgttctgtgaacaggagctatatcagaggttggtccatgagttgttggataaacagcagaatccgaccgtaaaatcaaggctggcaactgcgttccataaccttacaagttcaaacaatctctcaagctcactcgaccggccaaacaggcagagattcaggaaaaacctccttagcttcatggcggatgtatcgggcttcatgcagatcaagtagatgcgatggcagggaacaggtgatgtttgaccggtcaattaaaccccgaggaagcactgcaccactgtggtaggggtgcatgtgggcaccacatgtctgtggattgatgagagcgaagactgccacgacaagtctagtagatcttgaagagctagtgtcaccagaaaagacagggagatgagctagtcttagggttggcattcatagcgcatttgctggacaagatggaggcgtccctggccacgagatcgtcgtgtaaatgcgtttgttagacgcacagaaacggtggggattttgtggtggcgactcgttttgttcaattcccacaggcagaaggtagagatgttaagttgatgtaaataccgtttgatttaaacatgccttattcgtaggagaaagcgacacggcttgctgtaacttagggtttattactctttctcgtggcataggatccccaaagaagtctttgctggggtatttgcagccaaacgatgaccagtatgattgcgagaggttttcaatcttttgtaccaaatttggcctgcagttatgatgacactgagtgccgatacaggcatgaggcattccaaaattggcgggcaccacatgtgtctgtctgctgtctcagtgggggtcactgtagagtgtaggcggt

SEQ ID NO: 10067 - DNA, 4547 bp, Zea Mays
caagacccaagctgcaaaactatccagccaccattcacccctccgcactccgcctccgccgcctccctgccctcaactccacgcccggcagggtggccgctcgccggcagccaaaccctaggcgatcgcggaggccaaccacgcttcgggcgcgatcagccgccgccatgcagggcttccccggcggcgcccccgatccgcagcagctacaggccaccatgctcgccatcgagcaggcctgctccctcatccagctgcacatgaatccatctgaagcggaaaaagtgataacttcgctgcattcgtctctcatgccttatcaagtatgcagattcattcttgagacatcccaaaaaccaaatgcaagattccaagctgctggtgcaattggtgatgctgcggtaagggagtggggagttcttacagatgacaataaaaggagcctaataatatattgtttaaactatgttatggagcatgcaagttctcctgatggctatgtgcaatcgaaagtttccgctgtggcagctagattactgaaaagaggctgggttgagttttcggaccaagaaaaagcagctatcttctttgaggttgagcaatctatccggggcatccatgggcctaatcgacagtttgctgcaatcaatttcttggaaaccttggtttcagaattctccccttcaactgcttctgctatgagcctgcctaaggaatttcacgaacaatgtgaatactcactcgaagtgcagtttttgaaggatttttactgctgggcacaagctgctgtgttcaatactgctgacaaaatcttgaattcaactgtaacaataccggacgaaagagcatgttcagcagcattgcgcctgatgtttcagatactaagttggaatttcaaacatactgtggagcacgagagttcagatgctaagataaatttcggcttaaggattgatacgataaatctgaagaagtttgaacgttcgttggtgaagccagggtctatgtggagagagattctaatatcaagtggacaccctacctgggttttaaacttctataccaccttgcgccaaaagtactcatatgatacactgtggggtgattctccaattgctgtctcttgcagacagcttatagtgcagttatgctccttggcaggctctgtgtttcctaatgataatggggatgcacagattaaacaccttatgctgatattatctgctgttgttctatggattgaacctcctgatgtaatcacagcatcaatccgaaatgggggaagtgaaaggttctctcaggatccatctttgcaatcttgatttaacccgagaaaaaacttgagaaatgctgatgagcgagatattcattgtgttgcagtgagttcatagatggttgccatgccttgctttcaatcgcatctttaactactggctcactttttgacaacctcctaaaatctataaggccctatggtacagttaatctgctttctgctttgacgtcagaagctgtcaagtcggttctgaataaccagagtgaagaggaaacctggggcatagattcccttgatattttgttagaaacatggaatgttcttttgggggacgtagatgccgataaaaatccaatctcaaccgatggagcacttgcatcttcaagtttgtttaagatgattgtggagtcacacttgaagggtataaatctctttatattcccatttaaatgtaacctcagtcttgaagaatgttacagatggtgtaaaagattttctatgttgtttacattctgcatactgattactcttattttctttgacatagctgctgctgattctgcgttcgaggatactgatgatactgaatattttcatgtttctgtttcaaaacgtgatgaacagttagccttgtatgctctaatagcacgggcttctgcaaatactactattccatttcttgcacagttgttttcagaacgatttgcccggctaaatcagagaaatggtgaaagtgatcctactcaaacactggaagagctctattggctgttgttggttactagtcatgtcctaactgactctggcgaaggagaaacactacttatccctgaagcattacaggctggattccctaatgtgattgaagcagcacatcatcctgttgttacactctcctggtctataataaatttttccaggcagtgtttagatccaggaattagggcaaaatacttcagtccacgactaatggaggctgtgatctggttcttggccagatgggttgcaacctatttagtgccacttgacgtgagtagaggaaaagtaagcagagaaattgataatgtgggtacaaatggatcccaacattccagaaaactgctaaacagttttgcttgggaaaataaccaaggagagcttgttcttgattttgttgttctcatttcaatgttagctcttactacctatcagggagaaaatgagttgcagacactgacatgccagaagctacttgctacagtcgttcgccggaaacacacatgcacttatcttgttcaactggattcatggcgtgatcttacaagagcttttgcaagtggacggtctttgctttcattgagtggacgtttacaaaggtctctagcagaaacacttgcctctgcagcttcctgcatcaaagatcctgaagcatctgcacagtacctgagggatctcatgggaccagtggcagggtgcctggtagaaaatgctagcaggagtgatctaaaatctgtggcacagcaagcagatgttatttacatggtctgttgcctattggaacgactaagaggcgctgctagagctactcaaccccgaactcaaaaagttctatttgagatggctcatactgtgatgaacccacttttgactcttctggaggtctacaaaaatcattccacagtcgtatacatgatactcaagtttgtggtggactttgttgatggtcaagctgtattcctggatgctaaagagacatcagctttggtgagcttttgcttgcaactactccagatatactcctctcataacattgggaaggtaatgctctctctttcttcaagtctgcgtaatgagtcacaagcagaaaaatataaggatctgcgagctttgcttcgtcttctgacaaatatatgttcgaaggatttgttgtcaatgcaggttggctttctgtctgattgtggcggtgaaggttcacctgatatcgcagaggttatctacattggtcttgatattgtgacccccttgatatctttggatcttctgaaataccctaaacttagtcgtgattattttgtgcttatatcgcacttgttggaactgtacccggaaaaggttgctcacttaaatagtgatgcttttacaaggattattggaagtcttgacttcgggctccgtaatcaggatagcgatgttgttgagaggtgcctggcagcagtaaatgctcttgcttcatacaatttcaaagaaagattaggagggagaggaagactgaactcgcagctcatggaatctgaaggatctaatggcaaactgcaggaaagcatatcaagtcacttcttgagacttctgttgcaaatacttctttttgaagatttcagatcggagttagcaggttatgctgccgatgctttgcttcctttattgttctgtgaacaggagctatatcagaggttggtccatgagttgttggataaacagcagaatccgaccgtaaaatcaaggctggcaactgcgttccataaccttacaagttcaaacaatctctcaagctcactcgaccggccaaacaggcagagattcaggaaaaacctccttagcttcatggcggatgtatcgggcttcatgcagatcaagtagatgcgatggcagggaacaggtgatgtttgaccggtcaattaaaccccgaggaagcactgcaccactgtggtaggggtgcatgtgggcaccacatgtctgtggattgatgagagcgaagactgccacgacaagtctagtagatcttgaagagctagtgtcaccagaaaagacagggagatgagctagtcttagggttggcattcatagcgcatttgctggacaagatggaggcgtccctggccacgagatcgtcgtgtaaatgcgtttgttagacgcacagaaacggtggggattttgtggtggcgactcgttttgttcaattcccacaggcagaaggtagagatgttaagttgatgtaaataccgtttgatttaaacatgccttattcgtaggagaaagcgacacggcttgctgtaacttagggtttattactctttctcgtggcataggatccccaaagaagtctttgctggggtatttgcagccaaacgatgaccagtatgattgcgagaggttttcaatcttttgtaccaaatttggcctgcagttatgatgacactgagtgccgatacaggcatgaggcattccaaaattggcgggcaccacatgtgtctgtctgctgtctcagtgggggtcactgtagagtgtaggcggt

SEQ ID NO: 10068 - DNA, 4525 bp, Zea Mays
caagacccaagctgcaaaactatccagccaccattcacccctccgcactccgcctccgccgcctccctgccctcaactccacgcccggcagggtggccgctcgccggcagccaaaccctaggcgatcgcggaggccaaccacgcttcgggcgcgatcagccgccgccatgcagggcttccccggcggcgcccccgatccgcagcagctacaggccaccatgctcgccatcgagcaggcctgctccctcatccagctgcacatgaatccatctgaagcggaaaaagtgataacttcgctgcattcgtctctcatgccttatcaagtatgcagattcattcttgagacatcccaaaaaccaaatgcaagattccaagctgctggtgcaattggtgatgctgcggtaagggagtggggagttcttacagatgacaataaaaggagcctaataatatattgtttaaactatgttatggagcatgcaagttctcctgatggctatgtgcaatcgaaagtttccgctgtggcagctagattactgaaaagaggctgggttgagttttcggaccaagaaaaagcagctatcttctttgaggttgagcaatctatccggggcatccatgggcctaatcgacagtttgctgcaatcaatttcttggaaaccttgaattctccccttcaactgcttctgctatgagcctgcctaaggaatttcacgaacaatgtgaatactcactcgaagtgcagtttttgaaggatttttactgctgggcacaagctgctgtgttcaatactgctgacaaaatcttgaattcaactgtaacaataccggacgaaagagcatgttcagcagcattgcgcctgatgtttcagatactaagttggaatttcaaacatactgtggagcacgagagttcagatgctaagataaatttcggcttaaggattgatacgataaatctgaagaagtttgaacgttcgttggtgaagataatggggatgcacagattaaacaccttatgctgatattatctgctgttgttctatggattgaacctcctgatgtaatcacagcatcaatccgaaatgggggaagtgaaagtgagttcatagatggttgccatgccttgctttcaatcgcatctttaactactggctcactttttgacaacctcctaaaatctataaggccctatggtacagttaatctgctttctgctttgacgtcagaagctgtcaagtcggttctgaataaccagagtgaagaggaaacctggggcatagattcccttgatattttgttagaaacatggaatgttcttttgggggacgtagatgccgataaaaatccaatctcaaccgatggagcacttgcatcttcaagtttgtttaagatgattgtggagtcacacttgaaggctgctgctgattctgcgttcgaggatactgatgatactgaatattttcatgtttctgtttcaaaacgtgatgaacagttagccttgtatgctctaatagcacgggcttctgcaaatactactattccatttcttgcacagttgttttcagaacgatttgcccggctaaatcagagaaatggtgaaagtgatcctactcaaacactggaagagctctattggctgttgttggttactagtcatgtcctaactgactctggcgaaggagaaacactacttatccctgaagcattacaggctggattccctaatgtgattgaagcagcacatcatcctgttgttacactctcctggtctataataaatttttccaggcagtgtttagatccaggaattagggcaaaatacttcagtccacgactaatggaggctgtgatctggttcttggccagatgggttgcaacctatttagtgccacttgacgtgagtagaggaaaagtaagcagagaaattgataatgtgggtacaaatggatcccaacattccagaaaactgctaaacagttttgcttgggaaaataaccaaggagagcttgttcttgattttgttgttctcatttcaatgttagctcttactacctatcagggagaaaatgagttgcaggtaagcttcatttttactttttaatcatgatggaattgtgcagagtgcccagacatgtttgccccagttcaatttgcagtgcctaatgcaaaaatgctcgagtaaaacatcttgatcttttgatttcattatctctttgatgtgactttagccttatcattccatcacactgtgcgattgatccaaaataccaaatactgcataacttgaccaaacattaacaatgccatcaactttcaagatttctcattagagtgttttcactagcgttagacaagataaaagtttccaatgtcccttatatgttgttttgattcctgttcacagacactgacatgccagaagctacttgctacagtcgttcgccggaaacacacatgcacttatcttgttcaactggattcatggcgtgatcttacaagagcttttgcaagtggacggtctttgctttcattgagtggacgtttacaaaggtctctagcagaaacacttgcctctgcagcttcctgcatcaaagatcctgaagcatctgcacagtacctgagggatctcatgggaccagtggcagggtgcctggtagaaaatgctagcaggagtgatctaaaatctgtggcacagcaagcagatgttatttacatggtaagtatgtataatgtttgctttgtgctcttttagagaagaataaaggacataggtcaatggttgtaggtctgttgcctattggaacgactaagaggcgctgctagagctactcaaccccgaactcaaaaagttctatttgagatggctcatactgtgatgaacccacttttgactcttctggaggtctacaaaaatcattccacagtcgtatacatgatactcaagtttgtggtggactttgttgatggtcaagctgtattcctggatgctaaagagacatcagctttggtgagcttttgcttgcaactactccagatatactcctctcataacattgggaaggtaatgctctctctttcttcaagtctgcgtaatgagtcacaagcagaaaaatataaggatctgcgagctttgcttcgtcttctgacaaatatatgttcgaaggatttggttggctttctgtctgattgtggcggtgaaggttcacctgatatcgcagaggttatctacattggtcttgatattgtgacccccttgatatctttggatcttctgaaataccctaaacttagtcgtgattattttgtgcttatatcgcacttgttggaactgtacccggaaaaggttgctcacttaaatagtgatgcttttacaaggattattggaagtcttgacttcgggctccgtaatcaggatagcgatgttgttgagaggtgcctggcagcagtaaatgctcttgcttcatacaatttcaaagaaagattaggagggagaggaagactgaactcgcagctcatggaatctgaaggatctaatggcaaactgcaggaaagcatatcaagtcacttcttgagacttctgttgcaaatacttctttttgaagatttcagatcggagttagcaggttatgctgccgatgctttgcttcctttattgttctgtgaacaggagctatatcagaggttggtccatgagttgttggataaacagcagaatccgaccgtaaaatcaaggctggcaactgcgttccataaccttacaagttcaaacaatctctcaagctcactcgaccggccaaacaggcagagattcaggaaaaacctccttagcttcatggcggatgtatcgggcttcatgcagatcaagtagatgcgatggcagggaacaggtgatgtttgaccggtcaattaaaccccgaggaagcactgcaccactgtggtaggggtgcatgtgggcaccacatgtctgtggattgatgagagcgaagactgccacgacaagtctagtagatcttgaagagctagtgtcaccagaaaagacagggagatgagctagtcttagggttggcattcatagcgcatttgctggacaagatggaggcgtccctggccacgagatcgtcgtgtaaatgcgtttgttagacgcacagaaacggtggggattttgtggtggcgactcgttttgttcaattcccacaggcagaaggtagagatgttaagttgatgtaaataccgtttgatttaaacatgccttattcgtaggagaaagcgacacggcttgctgtaacttagggtttattactctttctcgtggcataggatccccaaagaagtctttgctggggtatttgcagccaaacgatgaccagtatgattgcgagaggttttcaatcttttgtaccaaatttggcctgcagttatgatgacactgagtgccgatacaggcatgaggcattccaaaattggcgggcaccacatgtgtctgtctgctgtctcagtgggggtcactgtagagtgtaggcggt

SEQ ID NO: 10069 - DNA, 4647 bp, Zea Mays
caagacccaagctgcaaaactatccagccaccattcacccctccgcactccgcctccgccgcctccctgccctcaactccacgcccggcagggtggccgctcgccggcagccaaaccctaggcgatcgcggaggccaaccacgcttcgggcgcgatcagccgccgccatgcagggcttccccggcggcgcccccgatccgcagcagctacaggccaccatgctcgccatcgagcaggcctgctccctcatccagctgcacatgaatccatctgaagcggaaaaagtgataacttcgctgcattcgtctctcatgccttatcaagtatgcagattcattcttgagacatcccaaaaaccaaatgcaagattccaagctgctggtgcaattggtgatgctgcggtaagggagtggggagttcttacagatgacaataaaaggagcctaataatatattgtttaaactatgttatggagcatgcaagttctcctgatggctatgtgcaatcgaaagtttccgctgtggcagctagattactgaaaagaggctgggttgagttttcggaccaagaaaaagcagctatcttctttgaggttgagcaatctatccggggcatccatgggcctaatcgacagtttgctgcaatcaatttcttggaaaccttggtttcagaattctccccttcaactgcttctgctatgagcctgcctaaggaatttcacgaacaatgtgaatactcactcgaagtgcagtttttgaaggatttttactgctgggcacaagctgctgtgttcaatactgctgacaaaatcttgaattcaactgtaacaataccggacgaaagagcatgttcagcagcattgcgcctgatgtttcagatactaagttggaatttcaaacatactgtggagcacgagagttcagatgctaagataaatttcggcttaaggattgatacgataaatctgaagaagtttgaacgttcgttggtgaagccagggtctatgtggagagagattctaatatcaagtggacaccctacctgggttttaaacttctataccaccttgcgccaaaagtactcatatgatacactgtggggtgattctccaattgctgtctcttgcagacagcttatagtgcagttatgctccttggcaggctctgtgtttcctaatgataatggggatgcacagattaaacaccttatgctgatattatctgctgttgttctatggattgaacctcctgatgtaatcacagcatcaatccgaaatgggggaagtgaaagtgagttcatagatggttgccatgccttgctttcaatcgcatctttaactactggctcactttttgacaacctcctaaaatctataaggccctatggtacagttaatctgctttctgctttgacgtcagaagctgtcaagtcggttctgaataaccagagtgaagaggaaacctggggcatagattcccttgatattttgttagaaacatggaatgttcttttgggggacgtagatgccgataaaaatccaatctcaaccgatggagcacttgcatcttcaagtttgtttaagatgattgtggagtcacacttgaaggctgctgctgattctgcgttcgaggatactgatgatactgaatattttcatgtttctgtttcaaaacgtgatgaacagttagccttgtatgctctaatagcacgggcttctgcaaatactactattccatttcttgcacagttgttttcagaacgatttgcccggctaaatcagagaaatggtgaaagtgatcctactcaaacactggaagagctctattggctgttgttggttactagtcatgtcctaactgactctggcgaaggagaaacactacttatccctgaagcattacaggctggattccctaatgtgattgaagcagcacatcatcctgttgttacactctcctggtctataataaatttttccaggcagtgtttagatccaggaattagggcaaaatacttcagtccacgactaatggaggctgtgatctggttcttggccagatgggttgcaacctatttagtgccacttgacgtgagtagaggaaaagtaagcagagaaattgataatgtgggtacaaatggatcccaacattccagaaaactgctaaacagttttgcttgggaaaataaccaaggagagcttgttcttgattttgttgttctcatttcaatgttagctcttactacctatcagggagaaaatgagttgcaggtaagcttcatttttactttttaatcatgatggaattgtgcagagtgcccagacatgtttgccccagttcaatttgcagtgcctaatgcaaaaatgctcgagtaaaacatcttgatcttttgatttcattatctctttgatgtgactttagccttatcattccatcacactgtgcgattgatccaaaataccaaatactgcataacttgaccaaacattaacaatgccatcaactttcaagatttctcattagagtgttttcactagcgttagacaagataaaagtttccaatgtcccttatatgttgttttgattcctgttcacagacactgacatgccagaagctacttgctacagtcgttcgccggaaacacacatgcacttatcttgttcaactggattcatggcgtgatcttacaagagcttttgcaagtggacggtctttgctttcattgagtggacgtttacaaaggtctctagcagaaacacttgcctctgcagcttcctgcatcaaagatcctgaagcatctgcacagtacctgagggatctcatgggaccagtggcagggtgcctggtagaaaatgctagcaggagtgatctaaaatctgtggcacagcaagcagatgttatttacatggtctgttgcctattggaacgactaagaggcgctgctagagctactcaaccccgaactcaaaaagttctatttgagatggctcatactgtgatgaacccacttttgactcttctggaggtctacaaaaatcattccacagtcgtatacatgatactcaagtttgtggtggactttgttgatggtcaagctgtattcctggatgctaaagagacatcagctttggtgagcttttgcttgcaactactccagatatactcctctcataacattgggaaggtaatgctctctctttcttcaagtctgcgtaatgagtcacaagcagaaaaatataaggatctgcgagctttgcttcgtcttctgacaaatatatgttcgaaggatttggttggctttctgtctgattgtggcggtgaaggttcacctgatatcgcagaggttatctacattggtcttgatattgtgacccccttgatatctttggatcttctgaaataccctaaacttagtcgtgattattttgtgcttatatcgcacttgttggaactgtacccggaaaaggttgctcacttaaatagtgatgcttttacaaggattattggaagtcttgacttcgggctccgtaatcaggatagcgatgttgttgagaggtgcctggcagcagtaaatgctcttgcttcatacaatttcaaagaaagattaggagggagaggaagactgaactcgcagctcatggaatctgaaggatctaatggcaaactgcaggaaagcatatcaagtcacttcttgagacttctgttgcaaatacttctttttgaagatttcagatcggagttagcaggttatgctgccgatgctttgcttcctttattgttctgtgaacaggagctatatcagaggttggtccatgagttgttggataaacagcagaatccgaccgtaaaatcaaggctggcaactgcgttccataaccttacaagttcaaacaatctctcaagctcactcgaccggccaaacaggcagagattcaggaaaaacctccttagcttcatggcggatgtatcgggcttcatgcagatcaagtagatgcgatggcagggaacaggtgatgtttgaccggtcaattaaaccccgaggaagcactgcaccactgtggtaggggtgcatgtgggcaccacatgtctgtggattgatgagagcgaagactgccacgacaagtctagtagatcttgaagagctagtgtcaccagaaaagacagggagatgagctagtcttagggttggcattcatagcgcatttgctggacaagatggaggcgtccctggccacgagatcgtcgtgtaaatgcgtttgttagacgcacagaaacggtggggattttgtggtggcgactcgttttgttcaattcccacaggcagaaggtagagatgttaagttgatgtaaataccgtttgatttaaacatgccttattcgtaggagaaagcgacacggcttgctgtaacttagggtttattactctttctcgtggcataggatccccaaagaagtctttgctggggtatttgcagccaaacgatgaccagtatgattgcgagaggttttcaatcttttgtaccaaatttggcctgcagttatgatgacactgagtgccgatacaggcatgaggcattccaaaattggcgggcaccacatgtgtctgtctgctgtctcagtgggggtcactgtagagtgtaggcggt

SEQ ID NO: 10070 - DNA, 4412 bp, Zea Mays
caagacccaagctgcaaaactatccagccaccattcacccctccgcactccgcctccgccgcctccctgccctcaactccacgcccggcagggtggccgctcgccggcagccaaaccctaggcgatcgcggaggccaaccacgcttcgggcgcgatcagccgccgccatgcagggcttccccggcggcgcccccgatccgcagcagctacaggccaccatgctcgccatcgagcaggcctgctccctcatccagctgcacatgaatccatctgaagcggaaaaagtgataacttcgctgcattcgtctctcatgccttatcaagtatgcagattcattcttgagacatcccaaaaaccaaatgcaagattccaagctgctggtgcaattggtgatgctgcggtaagggagtggggagttcttacagatgacaataaaaggagcctaataatatattgtttaaactatgttatggagcatgcaagttctcctgatggctatgtgcaatcgaaagtttccgctgtggcagctagattactgaaaagaggctgggttgagttttcggaccaagaaaaagcagctatcttctttgaggttgagcaatctatccggggcatccatgggcctaatcgacagtttgctgcaatcaatttcttggaaaccttggtttcagaattctccccttcaactgcttctgctatgagcctgcctaaggaatttcacgaacaatgtgaatactcactcgaagtgcagtttttgaaggatttttactgctgggcacaagctgctgtgttcaatactgctgacaaaatcttgaattcaactgtaacaataccggacgaaagagcatgttcagcagcattgcgcctgatgtttcagatactaagttggaatttcaaacatactgtggagcacgagagttcagatgctaagataaatttcggcttaaggattgatacgataaatctgaagaagtttgaacgttcgttggtgaagccagggtctatgtggagagagattctaatatcaagtggacaccctacctgggttttaaacttctataccaccttgcgccaaaagtactcatatgatacactgtggggtgattctccaattgctgtctcttgcagacagcttatagtgcagttatgctccttggcaggctctgtgtttcctaatgataatggggatgcacagattaaacaccttatgctgatattatctgctgttgttctatggattgaacctcctgatgtaatcacagcatcaatccgaaatgggggaagtgaaagtgagttcatagatggttgccatgccttgctttcaatcgcatctttaactactggctcactttttgacaacctcctaaaatctataaggccctatggtacagttaatctgctttctgctttgacgtcagaagctgtcaagtcggttctgaataaccagagtgaagaggaaacctggggcatagattcccttgatattttgttagaaacatggaatgttcttttgggggacgtagatgccgataaaaatccaatctcaaccgatggagcacttgcatcttcaagtttgtttaagatgattgtggagtcacacttgaaggctgctgctgattctgcgttcgaggatactgatgatactgaatattttcatgtttctgtttcaaaacgtgatgaacagttagccttgtatgctctaatagcacgggcttctgcaaatactactattccatttcttgcacagttgttttcagaacgatttgcccggctaaatcagagaaatggtgaaagtgatcctactcaaacactggaagagctctattggctgttgttggttactagtcatgtcctaactgactctggcgaaggagaaacactacttgttgagcgagaaatccatgatgagatcccggagccgaggtactcaactaaagctcaaattgacgaagctcctggtgtatcccaaatccttagatccctgaagcattacaggctggattccctaatgtgattgaagcagcacatcatcctgttgttacactctcctggtctataataaatttttccaggcagtgtttagatccaggaattagggcaaaatacttcagtccacgactaatggaggctgtgatctggttcttggccagatgggttgcaacctatttagtgccacttgacgtgagtagaggaaaagtaagcagagaaattgataatgtgggtacaaatggatcccaacattccagaaaactgctaaacagttttgcttgggaaaataaccaaggagagcttgttcttgattttgttgttctcatttcaatgttagctcttactacctatcagggagaaaatgagttgcagacactgacatgccagaagctacttgctacagtcgttcgccggaaacacacatgcacttatcttgttcaactggattcatggcgtgatcttacaagagcttttgcaagtggacggtctttgctttcattgagtggacgtttacaaaggtctctagcagaaacacttgcctctgcagcttcctgcatcaaagatcctgaagcatctgcacagtacctgagggatctcatgggaccagtggcagggtgcctggtagaaaatgctagcaggagtgatctaaaatctgtggcacagcaagcagatgttatttacatggtctgttgcctattggaacgactaagaggcgctgctagagctactcaaccccgaactcaaaaagttctatttgagatggctcatactgtgatgaacccacttttgactcttctggaggtctacaaaaatcattccacagtcgtatacatgatactcaagtttgtggtggactttgttgatggtcaagctgtattcctggatgctaaagagacatcagctttggtgagcttttgcttgcaactactccagatatactcctctcataacattgggaaggtaatgctctctctttcttcaagtctgcgtaatgagtcacaagcagaaaaatataaggatctgcgagctttgcttcgtcttctgacaaatatatgttcgaaggatttggttggctttctgtctgattgtggcggtgaaggttcacctgatatcgcagaggttatctacattggtcttgatattgtgacccccttgatatctttggatcttctgaaataccctaaacttagtcgtgattattttgtgcttatatcgcacttgttggaactgtacccggaaaaggttgctcacttaaatagtgatgcttttacaaggattattggaagtcttgacttcgggctccgtaatcaggatagcgatgttgttgagaggtgcctggcagcagtaaatgctcttgcttcatacaatttcaaagaaagattaggagggagaggaagactgaactcgcagctcatggaatctgaaggatctaatggcaaactgcaggaaagcatatcaagtcacttcttgagacttctgttgcaaatacttctttttgaagatttcagatcggagttagcaggttatgctgccgatgctttgcttcctttattgttctgtgaacaggagctatatcagaggttggtccatgagttgttggataaacagcagaatccgaccgtaaaatcaaggctggcaactgcgttccataaccttacaagttcaaacaatctctcaagctcactcgaccggccaaacaggcagagattcaggaaaaacctccttagcttcatggcggatgtatcgggcttcatgcagatcaagtagatgcgatggcagggaacaggtgatgtttgaccggtcaattaaaccccgaggaagcactgcaccactgtggtaggggtgcatgtgggcaccacatgtctgtggattgatgagagcgaagactgccacgacaagtctagtagatcttgaagagctagtgtcaccagaaaagacagggagatgagctagtcttagggttggcattcatagcgcatttgctggacaagatggaggcgtccctggccacgagatcgtcgtgtaaatgcgtttgttagacgcacagaaacggtggggattttgtggtggcgactcgttttgttcaattcccacaggcagaaggtagagatgttaagttgatgtaaataccgtttgatttaaacatgccttattcgtaggagaaagcgacacggcttgctgtaacttagggtttattactctttctcgtggcataggatccccaaagaagtctttgctggggtatttgcagccaaacgatgaccagtatgattgcgagaggttttcaatcttttgtaccaaatttggcctgcagttatgatgacactgagtgccgatacaggcatgaggcattccaaaattggcgggcaccacatgtgtctgtctgctgtctcagtgggggtcactgtagagtgtaggcggt

SEQ ID NO: 10071 - DNA, 4242 bp, Zea Mays
caagacccaagctgcaaaactatccagccaccattcacccctccgcactccgcctccgccgcctccctgccctcaactccacgcccggcagggtggccgctcgccggcagccaaaccctaggcgatcgcggaggccaaccacgcttcgggcgcgatcagccgccgccatgcagggcttccccggcggcgcccccgatccgcagcagctacaggccaccatgctcgccatcgagcaggcctgctccctcatccagctgcacatgaatccatctgaagcggaaaaagtgataacttcgctgcattcgtctctcatgccttatcaagtatgcagattcattcttgagacatcccaaaaaccaaatgcaagattccaagctgctggtgcaattggtgatgctgcggtaagggagtggggagttcttacagatgacaataaaaggagcctaataatatattgtttaaactatgttatggagcatgcaagttctcctgatggctatgtgcaatcgaaagtttccgctgtggcagctagattactgaaaagaggctgggttgagttttcggaccaagaaaaagcagctatcttctttgaggttgagcaatctatccggggcatccatgggcctaatcgacagtttgctgcaatcaatttcttggaaaccttggtttcagaattctccccttcaactgcttctgctatgagcctgcctaaggaatttcacgaacaatgtgaatactcactcgaagtgcagtttttgaaggatttttactgctgggcacaagctgctgtgttcaatactgctgacaaaatcttgaattcaactgtaacaataccggacgaaagagcatgttcagcagcattgcgcctgatgtttcagatactaagttggaatttcaaacatactgtggagcacgagagttcagatgctaagataaatttcggcttaaggattgatacgataaatctgaagaagtttgaacgttcgttggtgaagccagggtctatgtggagagagattctaatatcaagtggacaccctacctgggttttaaacttctataccaccttgcgccaaaagtactcatatgatacactgtggggtgattctccaattgctgtctcttgcagacagcttatagtgcagttatgctccttggcaggctctgtgtttcctaatgataatggggatgcacagattaaacaccttatgctgatattatctgctgttgttctatggattgaacctcctgatgtaatcacagcatcaatccgaaatgggggaagtgaaagtgagttcatagatggttgccatgccttgctttcaatcgcatctttaactactggctcactttttgacaacctcctaaaatctataaggccctatggtacagttaatctgctttctgctttgacgtcagaagctgtcaagtcggttctgaataaccagagtgaagaggaaacctggggcatagattcccttgatattttgttagaaacatggaatgttcttttgggggacgtagatgccgataaaaatccaatctcaaccgatggagcacttgcatcttcaagtttgtttaagatgattgtggagtcacacttgaaggctgctgctgattctgcgttcgaggatactgatgatactgaatattttcatgtttctgtttcaaaacgtgatgaacagttagccttgtatgctctaatagcacgggcttctgcaaatactactattccatttcttgcacagttgttttcagaacgatttgcccggctaaatcagagaaatggtgaaagtgatcctactcaaacactggaagagctctattggctgttgttggttactagtcatgtcctaactgactctggcgaaggagaaacactacttatccctgaagcattacaggctggattccctaatgtgattgaagcagcacatcatcctgttgttacactctcctggtctataataaatttttccaggcagtgtttagatccaggaattagggcaaaatacttcagtccacgactaatggaggctgtgatctggttcttggccagatgggttgcaacctatttagtgccacttgacgtgagtagaggaaaagtaagcagagaaattgataatgtgggtacaaatggatcccaacattccagaaaactgctaaacagttttgcttgggaaaataaccaaggagagcttgttcttgattttgttgttctcatttcaatgttagctcttactacctatcagggagaaaatgagttgcagacactgacatgccagaagctacttgctacagtcgttcgccggaaacacacatgcacttatcttgttcaactggattcatggcgtgatcttacaagagcttttgcaagtggacggtctttgctttcattgagtggacgtttacaaaggtctctagcagaaacacttgcctctgcagcttcctgcatcaaagatcctgaagcatctgcacagtacctgagggatctcatgggaccagtggcagggtgcctggtagaaaatgctagcaggagtgatctaaaatctgtggcacagcaagcagatgttatttacatggtctgttgcctattggaacgactaagaggcgctgctagagctactcaaccccgaactcaaaaagttctatttgagatggctcatactgtgatgaacccacttttgactcttctggaggtctacaaaaatcattccacagtcgtatacatgatactcaagtttgtggtggactttgttgatggtcaagctgtattcctggatgctaaagagacatcagctttggtgagcttttgcttgcaactactccagatatactcctctcataacattgggaaggtaatgctctctctttcttcaagtctgcgtaatgagtcacaagcagaaaaatataaggatctgcgagctttgcttcgtcttctgacaaatatatgttcgaaggatttggttggctttctgtctgattgtggcggtgaaggttcacctgatatcgcagagtattttgtgcttatatcgcacttgttggaactgtacccggaaaaggttgctcacttaaatagtgatgcttttacaaggattattggaagtcttgacttcgggctccgtaatcaggatagcgatgttgttgagaggtgcctggcagcagtaaatgctcttgcttcatacaatttcaaagaaagattaggagggagaggaagactgaactcgcagctcatggaatctgaaggatctaatggcaaactgcaggaaagcatatcaagtcacttcttgagacttctgttgcaaatacttctttttgaagatttcagatcggagttagcaggttatgctgccgatgctttgcttcctttattgttctgtgaacaggagctatatcagaggttggtccatgagttgttggataaacagcagaatccgaccgtaaaatcaaggctggcaactgcgttccataaccttacaagttcaaacaatctctcaagctcactcgaccggccaaacaggcagagattcaggaaaaacctccttagcttcatggcggatgtatcgggcttcatgcagatcaagtagatgcgatggcagggaacaggtgatgtttgaccggtcaattaaaccccgaggaagcactgcaccactgtggtaggggtgcatgtgggcaccacatgtctgtggattgatgagagcgaagactgccacgacaagtctagtagatcttgaagagctagtgtcaccagaaaagacagggagatgagctagtcttagggttggcattcatagcgcatttgctggacaagatggaggcgtccctggccacgagatcgtcgtgtaaatgcgtttgttagacgcacagaaacggtggggattttgtggtggcgactcgttttgttcaattcccacaggcagaaggtagagatgttaagttgatgtaaataccgtttgatttaaacatgccttattcgtaggagaaagcgacacggcttgctgtaacttagggtttattactctttctcgtggcataggatccccaaagaagtctttgctggggtatttgcagccaaacgatgaccagtatgattgcgagaggttttcaatcttttgtaccaaatttggcctgcagttatgatgacactgagtgccgatacaggcatgaggcattccaaaattggcgggcaccacatgtgtctgtctgctgtctcagtgggggtcactgtagagtgtaggcggt

SEQ ID NO: 10072 - DNA, 4617 bp, Zea Mays
caagacccaagctgcaaaactatccagccaccattcacccctccgcactccgcctccgccgcctccctgccctcaactccacgcccggcagggtggccgctcgccggcagccaaaccctaggcgatcgcggaggccaaccacgcttcgggcgcgatcagccgccgccatgcagggcttccccggcggcgcccccgatccgcagcagctacaggccaccatgctcgccatcgagcaggcctgctccctcatccagctgcacatgaatccatctgaagcggaaaaagtgataacttcgctgcattcgtctctcatgccttatcaagtatgcagattcattcttgagacatcccaaaaaccaaatgcaagattccaagctgctggtgcaattggtgatgctgcggtaagggagtggggagttcttacagatgacaataaaaggagcctaataatatattgtttaaactatgttatggagcatgcaagttctcctgatggctatgtgcaatcgaaagtttccgctgtggcagctagattactgaaaagaggctgggttgagttttcggaccaagaaaaagcagctatcttctttgaggttgagcaatctatccggggcatccatgggcctaatcgacagtttgctgcaatcaatttcttggaaaccttgaattctccccttcaactgcttctgctatgagcctgcctaaggaatttcacgaacaatgtgaatactcactcgaagtgcagtttttgaaggatttttactgctgggcacaagctgctgtgttcaatactgctgacaaaatcttgaattcaactgtaacaataccggacgaaagagcatgttcagcagcattgcgcctgatgtttcagatactaagttggaatttcaaacatactgtggagcacgagagttcagatgctaagataaatttcggcttaaggattgatacgataaatctgaagaagtttgaacgttcgttggtgaagggtctatgtggagagagattctaatatcaagtggacaccctacctgggttttaaacttctataccaccttgcgccaaaagtactcatatgatacactgtggggtgattctccaattgctgtctcttgcagacagcttatagtgcagttatgctccttggcaggctctgtgtttcctaatgataatggggatgcacagattaaacaccttatgctgatattatctgctgttgttctatggattgaacctcctgatgtaatcacagcatcaatccgaaatgggggaagtgaaagtgagttcatagatggttgccatgccttgctttcaatcgcatctttaactactggctcactttttgacaacctcctaaaatctataaggccctatggtacagttaatctgctttctgctttgacgtcagaagctgtcaagtcggttctgaataaccagagtgaagaggaaacctggggcatagattcccttgatattttgttagaaacatggaatgttcttttgggggacgtagatgccgataaaaatccaatctcaaccgatggagcacttgcatcttcaagtttgtttaagatgattgtggagtcacacttgaaggctgctgctgattctgcgttcgaggatactgatgatactgaatattttcatgtttctgtttcaaaacgtgatgaacagttagccttgtatgctctaatagcacgggcttctgcaaatactactattccatttcttgcacagttgttttcagaacgatttgcccggctaaatcagagaaatggtgaaagtgatcctactcaaacactggaagagctctattggctgttgttggttactagtcatgtcctaactgactctggcgaaggagaaacactacttatccctgaagcattacaggctggattccctaatgtgattgaagcagcacatcatcctgttgttacactctcctggtgaaaaatcttacctcaatctattccccttttcatttcgttgaaaatcaggaatctgtttgttgctgtttttagagttttttagtgcaaagactttgacctgctgttttttgggccagttccagctctggtaacccatttgactgtattaaaagtattaatacttatagcaatataatgtgaatattttgtctcttgatgatgcaggtctataataaatttttccaggcagtgtttagatccaggaattagggcaaaatacttcagtccacgactaatggaggctgtgatctggttcttggccagatgggttgcaacctatttagtgccacttgacgtgagtagaggaaaagtaagcagagaaattgataatgtgggtacaaatggatcccaacattccagaaaactgctaaacagttttgcttgggaaaataaccaaggagagcttgttcttgattttgttgttctcatttcaatgttagctcttactacctatcagggagaaaatgagttgcaggtaagcttcatttttactttttaatcatgatggaattgtgcagagtgcccagacatgtttgccccagttcaatttgcagtgcctaatgcaaaaatgctcgaacactgacatgccagaagctacttgctacagtcgttcgccggaaacacacatgcacttatcttgttcaactggattcatggcgtgatcttacaagagcttttgcaagtggacggtctttgctttcattgagtggacgtttacaaaggtctctagcagaaacacttgcctctgcagcttcctgcatcaaagatcctgaagcatctgcacagtacctgagggatctcatgggaccagtggcagggtgcctggtagaaaatgctagcaggagtgatctaaaatctgtggcacagcaagcagatgttatttacatggtctgttgcctattggaacgactaagaggcgctgctagagctactcaaccccgaactcaaaaagttctatttgagatggctcatactgtgatgaacccacttttgactcttctggaggtctacaaaaatcattccacagtcgtatacatgatactcaagtttgtggtggactttgttgatggtcaagctgtattcctggatgctaaagagacatcagctttggtgagcttttgcttgcaactactccagatatactcctctcataacattgggaaggtaatgctctctctttcttcaagtctgcgtaatgagtcacaagcagaaaaatataaggatctgcgagctttgcttcgtcttctgacaaatatatgttcgaaggatttggttggctttctgtctgattgtggcggtgaaggttcacctgatatcgcagaggttatctacattggtcttgatattgtgacccccttgatatctttggatcttctgaaataccctaaacttagtcgtgattattttgtgcttatatcgcacttgttggaactgtacccggaaaaggttgctcacttaaatagtgatgcttttacaaggattattggaagtcttgacttcgggctccgtaatcaggatagcgatgttgttgagaggtgcctggcagcagtaaatgctcttgcttcatacaatttcaaagaaagattaggagggagaggaagactgaactcgcagctcatggaatctgaaggatctaatggcaaactgcaggaaagcatatcaagtcacttcttgagacttctgttgcaaatacttctttttgaagatttcagatcggagttagcaggttatgctgccgatgctttgcttcctttattgttctgtgaacaggagctatatcagaggttggtccatgagttgttggataaacagcagaatccgaccgtaaaatcaaggctggcaactgcgttccataaccttacaagttcaaacaatctctcaagctcactcgaccggccaaacaggcagagattcaggaaaaacctccttagcttcatggcggatgtatcgggcttcatgcagatcaagtagatgcgatggcagggaacaggtgatgtttgaccggtcaattaaaccccgaggaagcactgcaccactgtggtaggggtgcatgtgggcaccacatgtctgtggattgatgagagcgaagactgccacgacaagtctagtagatcttgaagagctagtgtcaccagaaaagacagggagatgagctagtcttagggttggcattcatagcgcatttgctggacaagatggaggcgtccctggccacgagatcgtcgtgtaaatgcgtttgttagacgcacagaaacggtggggattttgtggtggcgactcgttttgttcaattcccacaggcagaaggtagagatgttaagttgatgtaaataccgtttgatttaaacatgccttattcgtaggagaaagcgacacggcttgctgtaacttagggtttattactctttctcgtggcataggatccccaaagaagtctttgctggggtatttgcagccaaacgatgaccagtatgattgcgagaggttttcaatcttttgtaccaaatttggcctgcagttatgatgacactgagtgccgatacaggcatgaggcattccaaaattggcgggcaccacatgtgtctgtctgctgtctcagtgggggtcactgtagagtgtaggcggt

SEQ ID NO: 10073 - DNA, 4316 bp, Zea Mays
ccacaagacccaagctgcaaaactatccagccaccattcacccctccgcactccgcctccgccgcctccctgccctcaactccacgcccggcagggtggccgctcgccggcagccaaaccctaggcgatcgcggaggccaaccacgcttcgggcgcgatcagccgccgccatgcagggcttccccggcggcgcccccgatccgcagcagctacaggccaccatgctcgccatcgagcaggcctgctccctcatccagctgcacatgaatccatctgaagcggaaaaagtgataacttcgctgcattcgtctctcatgccttatcaagtatgcagattcattcttgagacatcccaaaaaccaaatgcaagattccaagctgctggtgcaattggtgatgctgcggtaagggagtggggagttcttacagatgacaataaaaggagcctaataatatattgtttaaactatgttatggagcatgcaagttctcctgatggctatgtgcaatcgaaagtttccgctgtggcagctagattactgaaaagaggctgggttgagttttcggaccaagaaaaagcagctatcttctttgaggttgagcaatctatccggggcatccatgggcctaatcgacagtttgctgcaatcaatttcttggaaaccttgaattctccccttcaactgcttctgctatgagcctgcctaaggaatttcacgaacaatgtgaatactcactcgaagtgcagtttttgaaggatttttactgctgggcacaagctgctgtgttcaatactgctgacaaaatcttgaattcaactgtaacaataccggacgaaagagcatgttcagcagcattgcgcctgatgtttcagatactaagttggaatttcaaacatactgtggagcacgagagttcagatgctaagataaatttcggcttaaggattgatacgataaatctgaagaagtttgaacgttcgttggtgaagccagggtctatgtggagagagattctaatatcaagtggacaccctacctgggttttaaacttctataccaccttgcgccaaaagtactcatatgatacactgtggggtgattctccaattgctgtctcttgcagacagcttatagtgcagttatgctccttggcaggctctgtgtttcctaatgataatggggatgcacagattaaacaccttatgctgatattatctgctgttgttctatggattgaacctcctgatgtaatcacagcatcaatccgaaatgggggaagtgaaagtgagttcatagatggttgccatgccttgctttcaatcgcatctttaactactggctcactttttgacaacctcctaaaatctataaggccctatggtacagttaatctgctttctgctttgacgtcagaagctgtcaagtcggttctgaataaccagagtgaagaggaaacctggggcatagattcccttgatattttgttagaaacatggaatgttcttttgggggacgtagatgccgataaaaatccaatctcaaccgatggagcacttgcatcttcaagtttgtttaagatgattgtggagtcacacttgaaggctgctgctgattctgcgttcgaggatactgatgatactgaatattttcatgtttctgtttcaaaacgtgatgaacagttagccttgtatgctctaatagcacgggcttctgcaaatactactattccatttcttgcacagttgttttcagaacgatttgcccggctaaatcagagaaatggtgaaagtgatcctactcaaacactggaagagctctattggctgttgttggttactagtcatgtcctaactgactctggcgaaggagaaacactacttatccctgaagcattacaggctggattccctaatgtgattgaagcagcacatcatcctgttgttacactctcctggtctataataaatttttccaggcagtgtttagatccaggaattagggcaaaatacttcagtccacgactaatggaggctgtgatctggttcttggccagatgggttgcaacctatttagtgccacttgacgtgagtagaggaaaagtaagcagagaaattgataatgtgggtacaaatggatcccaacattccagaaaactgctaaacagttttgcttgggaaaataaccaaggagagcttgttcttgattttgttgttctcatttcaatgttagctcttactacctatcagggagaaaatgagttgcagacactgacatgccagaagctacttgctacagtcgttcgccggaaacacacatgcacttatcttgttcaactggattcatggcgtgatcttacaagagcttttgcaagtggacggtctttgctttcattgagtggacgtttacaaaggtctctagcagaaacacttgcctctgcagcttcctgcatcaaagatcctgaagcatctgcacagtacctgagggatctcatgggaccagtggcagggtgcctggtagaaaatgctagcaggagtgatctaaaatctgtggcacagcaagcagatgttatttacatggtctgttgcctattggaacgactaagaggcgctgctagagctactcaaccccgaactcaaaaagttctatttgagatggctcatactgtgatgaacccacttttgactcttctggaggtctacaaaaatcattccacagtcgtatacatgatactcaagtttgtggtggactttgttgatggtcaagctgtattcctggatgctaaagagacatcagctttggtgagcttttgcttgcaactactccagatatactcctctcataacattgggaaggtaatgctctctctttcttcaagtctgcgtaatgagtcacaagcagaaaaatataaggatctgcgagctttgcttcgtcttctgacaaatatatgttcgaaggatttggttggctttctgtctgattgtggcggtgaaggttcacctgatatcgcagaggttatctacattggtcttgatattgtgacccccttgatatctttggatcttctgaaataccctaaacttagtcgtgattattttgtgcttatatcgcacttgttggaactgtacccggaaaaggttgctcacttaaatagtgatgcttttacaaggattattggaagtcttgacttcgggctccgtaatcaggatagcgatgttgttgagaggtgcctggcagcagtaaatgctcttgcttcatacaatttcaaagaaagattaggagggagaggaagactgaactcgcagctcatggaatctgaaggatctaatggcaaactgcaggaaagcatatcaagtcacttcttgagacttctgttgcaaatacttctttttgaagatttcagatcggagttagcaggttatgctgccgatgctttgcttcctttattgttctgtgaacaggagctatatcagaggttggtccatgagttgttggataaacagcagaatccgaccgtaaaatcaaggctggcaactgcgttccataaccttacaagttcaaacaatctctcaagctcactcgaccggccaaacaggcagagattcaggaaaaacctccttagcttcatggcggatgtatcgggcttcatgcagatcaagtagatgcgatggcagggaacaggtgatgtttgaccggtcaattaaaccccgaggaagcactgcaccactgtggtaggggtgcatgtgggcaccacatgtctgtggattgatgagagcgaagactgccacgacaagtctagtagatcttgaagagctagtgtcaccagaaaagacagggagatgagctagtcttagggttggcattcatagcgcatttgctggacaagatggaggcgtccctggccacgagatcgtcgtgtaaatgcgtttgttagacgcacagaaacggtggggattttgtggtggcgactcgttttgttcaattcccacaggcagaaggtagagatgttaagttgatgtaaataccgtttgatttaaacatgccttattcgtaggagaaagcgacacggcttgctgtaacttagggtttattactctttctcgtggcataggatccccaaagaagtctttgctggggtatttgcagccaaacgatgaccagtatgattgcgagaggttttcaatcttttgtaccaaatttggcctgcagttatgatgacactgagtgccgatacaggcatgaggcattccaaaattggcgggcaccacatgtgtctgtctgctgtctcagtgggggtcactgtagagtgtaggcggt

SEQ ID NO: 10074 - DNA, 4360 bp, Zea Mays
aattactgcagcagccagccagccagcaaatcacgccggccccacaagacccaagctgcaaaactatccagccaccattcacccctccgcactccgcctccgccgcctccctgccctcaactccacgcccggcagggtggccgctcgccggcagccaaaccctaggcgatcgcggaggccaaccacgcttcgggcgcgatcagccgccgccatgcagggcttccccggcggcgcccccgatccgcagcagctacaggccaccatgctcgccatcgagcaggcctgctccctcatccagctgcacatgaatccatctgaagcggaaaaagtgataacttcgctgcattcgtctctcatgccttatcaagtatgcagattcattcttgagacatcccaaaaaccaaatgcaagattccaagctgctggtgcaattggtgatgctgcggtaagggagtggggagttcttacagatgacaataaaaggagcctaataatatattgtttaaactatgttatggagcatgcaagttctcctgatggctatgtgcaatcgaaagtttccgctgtggcagctagattactgaaaagaggctgggttgagttttcggaccaagaaaaagcagctatcttctttgaggttgagcaatctatccggggcatccatgggcctaatcgacagtttgctgcaatcaatttcttggaaaccttggtttcagaattctccccttcaactgcttctgctatgagcctgcctaaggaatttcacgaacaatgtgaatactcactcgaagtgcagtttttgaaggatttttactgctgggcacaagctgctgtgttcaatactgctgacaaaatcttgaattcaactgtaacaataccggacgaaagagcatgttcagcagcattgcgcctgatgtttcagatactaagttggaatttcaaacatactgtggagcacgagagttcagatgctaagataaatttcggcttaaggattgatacgataaatctgaagaagtttgaacgttcgttggtgaagggtctatgtggagagagattctaatatcaagtggacaccctacctgggttttaaacttctataccaccttgcgccaaaagtactcatatgatacactgtggggtgattctccaattgctgtctcttgcagacagcttatagtgcagttatgctccttggcaggctctgtgtttcctaatgataatggggatgcacagattaaacaccttatgctgatattatctgctgttgttctatggattgaacctcctgatgtaatcacagcatcaatccgaaatgggggaagtgaaagtgagttcatagatggttgccatgccttgctttcaatcgcatctttaactactggctcactttttgacaacctcctaaaatctataaggccctatggtacagttaatctgctttctgctttgacgtcagaagctgtcaagtcggttctgaataaccagagtgaagaggaaacctggggcatagattcccttgatattttgttagaaacatggaatgttcttttgggggacgtagatgccgataaaaatccaatctcaaccgatggagcacttgcatcttcaagtttgtttaagatgattgtggagtcacacttgaaggctgctgctgattctgcgttcgaggatactgatgatactgaatattttcatgtttctgtttcaaaacgtgatgaacagttagccttgtatgctctaatagcacgggcttctgcaaatactactattccatttcttgcacagttgttttcagaacgatttgcccggctaaatcagagaaatggtgaaagtgatcctactcaaacactggaagagctctattggctgttgttggttactagtcatgtcctaactgactctggcgaaggagaaacactacttatccctgaagcattacaggctggattccctaatgtgattgaagcagcacatcatcctgttgttacactctcctggtctataataaatttttccaggcagtgtttagatccaggaattagggcaaaatacttcagtccacgactaatggaggctgtgatctggttcttggccagatgggttgcaacctatttagtgccacttgacgtgagtagaggaaaagtaagcagagaaattgataatgtgggtacaaatggatcccaacattccagaaaactgctaaacagttttgcttgggaaaataaccaaggagagcttgttcttgattttgttgttctcatttcaatgttagctcttactacctatcagggagaaaatgagttgcagacactgacatgccagaagctacttgctacagtcgttcgccggaaacacacatgcacttatcttgttcaactggattcatggcgtgatcttacaagagcttttgcaagtggacggtctttgctttcattgagtggacgtttacaaaggtctctagcagaaacacttgcctctgcagcttcctgcatcaaagatcctgaagcatctgcacagtacctgagggatctcatgggaccagtggcagggtgcctggtagaaaatgctagcaggagtgatctaaaatctgtggcacagcaagcagatgttatttacatggtctgttgcctattggaacgactaagaggcgctgctagagctactcaaccccgaactcaaaaagttctatttgagatggctcatactgtgatgaacccacttttgactcttctggaggtctacaaaaatcattccacagtcgtatacatgatactcaagtttgtggtggactttgttgatggtcaagctgtattcctggatgctaaagagacatcagctttggtgagcttttgcttgcaactactccagatatactcctctcataacattgggaaggtaatgctctctctttcttcaagtctgcgtaatgagtcacaagcagaaaaatataaggatctgcgagctttgcttcgtcttctgacaaatatatgttcgaaggatttggttggctttctgtctgattgtggcggtgaaggttcacctgatatcgcagaggttatctacattggtcttgatattgtgacccccttgatatctttggatcttctgaaataccctaaacttagtcgtgattattttgtgcttatatcgcacttgttggaactgtacccggaaaaggttgctcacttaaatagtgatgcttttacaaggattattggaagtcttgacttcgggctccgtaatcaggatagcgatgttgttgagaggtgcctggcagcagtaaatgctcttgcttcatacaatttcaaagaaagattaggagggagaggaagactgaactcgcagctcatggaatctgaaggatctaatggcaaactgcaggaaagcatatcaagtcacttcttgagacttctgttgcaaatacttctttttgaagatttcagatcggagttagcaggttatgctgccgatgctttgcttcctttattgttctgtgaacaggagctatatcagaggttggtccatgagttgttggataaacagcagaatccgaccgtaaaatcaaggctggcaactgcgttccataaccttacaagttcaaacaatctctcaagctcactcgaccggccaaacaggcagagattcaggaaaaacctccttagcttcatggcggatgtatcgggcttcatgcagatcaagtagatgcgatggcagggaacaggtgatgtttgaccggtcaattaaaccccgaggaagcactgcaccactgtggtaggggtgcatgtgggcaccacatgtctgtggattgatgagagcgaagactgccacgacaagtctagtagatcttgaagagctagtgtcaccagaaaagacagggagatgagctagtcttagggttggcattcatagcgcatttgctggacaagatggaggcgtccctggccacgagatcgtcgtgtaaatgcgtttgttagacgcacagaaacggtggggattttgtggtggcgactcgttttgttcaattcccacaggcagaaggtagagatgttaagttgatgtaaataccgtttgatttaaacatgccttattcgtaggagaaagcgacacggcttgctgtaacttagggtttattactctttctcgtggcataggatccccaaagaagtctttgctggggtatttgcagccaaacgatgaccagtatgattgcgagaggttttcaatcttttgtaccaaatttggcctgcagttatgatgacactgagtgccgatacaggcatgaggcattccaaaattggcgggcaccacatgtgtctgtctgctgtctcagtgggggtcactgtagagtgtaggcggt

SEQ ID NO: 10075 - DNA, 4846 bp, Zea Mays
ttataaattactgcagcagccagccagccagcaaatcacgccggccccacaagacccaagctgcaaaactatccagccaccattcacccctccgcactccgcctccgccgcctccctgccctcaactccacgcccggcagggtggccgctcgccggcagccaaaccctaggcgatcgcggaggccaaccacgcttcgggcgcgatcagccgccgccatgcagggcttccccggcggcgcccccgatccgcagcagctacaggccaccatgctcgccatcgagcaggcctgctccctcatccagctgcacatgaatccatctgaagcggaaaaagtgataacttcgctgcattcgtctctcatgccttatcaagtatgcagattcattcttgagacatcccaaaaaccaaatgcaagattccaagctgctggtgcaattggtgatgctgcggtaagggagtggggagttcttacagatgacaataaaaggagcctaataatatattgtttaaactatgttatggagcatgcaagttctcctgatggctatgtgcaatcgaaagtttccgctgtggcagctagattactgaaaagaggctgggttgagttttcggaccaagaaaaagcagctatcttctttgaggttgagcaatctatccggggcatccatgggcctaatcgacagtttgctgcaatcaatttcttggaaaccttggtttcagaattctccccttcaactgcttctgctatgagcctgcctaaggaatttcacgaacaatgtgaatactcactcgaagtgcagtttttgaaggatttttactgctgggcacaagctgctgtgttcaatactgctgacaaaatcttgaattcaactgtaacaataccggacgaaagagcatgttcagcagcattgcgcctgatgtttcagatactaagttggaatttcaaacatactgtggagcacgagagttcagatgctaagataaatttcggcttaaggattgatacgataaatctgaagaagtttgaacgttcgttggtgaagccagggtctatgtggagagagattctaatatcaagtggacaccctacctgggttttaaacttctataccaccttgcgccaaaagtactcatatgatacactgtggggtgattctccaattgctgtctcttgcagacagcttatagtgcagttatgctccttggcaggctctgtgtttcctaatgataatggggatgcacagattaaacaccttatgctgatattatctgctgttgttctatggattgaacctcctgatgtaatcacagcatcaatccgaaatgggggaagtgaaagtgagttcatagatggttgccatgccttgctttcaatcgcatctttaactactggctcactttttgacaacctcctaaaatctataaggccctatggtacagttaatctgctttctgctttgacgtcagaagctgtcaagtcggttctgaataaccagagtgaagaggaaacctggggcatagattcccttgatattttgttagaaacatggaatgttcttttgggggacgtagatgccgataaaaatccaatctcaaccgatggagcacttgcatcttcaagtttgtttaagatgattgtggagtcacacttgaaggctgctgctgattctgcgttcgaggatactgatgatactgaatattttcatgtttctgtttcaagtaacgtgatgaacagttagccttgtatgctctaatagcacgggcttctgcaaatactactattccatttcttgcacagttgttttcagaacgatttgcccggctaaatcagagaaatggtgaaagtgatcctactcaaacactggaagagctctattggctgttgttggttactagtcatgtcctaactgactctggcgaaggagaaacactacttatccctgaagcattacaggctggattccctaatgtgattgaagcagcacatcatcctgttgttacactctcctggtgaaaaatcttacctcaatctattccccttttcatttcgttgaaaatcaggaatctgtttgttgctgtttttagagttttttagtgcaaagactttgacctgctgttttttgggccagttccagctctggtaacccatttgactgtattaaaagtattaatacttatagcaatataatgtgaatattttgtctcttgatgatgcaggtctataataaatttttccaggcagtgtttagatccaggaattagggcaaaatacttcagtccacgactaatggaggctgtgatctggttcttggccagatgggttgcaacctatttagtgccacttgacgtgagtagaggaaaagtaagcagagaaattgataatgtgggtacaaatggatcccaacattccagaaaactgctaaacagttttgcttgggaaaataaccaaggagagcttgttcttgattttgttgttctcatttcaatgttagctcttactacctatcagggagaaaatgagttgcaggtaagcttcatttttactttttaatcatgatggaattgtgcagagtgcccagacatgtttgccccagttcaatttgcagtgcctaatgcaaaaatgctcgaacactgacatgccagaagctacttgctacagtcgttcgccggaaacacacatgcacttatcttgttcaactggattcatggcgtgatcttacaagagcttttgcaagtggacggtctttgctttcattgagtggacgtttacaagtgatgtaccatgtgcaaatcatgttattctagcctatgacattatatttttgaaaatcttatgcttctattgctattttttacagaggtctctagcagaaacacttgcctctgcagcttcctgcatcaaagatcctgaagcatctgcacagtacctgagggatctcatgggaccagtggcagggtgcctggtagaaaatgctagcaggagtgatctaaaatctgtggcacagcaagcagatgttatttacatggtctgttgcctattggaacgactaagaggcgctgctagagctactcaaccccgaactcaaaaagttctatttgagatggctcatactgtgatgaacccacttttgactcttctggaggtctacaaaaatcattccacagtcgtatacatgatactcaagtttgtggtggactttgttgatggtcaagctgtattcctggatgctaaagagacatcagctttggtgagcttttgcttgcaactactccagatatactcctctcataacattgggaaggtaatgctctctctttcttcaagtctgcgtaatgagtcacaagcagaaaaatataaggatctgcgagctttgcttcgtcttctgacaaatatatgttcgaaggatttggtaacttttgttcccttacaccctgtttgtgtaatttgacgaaaagctccacataactaatagacacagttgtcaatgcaggttggctttctgtctgattgtggcggtgaaggttcacctgatatcgcagaggttatctacattggtcttgatattgtgacccccttgatatctttggatcttctgaaataccctaaacttagtcgtgattattttgtgcttatatcgcacttgttggaactgtacccggaaaaggttgctcacttaaatagtgatgcttttacaaggattattggaagtcttgacttcgggctccgtaatcaggatagcgatgttgttgagaggtgcctggcagcagtaaatgctcttgcttcatacaatttcaaagaaagattaggagggagaggaagactgaactcgcagctcatggaatctgaaggatctaatggcaaactgcaggaaagcatatcaagtcacttcttgagacttctgttgcaaatacttctttttgaagatttcagatcggagttagcaggttatgctgccgatgctttgcttcctttattgttctgtgaacaggagctatatcagaggttggtccatgagttgttggataaacagcagaatccgaccgtaaaatcaaggctggcaactgcgttccataaccttacaagttcaaacaatctctcaagctcactcgaccggccaaacaggcagagattcaggaaaaacctccttagcttcatggcggatgtatcgggcttcatgcagatcaagtagatgcgatggcagggaacaggtgatgtttgaccggtcaattaaaccccgaggaagcactgcaccactgtggtaggggtgcatgtgggcaccacatgtctgtggattgatgagagcgaagactgccacgacaagtctagtagatcttgaagagctagtgtcaccagaaaagacagggagatgagctagtcttagggttggcattcatagcgcatttgctggacaagatggaggcgtccctggccacgagatcgtcgtgtaaatgcgtttgttagacgcacagaaacggtggggattttgtggtggcgactcgttttgttcaattcccacaggcagaaggtagagatgttaagttgatgtaaataccgtttgatttaaacatgccttattcgtaggagaaagcgacacggcttgctgtaacttagggtttattactctttctcgtggcataggatccccaaagaagtctttgctggggtatttgcagccaaacgatgaccagtatgattgcgagaggttttcaatcttttgtaccaaatttggcctgcagttatgatgacactgagtgccgatacaggcatgaggcattccaaaattggcgggcaccacatgtgtctgtctgctgtctcagtgggggtcactgtagagtgtaggcggt

SEQ ID NO: 10076 - DNA, 4369 bp, Zea Mays
ttataaattactgcagcagccagccagccagcaaatcacgccggccccacaagacccaagctgcaaaactatccagccaccattcacccctccgcactccgcctccgccgcctccctgccctcaactccacgcccggcagggtggccgctcgccggcagccaaaccctaggcgatcgcggaggccaaccacgcttcgggcgcgatcagccgccgccatgcagggcttccccggcggcgcccccgatccgcagcagctacaggccaccatgctcgccatcgagcaggcctgctccctcatccagctgcacatgaatccatctgaagcggaaaaagtgataacttcgctgcattcgtctctcatgccttatcaagtatgcagattcattcttgagacatcccaaaaaccaaatgcaagattccaagctgctggtgcaattggtgatgctgcggtaagggagtggggagttcttacagatgacaataaaaggagcctaataatatattgtttaaactatgttatggagcatgcaagttctcctgatggctatgtgcaatcgaaagtttccgctgtggcagctagattactgaaaagaggctgggttgagttttcggaccaagaaaaagcagctatcttctttgaggttgagcaatctatccggggcatccatgggcctaatcgacagtttgctgcaatcaatttcttggaaaccttggtttcagaattctccccttcaactgcttctgctatgagcctgcctaaggaatttcacgaacaatgtgaatactcactcgaagtgcagtttttgaaggatttttactgctgggcacaagctgctgtgttcaatactgctgacaaaatcttgaattcaactgtaacaataccggacgaaagagcatgttcagcagcattgcgcctgatgtttcagatactaagttggaatttcaaacatactgtggagcacgagagttcagatgctaagataaatttcggcttaaggattgatacgataaatctgaagaagtttgaacgttcgttggtgaagccagggtctatgtggagagagattctaatatcaagtggacaccctacctgggttttaaacttctataccaccttgcgccaaaagtactcatatgatacactgtggggtgattctccaattgctgtctcttgcagacagcttatagtgcagttatgctccttggcaggctctgtgtttcctaatgataatggggatgcacagattaaacaccttatgctgatattatctgctgttgttctatggattgaacctcctgatgtaatcacagcatcaatccgaaatgggggaagtgaaagtgagttcatagatggttgccatgccttgctttcaatcgcatctttaactactggctcactttttgacaacctcctaaaatctataaggccctatggtacagttaatctgctttctgctttgacgtcagaagctgtcaagtcggttctgaataaccagagtgaagaggaaacctggggcatagattcccttgatattttgttagaaacatggaatgttcttttgggggacgtagatgccgataaaaatccaatctcaaccgatggagcacttgcatcttcaagtttgtttaagatgattgtggagtcacacttgaaggctgctgctgattctgcgttcgaggatactgatgatactgaatattttcatgtttctgtttcaaaacgtgatgaacagttagccttgtatgctctaatagcacgggcttctgcaaatactactattccatttcttgcacagttgttttcagaacgatttgcccggctaaatcagagaaatggtgaaagtgatcctactcaaacactggaagagctctattggctgttgttggttactagtcatgtcctaactgactctggcgaaggagaaacactacttatccctgaagcattacaggctggattccctaatgtgattgaagcagcacatcatcctgttgttacactctcctggtctataataaatttttccaggcagtgtttagatccaggaattagggcaaaatacttcagtccacgactaatggaggctgtgatctggttcttggccagatgggttgcaacctatttagtgccacttgacgtgagtagaggaaaagtaagcagagaaattgataatgtgggtacaaatggatcccaacattccagaaaactgctaaacagttttgcttgggaaaataaccaaggagagcttgttcttgattttgttgttctcatttcaatgttagctcttactacctatcagggagaaaatgagttgcagacactgacatgccagaagctacttgctacagtcgttcgccggaaacacacatgcacttatcttgttcaactggattcatggcgtgatcttacaagagcttttgcaagtggacggtctttgctttcattgagtggacgtttacaaaggtctctagcagaaacacttgcctctgcagcttcctgcatcaaagatcctgaagcatctgcacagtacctgagggatctcatgggaccagtggcagggtgcctggtagaaaatgctagcaggagtgatctaaaatctgtggcacagcaagcagatgttatttacatggtctgttgcctattggaacgactaagaggcgctgctagagctactcaaccccgaactcaaaaagttctatttgagatggctcatactgtgatgaacccacttttgactcttctggaggtctacaaaaatcattccacagtcgtatacatgatactcaagtttgtggtggactttgttgatggtcaagctgtattcctggatgctaaagagacatcagctttggtgagcttttgcttgcaactactccagatatactcctctcataacattgggaaggtaatgctctctctttcttcaagtctgcgtaatgagtcacaagcagaaaaatataaggatctgcgagctttgcttcgtcttctgacaaatatatgttcgaaggatttggttggctttctgtctgattgtggcggtgaaggttcacctgatatcgcagaggttatctacattggtcttgatattgtgacccccttgatatctttggatcttctgaaataccctaaacttagtcgtgattattttgtgcttatatcgcacttgttggaactgtacccggaaaaggttgctcacttaaatagtgatgcttttacaaggattattggaagtcttgacttcgggctccgtaatcaggatagcgatgttgttgagaggtgcctggcagcagtaaatgctcttgcttcatacaatttcaaagaaagattaggagggagaggaagactgaactcgcagctcatggaatctgaaggatctaatggcaaactgcaggaaagcatatcaagtcacttcttgagacttctgttgcaaatacttctttttgaagatttcagatcggagttagcaggttatgctgccgatgctttgcttcctttattgttctgtgaacaggagctatatcagaggttggtccatgagttgttggataaacagcagaatccgaccgtaaaatcaaggctggcaactgcgttccataaccttacaagttcaaacaatctctcaagctcactcgaccggccaaacaggcagagattcaggaaaaacctccttagcttcatggcggatgtatcgggcttcatgcagatcaagtagatgcgatggcagggaacaggtgatgtttgaccggtcaattaaaccccgaggaagcactgcaccactgtggtaggggtgcatgtgggcaccacatgtctgtggattgatgagagcgaagactgccacgacaagtctagtagatcttgaagagctagtgtcaccagaaaagacagggagatgagctagtcttagggttggcattcatagcgcatttgctggacaagatggaggcgtccctggccacgagatcgtcgtgtaaatgcgtttgttagacgcacagaaacggtggggattttgtggtggcgactcgttttgttcaattcccacaggcagaaggtagagatgttaagttgatgtaaataccgtttgatttaaacatgccttattcgtaggagaaagcgacacggcttgctgtaacttagggtttattactctttctcgtggcataggatccccaaagaagtctttgctggggtatttgcagccaaacgatgaccagtatgattgcgagaggttttcaatcttttgtaccaaatttggcctgcagttatgatgacactgagtgccgatacaggcatgaggcattccaaaattggcgggcaccacatgtgtctgtctgctgtctcagtgggggtcactgtagagtgtaggcggt

SEQ ID NO: 10077 - DNA, 2297 bp, Zea Mays
ctcgtattttatagtttgtgccaacactggtgtccccctgtctactttgtctgagcgatattggaaggattttgagggattgcttggggaattcctccgagcgagctatataaagagcggagtgcgttctttctcaaattaaatctcgtgcaattatatcttgccatggttggttgcttcacaaggaaatgtcacattttgtggacataagatgctgcggatgtggtatttggcctgccccggtaatcataaacgcgtctgcgcgctctttccggataagagcacggtctgtctctttggattatcccagtaggactgagcagaagaatgagactaatctagtggtggtacgaccagagcgaaggctgcgggatgattttgtcgatgcaggtgcagaccatggaagtggcagagcaactgcagatttcaagaaggcagttccatccttcgatgctaatctgagaaacctgttggatgagcaactaaaaccaggaaggcccttggatcataactcgggcaaggtggcaaacagggcatgcttttcaaagcataaaaccggctgttatgcttacagcctccgcaggcactgcaacaatgggaagctcattcaagcttgccgcatcatcgatgagatggtgttacatggccaagtaccagattcaaagtgttgtgttagattaattcgtggccttgtgagaactggtaatacaaataaagctaggcatgttcttgaggtcatggtgctctcaggtggggttcctgacaccatcacctgcaacatgttgattgggcaactttgctgtgaagggcagctgagttctgcgatgaaagtattggaggatatgaggtttactggttgctctcctagtggcatcactttcaatactttgattaggtgcatgtgcagccatcatttgtatgacagggcagtctccttttggaaagagcagctgaaaataggttggccaccatatgagatgacgagcaccttgcttgttgacctcatatgcaaacaatgtggtcccatgcgggctctggaagtattagatgaacttgatttggagggatgtcaaccacatgttgtcagctacaacactcttatcagtgcgtcatgcaaagcaggctgtttgaaggatgcaaagttgatattaactcgtctttcagctgaaggccttgagccaaatggtacaacctattgcatcttgcttcattccctgtgtgacaagagaaggtggtctgaagtatggacatctggatcaggcaattgatgttctagagatgatggtgagtgagaaatgctttcctgatatagtgacatacaacacacttctgaatgccatctctaaaagggggatggttcaagaagctcttgggattttccattccatcagagaaaatggatgccaggtggttcgcattacatacaacaccctcatagatgctttagcaaaaaggggtgatattattaatgctatgactctatttgatgaaatgattgttgatgggatcaatcctgatgatgtcacttatggttcacttattatggggttctgtaagaagaacatggccaaagaagcactggagcttttgaatcagatgcttgctcttggatttgaggttaaagcaactacattttccatgatgatccaagcattgtgcaaaggttgtaaagctgaagctgctgctgaaatactacgagtaatggtatcaagaaatgtcaaccacaggagtgcattttatctgtctatagtcacaagggttgctaagtcaggtcggcttaaagaggctcaaattctacaccaggaactatacagagcaaggtccctaaagaggattcttaatttattttaagcagctagttgctggattgtaagatcctcatgtcagagacatggaagtcatagaacacacaattcagctgacagtagataattccttgaagttttgcagcgtgccaatctgcataatgtctttagtaaggtacggataggggtggtagtagactctaaattttacactataaaatttaagaatttaaggattggaccaaattaagatcggactatatttctttttctttttttgaattagaattaattaagggctcaaacgaagaattgtgaagaaacattttgatcgtgatggagtacattgctcctgtaatttttgttttggtgttttttacattgcaaacataatgggtattgatggaactgtatttgtgatatggttcctggcttttcagtttcatatgagacttcttagcattcctttataaatattttctagaacctcac

SEQ ID NO: 10078 - DNA, 2512 bp, Zea Mays
gtttttgtgaaccaagagtgacccaccccgcccgcatagctaattacacgtctcttcggcgagacgtgcagcgccgcctccaggcgtccccgcagaccgcaattctgaaacaaaaacctcgcttcgtgtgcttgcttccagctctcgccgccgccctccgcagcgccgccgcctctccttcccgggagctcgtttcacacagagaatctcagatcttcggtccatcctccacgtgggactccgttcaagtattctgccattgtgcgccagcgtcgcaggaaggattttgagggattgcttggggaattcctccgagcgagctatataaagagcggagtgcgttctttctcaaattaaatctcgtgcaattatatcttgccatggttggttgcttcacaaggaaatgtcacattttgtggacataagatgctgcggatgtggtatttggcctgccccggtaatcataaacgcgtctgcgcgctctttccggataagagcacggtctgtctctttggattatcccagtaggactgagcagaagaatgagactaatctagtggtggtacgaccagagcgaaggctgcgggatgattttgtcgatgcaggtgcagaccatggaagtggcagagcaactgcagatttcaagaaggcagttccatccttcgatgctaatctgagaaacctgttggatgagcaactaaaaccaggaaggcccttggatcataactcgggcaaggtggcaaacagggcatgcttttcaaagcataaaaccggctgttatgcttacagcctccgcaggcactgcaacaatgggaagctcattcaagcttgccgcatcatcgatgagatggtgttacatggccaagtaccagattcaaagtgttgtgttagattaattcgtggccttgtgagaactggtaatacaaataaagctaggcatgttcttgaggtcatggtgctctcaggtggggttcctgacaccatcacctgcaacatgttgattgggcaactttgctgtgaagggcagctgagttctgcgatgaaagtattggaggatatgaggtttactggttgctctcctagtggcatcactttcaatactttgattaggtgcatgtgcagccatcatttgtatgacagggcagtctccttttggaaagagcagctgaaaataggttggccaccatatgagatgacgagcaccttgcttgttgacctcatatgcaaacaatgtggtcccatgcgggctctggaagtattagatgaacttgatttggagggatgtcaaccacatgttgtcagctacaacactcttatcagtgcgtcatgcaaagcaggctgtttgaaggatgcaaagttgatattaactcgtctttcagctgaaggccttgagccaaatggtacaacctattgcatcttgcttcattccctgtgtgacaagagaaggtggtctgaagtatggacatctggatcaggcaattgatgttctagagatgatggtgagtgagaaatgctttcctgatatagtgacatacaacacacttctgaatgccatctctaaaagggggatggttcaagaagctcttgggattttccattccatcagagaaaatggatgccaggtggttcgcattacatacaacaccctcatagatgctttagcaaaaaggggtgatattattaatgctatgactctatttgatgaaatgattgttgatgggatcaatcctgatgatgtcacttatggttcacttattatggggttctgtaagaagaacatggccaaagaagcactggagcttttgaatcagatgcttgctcttggatttgaggttaaagcaactacattttccatgatgatccaagcattgtgcaaaggttgtaaagctgaagctgctgctgaaatactacgagtaatggtatcaagaaatgtcaaccacaggagtgcattttatctgtctatagtcacaagggttgctaagtcaggtcggcttaaagaggctcaaattctacaccaggaactatacagagcaaggtccctaaagaggattcttaatttattttaagcagctagttgctggattgtaagatcctcatgtcagagacatggaagtcatagaacacacaattcagctgacagtagataattccttgaagttttgcagcgtgccaatctgcataatgtctttagtaaggtacggataggggtggtagtagactctaaattttacactataaaatttaagaatttaaggattggaccaaattaagatcggactatatttctttttctttttttgaattagaattaattaagggctcaaacgaagaattgtgaagaaacattttgatcgtgatggagtacattgctcctgtaatttttgttttggtgttttttacattgcaaacataatgggtattgatggaactgtatttgtgatatggttcctggcttttcagtttcatatgagacttcttagcattcctttataaatattttctagaacctcac

SEQ ID NO: 10079 - DNA, 2895 bp, Zea Mays
aaccgaaagtggcatccgaaagatcaatttattttgcactccgctgttatatcgacgtgcaccaccgtcttgccgtcgctcatttcctcctcgctcggctgcttgcctagggtttcacctgctaccgccccacctccagccgtcgcttcagatcccgccgctgccggcgctcgatcctacttcgttgctcctagctgatcccgctgagctcggatttgggcccttcctccccgccggaacagcgtccggacgcgcgggggcagatctgggttttggtggcccgcttggtgtatgagaaggcctccagagcttggaagtaatggaggtggagccggcgaggagggacgcggcagcgctggacccggagctgctgcagctggcggagctcgcgccgggcgcgcttcgtgagaactccatagctgatgcgctgtattcgcagtggctcgtgctacccgagacgaccaagctggtgaagtctttgattgatgatgcaaagactggtgctgtgcttaatgttgctggaagctctgctagcacaaatgctgcttcaagtagttctctaccttcgatgtttcctgctggtagtgctccaccactttctcctaggagcacgtctggttcccctcgtgttatgagacgaggatctggagctggaccatcatccttgggctctccattaaaattagttagtgaaccagtaagagaagttatacctcagttttacttcaagaatgggcgtcctcccacaaaagatttgaaggagcagtgcttatcaagaacagatcacctattttttggtggtgggggacttcaagttcaagaattcagatcggtcacgaaggacatatgtaaacttccttcattcttgtctagtgtccttttcaagaaaatcgatgttgaatgcactagaactgtctcaagggatgcatttgttgagtactggattaacgacaataaggttacaatggatatggctagtcaaatatttgaaatattaagaaagccaggttacacatatctcacccaggatgacttcaagcctgtcctgaaagaactactggcaacacaccctggcttagagtttttacaagggacccccgagtttcaggagagatatcggagactgtaatatacagaatcttttactccataaatagatctgggaatggtcatctgactctgagagagctcaaacgtggaaatttaattgctgcacttcagcagttagatgaggaagaagatatcaacaaagtgttgagatatttctcatatgaacacttttatgtgatctactgcaaattctgggagctggatgcagaccacgattttttgattgataaggaaaatctcatcaaatatgggaaccattcgttgacctatagaatagttgatagaattttcgcacagatcccaaggaaattcacaagcatgacagaaggaaagatgggttatgaagactttgtttactttatattatcagaggaagacaaatcatctgagcctagtcttgaatattggtttaagtgcatcgatcttgatggtaatggtattttaactttcaatgaaatgcaatttttctacgaggagcaattgcaccgaatggagtgcatggcacaagagcctgtgctttttctggacatattatgccagatgattgatatgattggaccagagaatgagagctatttaactctacgggacttaaaacggtgtaaactctcaggaaacatattcaatattcttttcaatctcaacaagttcatggcatttgaaactcgtgatccattcctcattcgccaggaacgtgaaaatccaactctaactgagtgggaccggtttgcacatagagaatatattagattgtccatggaagaagatggtgaggatgcttcaaatggaagtggtgatgtgtgggacgaatcacttgaggctccattctgaatggcgtcttgctgcatgaatttggttggacatggatgattatggttgtgaagcggaaggattgtaaatttggtggctaccctgttgaggccattgtaggctcacagcagattcagtaacatcaaaggctacttaaaagttttactgtgcagatctgattcaatatttgtcagttatcttgttgggcaaacatttttgctttgctggaaaattggggagggaggttggtgggggcgccctgcagtttcaaggcaacaacctcagcagtcatcaacggtcgactccatttgtgttctgattgatccttaggtggatatctgttattcaattgtgcgcaaattttggggctgaactgttaatgtttggctgctatttctttgttaaatcttggaagcgcaggctaccaattccatcacacaactaagatcatggcatgtagctttcaggttctgctttctcatcagcatggtgttctgtagttgtgttgccattcttggtgcatcttgggaggaatgatccgtgaccttgaagaatggatacttagtcattttgtaacattaccgagaagcagtggattgggtgcatagtaacacaggttgtaacgttaccgagaagctgtggattgggtccaatttttgttaaggtgtaaatttggagaatattttaggttatcttacttgaaagtgctttgcgctttgcgtattgagctacttatgtcgtgatgcgctgaaactccatgtgtgtattcttgttgtattttccattttgtcaaggatcatgttttcttgcctatatttttcattttgttggctcggttctcgcaacatttgcacctgcaagaaacggcacctagtattgtttggtttggcaagtcaacccattctagatggattataattagtgagattgttctcggcaggtaagaaattgccaagtacacaatttaacttatat

SEQ ID NO: 10080 - DNA, 2999 bp, Zea Mays
cccaaaccgaaagtggcatccgaaagatcaatttattttgcactccgctgttatatcgacgtgcaccaccgtcttgccgtcgctcatttcctcctcgctcggctgcttgcctagggtttcacctgctaccgccccacctccagccgtcgcttcagatcccgccgctgccggcgctcgatcctacttcgttgctcctagctgatcccgctgagctcggatttgggcccttcctccccgccggaacagcgtccggacgcgcgggggcagatctgggttttggtggcccgcttggtgtatgagaaggcctccagagcttggaagtaatggaggtggagccggcgaggagggacgcggcagcgctggacccggagctgctgcagctggcggagctcgcgccgggcgcgcttcgtgagaactccatagctgatgcgctgtattcgcagtggctcgtgctacccgagacgaccaagctggtgaagtctttgattgatgatgcaaagactggtgctgtgcttaatgttgctggaagctctgctagcacaaatgctgcttcaagtagttctctaccttcgatgtttcctgctggtagtgctccaccactttctcctaggagcacgtctggttcccctcgtgttatgagacgaggatctggagctggaccatcatccttgggctctccattaaaattagttagtgaaccagtaagagaagttatacctcagttttacttcaagaatgggcgtcctcccacaaaagatttgaaggagcagtgcttatcaagaacagatcacctattttttggtggtgggggacttcaagttcaagaattcagatcggtcacgaaggacatatgtaaacttccttcattcttgtctagtgtccttttcaagaaaatcgatgttgaatgcactagaactgtctcaagggatgcatttgttgagtactggattaacgacaataaggttacaatggatatggctagtcaaatatttgaaatattaagaaagccaggttacacatatctcacccaggatgacttcaagcctgtcctgaaagaactactggcaacacaccctggcttagagtttttacaagggacccccgagtttcaggagagatatgcggagactgtaatatacagaatcttttactccataaatagatctgggaatggtcatctgactctgagagagctcaaacgtggaaatttaattgctgcacttcagcagttagatgaggaagaagatatcaacaaagtgttgagatatttctcatatgaacacttttatgtgatctactgcaaattctgggagctggatgcagaccacgattttttgattgataaggaaaatctcatcaaatatgggaaccattcgttgacctatagaatagttgatagaattttcgcacagatcccaaggaaattcacaagcatgacagaaggaaagatgggttatgaagactttgtttactttatattatcagaggaagacaaatcatctgagcctagtcttgaatattggtgctctgcaaacgaagactggcttagtagaattgcgagtatgctccccgtccagcgggatcagataacactagatgtggagtgaaccaaacagatcatgtttaagtgcatcgatcttgatggtaatggtattttaactttcaatgaaatgcaatttttctacgaggagcaattgcaccgaatggagtgcatggcacaagagcctgtgctttttctggacatattatgccagatgattgatatgattggaccagagaatgagagctatttaactctacgggacttaaaacggtgtaaactctcaggaaacatattcaatattcttttcaatctcaacaagttcatggcatttgaaactcgtgatccattcctcattcgccaggaacgtgaaaatccaactctaactgagtgggaccggtttgcacatagagaatatattagattgtccatggaagaagatggtgaggatgcttcaaatggaagtggtgatgtgtgggacgaatcacttgaggctccattctgaatggcgtcttgctgcatgaatttggttggacatggatgattatggttgtgaagcggaaggattgtaaatttggtggctaccctgttgaggccattgtaggctcacagcagattcagtaacatcaaaggctacttaaaagttttactgtgcagatctgattcaatatttgtcagttatcttgttgggcaaacatttttgctttgctggaaaattggggagggaggttggtgggggcgccctgcagtttcaaggcaacaacctcagcagtcatcaacggtcgactccatttgtgttctgattgatccttaggtggatatctgttattcaattgtgcgcaaattttggggctgaactgttaatgtttggctgctatttctttgttaaatcttggaagcgcaggctaccaattccatcacacaactaagatcatggcatgtagctttcaggttctgctttctcatcagcatggtgttctgtagttgtgttgccattcttggtgcatcttgggaggaatgatccgtgaccttgaagaatggatacttagtcattttgtaacattaccgagaagcagtggattgggtgcatagtaacacaggttgtaacgttaccgagaagctgtggattgggtccaatttttgttaaggtgtaaatttggagaatattttaggttatcttacttgaaagtgctttgcgctttgcgtattgagctacttatgtcgtgatgcgctgaaactccatgtgtgtattcttgttgtattttccattttgtcaaggatcatgttttcttgcctatatttttcattttgttggctcggttctcgcaacatttgcacctgcaagaaacggcacctagtattgtttggtttggcaagtcaacccattctagatggattataattagtgagattgttctcggcaggtaagaaattgccaagtacacaatttaacttatat

SEQ ID NO: 10081 - DNA, 2771 bp, Zea Mays
gtccctaaaaaccaaacacctcctaattattttgctcaattctagctatagctttaccccaaaccgaaagtggcatccgaaagatcaatttattttgcactccgctgttatatcgacgtgcaccaccgtcttgccgtcgctcatttcctcctcgctcggctgcttgcctagggtttcacctgctaccgccccacctccagccgtcgcttcagatcccgccgctgccggcgctcgatcctacttcgttgctcctagctgatcccgctgagctcggatttgggcccttcctccccgccggaacagcgtccggacgcgcgggggcagatctgggttttggtggcccgcttggtgtatgagaaggcctccagagcttggaagtaatggaggtggagccggcgaggagggacgcggcagcgctggacccggagctgctgcagctggcggagctcgcgccgggcgcgcttcgtgagaactccatagctgatgcgctgtattcgcagtggctcgtgctacccgagacgaccaagctggtgaagtctttgattgatgatgcaaagactggtgctgtgcttaatgttgctggaagctctgctagcacaaatgctgcttcaagtagttctctaccttcgatgtttcctgctggtagtgctccaccactttctcctaggagcacgtctggttcccctcgtgttatgagacgaggatctggagctggaccatcatccttgggctctccattaaaattagttagtgaaccagtaagagaagttatacctcagttttacttcaagaatgggcgtcctcccacaaaagatttgaaggagcagtgcttatcaagaacagatcacctattttttggtggtgggggacttcaagttcaagaattcagatcggtcacgaaggacatatgtaaacttccttcattcttgtctagtgtccttttcaagaaaatcgatgttgaatgcactagaactgtctcaagggatgcatttgttgagtactggattaacgacaataaggttacaatggatatggctagtcaaatatttgaaatattaagaaagccaggttacacatatctcacccaggatgacttcaagcctgtcctgaaagaactactggcaacacaccctggcttagagtttttacaagggacccccgagtttcaggagagatatgcggagactgtaatatacagaatcttttactccataaatagatctgggaatggtcatctgactctgagagagctcaaacgtggaaatttaattgctgcacttcagcagttagatgaggaagaagatatcaacaaagtgttgagatatttctcatatgaacacttttatgtgatctactgcaaattctgggagctggatgcagaccacgattttttgattgataaggaaaatctcatcaaatatgggaaccattcgttgacctatagaatagttgatagaattttcgcacagatcccaaggaaattcacaagcatgacagaaggaaagatgggttatgaagactttgtttactttatattatcagaggaagacaaatcatctgagcctagtcttgaatattggtttaagtgcatcgatcttgatggtaatggtattttaactttcaatgaaatgcaatttttctacgaggagcaattgcaccgaatggagtgcatggcacaagagcctgtgctttttctggacatattatgccagatgattgatatgattggaccagaggaaacatattcaatattcttttcaatctcaacaagttcatggcatttgaaactcgtgatccattcctcattcgccaggaacgtgaaaatccaactctaactgagtgggaccggtttgcacatagagaatatattagattgtccatggaagaagatggtgaggatgcttcaaatggaagtggtgatgtgtgggacgaatcacttgaggctccattctgaatggcgtcttgctgcatgaatttggttggacatggatgattatggttgtgaagcggaaggattgtaaatttggtggctaccctgttgaggccattgtaggctcacagcagattcagtaacatcaaaggctacttaaaagttttactgtgcagatctgattcaatatttgtcagttatcttgttgggcaaacatttttgctttgctggaaaattggggagggaggttggtgggggcgccctgcagtttcaaggcaacaacctcagcagtcatcaacggtcgactccatttgtgttctgattgatccttaggttctgctttctcatcagcatggtgttctgtagttgtgttgccattcttggtgcatcttgggaggaatgatccgtgaccttgaagaatggatacttagtcattttgtaacattaccgagaagcagtggattgggtgcatagtaacacaggttgtaacgttaccgagaagctgtggattgggtccaatttttgttaaggtgtaaatttggagaatattttaggttatcttacttgaaagtgctttgcgctttgcgtattgagctacttatgtcgtgatgcgctgaaactccatgtgtgtattcttgttgtattttccattttgtcaaggatcatgttttcttgcctatatttttcattttgttggctcggttctcgcaacatttgcacctgcaagaaacggcacctagtattgtttggtttggcaagtcaacccattctagatggattataattagtgagattgttctcggcaggtaagaaattgccaagtacacaatttaacttatat

SEQ ID NO: 10082 - DNA, 2095 bp, Zea Mays
aaccgaaagtggcatccgaaagatcaatttattttgcactccgctgttatatcgacgtgcaccaccgtcttgccgtcgctcatttcctcctcgctcggctgcttgcctagggtttcacctgctaccgccccacctccagccgtcgcttcagatcccgccgctgccggcgctcgatcctacttcgttgctcctagctgatcccgctgagctcggatttgggcccttcctccccgccggaacagcgtccggacgcgcgggggcagatctgggttttggtggcccgcttggtgtatgagaaggcctccagagcttggaagtaatggaggtggagccggcgaggagggacgcggcagcgctggacccggagctgctgcagctggcggagctcgcgccgggcgcgcttcgtgagaactccatagctgatgcgctgtattcgcagtggctcgtgctacccgagacgaccaagctggtgaagtctttgattgatgatgcaaagactggtgctgtgcttaatgttgctggaagctctgctagcacaaatgctgcttcaagtagttctctaccttcgatgtttcctgctggtagtgctccaccactttctcctaggagcacgtctggttcccctcgtgttatgagacgaggatctggagctggaccatcatccttgggctctccattaaaattagttagtgaaccagtaagagaagttatacctcagttttacttcaagaatgggcgtcctcccacaaaagatttgaaggagcagtgcttatcaagaacagatcacctattttttggtggtgggggacttcaagttcaagaattcagatcggtcacgaaggacatatgtaaacttccttcattcttgtctagtgtccttttcaagaaaatcgatgttgaatgcactagaactgtctcaaggcttcatgatttcctgaatttgtttattaagagaagtgttacagcttctagcttacctttcccctaccagtgtcagatctaacatgcactatagctttgatgggatgcatttgttgagtactggattaacgacaataaggttacaatggatatggctagtcaaatatttgaaatattaagaaagccaggttacacatatctcacccaggatgacttcaagcctgtcctgaaagaactactggcaacacaccctggcttagagtttttacaagggacccccgagtttcaggagagatatgcggagactgtaatatacagaatcttttactccataaatagatctgggaatggtcatctgactctgagagagctcaaacgtggaaatttaattgctgcacttcagcagttagatgaggaagaagatatcaacaaagtgttgagatatttctcatatgaacacttttatgtgatctactgcaaattctgggagctggatgcagaccacgattttttgattgataaggaaaatctcatcaaatatgggaaccattcgttgacctatagaatagttgatagaattttcgcacagatcccaaggaaattcacaagcatgacagaaggaaagatgggttatgaagactttgtttactttatattatcagaggaagacaaatcatctgagcctagtcttgaatattggtttaagtgcatcgatcttgatggtaatggtattttaactttcaatgaaatgcaatttttctacgaggagcaattgcaccgaatggagtgcatggcacaagagcctgtgctttttctggacatattatgccagatgattgatatgattggaccagagaatgagagctatttaactctacgggacttaaaacggtgtaaactctcaggaaacatattcaatattcttttcaatctcaacaagttcatggcatttgaaactcgtgatccattcctcattcgccaggaacgtgaaaatccaactctaactgagtgggaccggtttgcacatagagaatatattagattgtccatggaagaagatggtgaggatgcttcaaatggaagtggtgatgtgtgggacgaatcacttgaggctccattctgaatggcgcttcaagaccagaaatagcatggagttttgggggttcaaaaccag

SEQ ID NO: 10083 - DNA, 2566 bp, Zea Mays
agacgaaacctgtttttccgacaatcgagcgccgaaaaaggactgccaccaaccgctcgctttccctcacctccccacctctctcgctccctccctccctccctcccattgcaggatcggcaccgatgcgattcaaccgcggcctcgcatccggtgcggaggtctgcaattggggggaggctcctctccgccgttggaaccgctgcggcgtcgcagcctgtgcgactttcctgctggttcctcatccctcagggacagattttgcattctttggcattactgtttgatggcagacagtagtgctccttctctgtggaggcattggggcaaaaggcagttgaactgaacgggcacatcaatagtctctggcctccaagggaaattgggaaattcagattgaacgtggctgcatcatttttcctttcattggtcttttcagcaacagcgatccattctcgtaggggggagagagagagagagagagagggagagaaatcaaagaggagagtgatcatggagcatgtgatcggagggaagtataagcttgggaggaagattgggagcggatccttcggagagctatatctcggtgttaatatacagaatggagaggaagtgggaataaaattggagcctgtgaaaacaaaacatccacagctgcactatgaatctaaagtttatatgctgctgcagggtggaaacggtatcccacacctcaagtggtatggtgttgagggggagtacaatgttatggtgatcgatcttcttggcccaagcttggaagatttgtttaattcctgcaacaggaaattttctatgaaaacggtgcttatgcttgctgatcaactggtgagtttattcattccatattcaaccttacgctgccctgcaacagttaggaggcaagtcaactttctggaatttgataacagctattggttgggagttacatgttcagaagtttcatgagcattctgccataagtgttgccttcttttgtgggttttaattccaaagtattagatcattgatggtacaaatggatttcatgaacaccgtatgttgttctaagtgtatcgcagataaaccgagtggaatacatgcattccaagggatttattcatcgtgacatcaagccagacaacttccttataggcttaggtcggaaagctaatcaggtctatatcattgattatgggcttgctaagaaatacaaggaccttcagactcataaacacatcccatacagggagaacaaaaatctgactggaacagcacgttatgctagtgtgaatactcatcttggaatagaacaaagcaggagagatgatctggagtctgttggctatcttctgctatattttttaagaggaagcctcccatggcagggccttaaagctggcactaagaaacaaaagtatgataaaattagtgaaaagaaaatgcttacctcggcagagattctgtgcaaatcttacccgccggagttcgtctcatatttccactattgtcgctccctgcgatttgaagacaggccagattactcttcaatgaagaagctctttcgtgatgtatttatacgggaaggataccaatttgattacgtatttgactggactgcactcaagtaccctcaaatgggctccaacaacaagcttgttcaacaaccaagtgcaagaatggctggagttggaccatcagttgagagaacagacaaagcttccatgggacaagagatccgggataggttcactggtgctgttgaggcattcgccagaagaaatccaggctctgggcgccctgcagatcattccagtcattccaggcacaaaagctttgcagattcctttggaacgtccaacgaagcagttgccgactcatcagagaaaacgcgcatcttgtcccggggagggagctcgtcgaaaatgcccgcagctccgtccacccggccgacctcttcgggggactgcagtgaccagaaccgccggtgggtctccggcagcagtggcggcagcgggcgcccgtcccccgcgcagaggctccaccactcgggaggcgccgagaacagcaggtcgtccccgcgctcccccgtggcccggaacgcggccgggaggggaggctccgcctcgcgggacaacacgacgttccgcagcctcgagcgcctcaccatcaccaccagcaggaggaagtgagctgccgaggaccacgccgacgaattctgagagtggaaggcggttactaggccgaggaacttttgcgggatccttgctctctgcagctaaagcaaatcggcaaatagatgatggatggatggttacaaggctgccatgaaaatgcaccctttccccaaaccccagcgtatagtataacgctctccccaaactccaagagggaagacaactccaaagtacaatgcaatcttgattctgtcgatctggcactagttttaaggtgttattgcagaatccctccatttgaccataaattttaaaaacgtatacaagaatctgagttaattttgtttaccgggtatttggctcgaagaatcgaataacctgtcactttc

SEQ ID NO: 10084 - DNA, 2248 bp, Zea Mays
agacgaaacctgtttttccgacaatcgagcgccgaaaaaggactgccaccaaccgctcgctttccctcacctccccacctctctcgctccctccctccctccctcccattgcaggatcggcaccgatgcgattcaaccgcggcctcgcatccggtgcggaggtctgcaattggggggaggctcctctccgccgttggaaccgctgcggcgtcgcagcctgtgcgactttcctgctggttcctcatccctcagggacagattttgcattctttggcattactgtttgatggcagacagtagtgctccttctctgtggaggcattggggcaaaaggcagttgaactgaacgggcacatcaatagtctctggcctccaagggaaattgggaaattcagattgaacgtggctgcatcatttttcctttcattggtcttttcagcaacagcgatccattctcgtaggggggagagagagagagagagagagggagagaaatcaaagaggagagtgatcatggagcatgtgatcggagggaagtataagcttgggaggaagattgggagcggatccttcggagagctatatctcggtgttaatatacagaatggagaggaagtgggaataaaattggagcctgtgaaaacaaaacatccacagctgcactatgaatctaaagtttatatgctgctgcagggtggaaacggtatcccacacctcaagtggtatggtgttgagggggagtacaatgttatggtgatcgatcttcttggcccaagcttggaagatttgtttaattcctgcaacaggaaattttctatgaaaacggtgcttatgcttgctgatcaactgataaaccgagtggaatacatgcattccaagggatttattcatcgtgacatcaagccagacaacttccttataggcttaggtcggaaagctaatcaggtctatatcattgattatgggcttgctaagaaatacaaggaccttcagactcataaacacatcccatacagggagaacaaaaatctgactggaacagcacgttatgctagtgtgaatactcatcttggaatagaacaaagcaggagagatgatctggagtctgttggctatcttctgctatattttttaagaggaagattctgtgcaaatcttacccgccggagttcgtctcatatttccactattgtcgctccctgcgatttgaagacaggccagattactcttcaatgaagaagctctttcgtgatgtatttatacgggaaggataccaatttgattacgtatttgactggactgcactcaagtaccctcaaatgggctccaacaacaagcttgttcaacaaccaagtgcaagaatggctggagttggaccatcagttgagagaacagacaaagcttccatgggacaagagatccgggataggttcactggtgctgttgaggcattcgccagaagaaatccaggctctgggcgccctgcagatcattccagtcattccaggcacaaaagctttgcagattcctttggaacgtccaacgaagcagttgccgactcatcagagaaaacgcgcatcttgtcccggggagggagctcgtcgaaaatgcccgcagctccgtccacccggccgacctcttcgggggactgcagtgaccagaaccgccggtgggtctccggcagcagtggcggcagcgggcgcccgtcccccgcgcagaggctccaccactcgggaggcgccgagaacagcaggtcgtccccgcgctcccccgtggcccggaacgcggccgggaggggaggctccgcctcgcgggacaacacgacgttccgcagcctcgagcgcctcaccatcaccaccagcaggaggaagtgagctgccgaggaccacgccgacgaattctgagagtggaaggcggttactaggccgaggaacttttgcgggatccttgctctctgcagctaaagcaaatcggcaaatagatgatggatggatggttacaaggctgccatgaaaatgcaccctttccccaaaccccagcgtatagtataacgctctccccaaactccaagagggaagacaactccaaagtacaatgcaatcttgattctgtcgatctggcactagttttaaggtgttattgcagaatccctccatttgaccataaattttaaaaacgtatacaagaatctgagttaattttgtttaccgggtatttggctcgaagaatcgaataacctgtcactttc

SEQ ID NO: 10085 - DNA, 2253 bp, Zea Mays
agacgaaacctgtttttccgacaatcgagcgccgaaaaaggactgccaccaaccgctcgctttccctcacctccccacctctctcgctccctccctccctccctcccattgcaggatcggcaccgatgcgattcaaccgcggcctcgcatccggtgcggaggtctgcaattggggggaggctcctctccgccgttggaaccgctgcggcgtcgcagcctgtgcgactttcctgctggttcctcatccctcagggacagattttgcattctttggcattactgtttgatggcagacagtagtgctccttctctgtggaggcattggggcaaaaggcagttgaactgaacgggcacatcaatagtctctggcctccaagggaaattgggaaattcagattgaacgtggctgcatcatttttcctttcattggtcttttcagcaacagcgatccattctcgtaggggggagagagagagagagagagagggagagaaatcaaagaggagagtgatcatggagcatgtgatcggagggaagtataagcttgggaggaagattgggagcggatccttcggagagctatatctcggtgttaatatacagaatggagaggaagtgggaataaaattggagcctcaagtggtatggtgttgagggggagtacaatgttatggtgatcgatcttcttggcccaagcttggaagatttgtttaattcctgcaacaggaaattttctatgaaaacggtgcttatgcttgctgatcaactgataaaccgagtggaatacatgcattccaagggatttattcatcgtgacatcaagccagacaacttccttataggcttaggtcggaaagctaatcaggtctatatcattgattatgggcttgctaagaaatacaaggaccttcagactcataaacacatcccatacagggagaacaaaaatctgactggaacagcacgttatgctagtgtgaatactcatcttggaatagaacaaagcaggagagatgatctggagtctgttggctatcttctgctatattttttaagaggaagcctcccatggcagggccttaaagctggcactaagaaacaaaagtatgataaaattagtgaaaagaaaatgcttacctcggcagagattctgtgcaaatcttacccgccggagttcgtctcatatttccactattgtcgctccctgcgatttgaagacaggccagattactcttcaatgaagaagctctttcgtgatgtatttatacgggaaggataccaatttgattacgtatttgactggactgcactcaagtaccctcaaatgggctccaacaacaagcttgttcaacaaccaagtgcaagaatggctggagttggaccatcagttgagagaacagacaaagcttccatgggacaagagatccgggataggttcactggtgctgttgaggcattcgccagaagaaatccaggctctgggcgccctgcagatcattccagtcattccaggcacaaaagctttgcagattcctttggaacgtccaacgaagcagttgccgactcatcagagaaaacgcgcatcttgtcccggggagggagctcgtcgaaaatgcccgcagctccgtccacccggccgacctcttcgggggactgcagtgaccagaaccgccggtgggtctccggcagcagtggcggcagcgggcgcccgtcccccgcgcagaggctccaccactcgggaggcgccgagaacagcaggtcgtccccgcgctcccccgtggcccggaacgcggccgggaggggaggctccgcctcgcgggacaacacgacgttccgcagcctcgagcgcctcaccatcaccaccagcaggaggaagtgagctgccgaggaccacgccgacgaattctgagagtggaaggcggttactaggccgaggaacttttgcgggatccttgctctctgcagctaaagcaaatcggcaaatagatgatggatggatggttacaaggctgccatgaaaatgcaccctttccccaaaccccagcgtatagtataacgctctccccaaactccaagagggaagacaactccaaagtacaatgcaatcttgattctgtcgatctggcactagttttaaggtgttattgcagaatccctccatttgaccataaattttaaaaacgtatacaagaatctgagttaattttgtttaccgggtatttggctcgaagaatcgaataacctgtcactttc

SEQ ID NO: 10086 - DNA, 2262 bp, Zea Mays
agacgaaacctgtttttccgacaatcgagcgccgaaaaaggactgccaccaaccgctcgctttccctcacctccccacctctctcgctccctccctccctccctcccattgcaggatcggcaccgatgcgattcaaccgcggcctcgcatccggtgcggaggtctgcaattggggggaggctcctctccgccgttggaaccgctgcggcgtcgcagcctgtgcgactttcctgctggttcctcatccctcagggacagattttgcattctttggcattactgtttgatggcagacagtagtgctccttctctgtggaggcattggggcaaaaggcagttgaactgaacgggcacatcaatagtctctggcctccaagggaaattgggaaattcagattgaacgtggctgcatcatttttcctttcattggtcttttcagcaacagcgatccattctcgtaggggggagagagagagagagagagagggagagaaatcaaagaggagagtgatcatggagcatgtgatcggagggaagtataagcttgggaggaagattgggagcggatccttcggagagctatatctcggtgttaatatacagaatggagaggaagtgggaataaaattggagcctgtgaaaacaaaacatccacagctgcactatgaatctaaagtttatatgctgctgcagggtggaaacggtatcccacacctcaagtggtatggtgttgagggggagtacaatgttatggtgatcgatcttcttggcccaagcttggaagatttgtttaattcctgcaacaggaaattttctatgaaaacggtgcttatgcttgctgatcaactgataaaccgagtggaatacatgcattccaagggatttattcatcgtgacatcaagccagacaacttccttataggcttaggtcggaaagctaatcagggagaacaaaaatctgactggaacagcacgttatgctagtgtgaatactcatcttggaatagaacaaagcaggagagatgatctggagtctgttggctatcttctgctatattttttaagaggaagcctcccatggcagggccttaaagctggcactaagaaacaaaagtatgataaaattagtgaaaagaaaatgcttacctcggcagagattctgtgcaaatcttacccgccggagttcgtctcatatttccactattgtcgctccctgcgatttgaagacaggccagattactcttcaatgaagaagctctttcgtgatgtatttatacgggaaggataccaatttgattacgtatttgactggactgcactcaagtaccctcaaatgggctccaacaacaagcttgttcaacaaccaagtgcaagaatggctggagttggaccatcagttgagagaacagacaaagcttccatgggacaagagatccgggataggttcactggtgctgttgaggcattcgccagaagaaatccaggctctgggcgccctgcagatcattccagtcattccaggcacaaaagctttgcagattcctttggaacgtccaacgaagcagttgccgactcatcagagaaaacgcgcatcttgtcccggggagggagctcgtcgaaaatgcccgcagctccgtccacccggccgacctcttcgggggactgcagtgaccagaaccgccggtgggtctccggcagcagtggcggcagcgggcgcccgtcccccgcgcagaggctccaccactcgggaggcgccgagaacagcaggtcgtccccgcgctcccccgtggcccggaacgcggccgggaggggaggctccgcctcgcgggacaacacgacgttccgcagcctcgagcgcctcaccatcaccaccagcaggaggaagtgagctgccgaggaccacgccgacgaattctgagagtggaaggcggttactaggccgaggaacttttgcgggatccttgctctctgcagctaaagcaaatcggcaaatagatgatggatggatggttacaaggctgccatgaaaatgcaccctttccccaaaccccagcgtatagtataacgctctccccaaactccaagagggaagacaactccaaagtacaatgcaatcttgattctgtcgatctggcactagttttaaggtgttattgcagaatccctccatttgaccataaattttaaaaacgtatacaagaatctgagttaattttgtttaccgggtatttggctcgaagaatcgaataacctgtcactttc

SEQ ID NO: 10087 - DNA, 2928 bp, Zea Mays
agacgaaacctgtttttccgacaatcgagcgccgaaaaaggactgccaccaaccgctcgctttccctcacctccccacctctctcgctccctccctccctccctcccattgcaggatcggcaccgatgcgattcaaccgcggcctcgcatccggtgcggaggtctgcaattggggggaggctcctctccgccgttggaaccgctgcggcgtcgcagcctgtgcgactttcctgctggttcctcatccctcaggtacgcgcttcgcgccctggacgttctcttgttgccatccacatttgagtgtgatcctggccccgctgggcaatgttactctgttcttcttctcttttttttttgacggaactgtagtgaccggatcctctacaggaggaattaattaaagaaagaaagcgttacagggaatgctggtctgtctgtggatgctgtttgtgctaatgtggctgattcaggtttcattttctctgtggttttcagggacagattttgcattctttggcattactgtttgatggcagacagtagtgctccttctctgtggaggcattggggcaaaaggcagttgaactgaacgggcacatcaatagtctctggcctccaagggaaattgggaaattcagattgaacgtggctgcatcatttttcctttcattggtcttttcagcaacagcgatccattctcgtaggggggagagagagagagagagagagggagagaaatcaaagaggagagtgatcatggagcatgtgatcggagggaagtataagcttgggaggaagattgggagcggatccttcggagagctatatctcggtgttaatatacagaatggagaggaagtgggaataaaattggagcctgtgaaaacaaaacatccacagctgcactatgaatctaaagtttatatgctgctgcagggtggaaacggtatcccacacctcaagtggtatggtgttgagggggagtacaatgttatggtgatcgatcttcttggcccaagcttggaagatttgtttaattcctgcaacaggaaattttctatgaaaacggtgcttatgcttgctgatcaactggtgagtttattcattccatattcaaccttacgctgccctgcaacagttaggaggcaagtcaactttctggaatttgataacagctattggttgggagttacatgttcagaagtttcatgagcattctgccataagtgttgccttcttttgtgggttttaattccaaagtattagatcattgatggtacaaatggatttcatgaacaccgtatgttgttctaagtgtatcgcaggcaagctttgcaagattgtacatattttaagtttgattctttttccttagtgggtgttggaaggagagcgagattttattattgtcctggacttacattattaaatcttccatttttagataaaccgagtggaatacatgcattccaagggatttattcatcgtgacatcaagccagacaacttccttataggcttaggtcggaaagctaatcaggtctatatcattgattatgggcttgctaagaaatacaaggaccttcagactcataaacacatcccatacagggagaacaaaaatctgactggaacagcacgttatgctagtgtgaatactcatcttggaatagaacaaagcaggagagatgatctggagtctgttggctatcttctgctatattttttaagaggaagcctcccatggcagggccttaaagctggcactaagaaacaaaagtatgataaaattagtgaaaagaaaatgcttacctcggcagagattctgtgcaaatcttacccgccggagttcgtctcatatttccactattgtcgctccctgcgatttgaagacaggccagattactcttcaatgaagaagctctttcgtgatgtatttatacgggaaggataccaatttgattacgtatttgactggactgcactcaagtaccctcaaatgggctccaacaacaagcttgttcaacaaccaagtgcaagaatggctggagttggaccatcagttgagagaacagacaaagcttccatgggacaagagatccgggataggttcactggtgctgttgaggcattcgccagaagaaatccaggctctgggcgccctgcagatcattccagtcattccaggcacaaaagctttgcagattcctttggaacgtccaacgaagcagttgccgactcatcagagaaaacgcgcatcttgtcccggggagggagctcgtcgaaaatgcccgcagctccgtccacccggccgacctcttcgggggactgcagtgaccagaaccgccggtgggtctccggcagcagtggcggcagcgggcgcccgtcccccgcgcagaggctccaccactcgggaggcgccgagaacagcaggtcgtccccgcgctcccccgtggcccggaacgcggccgggaggggaggctccgcctcgcgggacaacacgacgttccgcagcctcgagcgcctcaccatcaccaccagcaggaggaagtgagctgccgaggaccacgccgacgaattctgagagtggaaggcggttactaggccgaggaacttttgcgggatccttgctctctgcagctaaagcaaatcggcaaatagatgatggatggatggttacaaggctgccatgaaaatgcaccctttccccaaaccccagcgtatagtataacgctctccccaaactccaagagggaagacaactccaaagtacaatgcaatcttgattctgtcgatctggcactagttttaaggtgttattgcagaatccctccatttgaccataaattttaaaaacgtatacaagaatctgagttaattttgtttaccgggtatttggctcgaagaatcgaataacctgtcactttc

SEQ ID NO: 10088 - DNA, 2436 bp, Zea Mays
agacgaaacctgtttttccgacaatcgagcgccgaaaaaggactgccaccaaccgctcgctttccctcacctccccacctctctcgctccctccctccctccctcccattgcaggatcggcaccgatgcgattcaaccgcggcctcgcatccggtgcggaggtctgcaattggggggaggctcctctccgccgttggaaccgctgcggcgtcgcagcctgtgcgactttcctgctggttcctcatccctcagggacagattttgcattctttggcattactgtttgatggcagacagtagtgctccttctctgtggaggcattggggcaaaaggcagttgaactgaacgggcacatcaatagtctctggcctccaagggaaattgggaaattcagattgaacgtggctgcatcatttttcctttcattggtcttttcagcaacagcgatccattctcgtaggggggagagagagagagagagagagggagagaaatcaaagaggagagtgatcatggagcatgtgatcggagggaagtataagcttgggaggaagattgggagcggatccttcggagagctatatctcggtgttaatatacagaatggagaggaagtgggaataaaattggagcctgtgaaaacaaaacatccacagctgcactatgaatctaaagtttatatgctgctgcagggtggaagtaagtcgattgtaatttatatgattatttgcagtaatttgtgtccacgccttctggttgcttatttagtcactcatttttgacacagacggtatcccacacctcaagtggtatggtgttgagggggagtacaatgttatggtgatcgatcttcttggcccaagcttggaagatttgtttaattcctgcaacaggaaattttctatgaaaacggtgcttatgcttgctgatcaactgataaaccgagtggaatacatgcattccaagggatttattcatcgtgacatcaagccagacaacttccttataggcttaggtcggaaagctaatcaggtctatatcattgattatgggcttgctaagaaatacaaggaccttcagactcataaacacatcccatacagggagaacaaaaatctgactggaacagcacgttatgctagtgtgaatactcatcttggaatagaacaaagcaggagagatgatctggagtctgttggctatcttctgctatattttttaagaggaagcctcccatggcagggccttaaagctggcactaagaaacaaaagtatgataaaattagtgaaaagaaaatgcttacctcggcagaggtacttctttttgccaacacgaacattgtaatcccgccggagttcgtctcatatttccactattgtcgctccctgcgatttgaagacaggccagattactcttcaatgaagaagctctttcgtgatgtatttatacgggaaggataccaatttgattacgtatttgactggactgcactcaagtaccctcaaatgggctccaacaacaagcttgttcaacaaccaagtgcaagaatggctggagttggaccatcagttgagagaacagacaaagcttccatgggacaagagatccgggataggttcactggtgctgttgaggcattcgccagaagaaatccaggctctgggcgccctgcagatcattccagtcattccaggcacaaaagctttgcagattcctttggaacgtccaacgaagcagttgccgactcatcagagaaaacgcgcatcttgtcccggggagggagctcgtcgaaaatgcccgcagctccgtccacccggccgacctcttcgggggactgcagtgaccagaaccgccggtgggtctccggcagcagtggcggcagcgggcgcccgtcccccgcgcagaggctccaccactcgggaggcgccgagaacagcaggtcgtccccgcgctcccccgtggcccggaacgcggccgggaggggaggctccgcctcgcgggacaacacgacgttccgcagcctcgagcgcctcaccatcaccaccagcaggaggaagtgagctgccgaggaccacgccgacgaattctgagagtggaaggcggttactaggccgaggaacttttgcgggatccttgctctctgcagctaaagcaaatcggcaaatagatgatggatggatggttacaaggctgccatgaaaatgcaccctttccccaaaccccagcgtatagtataacgctctccccaaactccaagagggaagacaactccaaagtacaatgcaatcttgattctgtcgatctggcactagttttaaggtgttattgcagaatccctccatttgaccataaattttaaaaacgtatacaagaatctgagttaattttgtttaccgggtatttggctcgaagaatcgaataacctgtcactttc

SEQ ID NO: 10089 - DNA, 1371 bp, Zea Mays
agacgaaacctgtttttccgacaatcgagcgccgaaaaaggactgccaccaaccgctcgctttccctcacctccccacctctctcgctccctccctccctccctcccattgcaggatcggcaccgatgcgattcaaccgcggcctcgcatccggtgcggaggtctgcaattggggggaggctcctctccgccgttggaaccgctgcggcgtcgcagcctgtgcgactttcctgctggttcctcatccctcagggacagattttgcattctttggcattactgtttgatggcagacagtagtgctccttctctgtggaggcattggggcaaaaggcagttgaactgaacgggcacatcaatagtctctggcctccaagggaaattgggaaattcagattgaacgtggctgcatcatttttcctttcattggtcttttcagcaacagcgatccattctcgtaggggggagagagagagagagagagagggagagaaatcaaagaggagagtgatcatggagcatgtgatcggagggaagtataagcttgggaggaagattgggagcggatccttcggagagctatatctcggtgttaatatacagaatggagaggaagtgggaataaaattggagcctgtgaaaacaaaacatccacagctgcactatgaatctaaagtttatatgctgctgcagggtggaaacggtatcccacacctcaagtggtatggtgttgagggggagtacaatgttatggtgatcgatcttcttggcccaagcttggaagatttgtttaattcctgcaacaggaaattttctatgaaaacggtgcttatgcttgctgatcaactgataaaccgagtggaatacatgcattccaagggatttattcatcgtgacatcaagccagacaacttccttataggcttaggtcggaaagctaatcaggtctatatcattgattatgggcttgctaagaaatacaaggaccttcagactcataaacacatcccatacagggagaacaaaaatctgactggaacagcacgttatgctagtgtgaatactcatcttggaatagaacaaagcaggagagatgatctggagtctgttggctatcttctgctatattttttaagaggaagcctcccatggcagggccttaaagctggcactaagaaacaaaagtatgataaaattagtgaaaagaaaatgcttacctcggcagagattctgtgcaaatcttacccgccggagttcgtctcatatttccactattgtcgctccctttcttctgagtgaccccgctaatgtgaccattgttctcgcctgcactatgatccggtgttaggaaactgggtctcattatagatt

SEQ ID NO: 10090 - DNA, 5043 bp, Zea Mays
gtttacttaatcctgcgatcttggcggtaagtcgtttatccgaggtcctcggggcactcggacagatcctgttaagttgtttggtgcacatgcatagctgtctgaggtctttgagacaaggacaggtgcatgtgggcccgataacttgggaggttctgcgacagctggtatcggagcaggattaagtatatacggtcacatacgtattttcaaaacaaaagttttggttttgaaaaacctattttcaactaaacacattgtttggctttgaaaatcagttttgaaaaactataatgctagcgacatcctctgttaagccctaaattaaggactactaggtggcttagttcagaatactaactcataacctgggaagggtaacgcatacatgtgtaatgttatttttgaggtcattcagttttgaatggatcgacgctccaggtaaggtgagatgtgagagcatgactgaacaaacgtcggtctaggggagtgcttaattgtggcgcttgattatatacatgttacacatatgtatatatgaaggctgcgatgtggagtaattactttttcgggattcagtaccccatggatgtgtatgggtatacagacatgggaatactgagaagtgtaatgtatttgcaacgacgcacctacgctcaggtaagaaggtgagttaccataatgagctgccctatggttaaagtgtggcagcggcgcctatgcgtggctcggcgcttaatgaggagctggcctccatatagaaatatatggagtataaactgtgataaactgtcatgtgtgaattgcatcattgggaaatgggctgtgatggaattttctgcaggtacactaacttcgaactcgtatgtgtagatgacgactagcaatataccgagagagacgtagttatgccaccgatatagaacgttattgccacattatgtgggcaaaattagtgaggacgaataggacgagcatgcatcctgattgttgcattgtgtttgttgtttgcgcacaaaaatgcttccctcacctttattctaataattggtgattgtgaacgaacatgcttccctcgtctttattccgataataaataattggaaactgtatgaagtattactgttttataagcaaatttctagctttgtttgatgtgtcctttagacatgtgtctatgtggtctgtggttcttcttagtttgaccgatggtgcaacttatgtttatttttgtgcctatgtgccggtagaatgttgatagcttgtttgcgtaaacccaaaactaagttatgtccttgtttagtgaaccttgatctaaacgtgtattaatttcttaacaacctatcctaggtgtcgtcttgtgtgaatatcattttcttcacaagattcttggagttctagcaattagaccaagtcatgtcctcatcatctcaacatgtgaaattgtatgagatctaattcataattttgtcatttcttcgaagtccctctaaatctttaaaacatgcatgagtttgaattatcgattcctactccatggccaaactcgtgcaaatacaaatagatgtttaggtaattcccttattggacctaagatgcactcaaacttaaaaaacaaggatctcgagtctgtaatcttgacaatccacttgtaactctcttatggtcatatgttcatcctaagccatacccttgttgggttggtgcaagctggtattcctgttccagtttgcctctccttgagaatcacattattgctttctcagtccaacctaggaaaggaatgcccaatcattttcttgaatttgatgcctttgattctctcatatgtctcaaaggcttatcaaatttgatcttataaccattttctcatctatatctagttttacgttaatccttgaccttgaaatttctgcgatgggcatagaaatatgcttggggctgaaataacaatctcccatcgtactccctcatcgactaatttaggttttggcaatctcgtgttcctttcatcgggccaggacctatttggctctctacctgtaaccattcttataggtggagtctcttttgtatattgtcatcctggctcaatctatttgttatcgtgtgagatttcttattggttacgtctggtaatggtgttatgactaaaactgacggtgccgcgacgaaaccgagggcctcctgtgggtgatcaacacatggttgcgctacttggcacgcgctggtatcacagttagtagtcataatccattatgagattatatcgatatgttatctttgcgcgaattgttcttaccatgtgagattcattatcggtgctagttcgatgatggtgtcctagttaataacttatggtgccgcgtaaagccgaaagtctcatgtggcggccgacacatggtagtgctgttcagtatggtggtatcgaagtctctggctttgatccattatggaactacactgacatgttatcttccgtagactgcttccttgaaatgatttctatgttgtttgttagaatgatcaagccacatatgccgtcactgttagatcaaaagagtatataactctgatgtattccttggtaaattttctacccattcagaaatctccatcgaaaatcaaaacctatctgtgtctaatcatgtgagaaaatcaccttttcatgtggagactcctttctcttgatcttagtggcaactgcacacatggaaccttatgtgttcttttgtcagttgtcgtctgcttgttgacatctctagttggcttaaagtgatacatgctatatccactagagaaaccacatcctgagacactcgccttcgctcaggaccgtcttaagctatcgctaatatggacaagggttacacatctctctactcttaaaagtctttcgtttcgaatctcgggacgagattcttttaaggggggagggttgtaacaccccaggtgtttatcgtctgcttaaccacgagtgcggacgttaacacatgatagctgcgaatataaaggtcactaatttttaatcatccttctttatcacgattttgatatcgtgtctgtctccatctgtctaaaattgtcctaatttattttgcaaaattcagacattagtaatctttcgaaacatcaaatccagtatcgtttggggttaagccatcgacatcttgccccaaactataatctttgaaatcaaatgttgttccttaaaaattcgtttgaaattctttcacgcttgcgttgcacgtctctctgtggcctggcatcgtggcgcgtggctggtgctaaccggtgcctggacagcgcacaacctgtcgcccacgtgaacgatgcgtgatgtcgctttcgaaaggatcataatttcgatgccgcatcaatctcgcatatttatttcgcgaaatgtcgtgtctagtgcccgtttaaaaatttatggattaagagaacatgaatttggagccccaacctactctggtgattgtcgtcctaaacaaatattattagaactctacgacaacaatattgatgcaaaaattaaatcggaccgagataactagaaccgaactgagtattcataattaatctgttttctgttcagactgcggataaaattatctgctctaaattaaatcaagcgcagtctgtactagtttgacgagtatcttttgtttcgtccgatttacatcacgcccagacttaatcggagaactaaattatctgtgtagtcttttgtaacaagaattagagaaaagagcaaaaatctgatttttccttttctccttatcttctccatgccgccccctacttcagccttatctccagccgtcgttcacgccgctcaccacgagccttgcttcttcacgtcacctccttctcacacattttccctctcacctctcaatccatggacaccctccctgctctgatcccccccgatgctcgccgtgggtgccgtttgctgccccaacgccgttccgcgccccctccactccggccatgagctcctcccagtgaatccctctagtcccctgctcatctcccatggtggccgcagggagctctggatccatggccgtcggcctctgggcgtgagcagcccttggctctctcccctgcgacagacttcctccacggtgtctctttccccaaccatggtggccggctccctgcgcctccattcggtgcccctggttcagggccggtcgacctccggcgacctcctccccatggcacagcaggccgacgcccctgcctctactccatcttccccattggacagcacgagctcctcctcgccgatacgccagcaaccctgcagcagcgccactcgatctcctctatacgtgaacaacagcaacccggatcccatccacgtcgtatgcgtcgatccgatctgtgcagtcccaacccacgacgtcgcaacacccttgccctccgtcgatgtcacgcttcgctcatcgctcctcgacgaagagccataaccgtggtagacatgcatgcgcgatccgaactgatttcatcaggtatgttaattgatcacgtgctatggaagacgagtggaattgatctccaagtgatgctgatggacgaagctaaaatggatgaatcaaccaagtgccaggatggaagatgctcaccaagtggtcgtcaattaacaacactaacgtagtgtttatcccaggcaagccccggtgcatttgccacctccttgttgttttaaaacttttatcacttatatgctgcattaggtgataggagttgagtgatgaaacagttgatgcattgtcattccttggaatttgattatcctccttgatacctgttttacaaagagaactaatgaggcttagccctgcctagagaattaaaacctgtttctttttaaaagaatgatgtgtgacattgggaatgggtttgttttatgaaaatggacttgtaatggtgagcgcatcatctgcagtgatgaattcatcattcaagtatagtacctctgtcaggtatatggtttgggtgttaaataataagatgagaccagacgttgag

SEQ ID NO: 10091 - DNA, 4950 bp, Zea Mays
gtttacttaatcctgcgatcttggcggtaagtcgtttatccgaggtcctcggggcactcggacagatcctgttaagttgtttggtgcacatgcatagctgtctgaggtctttgagacaaggacaggtgcatgtgggcccgataacttgggaggttctgcgacagctggtatcggagcaggattaagtatatacggtcacatacgtattttcaaaacaaaagttttggttttgaaaaacctattttcaactaaacacattgtttggctttgaaaatcagttttgaaaaactataatgctagcgacatcctctgttaagccctaaattaaggactactaggtggcttagttcagaatactaactcataacctgggaagggtaacgcatacatgtgtaatgttatttttgaggtcattcagttttgaatggatcgacgctccaggtaaggtgagatgtgagagcatgactgaacaaacgtcggtctaggggagtgcttaattgtggcgcttgattatatacatgttacacatatgtatatatgaaggctgcgatgtggagtaattactttttcgggattcagtaccccatggatgtgtatgggtatacagacatgggaatactgagaagtgtaatgtatttgcaacgacgcacctacgctcaggtaagaaggtgagttaccataatgagctgccctatggttaaagtgtggcagcggcgcctatgcgtggctcggcgcttaatgaggagctggcctccatatagaaatatatggagtataaactgtgataaactgtcatgtgtgaattgcatcattgggaaatgggctgtgatggaattttctgcaggtacactaacttcgaactcgtatgtgtagatgacgactagcaatataccgagagagacgtagttatgccaccgatatagaacgttattgccacattatgtgggcaaaattagtgaggacgaataggacgagcatgcatcctgattgttgcattgtgtttgttgtttgcgcacaaaaatgcttccctcacctttattctaataattggtgattgtgaacgaacatgcttccctcgtctttattccgataataaataattggaaactgtatgaagtattactgttttataagcaaatttctagctttgtttgatgtgtcctttagacatgtgtctatgtggtctgtggttcttcttagtttgaccgatggtgcaacttatgtttatttttgtgcctatgtgccggtagaatgttgatagcttgtttgcgtaaacccaaaactaagttatgtccttgtttagtgaaccttgatctaaacgtgtattaatttcttaacaacctatcctaggtgtcgtcttgtgtgaatatcattttcttcacaagattcttggagttctagcaattagaccaagtcatgtcctcatcatctcaacatgtgaaattgtatgagatctaattcataattttgtcatttcttcgaagtccctctaaatctttaaaacatgcatgagtttgaattatcgattcctactccatggccaaactcgtgcaaatacaaatagatgtttaggtaattcccttattggacctaagatgcactcaaacttaaaaaacaaggatctcgagtctgtaatcttgacaatccacttgtaactctcttatggtcatatgttcatcctaagccatacccttgttgggttggtgcaagctggtattcctgttccagtttgcctctccttgagaatcacattattgctttctcagtccaacctaggaaaggaatgcccaatcattttcttgaatttgatgcctttgattctctcatatgtctcaaaggcttatcaaatttgatcttataaccattttctcatctatatctagttttacgttaatccttgaccttgaaatttctgcgatgggcatagaaatatgcttggggctgaaataacaatctcccatcgtactccctcatcgactaatttaggttttggcaatctcgtgttcctttcatcgggccaggacctatttggctctctacctgtaaccattcttataggtggagtctcttttgtatattgtcatcctggctcaatctatttgttatcgtgtgagatttcttattggttacgtctggtaatggtgttatgactaaaactgacggtgccgcgacgaaaccgagggcctcctgtgggtgatcaacacatggttgcgctacttggcacgcgctggtatcacagttagtagtcataatccattatgagattatatcgatatgttatctttgcgcgaattgttcttaccatgtgagattcattatcggtgctagttcgatgatggtgtcctagttaataacttatggtgccgcgtaaagccgaaagtctcatgtggcggccgacacatggtagtgctgttcagtatggtggtatcgaagtctctggctttgatccattatggaactacactgacatgttatcttccgtagactgcttccttgaaatgatttctatgttgtttgttagaatgatcaagccacatatgccgtcactgttagatcaaaagagtatataactctgatgtattccttggtaaattttctacccattcagaaatctccatcgaaaatcaaaacctatctgtgtctaatcatgtgagaaaatcaccttttcatgtggagactcctttctcttgatcttagtggcaactgcacacatggaaccttatgtgttcttttgtcagttgtcgtctgcttgttgacatctctagttggcttaaagtgatacatgctatatccactagagaaaccacatcctgagacactcgccttcgctcaggaccgtcttaagctatcgctaatatggacaagggttacacatctctctactcttaaaagtctttcgtttcgaatctcgggacgagattcttttaaggggggagggttgtaacaccccaggtgtttatcgtctgcttaaccacgagtgcggacgttaacacatgatagctgcgaatataaaggtcactaatttttaatcatccttctttatcacgattttgatatcgtgtctgtctccatctgtctaaaattgtcctaatttattttgcaaaattcagacattagtaatctttcgaaacatcaaatccagtatcgtttggggttaagccatcgacatcttgccccaaactataatctttgaaatcaaatgttgttccttaaaaattcgtttgaaattctttcacgcttgcgttgcacgtctctctgtggcctggcatcgtggcgcgtggctggtgctaaccggtgcctggacagcgcacaacctgtcgcccacgtgaacgatgcgtgatgtcgctttcgaaaggatcataatttcgatgccgcatcaatctcgcatatttatttcgcgaaatgtcgtgtctagtgcccgtttaaaaatttatggattaagagaacatgaatttggagccccaacctactctggtgattgtcgtcctaaacaaatattattagaactctacgacaacaatattgatgcaaaaattaaatcggaccgagataactagaaccgaactgagtattcataattaatctgttttctgttcagactgcggataaaattatctgctctaaattaaatcaagcgcagtctgtactagtttgacgagtatcttttgtttcgtccgatttacatcacgcccagacttaatcggagaactaaattatctgtgtagtcttttgtaacaagaattagagaaaagagcaaaaatctgatttttccttttctccttatcttctccatgccgccccctacttcagccttatctccagccgtcgttcacgccgctcaccacgagccttgcttcttcacgtcacctccttctcacacattttccctctcacctctcaatccatggacaccctccctgctctgatcccccccgatgctcgccgtgggtgccgtttgctgccccaacgccgttccgcgccccctccactccggccatgagctcctcccagtgaatccctctagtcccctgctcatctcccatggtggccgcagggagctctggatccatggccgtcggcctctgggcgtgagcagcccttggctctctcccctgcgacagacttcctccacggtgtctctttccccaaccatggtggccggctccctgcgcctccattcggtgcccctggttcagggccggtcgacctccggcgacctcctccccatggcacagcaggccgacgcccctgcctctactccatcttccccattggacagcacgagctcctcctcgccgatacgccagcaaccctgcagcagcgccactcgatctcctctatacgtgaacaacagcaacccggatcccatccacgtcgtatgcgtcgatccgatctgtgcagtcccaacccacgacgtcgcaacacccttggtatgttaattgatcacgtgctatggaagacgagtggaattgatctccaagtgatgctgatggacgaagctaaaatggatgaatcaaccaagtgccaggatggaagatgctcaccaagtggtcgtcaattaacaacactaacgtagtgtttatcccaggcaagccccggtgcatttgccacctccttgttgttttaaaacttttatcacttatatgctgcattaggtgataggagttgagtgatgaaacagttgatgcattgtcattccttggaatttgattatcctccttgatacctgttttacaaagagaactaatgaggcttagccctgcctagagaattaaaacctgtttctttttaaaagaatgatgtgtgacattgggaatgggtttgttttatgaaaatggacttgtaatggtgagcgcatcatctgcagtgatgaattcatcattcaagtatagtacctctgtcaggtatatggtttgggtgttaaataataagatgagaccagacgttgag

SEQ ID NO: 10092 - DNA, 1214 bp, Zea Mays
atgaagacgctacaggcagcttctgcagatcaaaacggtggtgactcagacgcttcatccatgaagaaaagcctctgcatggaaagcaaggtcacggagacagccagcagcagatgtgctggtgaatcagcgaaatgttcatctggtgaaacagacacgaacatcaaccgatccctgttgttgaaggcagcggagcctataactcacgccattgatatcacggaagcagccatgagaaaggcagaagccaccatggcaaaaaaactgtcgatgaacaagacgctgaacgatagccgtatcgacaaggacgcgccatgctccatcgacgccaaggccgacgattctcagcaggcgccaaaggtgtacaccgcggtgtgggtcgacaccgacacggacaccctgcgcgctcggctcgtcgactcaatgcggcacttgcgcaggatggcatctcggcggcgccatcggcacaggaagcgcggctcgaataacaagtggaggctgtggagaatcgggccaacgctcctggtcatcctcctgcttgtctccgcggtgcagctgctgttcatactctggctgtaccggaggctcctgaatcaaaattagacaaaatgtatgttagtgctttcttgttggagttattgatgttttgtagtatatgattttagtaatgcataccttgtctacaagaatagtgtcgagatgggttccagttccagatacgaagggtgattcagccgaccggtttccgaattttttatattttggccctttcccagaaaaaaatacacgtttggatcttaaaatattttaatgtcatttttggaccctctgctcggcgccatcgccaatagcgccgaggtaacacagttcagcgccataacctatggcgccaaggtgcgtgctgcgctggcacaaacggacgtcgtggcattgacgtggcaccgagctcggcgccatagatcttggcgccgagctctataatgtacacaaaacttgtctagctcagtttgttttaatactttttttttgtctttgtcactgattttttttgttgtccagatttttcgtttatgtcgctgatttgtccgtctagatttatttcttatccagattttttgtttttgtgactgatttgtttatccgtccatatttttttgtttatccagcgagcacagcggctgtgtgccacattggccgcaagccgtcaactttcc

SEQ ID NO: 10093 - DNA, 4067 bp, Zea Mays
atggccgcggtgctcagcgcgttcgtgccggacaccgcggtccggtggcgcgggctggtgacgggggaggtggcgcggcggatgggcgtcgcgacggaggcgaaggcgctgctggcgaggctggagcgggtgggcgccgcggtgcgggacgccgaggcgcgggccgcgtgcggggacgacggcgcggcgcggtggctggccaatgtgcgggctgccgcctacgaggcggacggggccgtcgaccggtgcagggtcgccgcacgccggcgcagggcccacgaccaacagaagcaggcgcctcttcctaggctgctatcctcctgctgcgacacggacacggacacggacgtgtcctcctgtgtcgacatcgcggctcacatcaacagcctgaaccggaagctgcaggtcatcctcaaggagaagcgtcggcttcagctccgctcttccctcggcggcgaccatcacccagcgcctgaccgcgcggcacataggctccgcaaacctcagaggacccgggccgcgggcgccggcatcgttggctcaaggatcgaggacgacgcggccgcgctcgtcgggctgctgacggagatggacggcgaggaaaccggctgcacgatcgtcgccattgtcggccccgacgggatcggcaagaccacgctcgccaggaaggtgtacggcagcgagaggatacggctcggcttcggggcggcgaggtcgtggctgcgcgttcccagggagtacagcgaggccggcctgctctcccaggtcgtcgactcgttcggcggcggcgacacgacgggcggcgagagcttcgccgacctcgagaaggcgctggccaggctggtggaggggaagaggtgtttgctcgtgctggacgacgcgcggtacggcggggtgtgggagggcgtgctgaggaggccgctccagcgcgctgggcgcggcagcaaggtggtggtcacggcgcggcacggcagcattgctcgggagatgggcgcccgccacgtccaccgcatcaagaggctggacagcgacggtgcctggctgctgcttcgcgcggcggcctctgtagctgacgaggctacagccgctgagctgaagggcgtgggccacgggatagccgataagtgcggcggtgtgccgttggcgatcaaggctgttgccggcgtcctgaccacacgggacgcgagcgcccaggagtggggcgaggtgctcgccagcccggcgtggctggtgaaggggctcgcggaggacgccatgaagccgctgtacctgtgctacgacgacctgccgtgccatctcaagcagtgcttcctctactgctcgttgttcccctctgacctcgccatggacaggcgcgtgctcgtgcagctgtggatagctgagggcttcgtgcagatcggagccgacgcaagcgtcgaggatgtggccgaggagtactacgatgagctcatcagaaggcaccttctccagccgggagaggaagacgaaggcggcggcgccacgtggtgcaccatgcacgacatgctgcgagctctagcgcagctgctctcgcatggtgaggagttgaccggcgactcgtatcggctgttggtcgacagcgatgccccgttcgcgccacggcgtgtttccctcgcgagaagaaacctggcctcgatacctgagaagatcctcaagttagaaagggcaattccagaatccataggcaacctgtggaacctgaaattcctcctgctgagagggtgcagggcactgcacgcgctgccaaaagggattgagcatctgagagggctcagggaccttgaccttgccggcacagtgatcgacgatgccgcattcagagtaggccatctgagaagcatcacgtcgctctgctgcttcacggtgacgagcaaagaggcgcgtgccgctcaggataggagcgggtggcctctggatgagctcaagaacttgtctcagctgagaacgctgcacatacagaagctcgagaatgctgccaatcgatccgaggcaactgagatgttacttggcgccaagaaatgcctcagggagctcgagctgtcgtgcagcagcactgtcgggccacttcaaacaacggagttgaccagaaagatcgaggatgtctttgaagagatgaatccgccattgtgcctggagtcactgaagcttgtaaactactttgggacaaggttcccgagatggctatcggtgaccttcctgccaaatctccgtgatctagacattgtcgggtgcaacttctgccagtcttttcctccactaggccgtttgccagaactgagatccttgtacgtagcagactcttcagctctgaaggatataggtgcagagctcacggtcacgggcaccgaacacccacaccaggttccgtttccaaagctggaaaacctgcacttccaaggcctgcggaagctccagacatgggcagacatcgagccaggggcatttccatccctgcagaaactccagcttgagagctgccccaagctgcagaaccttcctgttggcctcagacatgtgacgtccctgaccaagctacacgtagcagatatggcaagccttgaggccgtggatgacattgctacgctgagggaactgagcgtctggaacactcctaatttgaagaggatatcaaacctgccttcccttgaaggtatcaacatgtgccactgccctatgctggagagcgtggagaacgtagacgggttacgaacagtgcgcatctttgatcatgatttgcgggacatgcccagatggatcgaggcgcatgcttccaagcttcgatcgctgaatttcacaagcacagctgagctgctgaaaaggtgcttggttgatggtccggactggtctgtgattaagggcattaaggaagttcgtgggtactccactggttgcagctacatatactacaataggagtccttacatattcgagagcaatgtgagtgatgaagataacctcggtgtcagagaggatgaagcagatcctgataatgttgatgacatttcagtttcatcttcaggcgccagttatctagaaatcagaggattctttgactcacaagtgttgaaggaaggaactaacagggctgaagaaattgtgccacgtgggagttttgggaggaccatgctggggctcactcatcgtcgcctgcataagctagcagaagttgctcctgaagatgatgaggttgaggacggagcagattcagctatcctgcttccttctaatccaacaagagctatgacatctgcagaaaaagttggttgtgttgtgactaattatcgtaatgatcttggttcattggcaaatgctgcgagtcatgaagcaataaccaatgatgaaattggtcataacttggtccggcaagggtcccgagcaatcatcagtactgaaattggtcaaggttctaacttcagtagtatccgaagaaaggaacatacatccaagaaagaaggtgtcactgctgatgttactgtcgctaaaggcattagcctagttcattcaaggcaagtggtggcttccaataaaggaaaacatgattttgccgataatgccgcagctagcatctgttcatccgatgtaatgccagaaaatccattagacaaagaagtcccagagaaatctgctggtgccaatggtagtagctccatccatgaagcatgtcatacagtcattgtcactgaaaccactcgagatctggcttccaaagcaatcggtaacatcagttccatccatggtagaaaacaacagatgtcagacaaagagagagaactttctgatggtcttgctcctgctaattatgttgacaacaatgcaaatcagatggaggacggcaacatcagttcgtcagtcaagctaaatcatgaggaatccaaagcaatcggtgcaagcacaactaactgtgattcaggtctgttagctacctaaggagaagaagaggggatagcttggggaagaagagaatggcagggaacggagagtttcttagagattcagaatagttttcattacaagcatacccttcctgaacacacacactcattatttat

SEQ ID NO: 10094 - DNA, 929 bp, Zea Mays
atcaaatatggcatcatagataatttcataaatgcacatgtgtggacgtataatataaaaaaatgtttacgtatattaataggcacttgctaatctgtttgttcctaatattgcaagttgcccgaacgcttgggaccattgcaaattccttttcgtcagacatcggctgaaggtaagttgtctcaagctactgttctgcgctattatgctgcagttgagtcatcccgtaaaaaggaaggtctgtcttgaagcttctagtgcatttaattaattcaccaacaatggcattcccatacatttttgagtcatgcataagtcctactggcaattggctcaatcagtctgaatgtgcttactgtgttttctgttttatacatggacttctaaggttagcatacatatcatatgttacaagtacaattctccgcacctctcttagttgcaacctttcccctctgtcaattcatcatatgttgagtttattagtgacttcattggtggtgaactataacaggcgttgaagactaatattttggcttcagtgctttgatggttccatgtagcaggtggaggagattgcaatgttctgccccatgatatgtcgggaaattgtgaaaaatgacacaaggtcatccaaaaaaatcatactacaaaacacacaggcgacagtaaacaccggatcatgaactctcggtatgtcaacatgataaggacggactgccctcaccatccaaaaagtatgtccttgtgcaacaagcagccctggaaaggagtatacaaagggaaaaaaaataacaaacaatgttttgcattcatttttcctacatacgcgaatagacacaaaattgaactccctcttacaattcatactattactatttatcacgcgcgcataggcgcgcgcaatacactagtatatatagacatag

SEQ ID NO: 10095 - DNA, 895 bp, Zea Mays
cttcgtcctcgctctctccgccgttttgtcctctctgtcctctccgccaccccacacaagtagataaccgcagcgatggcagctcggctgcacgccctgcgcaccccaatagcaaaagccggcggttgctcgcgtggagtaagttgtctcaagctactgttctgcgctattatgctgcagttgagtcatcccgtaaaaaggaaggtctgtcttgaagcttctagtgcatttaattaattcaccaacaatggcattcccatacatttttgagtcatgcataagtcctactggcaattggctcaatcagtctgaatgtgcttactgtgttttctgttttatacatggacttctaaggttagcatacatatcatatgttacaagtacaattctccgcacctctcttagttgcaacctttcccctctgtcaattcatcatatgttgagtttattagtgacttcattggtggtgaactataacaggcgttgaagactaatattttggcttcagtgctttgatggttccatgtagcaggtggaggagattgcaatgttctgccccatgatatgtcgggaaattgtgaaaaatgacacaaggtcatccaaaaaaatcatactacaaaacacacaggcgacagtaaacaccggatcatgaactctcggtatgtcaacatgataaggacggactgccctcaccatccaaaaagtatgtccttgtgcaacaagcagccctggaaaggagtatacaaagggaaaaaaaataacaaacaatgttttgcattcatttttcctacatacgcgaatagacacaaaattgaactccctcttacaattcatactattactatttatcacgcgcgcataggcgcgcgcaatacactagtatatatagacatag

SEQ ID NO: 10096 - DNA, 3544 bp, Zea Mays
ccccaacctctgaaccccgctctaataaatcttcctcccatctctctcgctcccaaccctcaagtccccaccaacccaaccctggtggcaccggccgcacacacgaaagcaagctagctagtcactattagagctatttggttgggagcggtttagctgagcaagatcgaactggcattgtcacacacatctcagcactcagctccttgggttcccctccatgagcagcagctgagcagccacacattgccgtcttccttgctgcacttgtagttacagctagatccattgatttttttggcaacaacaagagcaggagctactgagcaagaagtgcgtacgtgcttgcggcgtcggtgctacctgctggactacgtgtgctacaaggcgacggacgaccggaagctgccgacggacctgtgcggcgagatcatccagcggaacaagctgctggggctggaggagtacaagttcctgctgaaggtgatcgtgaactcgggcatcggcgaggagacgtacggcccgcgcaacatgatcgagggcggggaggcccggccggaccgcctccgcgagggcatggaggagatggacgagaccttccacgccgtcctcgacgagctcttcgcccggtcggcggcgcccggcggcgtcggcatccgccccgccgacgtcgacgtgctcgtcgtcaacgtgtccatgttctcgccggcgccgtccctgtcggcgcgcgtcgtgcggcgctacggcctccgcgaggacgccaaggtgtacaacctcacgggcatgggctgcagcgccacgctcatcgcgctcgacctcgtcaacggctacttcaggtgcgtgctcgacctagctcgttaattcttgctagtaattaattactactcgttgtcatgaagagataaaggtctcgttcacgcatggtgtgctcctgtaaatagacgtctgagtttgacaaactgacaatagattattgaccgcagccaagtctatcgtctctctggccaaataaatatttaatcacaagtttaggaaaaaaattgtaataaagaattctataactcacaaagtctaaagctgttttgttacgaaaaggcaaaaacaaaaaaaaacaaaaaagggggctagagctgaaaatgtatatatgttgcacaggtaaaaaaaaagcccaaagctgggcaaaaatttatgcctgatgggccctagctagctgctctggtaattaagggcatggatggatacacacccagctgtgaggcatcttgtttggttgcacgccattgaatccatcgtctgtgtagctactgagaccagataaatgttcagtactcccctcctactacttgtaaattaatgcctatcaatcggaacatgtaccgtacgtgctctacctactagctagcaacgtagtagtagctcatttttaagagtggtagtactcgtttggtacttgtgctcaccataataatgaacacaatcacaaggatttttttgttatgaacctatggtagttttgttctctcttttttcagcaagataaactaggaaacaaatatatggtggaaggtcttgtaaataaagcattaagcagcgtaaccattataagcttaggtcctacattaatattgaagagttaaccactataaagatccatatagtaagtgattgactctattattaaacttgctgcaagaagatccatcccgagatggcagtagccgcatcccccatgaacacgggagtaaatgtggccggggccagcaatggcatgaatgctgtgctgtgactgctgcatgtgagccagctacggctacggcctactctggagtctggactgtcctcctttaatgcctgctcaccaagtttggtttgcctttagatgggcatgaatggctcagccgctcaggcaggcacggcatggctggacctggacctgaccggctccgcttgtagttagtagacatgcttgtccattgggctgaactgtctggttcaggcagatctccatctatcccaggccgacgagaaagtcggcggtggcacagccgcacaggcaacgaccaacatagcatacttgaaaatggctggcgtgtgcatagcatacttgaaatcttaatgaacttgtttgtcagtcatggatgctggattacgtgtggttggttgcttgcaggacgcacgccgggcaggtggctctggtgatgacgtcggagtcgatcgcgcccaactggtacgcgggcaacaagcgcaccttcatgctgggcaactgcctgttccgctccggcggctgcgcctacttcctgaccaacgacccgcggctccggccgcacgccaagctccgtctccgccacgtggtgcgcacccacacgggcgcctccgacgaggcctacaactgcgcgctccagatggaggacgaggccggccgcccggggttccacctgggcaaggagctgccgcgcgccgcggtgcacgccttcgtgcacaacctccgcgtgctggcgccccgcgtgctgccgctcccggagctgctccgcctcgcctgcgccaccctctcggcgcgcctggcgcgcaagaagcggcagcgcggcgcgggccatggccacggccacctcaccatccgcatgaaggccggcgtcgaccacttctgcgtgcacacgggcggcgccgccgtcatcgacggcgtcggcaagggactcacgctcacggagcacgacctggagccctcccgcatgacgctgcaccgcttcggcaacacctccgccagcagcgtctggtacgtgctcgcctacatggaggccaagggccgcctgcgccagggcgaccgcgtcctcatgctcaccttcggcgccggattcaagtgcaacagctgcgtctggaccgtcgagaggcccgccaccgacgccggcgtctggaaggaccgcatccaccactacccgctcaaggacgtctccaacccattcatggacaagtacggattcgtcaaggacctcatagacttgtgatcgccccctagctgctcaactcaacgtctcaaccccaccaacgcacatactttttatttacaccattattattgtattcattgtcatgttagtactactctgttctagtattgagcaactactagttaattaaggtgagcacaacaatgctagctgaggattcatagtagcttatgattcttttggtgatggcgggaagatcgacttttacgtagcaacggatatggcttcgctctttgttctttcttcagttctgtcatttcgtgtgtgtcaatttagatgccccatgtcgtcagtcaatcagtcagtgtcgtcctgttcctatttactatatcaaatgattatggtgcaatcattttttaaactaagttatttattatttattgtgtaatggtaaatgttgctgtaataaagagcatactctcactccaaagatgcatgttttatgatctgaaagtccactgcggcatagtattcatcagccctcatggcgatgtacatacgtagaagtcggttcttcgatttctaaataaatacaatacaaa

SEQ ID NO: 10097 - DNA, 1103 bp, Zea Mays
ccgagctccgacacagccgtcgccctgagcccgtcatccatgctcccttccatccttctccccaccagcacaaccacaccccctctcccccctcgccgcctccccagaccccgacacgtcctccccggccgcaatgaccgctccccgaccgtggtccccgctagcaaacccaagctcgtcggggagaagagcaaggggggcgcagaggcttgcctacctagctcgtcggggccctatggagatccagcaccaccggggctgggcaactccaaggttgtgaaggtgcagagcgaggaggcgtgggatctgttcaccgatcgagcgagcaatgaaggctgggccaggtatcggcgatgccctcggcgacatcgaaatctactccgcggccaccggcgagcccgtcctgttcagagacctgtgggactaggacgagaattagagagctgtttagatgactggagttcacattcatcttctgctggcaacccaaacataccatatgtggttgtctccaagtcatcaattgtgactgctgtatgcaaagagattcttggctgctacaggaagttacttggcattcctgatctgttgaatcaaccaaacatgtcaattctgaagcaacttttgcagactttacagccaactgaaaattttgatgatgttctttctgagttccaatcatctcttggtccttgcaatgttgattacctatattgtggagaatgtaaaatgttggaggatattatggattcagtgtcctcattttcataccttttgtcttctgatgtgttaattactatacaatcaattgtaaattctgttgttgtgttgttggacaaatccggggaaccaaatgggaaaaatatacacatgggatgctccaaagcaatcatttcctttctgcgaaagcgtcttggatactcagctcataagctgctcagtgctgatttccctagcgaagatgttggaaaaggatggcagagtaaaggtgatcttatacagaagatattgcaaatatacctcaggaatagtgactctacttcagatctacttgctgagataggtcgtgaattgcctaagcagtcatttagtatgaagcgaac

SEQ ID NO: 10098 - DNA, 1464 bp, Zea Mays
gtcgccccttcccccgagctccgacacagccgtcgccctgagcccgtcatccatgctcccttccatccttctccccaccagcacaaccacaccccctctcccccctcgccgcctccccagaccccgacacgtcctccccggccgcaatgaccgctccccgaccgtggtccccgctagcaaacccaagctcgtcggggagaagagcaaggggggcgcagaggcttgcctacctagctcgtcggggccctatggagatccagcaccaccggggctgggcaactccaaggttgtgaaggtgcagagcgaggaggcgtgggatctgttcaccgatcgagcgagcaatgaaggctgggccaggtatcggcgatgccctcggcgacatcgaaatctactccgcggccaccggcgagcccgtcctgttcagagacctgtgggactaggacgagaattagagagctgtttagatgactggagttcacattcatcttctgctggcaacccaaacataccatatgtggttgtctccaagtcatcaattgtgactgctgtatgcaaagagattcttggctgctacaggaagttacttggcattcctgatctgttgaatcaaccaaacatgtcaattctgaagcaacttttgcagactttacagccaactgaaaattttgatgatgttctttctgagttccaatcatctcttggtccttgcaatgttgattacctatattgtggagaatgtaaaatgttggaggatattatggattcagtgtcctcattttcataccttttgtcttctgatgtgttaattactatacaatcaattgtaaattctgttgttgtgttgttggacaaatccggggaaccaaatgggaaaaatatacacatgggatgctccaaagcaatcatttcctttctgcgaaagcgtcttggatactcagctcataagctgctcagtgctgatttccctagcgaagatgttggaaaaggatggcagagtaaaggtgatcttatacagaagatattgcaaatatacctcaggaatagtgactctacttcagatctacttgctgagataggtcgtgaattgcctaagctctttattcttggtggactcgaatgatgcctccaaatttgtctgtcagcaagatccaccaaatgctgctactggcccaagtgaccaatgtgtttgagtagagttcggatacttatcaacattggaagagctgcatgagcaatgatgttgcaacccaacccgggattcgtgtggttaaaacttttcagcagaactacccctagtgctcccgtaaaaaggaaaaggaaaaacaatttttatctctaaaattgtcttcaattccatatatatatctcttctctgtatctgtcatttatagacttacctaaatttttttcttttatatctcattactctccaacaatatccgctatatatagttagtcctccta

SEQ ID NO: 10099 - DNA, 7219 bp, Zea Mays
acaccgccggctaggaacgttacttggcattcctgatctgttgaatcaaccaaacatgtcaattctgaagcaacttttgcagactttacagccaactgaaaattttgatgatgttctttctgagttccaatcatctcttggtccttgcaatgttgattacctatattgtggagaatgtaaaatgttggaggatattatggattcagtgtcctcattttcataccttttgtcttctgatgtgttaattactatacaatcaattgtaaattctgttgttgtgttgttggacaaatccggggaaccaaatgggaaaaatatacacatgggatgctccaaagcaatcatttcctttctgcgaaagcgtcttggatactcagctcataagctgctcagtgctgatttccctagcgaagatgttggaaaaggatggcagagtaaaggtgatcttatacagaagatattgcaaatatacctcaggaatagtgactctacttcagatctacttgctgagataggtcgtgaattgcctaaggcacccaacacacaattgtttttttagcaagcgcgtatggaggtgtgtgcctgatgactgacggtgtacgagggaacttcttccggcaggcgtggggcgtgctctccaacgatgagaccatggaaatcgtggcatatatcgaagtcgacatgatactgatggttgcaatgtagtggtgaaacaactagattaaaataacaaaatttatgtatgaccatgatcacaaatagattatgaaacattttttcataacagtataacacacattttgtatataagttaccgtggtattatatgtccccgttgcaacgcacgggcactcacctagtatcacataaaatcatatcacttcacctttaaatcacttcacctttaaagtgagagtttcttcatgtcatcctccacacgcgagaattgcgaaatcaaaaaatggtgtgtgtgtgctaggttcaaacccaggccaccagaaacacaatgctcacctcctaaccactgtagcacatgttcgcttgtattgtacaaagaatagaatattgtaaatatataaaaattgtagcaatacacgagcaactaattagttaactgaatttatctatgcctaaattatgattattagaatagaattcaattcaaaggatccaaatagggccaaaggtatttggtttaaacaatgagttaattgttatcttctcactctttcacaatttcgtttggttgtggaataaatttgagtgattgattatcaatttattcggcgcaaggtactaattactagtactttagtatgaggaataaaagtgattccatcaaattgatgattagatttatgatgcacccctcatatagaatgattgattttttttcaaattagacaacctgttagttctgtaaatttttaggataagagcacacgtctcgtattggtctgttgggcaactagaatttagagaacttgggctgcttctatatatgtaacaaacaatagagctggaatgatccgtgcacatcttgaagcaagaaatgcttgggaatcaatcttttgtagtgctagaaaatagaaagtttgaagtgtagtgtaggtagggcaatcatatgacctcctggacaatgcaagaacgaagtgcacattaatagagtgtttggtttgaggaataataaacttgtcgatcatcttctcactactcagtttttttgtttgatttgtagaataaaatgatttgatctatcaccagctctgtcaagggcgtagtgatcaagggtaggcggccctcgactacggagttcgtagtctcctgccgtgtcttccagaaccgaaggttatgccccttacggcggctgggcttgagaggagatagagagagagatggataattgttttctccccttctcaagtgctgattacatctatatatagcccacggctgaaacagataagggtaatctcctcctaaataataggctagataacttctaacagaaaggagtaatcccttcctaaataataggctagatatcttttattgccttaatcctagcggctaattggtttgggcagccgcctcctgtgctgcatgctcggctgccctgcgtatgtcgcgggcgcgacgtcgcctggagtaggggatgccgtacatgacatctctccccccctcgaccaccagctcgtcctcgagctggaacgctgggtacttggcggagaaggcgtcgaggtcttcccatgtggaggatgctgcgggttctcccttccagcggatgagcacctgtcgaaccccgcgagcgacgcgagtgcgcacagcacgttccggctcagggttgatggctccatgatgaacagcgggtaacagtggtggtgtcgcgggaggctcgcccacccatttcttgaggaggccgacatggaacacatcatgaagcttggcgcgtggaggcaactcgagacgtactgccacctcattgatgagctcggtgacgcggtacgacccaaagaagcggggctgaagcttgctcttcggcgcctgagaaatggaagccaccggccgctgacggagtcggaggagcacccagtccccaacgacataggagacgtggcggtgagctttgtcgtagtagcgcttctggatcgcctgggcctgctctaggcggtgacggacgtcggccaagaattcttcacgttcggccattgtttgggccacagcagccacacgcgtgtcccctgcttcatatgatctgatggagggcgggtcgcggccgtataccacccgaaatggtgtctcctgtagagaagactggtacgcggtgttgtatgtatattctgcccaaggcagccaccgcaaccagtcccgtggccggtcgccggagaaacaacgtaggtacatggcgatgacgcggttggcagcctctgactgtccatcggattgcggatggaatgccgtggtcatatcgtagcttggcgcccatgagccgcatcagctccctccagaacgtggaggtgaacactggatcgcgatcggaaaccatggattgcggcatcccgtggaggcgtacaatgtcggtgaagaacgcctgtgccacagactcagaagagtacaggtgagctaaagggatgaaatggcagtacttgctgaagcgatccaccaccgttaggatgacagattttcctttgacccggggcagagcctcgatgaagtctagcccgacgtcagtccacactccagtcggcacgggtagtggaagaagaagaccagccggctgcagatgctccgtcttgaagcgttggcacgtagggcaggcgcggacgaagtcctggacgacgcgacgcatgtcggggaagtggaagtcgcgtcggagtcggtggagagtgcgctgcatgccctcatgtccgtccccgtgcaccgtggccacgatctccaggaggagtggcgaggtggaagggatgtacagccggccatcataggtgaccagcccgtcgacgaggccccacggggctgtacgggtacccgcggccagctcatcccggatggtgacgagggtagggtcgagagcgtgtgcctggcgtagccgctcgatgtagtcgaaacgcggggccgagatggtgagcactacgccgtcaggtgtgtcccgacgggacagcgcgtccacgacggtgttctaggcgcccagcttgtattccacctcgaagtcgaaactgagaagtttcctgacccaatggtgttgcggaattgtcgcgaggcgttggtcgaggaggaacttcaagctgtagtggtctgtccggaccgtgaagcgccgtccccacaggtatgggcgccagtggcgtatggcgtgcacgagcccgatgagttctcactcatatgcagcgagggagcgatgtcgtggcgcgacggggcggctgaagaaagctatggggtgcttgtcttggagcagcaccgccccgaatccgtgcgtagaggcgtcatactcgacaacaaaaggtcgtgtgaaatccggaagcgccaagaccggggccgaggtgaccgcggtcttgagggctgtgaatgccgtcgccgcgtcctcagtccaggagaacccctcctttttcaggagcgccgttaggggtgctgcgatggcgccgtagtcgtggacgaacttgcggtaatagcccgcaaggcccaagaacccgcggaccgcgcgggcggaacgcggttggggccagtcggccaccgcctgcaccttggcgggatccatggcgacgccggtatcagagatgacgtggccgaggtaggcgatggacgacaccccaaacgcacacttggagcgcttgacgaacagctggtgttgttgcagcacggtgagcacggctcggaggtgtcggagatggtcggcccaagagcagctgtagatcaaaatgtcgtcaaaaaacaccagtacgaaccggcggaggaagggacgcagaacgtcgttcatgagtgcttggaatgtcgccggagcgttgcacaggccgaacggcatgacgaggaactcatatagcccatcgtgcgtgcggaacgccgttttggcgatgtcgtcgggacgcatgcggacttgatgatagcccgagcggaggtccagcttggagaagaacttggcgccgtggagctcgtcgagcagctcgtcgacgactggaatgggaaaggcgtccttgacggtgatggcgttcagggcgcggtagtcgacgcagaaccgccacgagccctcaggcttcttgaccaatagaacgggtgaagagaacgccgaggaactccggcggatgagcccctgggagagcatcgttgtgcactggcgttccagctcgtccttgtgagtcgctgggtagcggtacggccgcacggcgacggcctgggcgcctggttggagggtgatgcggtggtcgcgagagcgcggtggaggcagcccttgaggctcggcgaatacggggtcgaaggagtgcagtagctcgtcgaggagggacgcggaggccgtggtggagcatatggccgccgcgatggcgccctgggcgcacggccagcagatcgggcgcccctgcatcatgaaggacatggtgcggcgcttgaaatcccacgttactggcccgagcgtgccgagccactgggcgcccagaacgacatcatacccagccagcggcatgacgaagagatcggtgctgaacacgtcgccctggacggagaacgtgacgtggtgcaaaacacctgggcaggtgattcgctcgccgttggccaccgtcgccgtcatgcgtggccgggcggagatagggagccctgtgcggcgtgctgcggactccgagatgaagctgtgcgaggagcccgagtccaggagcgcggagaatcggacgctgccgatggtgacgccgatctggagggtgtcgatgaagcggaccccggcgagagcggaaagggagaaacacggcgactcctcggtggatgcccctggtgcggcccatacggcgaacacaggcgcctccttgtcgccgggatcctccgctgccgcgttgccgtcccgcgcgacgtcatcgatctccacaccattgaagaagaaaaggcggcggcagaatctgttgtggccacaggtgaacttctcattgcaattgaaacacaacccttggcgtcgtcgttccgccatctcctctggtgtgagacgcctctggttgctctcgccgcggccctgctgagcggctgctggaggggcaggaagcgccaggagcggcgctgttgccggcagggcagcccgctgtgcggggcccgggggaccgagcggtgctggccgcgttggttgttgtacctgccggtcgctctccatcagctcgacttggcgagccaagcttatggccgccgcgagtgtgtctggatggtggagacggacggcgtggctgagcgacggtagaagacccccggtgaagagctggacacgctgcgcctcttccagccgaccggcgcgaggtagaagggcctggaatcggctggcgtactcttccacggttccggtgcgtcggcagtcggcgagctcgaacatcggggcagaccggagcgggggcccgaaccggaggctcaggagatctttgaaatgtccccacgatggggtgccctcatcgtcctgaagctggatataccatagctgcgcgacctcgtccaggtgataggacgccatgcgcacgcgctcctctgccatggtgcgatgttggcggaagtaagcctcgcacttgttgaggaagatcattggatcgatcgtgccgtcgaagcggggaaagtcccacttcttatggtttgggaagaagtcgtgatcgcggggcctgtcggtctggttgccatcggcggtgccagacgctgacgcagtcctgtccttcatggctgccatgtcggatttgagggtctgcatctccgaggtcatggtcttgagcatgtccagcacgtcggcgagagacggctcagacatggtggctgctgggctggttgcagattcagatgaagaggtcggcgagggtggggtgggcggtggtctagggctggcggcggctggtgagaaggtggaggatcggctggatcgctgataccagatgtcaagggcgtagtgatcaagggtaggcggccctcgactacggagttcgtagtctcctgccgtgtcttccagaaccgaaggttatgccccttacggcggctgggcttgagaggagatagagagagagatggataattgttttctccccttctcaagtgctgattacatctatatatagcccacggctgaaacagataaggataatctcctcctaaataataggctagataacttctaacagaaaggagtaatcccttcctaaataataggctagatatcttttattgccttaatcctagcggctaattggtttgggcagccgcctcctgtgctgcatgctcggctgccctgcgtatgtcgcgggcgcgacgtcgcctggagtaggggatgccgtacatgacaagctcatctttatagttagttagtactaatatgatgaatgagatcatctcaccaaatttgaggaataaatctatgatgcaccacctcattttagattgagtgatttcttaaaccaaacaccccctaaagtttttataagatgtacatatgatagcaattacctacactttttagtcaccctttgtctgattgtctcctacactttttagtcacccttgtcttttg

SEQ ID NO: 10100 - DNA, 7541 bp, Zea Mays
gaatacctctatgctgatcccgatcggaaggagggtcctgatcggcgactccggcgtcggcaagtccaacttgctctcacgcttcacgcgcaacgagtttagcctcgagtccaagtccaccatcggcgacgagttcgccacctgctctctccaggtcgacggcaagttcgtcaatgcccagatttgggacaccgccggctaggaacgaattagagagctgtttagatgactggagttcacattcatcttctgctggcaacccaaacataccatatgtggttgtctccaagtcatcaattgtgactgctgtatgcaaagagattcttggctgctacaggaagttacttggcattcctgatctgttgaatcaaccaaacatgtcaattctgaagcaacttttgcagactttacagccaactgaaaattttgatgatgttctttctgagttccaatcatctcttggtccttgcaatgttgattacctatattgtggagaatgtaaaatgttggaggatattatggattcagtgtcctcattttcataccttttgtcttctgatgtgttaattactatacaatcaattgtaaattctgttgttgtgttgttggacaaatccggggaaccaaatgggaaaaatatacacatgggatgctccaaagcaatcatttcctttctgcgaaagcgtcttggatactcagctcataagctgctcagtgctgatttccctagcgaagatgttggaaaaggatggcagagtaaaggtgatcttatacagaagatattgcaaatatacctcaggaatagtgactctacttcagatctacttgctgagataggtcgtgaattgcctaaggcacccaacacacaattgtttttttagcaagcgcgtatggaggtgtgtgcctgatgactgacggtgtacgagggaacttcttccggcaggcgtggggcgtgctctccaacgatgagaccatggaaatcgtggcatatatcgaagtcgacatgatactgatggttgcaatgtagtggtgaaacaactagattaaaataacaaaatttatgtatgaccatgatcacaaatagattatgaaacattttttcataacagtataacacacattttgtatataagttaccgtggtattatatgtccccgttgcaacgcacgggcactcacctagtatcacataaaatcatatcacttcacctttaaatcacttcacctttaaagtgagagtttcttcatgtcatcctccacacgcgagaattgcgaaatcaaaaaatggtgtgtgtgtgctaggttcaaacccaggccaccagaaacacaatgctcacctcctaaccactgtagcacatgttcgcttgtattgtacaaagaatagaatattgtaaatatataaaaattgtagcaatacacgagcaactaattagttaactgaatttatctatgcctaaattatgattattagaatagaattcaattcaaaggatccaaatagggccaaaggtatttggtttaaacaatgagttaattgttatcttctcactctttcacaatttcgtttggttgtggaataaatttgagtgattgattatcaatttattcggcgcaaggtactaattactagtactttagtatgaggaataaaagtgattccatcaaattgatgattagatttatgatgcacccctcatatagaatgattgattttttttcaaattagacaacctgttagttctgtaaatttttaggataagagcacacgtctcgtattggtctgttgggcaactagaatttagagaacttgggctgcttctatatatgtaacaaacaatagagctggaatgatccgtgcacatcttgaagcaagaaatgcttgggaatcaatcttttgtagtgctagaaaatagaaagtttgaagtgtagtgtaggtagggcaatcatatgacctcctggacaatgcaagaacgaagtgcacattaatagagtgtttggtttgaggaataataaacttgtcgatcatcttctcactactcagtttttttgtttgatttgtagaataaaatgatttgatctatcaccagctctgtcaagggcgtagtgatcaagggtaggcggccctcgactacggagttcgtagtctcctgccgtgtcttccagaaccgaaggttatgccccttacggcggctgggcttgagaggagatagagagagagatggataattgttttctccccttctcaagtgctgattacatctatatatagcccacggctgaaacagataagggtaatctcctcctaaataataggctagataacttctaacagaaaggagtaatcccttcctaaataataggctagatatcttttattgccttaatcctagcggctaattggtttgggcagccgcctcctgtgctgcatgctcggctgccctgcgtatgtcgcgggcgcgacgtcgcctggagtaggggatgccgtacatgacatctctccccccctcgaccaccagctcgtcctcgagctggaacgctgggtacttggcggagaaggcgtcgaggtcttcccatgtggaggatgctgcgggttctcccttccagcggatgagcacctgtcgaaccccgcgagcgacgcgagtgcgcacagcacgttccggctcagggttgatggctccatgatgaacagcgggtaacagtggtggtgtcgcgggaggctcgcccacccatttcttgaggaggccgacatggaacacatcatgaagcttggcgcgtggaggcaactcgagacgtactgccacctcattgatgagctcggtgacgcggtacgacccaaagaagcggggctgaagcttgctcttcggcgcctgagaaatggaagccaccggccgctgacggagtcggaggagcacccagtccccaacgacataggagacgtggcggtgagctttgtcgtagtagcgcttctggatcgcctgggcctgctctaggcggtgacggacgtcggccaagaattcttcacgttcggccattgtttgggccacagcagccacacgcgtgtcccctgcttcatatgatctgatggagggcgggtcgcggccgtataccacccgaaatggtgtctcctgtagagaagactggtacgcggtgttgtatgtatattctgcccaaggcagccaccgcaaccagtcccgtggccggtcgccggagaaacaacgtaggtacatggcgatgacgcggttggcagcctctgactgtccatcggattgcggatggaatgccgtggtcatatcgtagcttggcgcccatgagccgcatcagctccctccagaacgtggaggtgaacactggatcgcgatcggaaaccatggattgcggcatcccgtggaggcgtacaatgtcggtgaagaacgcctgtgccacagactcagaagagtacaggtgagctaaagggatgaaatggcagtacttgctgaagcgatccaccaccgttaggatgacagattttcctttgacccggggcagagcctcgatgaagtctagcccgacgtcagtccacactccagtcggcacgggtagtggaagaagaagaccagccggctgcagatgctccgtcttgaagcgttggcacgtagggcaggcgcggacgaagtcctggacgacgcgacgcatgtcggggaagtggaagtcgcgtcggagtcggtggagagtgcgctgcatgccctcatgtccgtccccgtgcaccgtggccacgatctccaggaggagtggcgaggtggaagggatgtacagccggccatcataggtgaccagcccgtcgacgaggccccacggggctgtacgggtacccgcggccagctcatcccggatggtgacgagggtagggtcgagagcgtgtgcctggcgtagccgctcgatgtagtcgaaacgcggggccgagatggtgagcactacgccgtcaggtgtgtcccgacgggacagcgcgtccacgacggtgttctaggcgcccagcttgtattccacctcgaagtcgaaactgagaagtttcctgacccaatggtgttgcggaattgtcgcgaggcgttggtcgaggaggaacttcaagctgtagtggtctgtccggaccgtgaagcgccgtccccacaggtatgggcgccagtggcgtatggcgtgcacgagcccgatgagttctcactcatatgcagcgagggagcgatgtcgtggcgcgacggggcggctgaagaaagctatggggtgcttgtcttggagcagcaccgccccgaatccgtgcgtagaggcgtcatactcgacaacaaaaggtcgtgtgaaatccggaagcgccaagaccggggccgaggtgaccgcggtcttgagggctgtgaatgccgtcgccgcgtcctcagtccaggagaacccctcctttttcaggagcgccgttaggggtgctgcgatggcgccgtagtcgtggacgaacttgcggtaatagcccgcaaggcccaagaacccgcggaccgcgcgggcggaacgcggttggggccagtcggccaccgcctgcaccttggcgggatccatggcgacgccggtatcagagatgacgtggccgaggtaggcgatggacgacaccccaaacgcacacttggagcgcttgacgaacagctggtgttgttgcagcacggtgagcacggctcggaggtgtcggagatggtcggcccaagagcagctgtagatcaaaatgtcgtcaaaaaacaccagtacgaaccggcggaggaagggacgcagaacgtcgttcatgagtgcttggaatgtcgccggagcgttgcacaggccgaacggcatgacgaggaactcatatagcccatcgtgcgtgcggaacgccgttttggcgatgtcgtcgggacgcatgcggacttgatgatagcccgagcggaggtccagcttggagaagaacttggcgccgtggagctcgtcgagcagctcgtcgacgactggaatgggaaaggcgtccttgacggtgatggcgttcagggcgcggtagtcgacgcagaaccgccacgagccctcaggcttcttgaccaatagaacgggtgaagagaacgccgaggaactccggcggatgagcccctgggagagcatcgttgtgcactggcgttccagctcgtccttgtgagtcgctgggtagcggtacggccgcacggcgacggcctgggcgcctggttggagggtgatgcggtggtcgcgagagcgcggtggaggcagcccttgaggctcggcgaatacggggtcgaaggagtgcagtagctcgtcgaggagggacgcggaggccgtggtggagcatatggccgccgcgatggcgccctgggcgcacggccagcagatcgggcgcccctgcatcatgaaggacatggtgcggcgcttgaaatcccacgttactggcccgagcgtgccgagccactgggcgcccagaacgacatcatacccagccagcggcatgacgaagagatcggtgctgaacacgtcgccctggacggagaacgtgacgtggtgcaaaacacctgggcaggtgattcgctcgccgttggccaccgtcgccgtcatgcgtggccgggcggagatagggagccctgtgcggcgtgctgcggactccgagatgaagctgtgcgaggagcccgagtccaggagcgcggagaatcggacgctgccgatggtgacgccgatctggagggtgtcgatgaagcggaccccggcgagagcggaaagggagaaacacggcgactcctcggtggatgcccctggtgcggcccatacggcgaacacaggcgcctccttgtcgccgggatcctccgctgccgcgttgccgtcccgcgcgacgtcatcgatctccacaccattgaagaagaaaaggcggcggcagaatctgttgtggccacaggtgaacttctcattgcaattgaaacacaacccttggcgtcgtcgttccgccatctcctctggtgtgagacgcctctggttgctctcgccgcggccctgctgagcggctgctggaggggcaggaagcgccaggagcggcgctgttgccggcagggcagcccgctgtgcggggcccgggggaccgagcggtgctggccgcgttggttgttgtacctgccggtcgctctccatcagctcgacttggcgagccaagcttatggccgccgcgagtgtgtctggatggtggagacggacggcgtggctgagcgacggtagaagacccccggtgaagagctggacacgctgcgcctcttccagccgaccggcgcgaggtagaagggcctggaatcggctggcgtactcttccacggttccggtgcgtcggcagtcggcgagctcgaacatcggggcagaccggagcgggggcccgaaccggaggctcaggagatctttgaaatgtccccacgatggggtgccctcatcgtcctgaagctggatataccatagctgcgcgacctcgtccaggtgataggacgccatgcgcacgcgctcctctgccatggtgcgatgttggcggaagtaagcctcgcacttgttgaggaagatcattggatcgatcgtgccgtcgaagcggggaaagtcccacttcttatggtttgggaagaagtcgtgatcgcggggcctgtcggtctggttgccatcggcggtgccagacgctgacgcagtcctgtccttcatggctgccatgtcggatttgagggtctgcatctccgaggtcatggtcttgagcatgtccagcacgtcggcgagagacggctcagacatggtggctgctgggctggttgcagattcagatgaagaggtcggcgagggtggggtgggcggtggtctagggctggcggcggctggtgagaaggtggaggatcggctggatcgctgataccagatgtcaagggcgtagtgatcaagggtaggcggccctcgactacggagttcgtagtctcctgccgtgtcttccagaaccgaaggttatgccccttacggcggctgggcttgagaggagatagagagagagatggataattgttttctccccttctcaagtgctgattacatctatatatagcccacggctgaaacagataaggataatctcctcctaaataataggctagataacttctaacagaaaggagtaatcccttcctaaataataggctagatatcttttattgccttaatcctagcggctaattggtttgggcagccgcctcctgtgctgcatgctcggctgccctgcgtatgtcgcgggcgcgacgtcgcctggagtaggggatgccgtacatgacaagctcatctttatagttagttagtactaatatgatgaatgagatcatctcaccaaatttgaggaataaatctatgatgcaccacctcattttagattgagtgatttcttaaaccaaacaccccctaaagtttttataagatgtacatatgatagcaattacctacactttttagtcaccctttgtctgattgtctcctacactttttagtcacccttgtcttttg

SEQ ID NO: 10101 - DNA, 7680 bp, Zea Mays
tgttgttgcgctgctaaggcatttcgagtgcccatgctgttgccctttccgttggaatacctctatgctgatcccgatcggaagtttagtaaatggagaagtaatgttggccgatccgcccgtagatcctctctccccattaccgcgatttatttggtacttcgggcaggagggtcctgatcggcgactccggcgtcggcaagtccaacttgctctcacgcttcacgcgcaacgagtttagcctcgagtccaagtccaccatcggcgacgagttcgccacctgctctctccaggtcgacggcaagttcgtcaatgcccagatttgggacaccgccggctaggaacgaattagagagctgtttagatgactggagttcacattcatcttctgctggcaacccaaacataccatatgtggttgtctccaagtcatcaattgtgactgctgtatgcaaagagattcttggctgctacaggaagttacttggcattcctgatctgttgaatcaaccaaacatgtcaattctgaagcaacttttgcagactttacagccaactgaaaattttgatgatgttctttctgagttccaatcatctcttggtccttgcaatgttgattacctatattgtggagaatgtaaaatgttggaggatattatggattcagtgtcctcattttcataccttttgtcttctgatgtgttaattactatacaatcaattgtaaattctgttgttgtgttgttggacaaatccggggaaccaaatgggaaaaatatacacatgggatgctccaaagcaatcatttcctttctgcgaaagcgtcttggatactcagctcataagctgctcagtgctgatttccctagcgaagatgttggaaaaggatggcagagtaaaggtgatcttatacagaagatattgcaaatatacctcaggaatagtgactctacttcagatctacttgctgagataggtcgtgaattgcctaaggcacccaacacacaattgtttttttagcaagcgcgtatggaggtgtgtgcctgatgactgacggtgtacgagggaacttcttccggcaggcgtggggcgtgctctccaacgatgagaccatggaaatcgtggcatatatcgaagtcgacatgatactgatggttgcaatgtagtggtgaaacaactagattaaaataacaaaatttatgtatgaccatgatcacaaatagattatgaaacattttttcataacagtataacacacattttgtatataagttaccgtggtattatatgtccccgttgcaacgcacgggcactcacctagtatcacataaaatcatatcacttcacctttaaatcacttcacctttaaagtgagagtttcttcatgtcatcctccacacgcgagaattgcgaaatcaaaaaatggtgtgtgtgtgctaggttcaaacccaggccaccagaaacacaatgctcacctcctaaccactgtagcacatgttcgcttgtattgtacaaagaatagaatattgtaaatatataaaaattgtagcaatacacgagcaactaattagttaactgaatttatctatgcctaaattatgattattagaatagaattcaattcaaaggatccaaatagggccaaaggtatttggtttaaacaatgagttaattgttatcttctcactctttcacaatttcgtttggttgtggaataaatttgagtgattgattatcaatttattcggcgcaaggtactaattactagtactttagtatgaggaataaaagtgattccatcaaattgatgattagatttatgatgcacccctcatatagaatgattgattttttttcaaattagacaacctgttagttctgtaaatttttaggataagagcacacgtctcgtattggtctgttgggcaactagaatttagagaacttgggctgcttctatatatgtaacaaacaatagagctggaatgatccgtgcacatcttgaagcaagaaatgcttgggaatcaatcttttgtagtgctagaaaatagaaagtttgaagtgtagtgtaggtagggcaatcatatgacctcctggacaatgcaagaacgaagtgcacattaatagagtgtttggtttgaggaataataaacttgtcgatcatcttctcactactcagtttttttgtttgatttgtagaataaaatgatttgatctatcaccagctctgtcaagggcgtagtgatcaagggtaggcggccctcgactacggagttcgtagtctcctgccgtgtcttccagaaccgaaggttatgccccttacggcggctgggcttgagaggagatagagagagagatggataattgttttctccccttctcaagtgctgattacatctatatatagcccacggctgaaacagataagggtaatctcctcctaaataataggctagataacttctaacagaaaggagtaatcccttcctaaataataggctagatatcttttattgccttaatcctagcggctaattggtttgggcagccgcctcctgtgctgcatgctcggctgccctgcgtatgtcgcgggcgcgacgtcgcctggagtaggggatgccgtacatgacatctctccccccctcgaccaccagctcgtcctcgagctggaacgctgggtacttggcggagaaggcgtcgaggtcttcccatgtggaggatgctgcgggttctcccttccagcggatgagcacctgtcgaaccccgcgagcgacgcgagtgcgcacagcacgttccggctcagggttgatggctccatgatgaacagcgggtaacagtggtggtgtcgcgggaggctcgcccacccatttcttgaggaggccgacatggaacacatcatgaagcttggcgcgtggaggcaactcgagacgtactgccacctcattgatgagctcggtgacgcggtacgacccaaagaagcggggctgaagcttgctcttcggcgcctgagaaatggaagccaccggccgctgacggagtcggaggagcacccagtccccaacgacataggagacgtggcggtgagctttgtcgtagtagcgcttctggatcgcctgggcctgctctaggcggtgacggacgtcggccaagaattcttcacgttcggccattgtttgggccacagcagccacacgcgtgtcccctgcttcatatgatctgatggagggcgggtcgcggccgtataccacccgaaatggtgtctcctgtagagaagactggtacgcggtgttgtatgtatattctgcccaaggcagccaccgcaaccagtcccgtggccggtcgccggagaaacaacgtaggtacatggcgatgacgcggttggcagcctctgactgtccatcggattgcggatggaatgccgtggtcatatcgtagcttggcgcccatgagccgcatcagctccctccagaacgtggaggtgaacactggatcgcgatcggaaaccatggattgcggcatcccgtggaggcgtacaatgtcggtgaagaacgcctgtgccacagactcagaagagtacaggtgagctaaagggatgaaatggcagtacttgctgaagcgatccaccaccgttaggatgacagattttcctttgacccggggcagagcctcgatgaagtctagcccgacgtcagtccacactccagtcggcacgggtagtggaagaagaagaccagccggctgcagatgctccgtcttgaagcgttggcacgtagggcaggcgcggacgaagtcctggacgacgcgacgcatgtcggggaagtggaagtcgcgtcggagtcggtggagagtgcgctgcatgccctcatgtccgtccccgtgcaccgtggccacgatctccaggaggagtggcgaggtggaagggatgtacagccggccatcataggtgaccagcccgtcgacgaggccccacggggctgtacgggtacccgcggccagctcatcccggatggtgacgagggtagggtcgagagcgtgtgcctggcgtagccgctcgatgtagtcgaaacgcggggccgagatggtgagcactacgccgtcaggtgtgtcccgacgggacagcgcgtccacgacggtgttctaggcgcccagcttgtattccacctcgaagtcgaaactgagaagtttcctgacccaatggtgttgcggaattgtcgcgaggcgttggtcgaggaggaacttcaagctgtagtggtctgtccggaccgtgaagcgccgtccccacaggtatgggcgccagtggcgtatggcgtgcacgagcccgatgagttctcactcatatgcagcgagggagcgatgtcgtggcgcgacggggcggctgaagaaagctatggggtgcttgtcttggagcagcaccgccccgaatccgtgcgtagaggcgtcatactcgacaacaaaaggtcgtgtgaaatccggaagcgccaagaccggggccgaggtgaccgcggtcttgagggctgtgaatgccgtcgccgcgtcctcagtccaggagaacccctcctttttcaggagcgccgttaggggtgctgcgatggcgccgtagtcgtggacgaacttgcggtaatagcccgcaaggcccaagaacccgcggaccgcgcgggcggaacgcggttggggccagtcggccaccgcctgcaccttggcgggatccatggcgacgccggtatcagagatgacgtggccgaggtaggcgatggacgacaccccaaacgcacacttggagcgcttgacgaacagctggtgttgttgcagcacggtgagcacggctcggaggtgtcggagatggtcggcccaagagcagctgtagatcaaaatgtcgtcaaaaaacaccagtacgaaccggcggaggaagggacgcagaacgtcgttcatgagtgcttggaatgtcgccggagcgttgcacaggccgaacggcatgacgaggaactcatatagcccatcgtgcgtgcggaacgccgttttggcgatgtcgtcgggacgcatgcggacttgatgatagcccgagcggaggtccagcttggagaagaacttggcgccgtggagctcgtcgagcagctcgtcgacgactggaatgggaaaggcgtccttgacggtgatggcgttcagggcgcggtagtcgacgcagaaccgccacgagccctcaggcttcttgaccaatagaacgggtgaagagaacgccgaggaactccggcggatgagcccctgggagagcatcgttgtgcactggcgttccagctcgtccttgtgagtcgctgggtagcggtacggccgcacggcgacggcctgggcgcctggttggagggtgatgcggtggtcgcgagagcgcggtggaggcagcccttgaggctcggcgaatacggggtcgaaggagtgcagtagctcgtcgaggagggacgcggaggccgtggtggagcatatggccgccgcgatggcgccctgggcgcacggccagcagatcgggcgcccctgcatcatgaaggacatggtgcggcgcttgaaatcccacgttactggcccgagcgtgccgagccactgggcgcccagaacgacatcatacccagccagcggcatgacgaagagatcggtgctgaacacgtcgccctggacggagaacgtgacgtggtgcaaaacacctgggcaggtgattcgctcgccgttggccaccgtcgccgtcatgcgtggccgggcggagatagggagccctgtgcggcgtgctgcggactccgagatgaagctgtgcgaggagcccgagtccaggagcgcggagaatcggacgctgccgatggtgacgccgatctggagggtgtcgatgaagcggaccccggcgagagcggaaagggagaaacacggcgactcctcggtggatgcccctggtgcggcccatacggcgaacacaggcgcctccttgtcgccgggatcctccgctgccgcgttgccgtcccgcgcgacgtcatcgatctccacaccattgaagaagaaaaggcggcggcagaatctgttgtggccacaggtgaacttctcattgcaattgaaacacaacccttggcgtcgtcgttccgccatctcctctggtgtgagacgcctctggttgctctcgccgcggccctgctgagcggctgctggaggggcaggaagcgccaggagcggcgctgttgccggcagggcagcccgctgtgcggggcccgggggaccgagcggtgctggccgcgttggttgttgtacctgccggtcgctctccatcagctcgacttggcgagccaagcttatggccgccgcgagtgtgtctggatggtggagacggacggcgtggctgagcgacggtagaagacccccggtgaagagctggacacgctgcgcctcttccagccgaccggcgcgaggtagaagggcctggaatcggctggcgtactcttccacggttccggtgcgtcggcagtcggcgagctcgaacatcggggcagaccggagcgggggcccgaaccggaggctcaggagatctttgaaatgtccccacgatggggtgccctcatcgtcctgaagctggatataccatagctgcgcgacctcgtccaggtgataggacgccatgcgcacgcgctcctctgccatggtgcgatgttggcggaagtaagcctcgcacttgttgaggaagatcattggatcgatcgtgccgtcgaagcggggaaagtcccacttcttatggtttgggaagaagtcgtgatcgcggggcctgtcggtctggttgccatcggcggtgccagacgctgacgcagtcctgtccttcatggctgccatgtcggatttgagggtctgcatctccgaggtcatggtcttgagcatgtccagcacgtcggcgagagacggctcagacatggtggctgctgggctggttgcagattcagatgaagaggtcggcgagggtggggtgggcggtggtctagggctggcggcggctggtgagaaggtggaggatcggctggatcgctgataccagatgtcaagggcgtagtgatcaagggtaggcggccctcgactacggagttcgtagtctcctgccgtgtcttccagaaccgaaggttatgccccttacggcggctgggcttgagaggagatagagagagagatggataattgttttctccccttctcaagtgctgattacatctatatatagcccacggctgaaacagataaggataatctcctcctaaataataggctagataacttctaacagaaaggagtaatcccttcctaaataataggctagatatcttttattgccttaatcctagcggctaattggtttgggcagccgcctcctgtgctgcatgctcggctgccctgcgtatgtcgcgggcgcgacgtcgcctggagtaggggatgccgtacatgacaagctcatctttatagttagttagtactaatatgatgaatgagatcatctcaccaaatttgaggaataaatctatgatgcaccacctcattttagattgagtgatttcttaaaccaaacaccccctaaagtttttataagatgtacatatgatagcaattacctacactttttagtcaccctttgtctgattgtctcctacactttttagtcacccttgtcttttg

SEQ ID NO: 10102 - DNA, 1867 bp, Zea Mays
gattgttgttggtgttagcactccagttaaagcccgtattcttgccgaggagcgtttgccctttccgttggaatacctctatgctgatcccgatcggaaggagggtcctgatcggcgactccggcgtcggcaagtccaacttgctctcacgcttcacgcgcaacgagtttagcctcgagtccaagtccaccatcggcgacgagttcgccacctgctctctccaggtcgacggcaagttcgtcaatgcccagatttgggacaccgccggctaggaacgaattagagagctgtttagatgactggagttcacattcatcttctgctggcaacccaaacataccatatgtggttgtctccaagtcatcaattgtgactgctgtatgcaaagagattcttggctgctacaggaagttacttggcattcctgatctgttgaatcaaccaaacatgtcaattctgaagcaacttttgcagactttacagccaactgaaaattttgatgatgttctttctgagttccaatcatctcttggtccttgcaatgttgattacctatattgtggagaatgtaaaatgttggaggatattatggattcagtgtcctcattttcataccttttgtcttctgatgtgttaattactatacaatcaattgtaaattctgttgttgtgttgttggacaaatccggggaaccaaatgggaaaaatatacacatgggatgctccaaagcaatcatttcctttctgcgaaagcgtcttggatactcagctcataagctgctcagtgctgatttccctagcgaagatgttggaaaaggatggcagagtaaaggtgatcttatacagaagatattgcaaatatacctcaggaatagtgactctacttcagatctacttgctgagataggtcgtgaattgcctaaggtgggtcatctcttcttctcgagtgatgctctcgagttatgcatatgccaccactctgccttaaaaagaacatctggcatcattctgaatccagccgaagagtgagcataaaaggtttagcaattcacaaataatctatgttcaatgggcatgagtgaagaataattagtaagtgcttttcactgctgacttgatagcaaagtagtgtaaaaataatggtaaaagtggttacgccttataaactgggacggagggagtactgttatattagcaagtacaaaagcattccccgctaacattgtttgtgtattagaagtcactaccggaatttggctctttgccgagtgccatattctttgccgagtgttttatttcgggcactcggcaaagagctctttgccgagtgccacgcaaaactaggcaaagacaattttaaaatcacattttaaagtagtaaattaattcaaatgaaaaagttttcaactacaaatttgtataactcattatgatgtacaatttatatattaaacatttcttcatatgacaaaataaaaataaatttgttcataaaatctatatctctctcgtagtttatgaaactacgagagagacgtatagaatttgtgcatattgttagaaccatcatctgagataaacaaattatcaaacaaccaaaataaactttataaatcttgagaagttataaaagtttatagttgacaactttttcatttgaagtcatattgtcaacgaaaactacgtctgaatttaaaaaaaattaaaatttgaattttgaaaacgacttcgaaaggaaaaaccaccaacatgaaagttgtaggtattgaagagttatgaaactttgtagttgacaatgttttagtttgaatcatcttgttatgcaaaactatgtttgaattttgaaatttgaatttttcaaactgtc

SEQ ID NO: 10103 - DNA, 2285 bp, Zea Mays
ccgagctccgacacagccgtcgccctgagcccgtcatccatgctcccttccatccttctccccaccagcacaaccacaccccctctcccccctcgccgcctccccagaccccgacacgtcctccccggccgcaatgaccgctccccgaccgtggtccccgctagcaaacccaagctcgtcggggagaagagcaaggggggcgcagaggcttgcctacctagctcgtcggggccctatggagatccagcaccaccggggctgggcaactccaaggttgtgaaggtgcagagcgaggaggcgtgggatctgttcaccgatcgagcgagcaatgaaggctgggccaggtatcggcgatgccctcggcgacatcgaaatctactccgcggccaccggcgagcccgtcctgttcagagacctgtgggactaggacgagtttagtaaatggagaagtaatgttggccgatccgcccgtagatcctctctccccattaccgcgatttatttggtacttcgggcaggagggtcctgatcggcgactccggcgtcggcaagtccaacttgctctcacgcttcacgcgcaacgagtttagcctcgagtccaagtccaccatcggcgacgagttcgccacctgctctctccaggtcgacggcaagttcgtcaatgcccagatttgggacaccgccggctaggaacgaattagagagctgtttagatgactggagttcacattcatcttctgctggcaacccaaacataccatatgtggttgtctccaagtcatcaattgtgactgctgtatgcaaagagattcttggctgctacaggaagttacttggcattcctgatctgttgaatcaaccaaacatgtcaattctgaagcaacttttgcagactttacagccaactgaaaattttgatgatgttctttctgagttccaatcatctcttggtccttgcaatgttgattacctatattgtggagaatgtaaaatgttggaggatattatggattcagtgtcctcattttcataccttttgtcttctgatgtgttaattactatacaatcaattgtaaattctgttgttgtgttgttggacaaatccggggaaccaaatgggaaaaatatacacatgggatgctccaaagcaatcatttcctttctgcgaaagcgtcttggatactcagctcataagctgctcagtgctgatttccctagcgaagatgttggaaaaggatggcagagtaaaggtgatcttatacagaagatattgcaaatatacctcaggaatagtgactctacttcagatctacttgctgagataggtcgtgaattgcctaaggtgggtcatctcttcttctcgagtgatgctctcgagttatgcatatgccaccactctgccttaaaaagaacatctggcatcattctgaatccagccgaagagtgagcataaaaggtttagcaattcacaaataatctatgttcaatgggcatgagtgaagaataattagtaagtgcttttcactgctgacttgatagcaaagtagtgtaaaaataatggtaaaagtggttacgccttataaactgggacggagggagtactgttatattagcaagtacaaaagcattccccgctaacattgtttgtgtattagaagtcactaccggaatttggctctttgccgagtgccatattctttgccgagtgttttatttcgggcactcggcaaagagctctttgccgagtgccacgcaaaactaggcaaagacaattttaaaatcacattttaaagtagtaaattaattcaaatgaaaaagttttcaactacaaatttgtataactcattatgatgtacaatttatatattaaacatttcttcatatgacaaaataaaaataaatttgttcataaaatctatatctctctcgtagtttatgaaactacgagagagacgtatagaatttgtgcatattgttagaaccatcatctgagataaacaaattatcaaacaaccaaaataaactttataaatcttgagaagttataaaagtttatagttgacaactttttcatttgaagtcatattgtcaacgaaaactacgtctgaatttaaaaaaaattaaaatttgaattttgaaaacgacttcgaaaggaaaaaccaccaacatgaaagttgtaggtattgaagagttatgaaactttgtagttgacaatgttttagtttgaatcatcttgttatgcaaaactatgtttgaattttgaaatttgaatttttcaaactgtc

SEQ ID NO: 10104 - DNA, 3534 bp, Zea Mays
ccgagctccgacacagccgtcgccctgagcccgtcatccatgctcccttccatccttctccccaccagcacaaccacaccccctctcccccctcgccgcctccccagaccccgacacgtcctccccggccgcaatgaccgctccccgaccgtggtccccgctagcaaacccaagctcgtcggggagaagagcaaggggggcgcagaggcttgcctacctagctcgtcggggccctatggagatccagcaccaccggggctgggcaactccaaggttgtgaaggtgcagagcgaggaggcgtgggatctgttcaccgatcgagcgagcaatgaaggctgggccaggtatcggcgatgccctcggcgacatcgaaatctactccgcggccaccggcgagcccgtcctgttcagagacctgtgggactaggacgagtttagtaaatggagaagtaatgttggccgatccgcccgtagatcctctctccccattaccgcgatttatttggtacttcgggcaggagggtcctgatcggcgactccggcgtcggcaagtccaacttgctctcacgcttcacgcgcaacgagtttagcctcgagtccaagtccaccatcggcgacgagttcgccacctgctctctccaggtcgacggcaagttcgtcaatgcccagatttgggacaccgccggctaggaacggtacgtttcgtttcagcttgctccagctcgtctcgcctttcatctctctccgccgttgccgcggcagctggcagtagatctgatttgcgtctcggttcggctgctgctagcgtgcgtatcctcattttcaccattaagattgggttctcgctttggatctcgctgccgaattgcgttgcgtgctgctgttgattaccatttgtagggtttggtgcattttcatttcagaatccgatactggaacacgcgaatcagcatgcaggcatccttttgttgacaaactagagttgtaggatgatgatgatgatatgatattcttctattgcacaaacgttttttatactgcccggagcttggttttcgagtacgcagcaggtggcgtggactggagatgacttggtttctttgccttggctcatgccgaacatttagcctaggaggagcagaccggccattttccttttctcttgtttgcatgcagcaagcctggccagttcagttaatttagtcgtcaaaacagtaaaatgcgcacaatgcaaatatggactggagattatctgaaaaaaaatgtgagctctatccaaattatggatttcttcagtttaaattgaccagtggattagaaaaccttttcttcctatcttaattgccaacaatcagttttttttgcagtgtcaaggttcatcttcttaccttgaaaccgaggtacttcattcctactagataattgttgctaaaatagggttacattattaacgtctggctgtttcgtcacgcaactaccaacatatctatatcttctccgtgatctgcacaacaaattagataatttgaatccttcaatcaagccttttcttagtacttctaaagcaaaatatactactactcattgccataagagcacacaagattttcttgacaaaatccagccactattcttagttttaaggaagcatctggatggagcagtttcaatgatcaaagatggtaaccttctattccataatttttgcttcgtgttacttttacaatgtttgaattaataattagtgggctgagtcggtttcttaatggtcggggttgtatgtgctgggagggattacaccccctcctttgtggatcttttcttcttagtgaaatgacacaactttcctgcattgcttgagaaaaacaatgtccgcatttcgtataatccttcattgaatgtccttgctttcgattggtaacatgataagctactactcttcagaattagagagctgtttagatgactggagttcacattcatcttctgctggcaacccaaacataccatatgtggttgtctccaagtcatcaattgtgactgctgtatgcaaagagattcttggctgctacaggaagttacttggcattcctgatctgttgaatcaaccaaacatgtcaattctgaagcaacttttgcagactttacagccaactgaaaattttgatgatgttctttctgagttccaatcatctcttggtccttgcaatgttgattacctatattgtggagaatgtaaaatgttggaggatattatggattcagtgtcctcattttcataccttttgtcttctgatgtgttaattactatacaatcaattgtaaattctgttgttgtgttgttggacaaatccggggaaccaaatgggaaaaatatacacatgggatgctccaaagcaatcatttcctttctgcgaaagcgtcttggatactcagctcataagctgctcagtgctgatttccctagcgaagatgttggaaaaggatggcagagtaaaggtgatcttatacagaagatattgcaaatatacctcaggaatagtgactctacttcagatctacttgctgagataggtcgtgaattgcctaaggtgggtcatctcttcttctcgagtgatgctctcgagttatgcatatgccaccactctgccttaaaaagaacatctggcatcattctgaatccagccgaagagtgagcataaaaggtttagcaattcacaaataatctatgttcaatgggcatgagtgaagaataattagtaagtgcttttcactgctgacttgatagcaaagtagtgtaaaaataatggtaaaagtggttacgccttataaactgggacggagggagtactgttatattagcaagtacaaaagcattccccgctaacattgtttgtgtattagaagtcactaccggaatttggctctttgccgagtgccatattctttgccgagtgttttatttcgggcactcggcaaagagctctttgccgagtgccacgcaaaactaggcaaagacaattttaaaatcacattttaaagtagtaaattaattcaaatgaaaaagttttcaactacaaatttgtataactcattatgatgtacaatttatatattaaacatttcttcatatgacaaaataaaaataaatttgttcataaaatctatatctctctcgtagtttatgaaactacgagagagacgtatagaatttgtgcatattgttagaaccatcatctgagataaacaaattatcaaacaaccaaaataaactttataaatcttgagaagttataaaagtttatagttgacaactttttcatttgaagtcatattgtcaacgaaaactacgtctgaatttaaaaaaaattaaaatttgaattttgaaaacgacttcgaaaggaaaaaccaccaacatgaaagttgtaggtattgaagagttatgaaactttgtagttgacaatgttttagtttgaatcatcttgttatgcaaaactatgtttgaattttgaaatttgaatttttcaaactgtc

SEQ ID NO: 10105 - DNA, 3585 bp, Zea Mays
cttcccccgagctccgacacagccgtcgccctgagcccgtcatccatgctcccttccatccttctccccaccagcacaaccacaccccctctcccccctcgccgcctccccagaccccgacacgtcctccccggccgcaatgaccgctccccgaccgtggtccccgctagcaaacccaagctcgtcggggagaagagcaaggggggcgcagaggcttgcctacctagctcgtcggggccctatggagatccagcaccaccggggctgggcaactccaaggttgtgaaggtgcagagcgaggaggcgtgggatctgttcaccgatcgagcgagcaatgaaggctgggccaggtatcggcgatgccctcggcgacatcgaaatctactccgcggccaccggcgagcccgtcctgttcagagacctgtgggactaggacgagttgccctttccgttggaatacctctatgctgatcccgatcggaagtttagtaaatggagaagtaatgttggccgatccgcccgtagatcctctctccccattaccgcgatttatttggtacttcgggcaggagggtcctgatcggcgactccggcgtcggcaagtccaacttgctctcacgcttcacgcgcaacgagtttagcctcgagtccaagtccaccatcggcgacgagttcgccacctgctctctccaggtcgacggcaagttcgtcaatgcccagatttgggacaccgccggctaggaacggtacgtttcgtttcagcttgctccagctcgtctcgcctttcatctctctccgccgttgccgcggcagctggcagtagatctgatttgcgtctcggttcggctgctgctagcgtgcgtatcctcattttcaccattaagattgggttctcgctttggatctcgctgccgaattgcgttgcgtgctgctgttgattaccatttgtagggtttggtgcattttcatttcagaatccgatactggaacacgcgaatcagcatgcaggcatccttttgttgacaaactagagttgtaggatgatgatgatgatatgatattcttctattgcacaaacgttttttatactgcccggagcttggttttcgagtacgcagcaggtggcgtggactggagatgacttggtttctttgccttggctcatgccgaacatttagcctaggaggagcagaccggccattttccttttctcttgtttgcatgcagcaagcctggccagttcagttaatttagtcgtcaaaacagtaaaatgcgcacaatgcaaatatggactggagattatctgaaaaaaaatgtgagctctatccaaattatggatttcttcagtttaaattgaccagtggattagaaaaccttttcttcctatcttaattgccaacaatcagttttttttgcagtgtcaaggttcatcttcttaccttgaaaccgaggtacttcattcctactagataattgttgctaaaatagggttacattattaacgtctggctgtttcgtcacgcaactaccaacatatctatatcttctccgtgatctgcacaacaaattagataatttgaatccttcaatcaagccttttcttagtacttctaaagcaaaatatactactactcattgccataagagcacacaagattttcttgacaaaatccagccactattcttagttttaaggaagcatctggatggagcagtttcaatgatcaaagatggtaaccttctattccataatttttgcttcgtgttacttttacaatgtttgaattaataattagtgggctgagtcggtttcttaatggtcggggttgtatgtgctgggagggattacaccccctcctttgtggatcttttcttcttagtgaaatgacacaactttcctgcattgcttgagaaaaacaatgtccgcatttcgtataatccttcattgaatgtccttgctttcgattggtaacatgataagctactactcttcagaattagagagctgtttagatgactggagttcacattcatcttctgctggcaacccaaacataccatatgtggttgtctccaagtcatcaattgtgactgctgtatgcaaagagattcttggctgctacaggaagttacttggcattcctgatctgttgaatcaaccaaacatgtcaattctgaagcaacttttgcagactttacagccaactgaaaattttgatgatgttctttctgagttccaatcatctcttggtccttgcaatgttgattacctatattgtggagaatgtaaaatgttggaggatattatggattcagtgtcctcattttcataccttttgtcttctgatgtgttaattactatacaatcaattgtaaattctgttgttgtgttgttggacaaatccggggaaccaaatgggaaaaatatacacatgggatgctccaaagcaatcatttcctttctgcgaaagcgtcttggatactcagctcataagctgctcagtgctgatttccctagcgaagatgttggaaaaggatggcagagtaaaggtgatcttatacagaagatattgcaaatatacctcaggaatagtgactctacttcagatctacttgctgagataggtcgtgaattgcctaaggtgggtcatctcttcttctcgagtgatgctctcgagttatgcatatgccaccactctgccttaaaaagaacatctggcatcattctgaatccagccgaagagtgagcataaaaggtttagcaattcacaaataatctatgttcaatgggcatgagtgaagaataattagtaagtgcttttcactgctgacttgatagcaaagtagtgtaaaaataatggtaaaagtggttacgccttataaactgggacggagggagtactgttatattagcaagtacaaaagcattccccgctaacattgtttgtgtattagaagtcactaccggaatttggctctttgccgagtgccatattctttgccgagtgttttatttcgggcactcggcaaagagctctttgccgagtgccacgcaaaactaggcaaagacaattttaaaatcacattttaaagtagtaaattaattcaaatgaaaaagttttcaactacaaatttgtataactcattatgatgtacaatttatatattaaacatttcttcatatgacaaaataaaaataaatttgttcataaaatctatatctctctcgtagtttatgaaactacgagagagacgtatagaatttgtgcatattgttagaaccatcatctgagataaacaaattatcaaacaaccaaaataaactttataaatcttgagaagttataaaagtttatagttgacaactttttcatttgaagtcatattgtcaacgaaaactacgtctgaatttaaaaaaaattaaaatttgaattttgaaaacgacttcgaaaggaaaaaccaccaacatgaaagttgtaggtattgaagagttatgaaactttgtagttgacaatgttttagtttgaatcatcttgttatgcaaaactatgtttgaattttgaaatttgaatttttcaaactgtc

SEQ ID NO: 10106 - DNA, 3646 bp, Zea Mays
cgtgaatgtcgccccttcccccgagctccgacacagccgtcgccctgagcccgtcatccatgctcccttccatccttctccccaccagcacaaccacaccccctctcccccctcgccgcctccccagaccccgacacgtcctccccggccgcaatgaccgctccccgaccgtggtccccgctagcaaacccaagctcgtcggggagaagagcaaggggggcgcagaggcttgcctacctagctcgtcggggccctatggagatccagcaccaccggggctgggcaactccaaggttgtgaaggtgcagagcgaggaggcgtgggatctgttcaccgatcgagcgagcaatgaaggctgggccaggtatcggcgatgccctcggcgacatcgaaatctactccgcggccaccggcgagcccgtcctgttcagagacctgtgggactaggacgagggagtgtctgttgttgcgctgctaaggcatttcgagtgcccatgctgttgccctttccgttggaatacctctatgctgatcccgatcggaagtttagtaaatggagaagtaatgttggccgatccgcccgtagatcctctctccccattaccgcgatttatttggtacttcgggcaggagggtcctgatcggcgactccggcgtcggcaagtccaacttgctctcacgcttcacgcgcaacgagtttagcctcgagtccaagtccaccatcggcgacgagttcgccacctgctctctccaggtcgacggcaagttcgtcaatgcccagatttgggacaccgccggctaggaacggtacgtttcgtttcagcttgctccagctcgtctcgcctttcatctctctccgccgttgccgcggcagctggcagtagatctgatttgcgtctcggttcggctgctgctagcgtgcgtatcctcattttcaccattaagattgggttctcgctttggatctcgctgccgaattgcgttgcgtgctgctgttgattaccatttgtagggtttggtgcattttcatttcagaatccgatactggaacacgcgaatcagcatgcaggcatccttttgttgacaaactagagttgtaggatgatgatgatgatatgatattcttctattgcacaaacgttttttatactgcccggagcttggttttcgagtacgcagcaggtggcgtggactggagatgacttggtttctttgccttggctcatgccgaacatttagcctaggaggagcagaccggccattttccttttctcttgtttgcatgcagcaagcctggccagttcagttaatttagtcgtcaaaacagtaaaatgcgcacaatgcaaatatggactggagattatctgaaaaaaaatgtgagctctatccaaattatggatttcttcagtttaaattgaccagtggattagaaaaccttttcttcctatcttaattgccaacaatcagttttttttgcagtgtcaaggttcatcttcttaccttgaaaccgaggtacttcattcctactagataattgttgctaaaatagggttacattattaacgtctggctgtttcgtcacgcaactaccaacatatctatatcttctccgtgatctgcacaacaaattagataatttgaatccttcaatcaagccttttcttagtacttctaaagcaaaatatactactactcattgccataagagcacacaagattttcttgacaaaatccagccactattcttagttttaaggaagcatctggatggagcagtttcaatgatcaaagatggtaaccttctattccataatttttgcttcgtgttacttttacaatgtttgaattaataattagtgggctgagtcggtttcttaatggtcggggttgtatgtgctgggagggattacaccccctcctttgtggatcttttcttcttagtgaaatgacacaactttcctgcattgcttgagaaaaacaatgtccgcatttcgtataatccttcattgaatgtccttgctttcgattggtaacatgataagctactactcttcagaattagagagctgtttagatgactggagttcacattcatcttctgctggcaacccaaacataccatatgtggttgtctccaagtcatcaattgtgactgctgtatgcaaagagattcttggctgctacaggaagttacttggcattcctgatctgttgaatcaaccaaacatgtcaattctgaagcaacttttgcagactttacagccaactgaaaattttgatgatgttctttctgagttccaatcatctcttggtccttgcaatgttgattacctatattgtggagaatgtaaaatgttggaggatattatggattcagtgtcctcattttcataccttttgtcttctgatgtgttaattactatacaatcaattgtaaattctgttgttgtgttgttggacaaatccggggaaccaaatgggaaaaatatacacatgggatgctccaaagcaatcatttcctttctgcgaaagcgtcttggatactcagctcataagctgctcagtgctgatttccctagcgaagatgttggaaaaggatggcagagtaaaggtgatcttatacagaagatattgcaaatatacctcaggaatagtgactctacttcagatctacttgctgagataggtcgtgaattgcctaaggtgggtcatctcttcttctcgagtgatgctctcgagttatgcatatgccaccactctgccttaaaaagaacatctggcatcattctgaatccagccgaagagtgagcataaaaggtttagcaattcacaaataatctatgttcaatgggcatgagtgaagaataattagtaagtgcttttcactgctgacttgatagcaaagtagtgtaaaaataatggtaaaagtggttacgccttataaactgggacggagggagtactgttatattagcaagtacaaaagcattccccgctaacattgtttgtgtattagaagtcactaccggaatttggctctttgccgagtgccatattctttgccgagtgttttatttcgggcactcggcaaagagctctttgccgagtgccacgcaaaactaggcaaagacaattttaaaatcacattttaaagtagtaaattaattcaaatgaaaaagttttcaactacaaatttgtataactcattatgatgtacaatttatatattaaacatttcttcatatgacaaaataaaaataaatttgttcataaaatctatatctctctcgtagtttatgaaactacgagagagacgtatagaatttgtgcatattgttagaaccatcatctgagataaacaaattatcaaacaaccaaaataaactttataaatcttgagaagttataaaagtttatagttgacaactttttcatttgaagtcatattgtcaacgaaaactacgtctgaatttaaaaaaaattaaaatttgaattttgaaaacgacttcgaaaggaaaaaccaccaacatgaaagttgtaggtattgaagagttatgaaactttgtagttgacaatgttttagtttgaatcatcttgttatgcaaaactatgtttgaattttgaaatttgaatttttcaaactgtc

SEQ ID NO: 10107 - DNA, 659 bp, Zea Mays
aaaatacaccaatatgtacaacatcaaattttgtgtcgttaagagggctgtttggttcccagccattggctctgttttggactgcataatcccaccgtgttccgtgttatgcagtagccaagctgcggtggctgagcgattgaatgaagctgttatgcattttggagagagcatcaaggaaatcatcaatgaggagtttggtgatggaatcatgtcagccatagacttctattgttcagttgacaaggttgaaggggccgacggaaaagatcgtgtggtggtcacatttgatgggaagtatctaccttacactgaacagaaatctgaacatatgatgtctaggccaacccgcaagacatcttgatgtggctggtgaggaggagaaacatgatcgtagtggttggtatcgggctcagcaaggatcgagcatgccattttctttgtgtagtccaaatcatcaacacaataaacagacctatattgatgataactgtcaaaaggaacattaaagtcaatgttctacctggcatgattgctggactgtattggatgatgctgagataaaaagagagaaaaagtgaaacaaactggattcaaattcatttttttctctatatcgtgtacattcccggaccctgagagctgatttggtgacccgg

SEQ ID NO: 10108 - DNA, 2024 bp, Zea Mays
cgcaatccctctccacctctcctcccaccgcagcagcaggcaagcgcgaggcggaggcggagagatggagtcggaccagggcaagctcttcatcggcggcatctcctgggaaacaacggaggagaagctgagcgagcacttctccgcctacggagaggttacgcaggccgccgtcatgcgcgacaagacgacgggccgcccccgaggcttcgggtttgtcgtcttcgccgaccccgccgtcgtcgaccgagcgctgcaggacccccacaccctcgacggccgcacggtcgatgtgaagcgggcactctcgcgggaggagcagcaggcctccaaggccgcaaaccctagcggtgggaggaacactggcggaggaaatggcggcggcgatgcaaatggtgctcggacgaagaaaatattcgtgggcgggctgccctctactctgactgaggatgggtttcggcagtatttccagaccttcggcatcgtcactgatgttgttgtcatgtatgaccagaacacgcagcgcccccgtggcttcggattcatcacctttgactcggaggacgcggttgaccacgtgctgcagaagaccttccatgatcttggtgggaagctggttgaggtgaagcgtgcattgccccgtgaggcgaaccctggtggctctggtagtgggcgttctggggtgagtgggggttaccagagcaacaatggccataacaccagctctggtagctatgatggtagaagtgatggtggcaggtacgggcaggcacagcagggtagtggtgtctatcctggctatggtgctggggcagctggatatggatatggtgctaaccctgcaattggatatggaaattatggggctggaggatatggaggtgctcctgctgcttatggtggacattatggaaacccaggtgcagctggttctggttaccaaggtggacccccaggctcaaatagaggaccttggggcagtcaagctccatctgcatatggaactggagggtatggtggcagtgctggctatagtgcttggaacaactcttctggtggtggcaatgctcccactagtcaagcccctggcggacctgcgggctatggaagccagggttttgggtatggtggatatggaggtgatccatcgtatggtagtcatgggggatatggagcttatggagcgcgaagtgatggtgctggcaatcctgctactggtggagcatctggatatggtgcagggtatggaagtgggggtgccaactctggctattcaagtgcttggagtgatccttcacaaggtggtggatttggtggttcagtcaatggaggttctgaagggcaatcaaactatggcactggctatggcagtgtgcagcccagggttgctcagtaaagaaggcattttgagtgtctgaaatgaaccagcacatctgggcagtctatgttgaatgggatgacattccttttcagagatgatacccaagcaaggttatgaaatcaggcatctgaaaaaaaatgtggcagtgattttacatgacgagctggtaaaaagttgcaatattggggtgcagacagaatgcaagataccagcttgagcgtttcattgtctgaagggtcttgtgctgtgctacaagatagtgtggcctctggcgttggaagcgaaggggaccggggcatcttgtggctgggctttaatcgagatggacggcaagcatctaactttggctccagttctgcagtatttctagtctgctaatagaatgtgggttgtgtcccttctctagtatcttgtttccagtaaagcatcaagcaatccgaaatccatggcctgcaaatgacgaaacacatgtaatagctcaaaaggagagatttgatatattactttgttctatataggcaagagaagctaatacctctgaagaagacatgaaccgatccctctgtccacttttgcaccatgtcaagtggttgaattttggataaaaaaagtcttccgtttggattcctagactatactcttg

SEQ ID NO: 10109 - DNA, 2719 bp, Zea Mays
aaatatcccacccaaacaactccaccctaccgcaccccaaattcgcaatccctctccacctctcctcccaccgcagcagcaggcaagcgcgaggcggaggcggagagatggagtcggaccagggcaagctcttcatcggcggcatctcctgggaaacaacggaggagaagctgagcgagcacttctccgcctacggagaggttacgcaggccgccgtcatgcgcgacaagacgacgggccgcccccgaggcttcgggtttgtcgtcttcgccgaccccgccgtcgtcgaccgagcgctgcaggacccccacaccctcgacggccgcacggtcgatgtgaagcgggcactctcgcgggaggagcagcaggcctccaaggccgcaaaccctagcggtgggaggaacactggcggaggaaatggcggcggcgatgcaaatggtgctcggacgaagaaaatattcgtgggcgggctgccctctactctgactgaggatgggtttcggcagtatttccagaccttcggcatcgtcactgatgttgttgtcatgtatgaccagaacacgcagcgcccccgtggcttcggattcatcacctttgactcggaggacgcggttgaccacgtgctgcagaagaccttccatgatcttggtgggaagctggttgaggtgaagcgtgcattgccccgtgaggcgaaccctggtggctctggtagtgggcgttctggggtgagtgggggttaccagagcaacaatggccataacaccagctctggtagctatgatggtagaagtgatggtggcaggtacgggcaggcacagcagggtagtggtgtctatcctggctatggtgctggggcagctggatatggatatggtgctaaccctgcaattggatatggaaattatggggctggaggatatggaggtgctcctgctgcttatggtggacattatggaaacccaggtgcagctggttctggttaccaaggtggacccccaggctcaaatagaggaccttggggcagtcaagctccatctgcatatggaactggagggtatggtggcagtgctggctatagtgcttggaacaactcttctggtggtggcaatgctcccactagtcaagcccctggcggacctgcgggctatggaagccagggttttgggtatggtggatatggaggtgatccatcgtatggtagtcatgggggatatggagcttatggagcgcgaagtgatggtgctggcaatcctgctactggtggagcatctggatatggtgcagggtatggaagtgggggtgccaactctggctattcaagtgcttggagtgatccttcacaaggtggtggatttggtggttcagtcaatggaggttctgaagggcaatcaaactatggcactggctatggcagtgtgcagcccagggttgctcagtaaagaaggcattttgagtgtctgaaatgaaccagcacatctgggcagtctatgtattgatttgtcattccagttctgatttgttctcagcattctgaagattgcccatttgctggttaaatcagtatttctccgggttggaatgcttgatcctttagtggcttactactagaacttgtagtcaataagtagctataatgtggagtagcagtatcttgcagaatgcttttattaatttctacatttagctttatctatctgtgtgctttgccatgagtggagtttcaggttccttcatctctagttataagctagagtagcttgactgcttatggacaaaattatctagttgtacctctattctacagatcatacattcgtgtttgatggtagtatttatgctggatattgtacctctattctggaatgttctatatttggtggttgtattgacatatggtattatcaacattcatggtttgaaacagatgcaacccctgaaatatgcagtcatagttggcttgatgctgtagctgcttctaacattatgttcaaactgtagtgcaagtgtttatatagctggaatgctacatccttcaagtatgtcatcaagctatgaattccatccatttggccctagaatttgatattttccaagcagcagtaagcttattagcagcaagattgtagcactaagtttctgaggttgaatgggatgacattccttttcagagatgatacccaagcaaggttatgaaatcaggcatctgaaaaaaaatgtggcagtgattttacatgacgagctggtaaaaagttgcaatattggggtgcagacagaatgcaagataccagcttgagcgtttcattgtctgaagggtcttgtgctgtgctacaagatagtgtggcctctggcgttggaagcgaaggggaccggggcatcttgtggctgggctttaatcgagatggacggcaagcatctaactttggctccagttctgcagtatttctagtctgctaatagaatgtgggttgtgtcccttctctagtatcttgtttccagtaaagcatcaagcaatccgaaatccatggcctgcaaatgacgaaacacatgtaatagctcaaaaggagagatttgatatattactttgttctatataggcaagagaagctaatacctctgaagaagacatgaaccgatccctctgtccacttttgcaccatgtcaagtggttgaattttggataaaaaaagtcttccgtttggattcctagactatactcttg

SEQ ID NO: 10110 - DNA, 2106 bp, Zea Mays
caaaaatatcccacccaaacaactccaccctaccgcaccccaaattcgcaatccctctccacctctcctcccaccgcagcagcaggcaagcgcgaggcggaggcggagagatggagtcggaccagggcaagctcttcatcggcggcatctcctgggaaacaacggaggagaagctgagcgagcacttctccgcctacggagaggttacgcaggccgccgtcatgcgcgacaagacgacgggccgcccccgaggcttcgggtttgtcgtcttcgccgaccccgccgtcgtcgaccgagcgctgcaggacccccacaccctcgacggccgcacggtcgatgtgaagcgggcactctcgcgggaggagcagcaggcctccaaggccgcaaaccctagcggtgggaggaacactggcggaggaaatggcggcggcgatgcaaatggtgctcggacgaagaaaatattcgtgggcgggctgccctctactctgactgaggatgggtttcggcagtatttccagaccttcggcatcgtcactgatgttgttgtcatgtatgaccagaacacgcagcgcccccgtggcttcggattcatcacctttgactcggaggacgcggttgaccacgtgctgcagaagaccttccatgatcttggtgggaagctggttgaggtgaagcgtgcattgccccgtgaggcgaaccctggtggctctggtagtgggcgttctggggtgagtgggggttaccagagcaacaatggccataacaccagctctggtagctatgatggtagaagtgatggtggcaggtacgggcaggcacagcagggtagtggtgtctatcctggctatggtgctggggcagctggatatggatatggtgctaaccctgcaattggatatggaaattatggggctggaggatatggaggtgctcctgctgcttatggtggacattatggaaacccaggtgcagctggttctggttaccaaggtggacccccaggctcaaatagaggaccttggggcagtcaagctccatctgcatatggaactggagggtatggtggcagtgctggctatagtgcttggaacaactcttctggtggtggcaatgctcccactagtcaagcccctggcggacctgcgggctatggaagccagggttttgggtatggtggatatggaggtgatccatcgtatggtagtcatgggggatatggagcttatggagcgcgaagtgatggtgctggcaatcctgctactggtggagcatctggatatggtgcagggtatggaagtgggggtgccaactctggctattcaagtgcttggagtgatccttcacaaggtggtggatttggtggttcagtcaatggaggttctgaagggcaatcaaactatggcactggctatggcagtgtgcagcccagggttgctcagtaaagaaggcattttgagtgtctgaaatgaaccagcacatctgggcagtctatgtattgatttgtcattccagttctgatttgttctcagcattctgaagattgcccatttgctggttaaatcagtatttctccgggttgaatgggatgacattccttttcagagatgatacccaagcaaggttatgaaatcaggcatctgaaaaaaaatgtggcagtgattttacatgacgagctggtaaaaagttgcaatattggggtgcagacagaatgcaagataccagcttgagcgtttcattgtctgaagggtcttgtgctgtgctacaagatagtgggctttaatcgagatggacggcaagcatctaactttggctccagttctgcagtatttctagtctgctaatagaatgtgggttgtgtcccttctctagtatcttgtttccagtaaagcatcaagcaatccgaaatccatggcctgcaaatgacgaaacacatgtaatagctcaaaaggagagatttgatatattactttgttctatataggcaagagaagctaatacctctgaagaagacatgaaccgatccctctgtccacttttgcaccatgtcaagtggttgaattttggataaaaaaagtcttccgtttggattcctagactatactcttg

SEQ ID NO: 10111 - DNA, 2654 bp, Zea Mays
caaaaatatcccacccaaacaactccaccctaccgcaccccaaattcgcaatccctctccacctctcctcccaccgcagcagcaggcaagcgcgaggcggaggcggagagatggagtcggaccagggcaagctcttcatcggcggcatctcctgggaaacaacggaggagaagctgagcgagcacttctccgcctacggagaggttacgcaggccgccgtcatgcgcgacaagacgacgggccgcccccgaggcttcgggtttgtcgtcttcgccgaccccgccgtcgtcgaccgagcgctgcaggacccccacaccctcgacggccgcacggtcgatgtgaagcgggcactctcgcgggaggagcagcaggcctccaaggccgcaaaccctagcggtgggaggaacactggcggaggaaatggcggcggcgatgcaaatggtgctcggacgaagaaaatattcgtgggcgggctgccctctactctgactgaggatgggtttcggcagtatttccagaccttcggcatcgtcactgatgttgttgtcatgtatgaccagaacacgcagcgcccccgtggcttcggattcatcacctttgactcggaggacgcggttgaccacgtgctgcagaagaccttccatgatcttggtgggaagctggttgaggtgaagcgtgcattgccccgtgaggcgaaccctggtggctctggtagtgggcgttctggggtgagtgggggttaccagagcaacaatggccataacaccagctctggtagctatgatggtagaagtgatggtggcaggtacgggcaggcacagcagggtagtggtgtctatcctggctatggtgctggggcagctggatatggatatggtgctaaccctgcaattggatatggaaattatggggctggaggatatggaggtgctcctgctgcttatggtggacattatggaaacccaggtgcagctggttctggttaccaaggtggacccccaggctcaaatagaggaccttggggcagtcaagctccatctgcatatggaactggagggtatggtggcagtgctggctatagtgcttggaacaactcttctggtggtggcaatgctcccactagtcaagcccctggcggacctgcgggctatggaagccagggttttgggtatggtggatatggaggtgatccatcgtatggtagtcatgggggatatggagcttatggagcgcgaagtgatggtgctggcaatcctgctactggtggagcatctggatatggtgcagggtatggaagtgggggtgccaactctggctattcaagtgcttggagtgatccttcacaaggtggtggatttggtggttcagtcaatggaggttctgaagggcaatcaaactatggcactggctatggcagtgtgcagcccagggttgctcagtaaagaaggcattttgagtgtctgaaatgaaccagcacatctgggcagtctatgtattgatttgtcattccagttctgatttgttctcagcattctgaagattgcccatttgctggttaaatcagtatttctccgggttgaatgggatgacattccttttcagagatgatacccaagcaaggttatgaaatcaggcatctgaaaaaaaatgtggcagtgattttacatgacgagctggtaaaaagttgcaatattggggtgcagacagaatgcaagataccagcttgagcgtttcattgtctgaagggtcttgtgctgtgctacaagatagtggtgcgagcttactctcccttcccaaagagcatgttttaatggcaaaactcttgtcaacagacgaagtgcaacatgctgactcgagcagtcgagctgctgtagctgggtcttgggaagggtctcggctgtgtgtctgcatactgatgatcggtgatgcttacgatataggaatgccccaatgtataggtgaacttttagtgctatagaggcttccttttgttgtcatgatgtctatgctctttaagtagctgcataacaccatgtatactcagtatagttctacacctgggtatggaagccattcgtgtttttgtttagtatgaatgccatgtaattgtacattaggttgacaattcagttgttgctaaatcacgctccactagtgaattgtgtaaatggaaagaaatgaaatgcatatatataaaactctgatcctttactgctctgatttgacactgatgggttatttgacttgttccttattactctctccggctccagtggcctctggcgttggaagcgaaggggaccggggcatcttgtggctgggctttaatcgagatggacggcaagcatctaactttggctccagttctgcagtatttctagtctgctaatagaatgtgggttgtgtcccttctctagtatcttgtttccagtaaagcatcaagcaatccgaaatccatggcctgcaaatgacgaaacacatgtaatagctcaaaaggagagatttgatatattactttgttctatataggcaagagaagctaatacctctgaagaagacatgaaccgatccctctgtccacttttgcaccatgtcaagtggttgaattttggataaaaaaagtcttccgtttggattcctagactatactcttg

SEQ ID NO: 10112 - DNA, 2187 bp, Zea Mays
tttaaaaaataccgatgcgcaccacgcgccggaacaaaaatatcccacccaaacaactccaccctaccgcaccccaaattcgcaatccctctccacctctcctcccaccgcagcagcaggcaagcgcgaggcggaggcggagagatggagtcggaccagggcaagctcttcatcggcggcatctcctgggaaacaacggaggagaagctgagcgagcacttctccgcctacggagaggttacgcaggccgccgtcatgcgcgacaagacgacgggccgcccccgaggcttcgggtttgtcgtcttcgccgaccccgccgtcgtcgaccgagcgctgcaggacccccacaccctcgacggccgcacggtcgatgtgaagcgggcactctcgcgggaggagcagcaggcctccaaggccgcaaaccctagcggtgggaggaacactggcggaggaaatggcggcggcgatgcaaatggtgctcggacgaagaaaatattcgtgggcgggctgccctctactctgactgaggatgggtttcggcagtatttccagaccttcggcatcgtcactgatgttgttgtcatgtatgaccagaacacgcagcgcccccgtggcttcggattcatcacctttgactcggaggacgcggttgaccacgtgctgcagaagaccttccatgatcttggtgggaagctggttgaggtgaagcgtgcattgccccgtgaggcgaaccctggtggctctggtagtgggcgttctggggtgagtgggggttaccagagcaacaatggccataacaccagctctggtagctatgatggtagaagtgatggtggcaggtacgggcaggcacagcagggtagtggtgtctatcctggctatggtgctggggcagctggatatggatatggtgctaaccctgcaattggatatggaaattatggggctggaggatatggaggtgctcctgctgcttatggtggacattatggaaacccaggtgcagctggttctggttaccaaggtggacccccaggctcaaatagaggaccttggggcagtcaagctccatctgcatatggaactggagggtatggtggcagtgctggctatagtgcttggaacaactcttctggtggtggcaatgctcccactagtcaagcccctggcggacctgcgggctatggaagccagggttttgggtatggtggatatggaggtgatccatcgtatggtagtcatgggggatatggagcttatggagcgcgaagtgatggtgctggcaatcctgctactggtggagcatctggatatggtgcagggtatggaagtgggggtgccaactctggctattcaagtgcttggagtgatccttcacaaggtggtggatttggtggttcagtcaatggaggttctgaagggcaatcaaactatggcactggctatggcagtgtgcagcccagggttgctcagtaaagaaggcattttgagtgtctgaaatgaaccagcacatctgggcagtctatgtattgatttgtcattccagttctgatttgttctcagcattctgaagattgcccatttgctggttaaatcagtatttctccgggttgaatgggatgacattccttttcagagatgatacccaagcaaggttatgaaatcaggcatctgaaaaaaaatgtggcagtgattttacatgacgagctggtaaaaagttgcaatattggggtgcagacagaatgcaagataccagcttgagcgtttcattgtctgaagggtcttgtgctgtgctacaagatagtgtggcctctggcgttggaagcgaaggggaccggggcatcttgtggctgggctttaatcgagatggacggcaagcatctaactttggctccagttctgcagtatttctagtctgctaatagaatgtgggttgtgtcccttctctagtatcttgtttccagtaaagcatcaagcaatccgaaatccatggcctgcaaatgacgaaacacatgtaatagctcaaaaggagagatttgatatattactttgttctatataggcaagagaagctaatacctctgaagaagacatgaaccgatccctctgtccacttttgcaccatgtcaagtggttgaattttggataaaaaaagtcttccgtttggattcctagactatactcttg

SEQ ID NO: 10113 - DNA, 3200 bp, Zea Mays
aacaactccaccctaccgcaccccaaattcgcaatccctctccacctctcctcccaccgcagcagcaggcaagcgcgaggcggaggcggagagatggagtcggaccagggcaagctcttcatcggcggcatctcctgggaaacaacggaggagaagctgagcgagcacttctccgcctacggagaggttacgcaggccgccgtcatgcgcgacaagacgacgggccgcccccgaggcttcgggtttgtcgtcttcgccgaccccgccgtcgtcgaccgagcgctgcaggacccccacaccctcgacggccgcacggtcgatgtgaagcgggcactctcgcgggaggagcagcaggcctccaaggccgcaaaccctagcggtgggaggaacactggcggaggaaatggcggcggcgatgcaaatggtgctcggacgaagaaaatattcgtgggcgggctgccctctactctgactgaggatgggtttcggcagtatttccagaccttcggcatcgtcactgatgttgttgtcatgtatgaccagaacacgcagcgcccccgtggcttcggattcatcacctttgactcggaggacgcggttgaccacgtgctgcagaagaccttccatgatcttggtgggaagctggttgaggtgaagcgtgcattgccccgtgaggcgaaccctggtggctctggtagtgggcgttctggggtgagtgggggttaccagagcaacaatggccataacaccagctctggtagctatgatggtagaagtgatggtggcaggtacgggcaggcacagcagggtagtggtgtctatcctggctatggtgctggggcagctggatatggatatggtgctaaccctgcaattggatatggaaattatggggctggaggatatggaggtgctcctgctgcttatggtggacattatggaaacccaggtgcagctggttctggttaccaaggtggacccccaggctcaaatagaggaccttggggcagtcaagctccatctgcatatggaactggagggtatggtggcagtgctggctatagtgcttggaacaactcttctggtggtggcaatgctcccactagtcaagcccctggcggacctgcgggctatggaagccagggttttgggtatggtggatatggaggtgatccatcgtatggtagtcatgggggatatggagcttatggagcgcgaagtgatggtgctggcaatcctgctactggtggagcatctggatatggtgcagggtatggaagtgggggtgccaactctggctattcaagtgcttggagtgatccttcacaaggtggtggatttggtggttcagtcaatggaggttctgaagggcaatcaaactatggcactggctatggcagtgtgcagcccagggttgctcagtaaagaaggcattttgagtgtctgaaatgaaccagcacatctgggcagtctatgtattgatttgtcattccagttctgatttgttctcagcattctgaagattgcccatttgctggttaaatcagtatttctccggtgcaagtgtttatatagctggaatgctacatccttcaagtatgtcatcaagctatgaattccatccatttggccctagaatttgatattttccaagcagcagtaagcttattagcagcaagattgtagcactaagtttctgaggtagtatagataactgggttatctgtgaagctaattgaatgtttaggggtagaattgtattgtagaacagtcaaggctcggcaagtaaagtaattgtccttcctcctacctttcctttatgtacaggttgaatgggatgacattccttttcagagatgatacccaagcaaggttatgaaatcaggcatctgaaaaaaaatgtggcagtgattttacatgacgagctggtaaaaagttgcaatattggggtgcagacagaatgcaagataccagcttgagcgtttcattgtctgaagggtcttgtgctgtgctacaagatagtgtggcctctggcgttggaagcgaaggggaccggggcatcttgtggctggtgtgtatcatcttcctaccatcctaggacatctaattagtttgattagtttcttccccgttctagtggactcggttgctgcttttggctttcaccgaatcctctccaaaggtggcgctggtgctactgttccttatggtgatgattttacttctgaccatgattgttacagcggtaaggcggtcttaggatcttttaacctttaagcatggagacgactttatatacatgtaagtaaggtgaataataacaaaaaaaaaatgcatagctaagtagatagaccatatatatatcatagaacatacaagccttaatgaatagcataatttataaaatagtataattgatagttcataaaactaacaaacagtagttcataaaactaacaagtccaaaatatatagttcataattttgtaaactaacaagtccataaaagaacacaaggcaacattaaatttagattctcaacacttagggcctgtttggtttgtggctaaatgtgtcatactttgtctaatgttagttgttcgaattgaataactaatcttaggcagaaaagttaggcaaaatgtggtaactgaggtagtgaaccaaacatgtctttagatagatctgggccgcctctcttggacagctgcccctctagggctgctgccagcctaccacccatgtgccgcgtcgccgcaacaaagtgcacatatcttctccctcctcttttatgcatccatgacagggacctcacgcgctcgtgtcaaagaggaggccatggccttccgcaagaagatggcatgcttgttacggctcaaggtgcagacaaggaggctgtcaacgcacacactcgcgcccaagtaggatggcaacgcgcaatcccccgtcggggaatacctccccgtccccgcgacgattttttttccgtagggattcccacgaatacttgtggggaacatttcttctctatccctgtttttcgcgggataaatctccaaaagtgatccctatctctgtttaaattataattaaaatatgcgttatttattattaatattaaacattatcacttatacacattatcagatgtaagaaatcattatgcacacatcaaaataaatatatttgtacaattagtg

SEQ ID NO: 10114 - DNA, 3910 bp, Zea Mays
aaatatcccacccaaacaactccaccctaccgcaccccaaattcgcaatccctctccacctctcctcccaccgcagcagcaggcaagcgcgaggcggaggcggagagatggagtcggaccagggcaagctcttcatcggcggcatctcctgggaaacaacggaggagaagctgagcgagcacttctccgcctacggagaggttacgcaggccgccgtcatgcgcgacaagacgacgggccgcccccgaggcttcgggtttgtcgtcttcgccgaccccgccgtcgtcgaccgagcgctgcaggacccccacaccctcgacggccgcacggtcgatgtgaagcgggcactctcgcgggaggagcagcaggcctccaaggccgcaaaccctagcggtgggaggaacactggcggaggaaatggcggcggcgatgcaaatggtgctcggacgaagaaaatattcgtgggcgggctgccctctactctgactgaggatgggtttcggcagtatttccagaccttcggcatcgtcactgatgttgttgtcatgtatgaccagaacacgcagcgcccccgtggcttcggattcatcacctttgactcggaggacgcggttgaccacgtgctgcagaagaccttccatgatcttggtgggaagctggttgaggtgaagcgtgcattgccccgtgaggcgaaccctggtggctctggtagtgggcgttctggggtgagtgggggttaccagagcaacaatggccataacaccagctctggtagctatgatggtagaagtgatggtggcaggtacgggcaggcacagcagggtagtggtgtctatcctggctatggtgctggggcagctggatatggatatggtgctaaccctgcaattggatatggaaattatggggctggaggatatggaggtgctcctgctgcttatggtggacattatggaaacccaggtgcagctggttctggttaccaaggtggacccccaggctcaaatagaggaccttggggcagtcaagctccatctgcatatggaactggagggtatggtggcagtgctggctatagtgcttggaacaactcttctggtggtggcaatgctcccactagtcaagcccctggcggacctgcgggctatggaagccagggttttgggtatggtggatatggaggtgatccatcgtatggtagtcatgggggatatggagcttatggagcgcgaagtgatggtgctggcaatcctgctactggtggagcatctggatatggtgcagggtatggaagtgggggtgccaactctggctattcaagtgcttggagtgatccttcacaaggtggtggatttggtggttcagtcaatggaggttctgaagggcaatcaaactatggcactggctatggcagtgtgcagcccagggttgctcagtaaagaaggcattttgagtgtctgaaatgaaccagcacatctgggcagtctatgtattgatttgtcattccagttctgatttgttctcagcattctgaagattgcccatttgctggttaaatcagtatttctccgggttggaatgcttgatcctttagtggcttactactagaacttgtagtcaataagtagctataatgtggagtagcagtatcttgcagaatgcttttattaatttctacatttagctttatctatctgtgtgctttgccatgagtggagtttcaggttccttcatctctagttataagctagagtagcttgactgcttatggacaaaattatctagttgtacctctattctacagatcatacattcgtgtttgatggtagtatttatgctggatattgtacctctattctggaatgttctatatttggtggttgtattgacatatggtattatcaacattcatggtttgaaacagatgcaacccctgaaatatgcagtcatagttggcttgatgctgtagctgcttctaacattatgttcaaactgtagtgcaagtgtttatatagctggaatgctacatccttcaagttgaatgggatgacattccttttcagagatgatacccaagcaaggttatgaaatcaggcatctgaaaaaaaatgtggcagtgattttacatgacgagctggtaaaaagttgcaatattggggtgcagacagaatgcaagataccagcttgagcgtttcattgtctgaagggtcttgtgctgtgctacaagatagtggtgcgagcttactctcccttcccaaagagcatgttttaatggcaaaactcttgtcaacagacgaagtgcaacatgctgactcgagcagtcgagctgctgtagctgggtcttgggaagggtctcggctgtgtgtctgcatactgatgatcggtgatgcttacgatataggaatgccccaatgtataggtgaacttttagtgctatagaggcttccttttgttgtcatgatgtctatgctctttaagtagctgcataacaccatgtatactcagtatagttctacacctgggtatggaagccattcgtgtttttgtttagtatgaatgccatgtaattgtacattaggttgacaattcagttgttgctaaatcacgctccactagtgaattgtgtaaatggaaagaaatgaaatgcatatatataaaactctgatcctttactgctctgatttgacactgatgggttatttgacttgttccttattactctctccggctccagtggcctctggcgttggaagcgaaggggaccggggcatcttgtggctggtgtgtatcatcttcctaccatcctaggacatctaattagtttgattagtttcttccccgttctagtggactcggttgctgcttttggctttcaccgaatcctctccaaaggtggcgctggtgctactgttccttatggtgatgattttacttctgaccatgattgttacagcggtaaggcggtcttaggatcttttaacctttaagcatggagacgactttatatacatgtaagtaaggtgaataataacaaaaaaaaaatgcatagctaagtagatagaccatatatatatcatagaacatacaagccttaatgaatagcataatttataaaatagtataattgatagttcataaaactaacaaacagtagttcataaaactaacaagtccaaaatatatagttcataattttgtaaactaacaagtccataaaagaacacaaggcaacattaaatttagattctcaacacttagggcctgtttggtttgtggctaaatgtgtcatactttgtctaatgttagttgttcgaattgaataactaatcttaggcagaaaagttaggcaaaatgtggtaactgaggtagtgaaccaaacatgtctttagatagatctgggccgcctctcttggacagctgcccctctagggctgctgccagcctaccacccatgtgccgcgtcgccgcaacaaagtgcacatatcttctccctcctcttttatgcatccatgacagggacctcacgcgctcgtgtcaaagaggaggccatggccttccgcaagaagatggcatgcttgttacggctcaaggtgcagacaaggaggctgtcaacgcacacactcgcgcccaagtaggatggcaacgcgcaatcccccgtcggggaatacctccccgtccccgcgacgattttttttccgtagggattcccacgaatacttgtggggaacatttcttctctatccctgtttttcgcgggataaatctccaaaagtgatccctatctctgtttaaattataattaaaatatgcgttatttattattaatattaaacattatcacttatacacattatcagatgtaagaaatcattatgcacacatcaaaataaatatatttgtacaattagtg

SEQ ID NO: 10115 - DNA, 3913 bp, Zea Mays
aaatatcccacccaaacaactccaccctaccgcaccccaaattcgcaatccctctccacctctcctcccaccgcagcagcaggcaagcgcgaggcggaggcggagagatggagtcggaccagggcaagctcttcatcggcggcatctcctgggaaacaacggaggagaagctgagcgagcacttctccgcctacggagaggttacgcaggccgccgtcatgcgcgacaagacgacgggccgcccccgaggcttcgggtttgtcgtcttcgccgaccccgccgtcgtcgaccgagcgctgcaggacccccacaccctcgacggccgcacggtcgatgtgaagcgggcactctcgcgggaggagcagcaggcctccaaggccgcaaaccctagcggtgggaggaacactggcggaggaaatggcggcggcgatgcaaatggtgctcggacgaagaaaatattcgtgggcgggctgccctctactctgactgaggatgggtttcggcagtatttccagaccttcggcatcgtcactgatgttgttgtcatgtatgaccagaacacgcagcgcccccgtggcttcggattcatcacctttgactcggaggacgcggttgaccacgtgctgcagaagaccttccatgatcttggtgggaagctggttgaggtgaagcgtgcattgccccgtgaggcgaaccctggtggctctggtagtgggcgttctggggtgagtgggggttaccagagcaacaatggccataacaccagctctggtagctatgatggtagaagtgatggtggcaggtacgggcaggcacagcagggtagtggtgtctatcctggctatggtgctggggcagctggatatggatatggtgctaaccctgcaattggatatggaaattatggggctggaggatatggaggtgctcctgctgcttatggtggacattatggaaacccaggtgcagctggttctggttaccaaggtggacccccaggctcaaatagaggaccttggggcagtcaagctccatctgcatatggaactggagggtatggtggcagtgctggctatagtgcttggaacaactcttctggtggtggcaatgctcccactagtcaagcccctggcggacctgcgggctatggaagccagggttttgggtatggtggatatggaggtgatccatcgtatggtagtcatgggggatatggagcttatggagcgcgaagtgatggtgctggcaatcctgctactggtggagcatctggatatggtgcagggtatggaagtgggggtgccaactctggctattcaagtgcttggagtgatccttcacaaggtggtggatttggtggttcagtcaatggaggttctgaagggcaatcaaactatggcactggctatggcagtgtgcagcccagggttgctcagtaaagaaggcattttgagtgtctgaaatgaaccagcacatctgggcagtctatgtattgatttgtcattccagttctgatttgttctcagcattctgaagattgcccatttgctggttaaatcagtatttctccgggttggaatgcttgatcctttagtggcttactactagaacttgtagtcaataagtagctataatgtggagtagcagtatcttgcagaatgcttttattaatttctacatttagctttatctatctgtgtgctttgccatgagtggagtttcaggttccttcatctctagttataagctagagtagcttgactgcttatggacaaaattatctagttgtacctctattctacagatcatacattcgtgtttgatggtagtatttatgctggatattgtacctctattctggaatgttctatatttggtggttgtattgacatatggtattatcaacattcatggtttgaaacagatgcaacccctgaaatatgcagtcatagttggcttgatgctgtagctgcttctaacattatgttcaaactgtagtgcaagtgtttatatagctggaatgctacatccttcaagtatgtcatcaagctatgaattccatccatttggccctagaatttgatattttccaagcagcagttgaatgggatgacattccttttcagagatgatacccaagcaaggttatgaaatcaggcatctgaaaaaaaatgtggcagtgattttacatgacgagctggtaaaaagttgcaatattggggtgcagacagaatgcaagataccagcttgagcgtttcattgtctgaagggtcttgtgctgtgctacaagatagtgacgaagtgcaacatgctgactcgagcagtcgagctgctgtagctgggtcttgggaagggtctcggctgtgtgtctgcatactgatgatcggtgatgcttacgatataggaatgccccaatgtataggtgaacttttagtgctatagaggcttccttttgttgtcatgatgtctatgctctttaagtagctgcataacaccatgtatactcagtatagttctacacctgggtatggaagccattcgtgtttttgtttagtatgaatgccatgtaattgtacattaggttgacaattcagttgttgctaaatcacgctccactagtgaattgtgtaaatggaaagaaatgaaatgcatatatataaaactctgatcctttactgctctgatttgacactgatgggttatttgacttgttccttattactctctccggctccagtggcctctggcgttggaagcgaaggggaccggggcatcttgtggctggtgtgtatcatcttcctaccatcctaggacatctaattagtttgattagtttcttccccgttctagtggactcggttgctgcttttggctttcaccgaatcctctccaaaggtggcgctggtgctactgttccttatggtgatgattttacttctgaccatgattgttacagcggtaaggcggtcttaggatcttttaacctttaagcatggagacgactttatatacatgtaagtaaggtgaataataacaaaaaaaaaatgcatagctaagtagatagaccatatatatatcatagaacatacaagccttaatgaatagcataatttataaaatagtataattgatagttcataaaactaacaaacagtagttcataaaactaacaagtccaaaatatatagttcataattttgtaaactaacaagtccataaaagaacacaaggcaacattaaatttagattctcaacacttagggcctgtttggtttgtggctaaatgtgtcatactttgtctaatgttagttgttcgaattgaataactaatcttaggcagaaaagttaggcaaaatgtggtaactgaggtagtgaaccaaacatgtctttagatagatctgggccgcctctcttggacagctgcccctctagggctgctgccagcctaccacccatgtgccgcgtcgccgcaacaaagtgcacatatcttctccctcctcttttatgcatccatgacagggacctcacgcgctcgtgtcaaagaggaggccatggccttccgcaagaagatggcatgcttgttacggctcaaggtgcagacaaggaggctgtcaacgcacacactcgcgcccaagtaggatggcaacgcgcaatcccccgtcggggaatacctccccgtccccgcgacgattttttttccgtagggattcccacgaatacttgtggggaacatttcttctctatccctgtttttcgcgggataaatctccaaaagtgatccctatctctgtttaaattataattaaaatatgcgttatttattattaatattaaacattatcacttatacacattatcagatgtaagaaatcattatgcacacatcaaaataaatatatttgtacaattagtg

SEQ ID NO: 10116 - DNA, 3409 bp, Zea Mays
aaatatcccacccaaacaactccaccctaccgcaccccaaattcgcaatccctctccacctctcctcccaccgcagcagcaggcaagcgcgaggcggaggcggagagatggagtcggaccagggcaagctcttcatcggcggcatctcctgggaaacaacggaggagaagctgagcgagcacttctccgcctacggagaggttacgcaggccgccgtcatgcgcgacaagacgacgggccgcccccgaggcttcgggtttgtcgtcttcgccgaccccgccgtcgtcgaccgagcgctgcaggacccccacaccctcgacggccgcacggtcgatgtgaagcgggcactctcgcgggaggagcagcaggcctccaaggccgcaaaccctagcggtgggaggaacactggcggaggaaatggcggcggcgatgcaaatggtgctcggacgaagaaaatattcgtgggcgggctgccctctactctgactgaggatgggtttcggcagtatttccagaccttcggcatcgtcactgatgttgttgtcatgtatgaccagaacacgcagcgcccccgtggcttcggattcatcacctttgactcggaggacgcggttgaccacgtgctgcagaagaccttccatgatcttggtgggaagctggttgaggtgaagcgtgcattgccccgtgaggcgaaccctggtggctctggtagtgggcgttctggggtgagtgggggttaccagagcaacaatggccataacaccagctctggtagctatgatggtagaagtgatggtggcaggtacgggcaggcacagcagggtagtggtgtctatcctggctatggtgctggggcagctggatatggatatggtgctaaccctgcaattggatatggaaattatggggctggaggatatggaggtgctcctgctgcttatggtggacattatggaaacccaggtgcagctggttctggttaccaaggtggacccccaggctcaaatagaggaccttggggcagtcaagctccatctgcatatggaactggagggtatggtggcagtgctggctatagtgcttggaacaactcttctggtggtggcaatgctcccactagtcaagcccctggcggacctgcgggctatggaagccagggttttgggtatggtggatatggaggtgatccatcgtatggtagtcatgggggatatggagcttatggagcgcgaagtgatggtgctggcaatcctgctactggtggagcatctggatatggtgcagggtatggaagtgggggtgccaactctggctattcaagtgcttggagtgatccttcacaaggtggtggatttggtggttcagtcaatggaggttctgaagggcaatcaaactatggcactggctatggcagtgtgcagcccagggttgctcagtaaagaaggcattttgagtgtctgaaatgaaccagcacatctgggcagtctatgtattgatttgtcattccagttctgatttgttctcagcattctgaagattgcccatttgctggttaaatcagtatttctccgggttggaatgcttgatcctttagtggcttactactagaacttgtagtcaataagtagctataatgtggagtagcagtatcttgcagaatgcttttattaatttctacatttagctttatctatctgtgtgctttgccatgagtggagtttcaggttccttcatctctagttataagctagagtagcttgactgcttatggacaaaattatctagttgtacctctattctacagatcatacattcgtgtttgatggtagtatttatgctggatattgtacctctattctggaatgttctatatttggtggttgtattgacatatggtattatcaacattcatggtttgaaacagatgcaacccctgaaatatgcagtcatagttggcttgatgctgtagctgcttctaacattatgttcaaactgtagtgcaagtgtttatatagctggaatgctacatccttcaagttgaatgggatgacattccttttcagagatgatacccaagcaaggttatgaaatcaggcatctgaaaaaaaatgtggcagtgattttacatgacgagctggtaaaaagttgcaatattggggtgcagacagaatgcaagataccagcttgagcgtttcattgtctgaagggtcttgtgctgtgctacaagatagtgtggcctctggcgttggaagcgaaggggaccggggcatcttgtggctggtgtgtatcatcttcctaccatcctaggacatctaattagtttgattagtttcttccccgttctagtggactcggttgctgcttttggctttcaccgaatcctctccaaaggtggcgctggtgctactgttccttatggtgatgattttacttctgaccatgattgttacagcggtaaggcggtcttaggatcttttaacctttaagcatggagacgactttatatacatgtaagtaaggtgaataataacaaaaaaaaaatgcatagctaagtagatagaccatatatatatcatagaacatacaagccttaatgaatagcataatttataaaatagtataattgatagttcataaaactaacaaacagtagttcataaaactaacaagtccaaaatatatagttcataattttgtaaactaacaagtccataaaagaacacaaggcaacattaaatttagattctcaacacttagggcctgtttggtttgtggctaaatgtgtcatactttgtctaatgttagttgttcgaattgaataactaatcttaggcagaaaagttaggcaaaatgtggtaactgaggtagtgaaccaaacatgtctttagatagatctgggccgcctctcttggacagctgcccctctagggctgctgccagcctaccacccatgtgccgcgtcgccgcaacaaagtgcacatatcttctccctcctcttttatgcatccatgacagggacctcacgcgctcgtgtcaaagaggaggccatggccttccgcaagaagatggcatgcttgttacggctcaaggtgcagacaaggaggctgtcaacgcacacactcgcgcccaagtaggatggcaacgcgcaatcccccgtcggggaatacctccccgtccccgcgacgattttttttccgtagggattcccacgaatacttgtggggaacatttcttctctatccctgtttttcgcgggataaatctccaaaagtgatccctatctctgtttaaattataattaaaatatgcgttatttattattaatattaaacattatcacttatacacattatcagatgtaagaaatcattatgcacacatcaaaataaatatatttgtacaattagtg

SEQ ID NO: 10117 - DNA, 3851 bp, Zea Mays
aaaatatcccacccaaacaactccaccctaccgcaccccaaattcgcaatccctctccacctctcctcccaccgcagcagcaggcaagcgcgaggcggaggcggagagatggagtcggaccagggcaagctcttcatcggcggcatctcctgggaaacaacggaggagaagctgagcgagcacttctccgcctacggagaggttacgcaggccgccgtcatgcgcgacaagacgacgggccgcccccgaggcttcgggtttgtcgtcttcgccgaccccgccgtcgtcgaccgagcgctgcaggacccccacaccctcgacggccgcacggtcgatgtgaagcgggcactctcgcgggaggagcagcaggcctccaaggccgcaaaccctagcggtgggaggaacactggcggaggaaatggcggcggcgatgcaaatggtgctcggacgaagaaaatattcgtgggcgggctgccctctactctgactgaggatgggtttcggcagtatttccagaccttcggcatcgtcactgatgttgttgtcatgtatgaccagaacacgcagcgcccccgtggcttcggattcatcacctttgactcggaggacgcggttgaccacgtgctgcagaagaccttccatgatcttggtgggaagctggttgaggtgaagcgtgcattgccccgtgaggcgaaccctggtggctctggtagtgggcgttctggggtgagtgggggttaccagagcaacaatggccataacaccagctctggtagctatgatggtagaagtgatggtggcaggtacgggcaggcacagcagggtagtggtgtctatcctggctatggtgctggggcagctggatatggatatggtgctaaccctgcaattggatatggaaattatggggctggaggatatggaggtgctcctgctgcttatggtggacattatggaaacccaggtgcagctggttctggttaccaaggtggacccccaggctcaaatagaggaccttggggcagtcaagctccatctgcatatggaactggagggtatggtggcagtgctggctatagtgcttggaacaactcttctggtggtggcaatgctcccactagtcaagcccctggcggacctgcgggctatggaagccagggttttgggtatggtggatatggaggtgatccatcgtatggtagtcatgggggatatggagcttatggagcgcgaagtgatggtgctggcaatcctgctactggtggagcatctggatatggtgcagggtatggaagtgggggtgccaactctggctattcaagtgcttggagtgatccttcacaaggtggtggatttggtggttcagtcaatggaggttctgaagggcaatcaaactatggcactggctatggcagtgtgcagcccagggttgctcagtaaagaaggcattttgagtgtctgaaatgaaccagcacatctgggcagtctatgtattgatttgtcattccagttctgatttgttctcagcattctgaagattgcccatttgctggttaaatcagtatttctccgggttggaatgcttgatcctttagtggcttactactagaacttgtagtcaataagtagctataatgtggagtagcagtatcttgcagaatgcttttattaatttctacatttagctttatctatctgtgtgctttgccatgagtggagtttcaggttccttcatctctagttataagctagagtagcttgactgcttatggacaaaattatctagttgtacctctattctacagatcatacattcgtgtttgatggtagtatttatgctggatattgtacctctattctggaatgttctatatttggtggttgtattgacatatggtattatcaacattcatggtttgaaacagatgcaacccctgaaatatgcagtcatagttggcttgatgctgtagctgcttctaacattatgttcaaactgtagtgcaagtgtttatatagctggaatgctacatccttcaagttgaatgggatgacattccttttcagagatgatacccaagcaaggttatgaaatcaggcatctgaaaaaaaatgtggcagtgattttacatgacgagctggtaaaaagttgcaatattggggtgcagacagaatgcaagataccagcttgagcgtttcattgtctgaagggtcttgtgctgtgctacaagatagtgacgaagtgcaacatgctgactcgagcagtcgagctgctgtagctgggtcttgggaagggtctcggctgtgtgtctgcatactgatgatcggtgatgcttacgatataggaatgccccaatgtataggtgaacttttagtgctatagaggcttccttttgttgtcatgatgtctatgctctttaagtagctgcataacaccatgtatactcagtatagttctacacctgggtatggaagccattcgtgtttttgtttagtatgaatgccatgtaattgtacattaggttgacaattcagttgttgctaaatcacgctccactagtgaattgtgtaaatggaaagaaatgaaatgcatatatataaaactctgatcctttactgctctgatttgacactgatgggttatttgacttgttccttattactctctccggctccagtggcctctggcgttggaagcgaaggggaccggggcatcttgtggctggtgtgtatcatcttcctaccatcctaggacatctaattagtttgattagtttcttccccgttctagtggactcggttgctgcttttggctttcaccgaatcctctccaaaggtggcgctggtgctactgttccttatggtgatgattttacttctgaccatgattgttacagcggtaaggcggtcttaggatcttttaacctttaagcatggagacgactttatatacatgtaagtaaggtgaataataacaaaaaaaaaatgcatagctaagtagatagaccatatatatatcatagaacatacaagccttaatgaatagcataatttataaaatagtataattgatagttcataaaactaacaaacagtagttcataaaactaacaagtccaaaatatatagttcataattttgtaaactaacaagtccataaaagaacacaaggcaacattaaatttagattctcaacacttagggcctgtttggtttgtggctaaatgtgtcatactttgtctaatgttagttgttcgaattgaataactaatcttaggcagaaaagttaggcaaaatgtggtaactgaggtagtgaaccaaacatgtctttagatagatctgggccgcctctcttggacagctgcccctctagggctgctgccagcctaccacccatgtgccgcgtcgccgcaacaaagtgcacatatcttctccctcctcttttatgcatccatgacagggacctcacgcgctcgtgtcaaagaggaggccatggccttccgcaagaagatggcatgcttgttacggctcaaggtgcagacaaggaggctgtcaacgcacacactcgcgcccaagtaggatggcaacgcgcaatcccccgtcggggaatacctccccgtccccgcgacgattttttttccgtagggattcccacgaatacttgtggggaacatttcttctctatccctgtttttcgcgggataaatctccaaaagtgatccctatctctgtttaaattataattaaaatatgcgttatttattattaatattaaacattatcacttatacacattatcagatgtaagaaatcattatgcacacatcaaaataaatatatttgtacaattagtg

SEQ ID NO: 10118 - DNA, 3515 bp, Zea Mays
aaaatatcccacccaaacaactccaccctaccgcaccccaaattcgcaatccctctccacctctcctcccaccgcagcagcaggcaagcgcgaggcggaggcggagagatggagtcggaccagggcaagctcttcatcggcggcatctcctgggaaacaacggaggagaagctgagcgagcacttctccgcctacggagaggttacgcaggccgccgtcatgcgcgacaagacgacgggccgcccccgaggcttcgggtttgtcgtcttcgccgaccccgccgtcgtcgaccgagcgctgcaggacccccacaccctcgacggccgcacggtcgatgtgaagcgggcactctcgcgggaggagcagcaggcctccaaggccgcaaaccctagcggtgggaggaacactggcggaggaaatggcggcggcgatgcaaatggtgctcggacgaagaaaatattcgtgggcgggctgccctctactctgactgaggatgggtttcggcagtatttccagaccttcggcatcgtcactgatgttgttgtcatgtatgaccagaacacgcagcgcccccgtggcttcggattcatcacctttgactcggaggacgcggttgaccacgtgctgcagaagaccttccatgatcttggtgggaagctggttgaggtgaagcgtgcattgccccgtgaggcgaaccctggtggctctggtagtgggcgttctggggtgagtgggggttaccagagcaacaatggccataacaccagctctggtagctatgatggtagaagtgatggtggcaggtacgggcaggcacagcagggtagtggtgtctatcctggctatggtgctggggcagctggatatggatatggtgctaaccctgcaattggatatggaaattatggggctggaggatatggaggtgctcctgctgcttatggtggacattatggaaacccaggtgcagctggttctggttaccaaggtggacccccaggctcaaatagaggaccttggggcagtcaagctccatctgcatatggaactggagggtatggtggcagtgctggctatagtgcttggaacaactcttctggtggtggcaatgctcccactagtcaagcccctggcggacctgcgggctatggaagccagggttttgggtatggtggatatggaggtgatccatcgtatggtagtcatgggggatatggagcttatggagcgcgaagtgatggtgctggcaatcctgctactggtggagcatctggatatggtgcagggtatggaagtgggggtgccaactctggctattcaagtgcttggagtgatccttcacaaggtggtggatttggtggttcagtcaatggaggttctgaagggcaatcaaactatggcactggctatggcagtgtgcagcccagggttgctcagtaaagaaggcattttgagtgtctgaaatgaaccagcacatctgggcagtctatgtattgatttgtcattccagttctgatttgttctcagcattctgaagattgcccatttgctggttaaatcagtatttctccgggttggaatgcttgatcctttagtggcttactactagaacttgtagtcaataagtagctataatgtggagtagcagtatcttgcagaatgcttttattaatttctacatttagctttatctatctgtgtgctttgccatgagtggagtttcaggttccttcatctctagttataagctagagtagcttgactgcttatggacaaaattatctagttgtacctctattctacagatcatacattcgtgtttgatggtagtatttatgctggatattgtacctctattctggaatgttctatatttggtggttgtattgacatatggtattatcaacattcatggtttgaaacagatgcaacccctgaaatatgcagtcatagttggcttgatgctgtagctgcttctaacattatgttcaaactgtagtgcaagtgtttatatagctggaatgctacatccttcaagtatgtcatcaagctatgaattccatccatttggccctagaatttgatattttccaagcagcagtaagcttattagcagcaagattgtagcactaagtttctgaggttgaatgggatgacattccttttcagagatgatacccaagcaaggttatgaaatcaggcatctgaaaaaaaatgtggcagtgattttacatgacgagctggtaaaaagttgcaatattggggtgcagacagaatgcaagataccagcttgagcgtttcattgtctgaagggtcttgtgctgtgctacaagatagtgtggcctctggcgttggaagcgaaggggaccggggcatcttgtggctggtgtgtatcatcttcctaccatcctaggacatctaattagtttgattagtttcttccccgttctagtggactcggttgctgcttttggctttcaccgaatcctctccaaaggtggcgctggtgctactgttccttatggtgatgattttacttctgaccatgattgttacagcggtaaggcggtcttaggatcttttaacctttaagcatggagacgactttatatacatgtaagtaaggtgaataataacaaaaaaaaaatgcatagctaagtagatagaccatatatatatcatagaacatacaagccttaatgaatagcataatttataaaatagtataattgatagttcataaaactaacaaacagtagttcataaaactaacaagtccaaaatatatagttcataattttgtaaactaacaagtccataaaagaacacaaggcaacattaaatttagattctcaacacttagggcctgtttggtttgtggctaaatgtgtcatactttgtctaatgttagttgttcgaattgaataactaatcttaggcagaaaagttaggcaaaatgtggtaactgaggtagtgaaccaaacatgtctttagatagatctgggccgcctctcttggacagctgcccctctagggctgctgccagcctaccacccatgtgccgcgtcgccgcaacaaagtgcacatatcttctccctcctcttttatgcatccatgacagggacctcacgcgctcgtgtcaaagaggaggccatggccttccgcaagaagatggcatgcttgttacggctcaaggtgcagacaaggaggctgtcaacgcacacactcgcgcccaagtaggatggcaacgcgcaatcccccgtcggggaatacctccccgtccccgcgacgattttttttccgtagggattcccacgaatacttgtggggaacatttcttctctatccctgtttttcgcgggataaatctccaaaagtgatccctatctctgtttaaattataattaaaatatgcgttatttattattaatattaaacattatcacttatacacattatcagatgtaagaaatcattatgcacacatcaaaataaatatatttgtacaattagtg

SEQ ID NO: 10119 - DNA, 2899 bp, Zea Mays
caaaaatatcccacccaaacaactccaccctaccgcaccccaaattcgcaatccctctccacctctcctcccaccgcagcagcaggcaagcgcgaggcggaggcggagagatggagtcggaccagggcaagctcttcatcggcggcatctcctgggaaacaacggaggagaagctgagcgagcacttctccgcctacggagaggttacgcaggccgccgtcatgcgcgacaagacgacgggccgcccccgaggcttcgggtttgtcgtcttcgccgaccccgccgtcgtcgaccgagcgctgcaggacccccacaccctcgacggccgcacggtcgatgtgaagcgggcactctcgcgggaggagcagcaggcctccaaggccgcaaaccctagcggtgggaggaacactggcggaggaaatggcggcggcgatgcaaatggtgctcggacgaagaaaatattcgtgggcgggctgccctctactctgactgaggatgggtttcggcagtatttccagaccttcggcatcgtcactgatgttgttgtcatgtatgaccagaacacgcagcgcccccgtggcttcggattcatcacctttgactcggaggacgcggttgaccacgtgctgcagaagaccttccatgatcttggtgggaagctggttgaggtgaagcgtgcattgccccgtgaggcgaaccctggtggctctggtagtgggcgttctggggtgagtgggggttaccagagcaacaatggccataacaccagctctggtagctatgatggtagaagtgatggtggcaggtacgggcaggcacagcagggtagtggtgtctatcctggctatggtgctggggcagctggatatggatatggtgctaaccctgcaattggatatggaaattatggggctggaggatatggaggtgctcctgctgcttatggtggacattatggaaacccaggtgcagctggttctggttaccaaggtggacccccaggctcaaatagaggaccttggggcagtcaagctccatctgcatatggaactggagggtatggtggcagtgctggctatagtgcttggaacaactcttctggtggtggcaatgctcccactagtcaagcccctggcggacctgcgggctatggaagccagggttttgggtatggtggatatggaggtgatccatcgtatggtagtcatgggggatatggagcttatggagcgcgaagtgatggtgctggcaatcctgctactggtggagcatctggatatggtgcagggtatggaagtgggggtgccaactctggctattcaagtgcttggagtgatccttcacaaggtggtggatttggtggttcagtcaatggaggttctgaagggcaatcaaactatggcactggctatggcagtgtgcagcccagggttgctcagtaaagaaggcattttgagtgtctgaaatgaaccagcacatctgggcagtctatgtattgatttgtcattccagttctgatttgttctcagcattctgaagattgcccatttgctggttaaatcagtatttctccgggttgaatgggatgacattccttttcagagatgatacccaagcaaggttatgaaatcaggcatctgaaaaaaaatgtggcagtgattttacatgacgagctggtaaaaagttgcaatattggggtgcagacagaatgcaagataccagcttgagcgtttcattgtctgaagggtcttgtgctgtgctacaagatagtgtggcctctggcgttggaagcgaaggggaccggggcatcttgtggctgtttcttccccgttctagtggactcggttgctgcttttggctttcaccgaatcctctccaaaggtggcgctggtgctactgttccttatggtgatgattttacttctgaccatgattgttacagcggtaaggcggtcttaggatcttttaacctttaagcatggagacgactttatatacatgtaagtaaggtgaataataacaaaaaaaaaatgcatagctaagtagatagaccatatatatatcatagaacatacaagccttaatgaatagcataatttataaaatagtataattgatagttcataaaactaacaaacagtagttcataaaactaacaagtccaaaatatatagttcataattttgtaaactaacaagtccataaaagaacacaaggcaacattaaatttagattctcaacacttagggcctgtttggtttgtggctaaatgtgtcatactttgtctaatgttagttgttcgaattgaataactaatcttaggcagaaaagttaggcaaaatgtggtaactgaggtagtgaaccaaacatgtctttagatagatctgggccgcctctcttggacagctgcccctctagggctgctgccagcctaccacccatgtgccgcgtcgccgcaacaaagtgcacatatcttctccctcctcttttatgcatccatgacagggacctcacgcgctcgtgtcaaagaggaggccatggccttccgcaagaagatggcatgcttgttacggctcaaggtgcagacaaggaggctgtcaacgcacacactcgcgcccaagtaggatggcaacgcgcaatcccccgtcggggaatacctccccgtccccgcgacgattttttttccgtagggattcccacgaatacttgtggggaacatttcttctctatccctgtttttcgcgggataaatctccaaaagtgatccctatctctgtttaaattataattaaaatatgcgttatttattattaatattaaacattatcacttatacacattatcagatgtaagaaatcattatgcacacatcaaaataaatatatttgtacaattagtg

SEQ ID NO: 10120 - DNA, 4018 bp, Zea Mays
caaaaatatcccacccaaacaactccaccctaccgcaccccaaattcgcaatccctctccacctctcctcccaccgcagcagcaggcaagcgcgaggcggaggcggagagatggagtcggaccagggcaagctcttcatcggcggcatctcctgggaaacaacggaggagaagctgagcgagcacttctccgcctacggagaggttacgcaggccgccgtcatgcgcgacaagacgacgggccgcccccgaggcttcgggtttgtcgtcttcgccgaccccgccgtcgtcgaccgagcgctgcaggacccccacaccctcgacggccgcacggtcgatgtgaagcgggcactctcgcgggaggagcagcaggcctccaaggccgcaaaccctagcggtgggaggaacactggcggaggaaatggcggcggcgatgcaaatggtgctcggacgaagaaaatattcgtgggcgggctgccctctactctgactgaggatgggtttcggcagtatttccagaccttcggcatcgtcactgatgttgttgtcatgtatgaccagaacacgcagcgcccccgtggcttcggattcatcacctttgactcggaggacgcggttgaccacgtgctgcagaagaccttccatgatcttggtgggaagctggttgaggtgaagcgtgcattgccccgtgaggcgaaccctggtggctctggtagtgggcgttctggggtgagtgggggttaccagagcaacaatggccataacaccagctctggtagctatgatggtagaagtgatggtggcaggtacgggcaggcacagcagggtagtggtgtctatcctggctatggtgctggggcagctggatatggatatggtgctaaccctgcaattggatatggaaattatggggctggaggatatggaggtgctcctgctgcttatggtggacattatggaaacccaggtgcagctggttctggttaccaaggtggacccccaggctcaaatagaggaccttggggcagtcaagctccatctgcatatggaactggagggtatggtggcagtgctggctatagtgcttggaacaactcttctggtggtggcaatgctcccactagtcaagcccctggcggacctgcgggctatggaagccagggttttgggtatggtggatatggaggtgatccatcgtatggtagtcatgggggatatggagcttatggagcgcgaagtgatggtgctggcaatcctgctactggtggagcatctggatatggtgcagggtatggaagtgggggtgccaactctggctattcaagtgcttggagtgatccttcacaaggtggtggatttggtggttcagtcaatggaggttctgaagggcaatcaaactatggcactggctatggcagtgtgcagcccagggttgctcagtaaagaaggcattttgagtgtctgaaatgaaccagcacatctgggcagtctatgtattgatttgtcattccagttctgatttgttctcagcattctgaagattgcccatttgctggttaaatcagtatttctccgggttggaatgcttgatcctttagtggcttactactagaacttgtagtcaataagtagctataatgtggagtagcagtatcttgcagaatgcttttattaatttctacatttagctttatctatctgtgtgctttgccatgagtggagtttcaggttccttcatctctagttataagctagagtagcttgactgcttatggacaaaattatctagttgtacctctattctacagatcatacattcgtgtttgatggtagtatttatgctggatattgtacctctattctggaatgttctatatttggtggttgtattgacatatggtattatcaacattcatggtttgaaacagatgcaacccctgaaatatgcagtcatagttggcttgatgctgtagctgcttctaacattatgttcaaactgtagtgcaagtgtttatatagctggaatgctacatccttcaagtatgtcatcaagctatgaattccatccatttggccctagaatttgatattttccaagcagcagtaagcttattagcagcaagattgtagcactaagtttctgaggttgaatgggatgacattccttttcagagatgatacccaagcaaggttatgaaatcaggcatctgaaaaaaaatgtggcagtgattttacatgacgagctggtaaaaagttgcaatattggggtgcagacagaatgcaagataccagcttgagcgtttcattgtctgaagggtcttgtgctgtgctacaagatagtggtgcgagcttactctcccttcccaaagagcatgttttaatggcaaaactcttgtcaacagacgaagtgcaacatgctgactcgagcagtcgagctgctgtagctgggtcttgggaagggtctcggctgtgtgtctgcatactgatgatcggtgatgcttacgatataggaatgccccaatgtataggtgaacttttagtgctatagaggcttccttttgttgtcatgatgtctatgctctttaagtagctgcataacaccatgtatactcagtatagttctacacctgggtatggaagccattcgtgtttttgtttagtatgaatgccatgtaattgtacattaggttgacaattcagttgttgctaaatcacgctccactagtgaattgtgtaaatggaaagaaatgaaatgcatatatataaaactctgatcctttactgctctgatttgacactgatgggttatttgacttgttccttattactctctccggctccagtggcctctggcgttggaagcgaaggggaccggggcatcttgtggctggtgtgtatcatcttcctaccatcctaggacatctaattagtttgattagtttcttccccgttctagtggactcggttgctgcttttggctttcaccgaatcctctccaaaggtggcgctggtgctactgttccttatggtgatgattttacttctgaccatgattgttacagcggtaaggcggtcttaggatcttttaacctttaagcatggagacgactttatatacatgtaagtaaggtgaataataacaaaaaaaaaatgcatagctaagtagatagaccatatatatatcatagaacatacaagccttaatgaatagcataatttataaaatagtataattgatagttcataaaactaacaaacagtagttcataaaactaacaagtccaaaatatatagttcataattttgtaaactaacaagtccataaaagaacacaaggcaacattaaatttagattctcaacacttagggcctgtttggtttgtggctaaatgtgtcatactttgtctaatgttagttgttcgaattgaataactaatcttaggcagaaaagttaggcaaaatgtggtaactgaggtagtgaaccaaacatgtctttagatagatctgggccgcctctcttggacagctgcccctctagggctgctgccagcctaccacccatgtgccgcgtcgccgcaacaaagtgcacatatcttctccctcctcttttatgcatccatgacagggacctcacgcgctcgtgtcaaagaggaggccatggccttccgcaagaagatggcatgcttgttacggctcaaggtgcagacaaggaggctgtcaacgcacacactcgcgcccaagtaggatggcaacgcgcaatcccccgtcggggaatacctccccgtccccgcgacgattttttttccgtagggattcccacgaatacttgtggggaacatttcttctctatccctgtttttcgcgggataaatctccaaaagtgatccctatctctgtttaaattataattaaaatatgcgttatttattattaatattaaacattatcacttatacacattatcagatgtaagaaatcattatgcacacatcaaaataaatatatttgtacaattagtg

SEQ ID NO: 10121 - DNA, 3432 bp, Zea Mays
attaaattatttaaaaaataccgatgcgcaccacgcgccggaacaaaaatatcccacccaaacaactccaccctaccgcaccccaaattcgcaatccctctccacctctcctcccaccgcagcagcaggcaagcgcgaggcggaggcggagagatggagtcggaccagggcaagctcttcatcggcggcatctcctgggaaacaacggaggagaagctgagcgagcacttctccgcctacggagaggttacgcaggccgccgtcatgcgcgacaagacgacgggccgcccccgaggcttcgggtttgtcgtcttcgccgaccccgccgtcgtcgaccgagcgctgcaggacccccacaccctcgacggccgcacggtcgatgtgaagcgggcactctcgcgggaggagcagcaggcctccaaggccgcaaaccctagcggtgggaggaacactggcggaggaaatggcggcggcgatgcaaatggtgctcggacgaagaaaatattcgtgggcgggctgccctctactctgactgaggatgggtttcggcagtatttccagaccttcggcatcgtcactgatgttgttgtcatgtatgaccagaacacgcagcgcccccgtggcttcggattcatcacctttgactcggaggacgcggttgaccacgtgctgcagaagaccttccatgatcttggtgggaagctggttgaggtgaagcgtgcattgccccgtgaggcgaaccctggtggctctggtagtgggcgttctggggtgagtgggggttaccagagcaacaatggccataacaccagctctggtagctatgatggtagaagtgatggtggcaggtacgggcaggcacagcagggtagtggtgtctatcctggctatggtgctggggcagctggatatggatatggtgctaaccctgcaattggatatggaaattatggggctggaggatatggaggtgctcctgctgcttatggtggacattatggaaacccaggtgcagctggttctggttaccaaggtggacccccaggctcaaatagaggaccttggggcagtcaagctccatctgcatatggaactggagggtatggtggcagtgctggctatagtgcttggaacaactcttctggtggtggcaatgctcccactagtcaagcccctggcggacctgcgggctatggaagccagggttttgggtatggtggatatggaggtgatccatcgtatggtagtcatgggggatatggagcttatggagcgcgaagtgatggtgctggcaatcctgctactggtggagcatctggatatggtgcagggtatggaagtgggggtgccaactctggctattcaagtgcttggagtgatccttcacaaggtggtggatttggtggttcagtcaatggaggttctgaagggcaatcaaactatggcactggctatggcagtgtgcagcccagggttgctcagtaaagaaggcattttgagtgtctgaaatgaaccagcacatctgggcagtctatgtattgatttgtcattccagttctgatttgttctcagcattctgaagattgcccatttgctggttaaatcagtatttctccgggttgaatgggatgacattccttttcagagatgatacccaagcaaggttatgaaatcaggcatctgaaaaaaaatgtggcagtgattttacatgacgagctggtaaaaagttgcaatattggggtgcagacagaatgcaagataccagcttgagcgtttcattgtctgaagggtcttgtgctgtgctacaagatagtgacgaagtgcaacatgctgactcgagcagtcgagctgctgtagctgggtcttgggaagggtctcggctgtgtgtctgcatactgatgatcggtgatgcttacgatataggaatgccccaatgtataggtgaacttttagtgctatagaggcttccttttgttgtcatgatgtctatgctctttaagtagctgcataacaccatgtatactcagtatagttctacacctgggtatggaagccattcgtgtttttgtttagtatgaatgccatgtaattgtacattaggttgacaattcagttgttgctaaatcacgctccactagtgaattgtgtaaatggaaagaaatgaaatgcatatatataaaactctgatcctttactgctctgatttgacactgatgggttatttgacttgttccttattactctctccggctccagtggcctctggcgttggaagcgaaggggaccggggcatcttgtggctggtgtgtatcatcttcctaccatcctaggacatctaattagtttgattagtttcttccccgttctagtggactcggttgctgcttttggctttcaccgaatcctctccaaaggtggcgctggtgctactgttccttatggtgatgattttacttctgaccatgattgttacagcggtaaggcggtcttaggatcttttaacctttaagcatggagacgactttatatacatgtaagtaaggtgaataataacaaaaaaaaaatgcatagctaagtagatagaccatatatatatcatagaacatacaagccttaatgaatagcataatttataaaatagtataattgatagttcataaaactaacaaacagtagttcataaaactaacaagtccaaaatatatagttcataattttgtaaactaacaagtccataaaagaacacaaggcaacattaaatttagattctcaacacttagggcctgtttggtttgtggctaaatgtgtcatactttgtctaatgttagttgttcgaattgaataactaatcttaggcagaaaagttaggcaaaatgtggtaactgaggtagtgaaccaaacatgtctttagatagatctgggccgcctctcttggacagctgcccctctagggctgctgccagcctaccacccatgtgccgcgtcgccgcaacaaagtgcacatatcttctccctcctcttttatgcatccatgacagggacctcacgcgctcgtgtcaaagaggaggccatggccttccgcaagaagatggcatgcttgttacggctcaaggtgcagacaaggaggctgtcaacgcacacactcgcgcccaagtaggatggcaacgcgcaatcccccgtcggggaatacctccccgtccccgcgacgattttttttccgtagggattcccacgaatacttgtggggaacatttcttctctatccctgtttttcgcgggataaatctccaaaagtgatccctatctctgtttaaattataattaaaatatgcgttatttattattaatattaaacattatcacttatacacattatcagatgtaagaaatcattatgcacacatcaaaataaatatatttgtacaattagtg

SEQ ID NO: 10122 - DNA, 2881 bp, Zea Mays
aaatatcccacccaaacaactccaccctaccgcaccccaaattcgcaatccctctccacctctcctcccaccgcagcagcaggcaagcgcgaggcggaggcggagagatggagtcggaccagggcaagctcttcatcggcggcatctcctgggaaacaacggaggagaagctgagcgagcacttctccgcctacggagaggttacgcaggccgccgtcatgcgcgacaagacgacgggccgcccccgaggcttcgggtttgtcgtcttcgccgaccccgccgtcgtcgaccgagcgctgcaggacccccacaccctcgacggccgcacggtcgatgtgaagcgggcactctcgcgggaggagcagcaggcctccaaggccgcaaaccctagcggtgggaggaacactggcggaggaaatggcggcggcgatgcaaatggtgctcggacgaagaaaatattcgtgggcgggctgccctctactctgactgaggatgggtttcggcagtatttccagaccttcggcatcgtcactgatgttgttgtcatgtatgaccagaacacgcagcgcccccgtggcttcggattcatcacctttgactcggaggacgcggttgaccacgtgctgcagaagaccttccatgatcttggtgggaagctggttgaggtgaagcgtgcattgccccgtgaggcgaaccctggtggctctggtagtgggcgttctggggtgagtgggggttaccagagcaacaatggccataacaccagctctggtagctatgatggtagaagtgatggtggcaggtacgggcaggcacagcagggtagtggtgtctatcctggctatggtgctggggcagctggatatggatatggtgctaaccctgcaattggatatggaaattatggggctggaggatatggaggtgctcctgctgcttatggtggacattatggaaacccaggtgcagctggttctggttaccaaggtggacccccaggctcaaatagaggaccttggggcagtcaagctccatctgcatatggaactggagggtatggtggcagtgctggctatagtgcttggaacaactcttctggtggtggcaatgctcccactagtcaagcccctggcggacctgcgggctatggaagccagggttttgggtatggtggatatggaggtgatccatcgtatggtagtcatgggggatatggagcttatggagcgcgaagtgatggtgctggcaatcctgctactggtggagcatctggatatggtgcagggtatggaagtgggggtgccaactctggctattcaagtgcttggagtgatccttcacaaggtggtggatttggtggttcagtcaatggaggttctgaagggcaatcaaactatggcactggctatggcagtgtgcagcccagggttgctcagtaaagaaggcattttgagtgtctgaaatgaaccagcacatctgggcagtctatgtattgatttgtcattccagttctgatttgttctcagcattctgaagattgcccatttgctggttaaatcagtatttctccgggttggaatgcttgatcctttagtggcttactactagaacttgtagtcaataagtagctataatgtggagtagcagtatcttgcagaatgcttttattaatttctacatttagctttatctatctgtgtgctttgccatgagtggagtttcaggttccttcatctctagttataagctagagtagcttgactgcttatggacaaaattatctagttgtacctctattctacagatcatacattcgtgtttgatggtagtatttatgctggatattgtacctctattctggaatgttctatatttggtggttgtattgacatatggtattatcaacattcatggtttgaaacagatgcaacccctgaaatatgcagtcatagttggcttgatgctgtagctgcttctaacattatgttcaaactgtagtgcaagtgtttatatagctggaatgctacatccttcaagtatgtcatcaagctatgaattccatccatttggccctagaatttgatattttccaagcagcagtaagcttattagcagcaagattgtagcactaagtttctgaggtagtatagataactgggttatctgtgaagctaattgaatgtttaggggtagaattgtattgtagaacagtcaaggctcggcaagtaaagtaattgtccttcctcctacctttcctttatgtacaggttgaatgggatgacattccttttcagagatgatacccaagcaaggttatgaaatcaggcatctgaaaaaaaatgtggcagtgattttacatgacgagctggtaaaaagttgcaatattggggtgcagacagaatgcaagataccagcttgagcgtttcattgtctgaagggtcttgtgctgtgctacaagatagtggtgaaattattggttttttaagtaaagaaactcgtcggacaagggtagtgattaggtgggttagctttgcttgtttatttcttaaggttgtgtttggttcggcttctggaaattgcttctgctgccaagagcagaatgccagccaaacggaccggaaactgctttttcagaagcagttgccttcgcgtgctttttggctttgaggtttctgttttttttttcttcaaatgggtggcaatagagagatgttttacaactgtttcaagggagataaagagattataggtttcatagctgttttaaaacgaacagttacaacttttttatagcacagcttacaacagcttttccacaccgcacagcattttttttttgcagctcacagctgaaccaaacatactcttgccactgcatata

SEQ ID NO: 10123 - DNA, 2165 bp, Zea Mays
aaacgatatggtatcgcctccttcctgcaggctgattctgagccttgctgctgtccggtgacgaaaaccacaggtaaccgctggggacttcgctgattctgagccttgcggctgtcacctagcgtttggaactaattagccttgtgctaatcgaggctttgccacgcttccgtcggacttcggctaagcgctcccacccaggacaagcgagacacgttctcttctgtctgtccgtttcctgttgttccagaccttggagatgcgtgtgcgccctgtcatgactcatgatgtacgaggtgttcgagcggatggcgtactacggcatctcctccaacctggtcctgtacctgaccaagaagatgcaccagggcgtggtgccgtcggcgaacaacgtcaccaactgggtcggcaccatctggatgacgcccatcatcggcgcctatgtcgccgacgcgcacctcggccgctaccggaccttcatggtcgcctccgtcatctacctcagcggcatgatcctgctgacgctggcggtgtcgctgccggcgctgcggccgcccaagtgcggcgcgggaacggcggacccggactgcgtgcacaaggcgacgagcgagcagctgggcgtcttcttcctggccctgtacatcctcgccgtgggcacgggcggcaccaagcccaacatctccaccatcggcgccgaccagttcgacgacgcgcacccgcgggagcgcgcccacaagctctccttcttcaactggtggatgttcagcatcttcttcggcacgctcttcgccaacaccgtgctcgtctacatccaggacaccgtcggctgggccgtgggctacgcgctgcccacgctgggcctcgccgtctccatcgccgtcttcaccgccggcacgccattctaccgccacaagcccacctccgccgaaagccccttcgccaagatggccagggtcatcgtggcggccgccaggaagctggacgtccccgtgcccgtggacccgcgcgacctgcacgagctcgacgccgagcactacgccaagaggaacgtggccccgctcccgcacacgcccaacctcagcgtactcagcaaggcggcggtcaagaccggcgcggccacgtcgcggtggtcgctcagcaccgtcacgcaggtggaggagaccaagcagatgctcaagatgctccccgtgctggccatcacgttcgtgcccagcgccatgatggcgcagatcaacacgctgttcgtcaagcagggcaccacgctggaccgccacgtcggccgccacttcgagatcccgccggcgagcctccagggcttcgtcaccatctccatgctgctcgccgtcgtgctctacgaccgcgccttcatgccgttcgcgcgccgcgtcacggccaacccgcgcggcatctcgctgctgcagcgcatgagcgtcggcctcgtcatccacatcctcatcatggccatcgcgtcgctcacggagcgccaccgcctggcggtggcgcgcgaccacggcctctacgacagcaagggcaccacggtcccgctcaccatattcgtcctgctcccgcagttcgtgctcatgggcgtggccgacgccttccttgaggtggccaagatcgagttcttctacgaccaggcgcccgagggcatgaagagcctcggcacctcgtacgccatgaccagcctcggcatcggcaacttcctcagcagcgcgctgctctcagctgtgtcgcacatcaccaggcgccacggccggaccggctggatcctcaataacctcaacgcatcgcgcctggacaagtactacgccttcttcgccattctcaactgcgccaacctcgtcgccttcttcttcgtgtgccgcttctacgtgtacaacgccgaggtatcccacgtcgtcgacgccgggagcagtaagcagaagcgggaagtgcccatggcgatgcagccgccggccgtgggcgcagtggacgccaccctataggactagtgttccggtccattacaaatgtagttgtcatactcatacgtaccggtcatacatacgtgacgtgaaggatgaagcgccgcgtgtacagtgctgtaatctctacgtacatgcacctgcaatggatatgtgaaagtagtacgagaagctctgcagtgacggttaaaaagcgttttt

SEQ ID NO: 10124 - DNA, 2081 bp, Zea Mays
gtcaactgtcgtatacccatccataatctaaggtctcgctcgtcggcgtggttcggagaggccacggccacccacccacccatggcggagaggctggaggcggccgcttccgacgagtacacgcaggacggcacggtggacctccacggaaacccggtgctccggtccaggcggggcgggtggagagcctgcggcttcgtcgtatgtacgaggtgttcgagcggatggcgtactacggcatctcctccaacctggtcctgtacctgaccaagaagatgcaccagggcgtggtgccgtcggcgaacaacgtcaccaactgggtcggcaccatctggatgacgcccatcatcggcgcctatgtcgccgacgcgcacctcggccgctaccggaccttcatggtcgcctccgtcatctacctcagcggcatgatcctgctgacgctggcggtgtcgctgccggcgctgcggccgcccaagtgcggcgcgggaacggcggacccggactgcgtgcacaaggcgacgagcgagcagctgggcgtcttcttcctggccctgtacatcctcgccgtgggcacgggcggcaccaagcccaacatctccaccatcggcgccgaccagttcgacgacgcgcacccgcgggagcgcgcccacaagctctccttcttcaactggtggatgttcagcatcttcttcggcacgctcttcgccaacaccgtgctcgtctacatccaggacaccgtcggctgggccgtgggctacgcgctgcccacgctgggcctcgccgtctccatcgccgtcttcaccgccggcacgccattctaccgccacaagcccacctccgccgaaagccccttcgccaagatggccagggtcatcgtggcggccgccaggaagctggacgtccccgtgcccgtggacccgcgcgacctgcacgagctcgacgccgagcactacgccaagaggaacgtggccccgctcccgcacacgcccaacctcagcgtactcagcaaggcggcggtcaagaccggcgcggccacgtcgcggtggtcgctcagcaccgtcacgcaggtggaggagaccaagcagatgctcaagatgctccccgtgctggccatcacgttcgtgcccagcgccatgatggcgcagatcaacacgctgttcgtcaagcagggcaccacgctggaccgccacgtcggccgccacttcgagatcccgccggcgagcctccagggcttcgtcaccatctccatgctgctcgccgtcgtgctctacgaccgcgccttcatgccgttcgcgcgccgcgtcacggccaacccgcgcggcatctcgctgctgcagcgcatgagcgtcggcctcgtcatccacatcctcatcatggccatcgcgtcgctcacggagcgccaccgcctggcggtggcgcgcgaccacggcctctacgacagcaagggcaccacggtcccgctcaccatattcgtcctgctcccgcagttcgtgctcatgggcgtggccgacgccttccttgaggtggccaagatcgagttcttctacgaccaggcgcccgagggcatgaagagcctcggcacctcgtacgccatgaccagcctcggcatcggcaacttcctcagcagcgcgctgctctcagctgtgtcgcacatcaccaggcgccacggccggaccggctggatcctcaataacctcaacgcatcgcgcctggacaagtactacgccttcttcgccattctcaactgcgccaacctcgtcgccttcttcttcgtgtgccgcttctacgtgtacaacgccgaggtatcccacgtcgtcgacgccgggagcagtaagcagaagcgggaagtgcccatggcgatgcagccgccggccgtgggcgcagtggacgccaccctataggactagtgttccggtccattacaaatgtagttgtcatactcatacgtaccggtcatacatacgtgacgtgaaggatgaagcgccgcgtgtacagtgctgtaatctctacgtacatgcacctgcaatggatatgtgaaagtagtacgagaagctctgcagtgacggttaaaaagcgttttt

SEQ ID NO: 10125 - DNA, 729 bp, Zea Mays
  misc_feature (1)..(2): n is a, c, g, or t
nngaattcgctactgttgaagctgctcagaaggctcttgaatttgttggtcatgacctgatgggacggcctctaaggattgacatggctaccgagaggggtgcatacactcctagcagcgggaaggacaacggttctttcaagaagttcgctccaaggtcaggcaacaccgtgtttattaagggctttgacacctctggtggagaggaccagatccgcaccgctcttgaagagcattttggatcatgtggagatatcacccggatttcaattccaaaggattatgacactggtgtaagcaaaggaatggcgtacatggatttcaaggacccagattccttgaataaagcatacgagttgaatggaaccgaccttggtggctacagcttgtatgtcgatgaagccaagccgagacctgataacagcggccgtggtggaaggggtacgcctttcagacagaccgctggtacagctagtacaggaaagaagaccacctttggtgatgacgattgaagatccatggctggctattatagtgaaaaacgcaaactatattgtaccgttcagacctattgttatctgaggctgtactgcttttttgcttgataattcgacaattgtttttaccatttttaacatttggtgctatcaaagacatgactttttaagtttttataatatgagtagcggcaagttcaaatgttgttggtctttgaatttctgtgataga

SEQ ID NO: 10126 - DNA, 856 bp, Zea Mays
  misc_feature (1)..(2): n is a, c, g, or t
nngaattcgctactgttgaagctgctcagaaggctcttgaatttgttggtcatgacctgatgggacggcctctaaggattgacatggctaccgagaggggtgcatacactcctagcagcgggaaggacaacggttctttcaagaagttcgctccaaggtcaggcaacaccgtgtttattaagggctttgacacctctggtggagaggaccagatccgcaccgctcttgaagagcattttggatcatgtggagatatcacccggatttcaattccaaaggattatgacactggtaatggcgtacatggatttcaaggacccagattccttgaataaagcatacgagttgaatggaaccgaccttggtggctacagcttgtatgtcgatgaagccaagccgagacctgataacagcggtggcttcagtggtgacaggggtggtggcagagggaggagtggcggcttcagtggtggcagaggagggaggagtgacagggggcgtggtggtagccgtgggcgtggatttggaggccgtggtggaaggggtgacagaggccgtggtggaaggggtacgcctttcagacagaccgctggtacagctagtacaggaaagaagaccacctttggtgatgacgattgaagatccatggctggctattatagtgaaaaacgcaaactatattgtaccgttcagacctattgttatctgaggctgtactgcttttttgcttgataattcgacaattgtttttaccatttttaacatttggtgctatcaaagacatgactttttaagtttttataatatgagtagcggcaagttcaaatgttgttggtctttgaatttctgtgataga

SEQ ID NO: 10127 - DNA, 863 bp, Zea Mays
  misc_feature (1)..(2): n is a, c, g, or t
nngaattcgctactgttgaagctgctcagaaggctcttgaatttgttggtcatgacctgatgggacggcctctaaggattgacatggctaccgagaggggtgcatacactcctagcagaaggacaacggttctttcaagaagttcgctccaaggtcaggcaacaccgtgtttattaagggctttgacacctctggtggagaggaccagatccgcaccgctcttgaagagcattttggatcatgtggagatatcacccggatttcaattccaaaggattatgacactggtgtaagcaaaggaatggcgtacatggatttcaaggacccagattccttgaataaagcatacgagttgaatggaaccgaccttggtggctacagcttgtatgtcgatgaagccaagccgagacctgataacagcggtggcttcagtggtgacaggggtggtggcagagggaggagtggcggcttcagtggtggcagaggagggaggagtgacagggggcgtggtggtagccgtgggcgtggatttggaggccgtggtggaaggggtgacagaggccgtggtggaaggggtacgcctttcagacagaccgctggtacagctagtacaggaaagaagaccacctttggtgatgacgattgaagatccatggctggctattatagtgaaaaacgcaaactatattgtaccgttcagacctattgttatctgaggctgtactgcttttttgcttgataattcgacaattgtttttaccatttttaacatttggtgctatcaaagacatgactttttaagtttttataatatgagtagcggcaagttcaaatgttgttggtctttgaatttctgtgataga

SEQ ID NO: 10128 - DNA, 921 bp, Zea Mays
aaaacccgtcggtctgcattgaatgccgccataggtacgatttgtggaggttggcatccatcgtcacaagataatcatcgcagccccacgaacgacggtcatgcaacacatgcacaacctgaagcttcgtcgccagctgcatctgtgcaaaaccctctggacaacaacattgatgcctcgtggatgcttcctgattacagcatactacccacccaagataactactataggaatctgatgaaccaagatgatgcagataatttaggctcggaggattgcgtgcaagttgatcctcttgtagctaatatgaattcttagacaaaaccaaagggccgctcaaaaatttcactgatgatgaggacatcttactattctcagcgtatctaaatgttagcaaagatcctattgctggaagggaccaaaaagatggcagattttgggaaagaattgaaaagtattatcatgtcaatttaacatttgaatcagatcgcaattgctcttcgttgcgtcatcgatggggtataatccaaaaggaagtaagtcttttccaaagttactatgaaaccatagaaaggaagaatgaaagtggaaagacagtgaatgacaagattgctgatgctaaagctatgttccaaaccttaagaaaaaggcttttactttgtttcatgcttggaatattcttagacacgagccaaagtggtcatcaataaaggactccacaatggctaccaagaagctagatcctcacagcggtaatgaagatgatggacatgacgcccctagaccaccaggaaggaaagctaagaaagaaaaattgcgagcacgaaagcgagaggacaatgacaatgatgcattcatggaagaactaaaaaaatagagagtcaagactggagatagaaaatgatcgaaaggcacgagaag

SEQ ID NO: 10129 - DNA, 2083 bp, Zea Mays
cgcgcgctcaccgccaggttctgcatgcgctttgcggcgaggcgcgtggtcgtcgaggacgcgccacgtgggatggtcgacatagaggcgccttttccggtggcggtggcggaggcggagcagcagcaagagcagccggaggacgagagggagatgttgctggccgcggtgtcctccgaaccggtctcccagtctttggcaatccggagccagctgttttcaatgacgatgagcagatacttcttcagcctgaaacagcagttggcggcgaggagggtgacgaggttccccctttgcttgagatcacgacatacaatgaattcccagccacccaggagtccgtggcgcaggaggaattcgccatcttgatccatctcaaggctccgcatgtgccgtcgtgggtaagcacccgagcgccgctggatctggtgactgtgctcgacgtgagcgggagcatgtcgggccacaagcttgcgctcctgaagcgcgccatgaggttcgtgatcgaaaaccttgaccccagcgaccggctctccgtcgtcgccttctcctcgtcggcctggaggctgttcccgctccagaggatgaccgcctccggacagcagcagtcgctgcaggctgtcaactccctcgccgccgatggcggcaccaacatcgccgaggggctgcggaaggctgccagggtggtggaggacaggcaggccaggaacccggtgtgcagcatcatgctcctctccgacggcgtggactcccacaacctcccgccgcgggacggctcggcgccggactacgggccgctcgtcccgcgctccatccttcccgggagcgagcaccacgtgccgatccatgcctttggcttcggcatggaccacgactccagggcgatgcacgccgtcgcccagatgtccagcggcaccttctccttcatcgacatggcggggtcgatccaggacgccttcgcgcagtgcatcggcggcctcctcagcgtggtggcgcaggagacgcggctcggcgtcgactgcgccgacgatggcgtgctgctcacgtccatcaagtcgggcggctacgccagcggggtggacggcgacgggcgcggcgggttcgtcgacgtcggccgactctacgccgacgaggggagggacttcctcgtcaccgtgcgcgtcccgcagtcacgcggggacattgcgctcatccgcccgagctgtacctaccgcgacgcggtcaccatggagatggtgcgggtgggaggcgacccggtgacgctgctccgcgcggcgaaccctgcgaacgcggggatgtccctgcgtgtggagcgcgagtggcaccgcgtccacgccaccgaggacatagccgcggcgcagaccgccgcggaggagtacgactacgcgcgcgcggcttcgatcctggaggcccgccgcctgctgctggagtcgtgcgcgtcgctgtcctcggaccagcaaacgcaggcgctggtggccgagctgcgggagatgcaggagcgcgtgctgaacgcggagctgtacgaggggtctggccgcgcctacctcctgtccgggctgagctcccactcgtggcagcgtgccacggctcgtggcgactcgactgagctcacgggcctcgtccacagctaccagacgccgttcatgatcgacatgctcaacaggtcgcaggcgctccagccggaggtagcggaggcgctgagccggtccccgacgatcgcgtcgtcgcgcagctcggccccaactcccgcccctgcctcctccggctcgccgtggacgcgacgcgggcttcggtcgttcaggccggcaaagtctttcaccgggctgtcattgtgagtgcaggactgcaggttcgctgattccattcacaatgcatgcaaactggcatcttgcagtagcagtagctaggaggagcgcggaagaaaactatcaccattgatccgtttcttcgatactctattgtcgtagagaggatttggtattactggtttgtactgctgtttgtccgtggattaatcctgagacatgttgtttgaccatcgattcgggtgtttttgttctataaacgtttgtgctgtttgtcg

SEQ ID NO: 10130 - DNA, 457 bp, Zea Mays
tgaaaatactggttgcataataaatgtccagcgagaaatctgatgacagctctgatgagagttctgatgaaagtgatgaggaacctccacaaaagaaaactaagaattctgcaccttctggtgctgcaaaggctgccactaatgtttcaaagaaaaaaagcagcagtgatgaagatgatgaaagttcagaagaaagctctgatgatgaggatacagaacaagttgaaactaaggaaacttctgtagtcactacccagaagccggcacataatgaacctaaaactcctgccaaaagccaaagtcaggctactggttcaaagactatttttgttgggaatttagcctacagtatagagcgtgaacaagttaaggaattttttgaggaggctggtgaagttgttgatgttcgtttggctacttttgatgatgggagtttcaagggttttggacatgttcc

SEQ ID NO: 10131 - DNA, 817 bp, Zea Mays
atgaggatgaatcagaagataaacctgctgctaacctaaagaagcctccggttccctctgtgcaaaagaagacccaagaatctgacagctctgacagtgattctgatgaggatgaatcagatgatattcctgctaaagctcaagtagtagccaagaaaaaggaagaatctggtagcagttctgattctgatagtgaatttgagtctgacgatgaggatagcaatgcgaaaacagtacaacctgccaaggctgctgctattaaaaagaaggaagattctagtgagagctcagaaactgactcacagtcagattcagaagattcagaacctgaaaaacctactgtccctgcgaaaaggcctctagcaacaaataaaaagaatgaacaatccagcgagaaatctgatgacagctctgatgagagttctgatgaaagtgatgaggaacctccacaaaagaaaactaagaattctgcaccttctggtgctgcaaaggctgccactaatgtttcaaagaaaaaaagcagcagtgatgaagatgatgaaagttcagaagaaagctctgatgatgaggatacagaacaagttgaaactaaggaaacttctgtagtcactacccagaagccggcacataatgaacctaaaactcctgccaaaagccaaagtcaggctactggttcaaagactatttttgttgggaatttagcctacagtatagagcgtgaacaagttaaggaattttttgaggaggctggtgaagttgttgatgttcgtttggctacttttgatgatgggagtttcaagggttttggacatgttcc

SEQ ID NO: 10132 - DNA, 832 bp, Zea Mays
ttgcaggttaaggtccagccgaagaaggttattcaaccgaagaaaagtacacaacctgctaaacaggagtccagtgatgacagcagctctgagagctcctcagacgatgaaccttccaaaaaaccagttgccggttcaaaaaagcctcctgccagtagtagcagcagtgatgatagcagtgacagtgatgatagcagctctgatgaggaaccagcaaagaagcccacggtcctttcaaagaagcccactgtcctttcaaagaagcccactgtcctttcaaaaaaacctgtcacagcagtcagtaatggttcaaaacaggttaaacctgatagcagcagctctgacagtagctcagatgaggatgaaaaactgactcacagtcagattcagaagattcagaatccagcgagaaatctgatgacagctctgatgagagttctgatgaaagtgatgaggaacctccacaaaagaaaactaagaattctgcaccttctggtgctgcaaaggctgccactaatgtttcaaagaaaaaaagcagcagtgatgaagatgatgaaagttcagaagaaagctctgatgatgaggatacagaacaagttgaaactaaggaaacttctgtagtcactacccagaagccggcacataatgaacctaaaactcctgccaaaagccaaagtcaggctactggttcaaagactatttttgttgggaatttagcctacagtatagagcgtgaacaagttaaggaattttttgaggaggctggtgaagttgttgatgttcgtttggctacttttgatgatgggagtttcaagggttttggacatgttcc

SEQ ID NO: 10133 - DNA, 1158 bp, Zea Mays
ttgcaggttaaggtccagccgaagaaggttattcaaccgaagaaaagtacacaacctgctaaacaggagtccagtgatgacagcagctctgagagctcctcagacgatgaaccttccaaaaaaccagttgccggttcaaaaaagcctcctgccagtagtagcagcagtgatgatagcagtgacagtgatgatagcagctctgatgaggaaccagcaaagaagcccacggtcctttcaaagaagcccactgtcctttcaaagaagcccactgtcctttcaaaaaaacctgtcacagcagtcagtaatggttcaaaacaggttaaacctgatagcagcagctctgacagtagctcagatgaggatgaaaaacctgctgctaacctaaagaagcctccggttccctctgtgcaaaagaagacccaagaatctgacagctctgacagtgattctgatgaggatgaatcagatgatattcctgctaaagctcaagtagtagccaagaaaaaggaagaatctggtagcagttctgattctgatagtgaatttgagtctgacgatgaggatagcaatgcgaaaacagtacaacctgccaaggctgctgctattaaaaagaaggaagattctagtgagagctcagaaactgactcacagtcagattcagaagattcagaacctgaaaaacctactgtccctgcgaaaaggcctctagcaacaaataaaaagaatgaacaacgagaaatctgatgacagctctgatgagagttctgatgaaagtgatgaggaacctccacaaaagaaaactaagaattctgcaccttctggtgctgcaaaggctgccactaatgtttcaaagaaaaaaagcagcagtgatgaagatgatgaaagttcagaagaaagctctgatgatgaggatacagaacaagttgaaactaaggaaacttctgtagtcactacccagaagccggcacataatgaacctaaaactcctgccaaaagccaaagtcaggctactggttcaaagactatttttgttgggaatttagcctacagtatagagcgtgaacaagttaaggaattttttgaggaggctggtgaagttgttgatgttcgtttggctacttttgatgatgggagtttcaagggttttggacatgttcc

SEQ ID NO: 10134 - DNA, 1163 bp, Zea Mays
ttgcaggttaaggtccagccgaagaaggttattcaaccgaagaaaagtacacaacctgctaaacaggagtccagtgatgacagcagctctgagagctcctcagacgatgaaccttccaaaaaaccagttgccggttcaaaaaagcctcctgccagtagtagcagcagtgatgatagcagtgacagtgatgatagcagctctgatgaggaaccagcaaagaagcccacggtcctttcaaagaagcccactgtcctttcaaagaagcccactgtcctttcaaaaaaacctgtcacagcagtcagtaatggttcaaaacaggttaaacctgatagcagcagctctgacagtagctcagatgaggatgaaaaacctgctgctaacctaaagaagcctccggttccctctgtgcaaaagaagacccaagaatctgacagctctgacagtgattctgatgaggatgaatcagatgatattcctgctaaagctcaagtagtagccaagaaaaaggaagaatctggtagcagttctgattctgatagtgaatttgagtctgacgatgaggatagcaatgcgaaaacagtacaacctgccaaggctgctgctattaaaaagaaggaagattctagtgagagctcagaaactgactcacagtcagattcagaagattcagaacctgaaaaacctactgtccctgcgaaaaggcctctagcaacaaataaaaagaatgaacaatccagcgagaaatctgatgacagctctgatgagagttctgatgaaagtgatgaggaacctccacaaaagaaaactaagaattctgcaccttctggtgctgcaaaggctgccactaatgtttcaaagaaaaaaagcagcagtgatgaagatgatgaaagttcagaagaaagctctgatgatgaggatacagaacaagttgaaactaaggaaacttctgtagtcactacccagaagccggcacataatgaacctaaaactcctgccaaaagccaaagtcaggctactggttcaaagactatttttgttgggaatttagcctacagtatagagcgtgaacaagttaaggaattttttgaggaggctggtgaagttgttgatgttcgtttggctacttttgatgatgggagtttcaagggttttggacatgttcc

SEQ ID NO: 10135 - DNA, 1166 bp, Zea Mays
ttgcaggttaaggtccagccgaagaaggttattcaaccgaagaaaagtacacaacctgctaaacaggagtccagtgatgacagcagctctgagagctcctcagacgatgaaccttccaaaaaaccagttgccggttcaaaaaagcctcctgccagtagtagcagcagtgatgatagcagtgacagtgatgatagcagctctgatgaggaaccagcaaagaagcccacggtcctttcaaagaagcccactgtcctttcaaagaagcccactgtcctttcaaaaaaacctgtcacagcagtcagtaatggttcaaaacaggttaaacctgatagcagcagctctgacagtagctcagatgaggatgaaaaacctgctgctagcctaaagaagcctgttgttgcctctgtgcaaaagaagacccaagaatctgatagctctgacagtgattctgatgaggatgaatcagaagatgatattcctgctaaagctcaagtagtagccaagaaaaaggaagaatctggtagcagttctgattctgatagtgaatttgagtctgacgatgaggatagcaatgcgaaaacagtacaacctgccaaggctgctgctattaaaaagaaggaagattctagtgagagctcagaaactgactcacagtcagattcagaagattcagaacctgaaaaacctactgtccctgcgaaaaggcctctagcaacaaataaaaagaatgaacaatccagcgagaaatctgatgacagctctgatgagagttctgatgaaagtgatgaggaacctccacaaaagaaaactaagaattctgcaccttctggtgctgcaaaggctgccactaatgtttcaaagaaaaaaagcagcagtgatgaagatgatgaaagttcagaagaaagctctgatgatgaggatacagaacaagttgaaactaaggaaacttctgtagtcactacccagaagccggcacataatgaacctaaaactcctgccaaaagccaaagtcaggctactggttcaaagactatttttgttgggaatttagcctacagtatagagcgtgaacaagttaaggaattttttgaggaggctggtgaagttgttgatgttcgtttggctacttttgatgatgggagtttcaagggttttggacatgttcc

SEQ ID NO: 10136 - DNA, 1376 bp, Zea Mays
tcttcgccacttaactttgatgttaaggtccagccgaagaaggttattcaaccgaagaaaagtacacaacctgctaaacaggagtccagtgatgacagcagctctgagagctcctcagacgatgaaccttccaaaaaaccagttgccggttcaaaaaagcctcctgccagtagtagcagcagtgatgatagcagtgacagtgatgatagcagctctgatgaggaaccagcaaagaagcccacggtcctttcaaagaagcccactgtcctttcaaagaagcccactgtcctttcaaaaaaacctgtcacagcagtcagtaatggttcaaaacaggttaaacctgatagcagcagctctgacagtagctcagatgaggatgaaaaacctgctgctagcctaaagaagcctgttgttgcctctgtgcaaaagaagacccaagaatctgatagctctgacagtgattctgatgaggatgaatcagaagatgatattcctgctaaagctcaagtagtagccaagaaaaaggaagagtccagtagcagttctgattctgatagtgattctgagtccgaggatgagaaacctgctgctaacctaaagaagcctccggttccctctgtgcaaaagaagacccaagaatctgacagctctgacagtgattctgatgaggatgaatcagatgatattcctgctaaagctcaagtagtagccaagaaaaaggaagaatctggtagcagttctgattctgatagtgaatttgagtctgacgatgaggatagcaatgcgaaaacagtacaacctgccaaggctgctgctattaaaaagaaggaagattctagtgagagctcagaaactgactcacagtcagattcagaagattcagaacctgaaaaacctactgtccctgcgaaaaggcctctagcaacaaataaaaagaatgaacaatccagcgagaaatctgatgacagctctgatgagagttctgatgaaagtgatgaggaacctccacaaaagaaaactaagaattctgcaccttctggtgctgcaaaggctgccactaatgtttcaaagaaaaaaagcagcagtgatgaagatgatgaaagttcagaagaaagctctgatgatgaggatacagaacaagttgaaactaaggaaacttctgtagtcactacccagaagccggcacataatgaacctaaaactcctgccaaaagccaaagtcaggctactggttcaaagactatttttgttgggaatttagcctacagtatagagcgtgaacaagttaaggaattttttgaggaggctggtgaagttgttgatgttcgtttggctacttttgatgatgggagtttcaagggttttggacatgttcc

SEQ ID NO: 10137 - DNA, 351 bp, Zea Mays
attaaatagtccccatgtctacccataatgctttatgccagtggaagcatgtcctcacacacgcatgaaaaataacgacattatatctcctaccacataccaggttctcgggtttgactttaaaaacatcggtttaccaattcatctgcattaccaccaaaatgcaaaaaaagagaacctagagtttttttacacgcaacgcatgagtacataaacatttttagacggtcctattacagtttttatgcataagataaaggaatgtgggacggttagttgttgtgacactctttatgagtctaacatgacctgttttgaatagaaacatctatttgtgcatatagaggtctc

SEQ ID NO: 10138 - DNA, 2735 bp, Zea Mays
cactcctccaaccaagcgttctgcttccgtcctccaatgcccacagtttctgagagaaaagaaaccgacagctcgacccggatcatctctgactccctgcagaatcaatcatcggttccacactatctcttccaaaatttcgttgataacacctggcaagttttttatcgcacctaaaattctatctgtctgttgtctggcgctgctgtatcactctgaatttttggttctggcccaaatcttgttctttttccggttcttctgatcccgtctttatcctctcaaatccactaaaccactccaaagatagaatttttctgcatccgaagcccagatatttttttccttcggtttgttccggcggcaggggtgcgaaatccctcaagctggcaaccccggcgcggccatggacctccccgagagctctgtcccccgcgcagacaagggcccggcccctcgccgtctttgccccgtcgaccgcgaggagctggtgcgcgccatggcacagtcgctctactcgctcgggtacaggcgggcggcggccgcgctcgaggcggagtccggcgtgccactgtacccgccggagcatgaccgcctgctgctggaagtgatggccggtcagtgggacgcgtccgcggagatcgtccgctcggtcgccggcgtcggcgaagcggaccgcacggtcgcggagttcctggtgtggaggggctactacttggagctcctggggatgcgcggtgacgctggcctgcgccgggcgagggaggtgctacggcgtcggattgcgccgctcggcgtcgacaggaggtgcgtacacttgctggcgcgcgccatggtctccagcgagggggccgttgcgccggaggccgtggttgggtggaggattgcggtgttcttggatttggtcgaggtgttgccaccatggttccatgtggctagtgggcggttagagcatttggtggagagtgcggtaaccaagcaagtagaatcttgtatatatcacaatttgccggatgagatcactctgtttgaagatcataggtgccatgaagagcatatcccctcccaatgtgcacaggttctcaaataatggaagctacctggtgtcatcttcaagtgattgcactgccataatttggaaggtggaaaatgatgatacattgaccaagaagcactgcctccagggtcacgaaaaaccaatttcctttgcttcctggagcccaaatgacagaatgctgctcacttgtggtactggtgaatcattaaaactgtggaatgttgatactggtgaatgtaaccttaaattcagaggctcagcagactgcatcatcagttcatgtgcatggtttcctaattcggagaaaatagtatgtgccagctcggagcctgcaagtgctccaaataggatcttcacttgtgatctagaaggccaaaatctggaagtatgggctggagatagaataccaaaagtcagtgatctcgctgtgacacctgatggccgacacctaatctttgtatcttgcaacgatatctggattagggaacttccaagggggcgggaatggagatttcgtgagaagcagacgatttcatctctttctctctcaggtgatgggcagtcactcattgtgaaccttaacagtcaggagattcatctgtggaaaattaatgaaagttgtactgtgcctgaaaagttcatggggcacaagcaagacaagtttgtgattaggtcttgctttggtggttcaaactcttcgttcattgctagtggcagtgaggattcacaggtctacatttggaagaggcacgtggagatgccgattaaggttctacatggccacacgatgattgtgaactgtgtaagctggaatcctgcaaggccccacatgctggcttctgctagcgacgaccgcacggttcgaatatgggtagggcgcaaaaatgcaacaaagtaaacgctgttgaagtgtgaagttttgtatgtctgtgtaaatagttgtacatctggactgcatccacaaacctgtttgggacaatgctctgttcttcacccctgatgaatatgtcgtcgtagctatttgttcagaaataaacctgcaacagccataggtagccggtgctgctgtgtccagatgtgtgcctggctaaccggtgagttttgacatgtgtacaggacaaagatgcatcagaactttgtacatcttgttagtatatgccttggacactcgaagtgctgaaatatgccttctgttgctgtggatctagtgttcgtgtccttttatctttttcgcttggttcatgtgctatcttgctttttgtttagaataccccataacttctttctgatgtccttttcaggtgactttgcaacctttggcatggtcaacaaatatgtataagatttgtaacagcattataattggctagaatcgtgcactagcaaactgtccagcacctcttagcacattttatgtacttgtagttttgctagacagttttggggtgatatcttttcacccttgagagaggggatgaatagatgatattgtaaattttgctcaaaacaacacaaacttggtttataatatgggttagagtaaataaaaccaagtttaagagtatagagaagagagataaaaactcttcacttgattgctctcttgaaataagtattaaactaggagcaatattccaagtgaatatgagaactcaagaagtcaataattgcaataaag

SEQ ID NO: 10139 - DNA, 4268 bp, Zea Mays
cactcctccaaccaagcgttctgcttccgtcctccaatgcccacagtttctgagagaaaagaaaccgacagctcgacccggatcatctctgactccctgcagaatcaatcatcggttccacactatctcttccaaaatttcgttgataacacctggcaagttttttatcgcacctaaaattctatctgtctgttgtctggcgctgctgtatcactctgaatttttggttctggcccaaatcttgttctttttccggttcttctgatcccgtctttatcctctcaaatccactaaaccactccaaagatagaatttttctgcatccgaagcccagatatttttttccttcggtttgttccggcggcaggggtgcgaaatccctcaagctggcaaccccggcgcggccatggacctccccgagagctctgtcccccgcgcagacaagggcccggcccctcgccgtctttgccccgtcgaccgcgaggagctggtgcgcgccatggcacagtcgctctactcgctcgggtacaggcgggcggcggccgcgctcgaggcggagtccggcgtgccactgtacccgccggagcatgaccgcctgctgctggaagtgatggccggtcagtgggacgcgtccgcggagatcgtccgctcggtcgccggcgtcggcgaagcggaccgcacggtcgcggagttcctggtgtggaggggctactacttggagctcctggggatgcgcggtgacgctggcctgcgccgggcgagggaggtgctacggcgtcggattgcgccgctcggcgtcgacaggaggtgcgtacacttgctggcgcgcgccatggtctccagcgagggggccgttgcgccggaggccgtggttgggtggaggattgcggtgttcttggatttggtcgaggtgttgccaccatggttccatgtggctagtgggcggttagagcatttggtggagagtgcggtaaccaagcaagtagaatcttgtatatatcacaatttgccggatgagatcactctgtttgaagatcataggtgccatgaagagcatatcccctcccaatgtgcacaggtgcgagttaaacagattgttgacttgtttcccagtttcgacaaatgtccaagcttatcagttgtataagaatgcggaacgaaattaccgaactcacatatcaaggccatcaatttacaatagggaaatatttcacgaacaacccatttctacatatagcagcactccttaaaagttttagatatttggtcttcttccaagttagtttaataagcaattcagtatggctattcatttcagcgatttaaatttcttctataccatgtttgcaatgtatgcagattgatccctatctatatttgattttggaagcataaaagtgcaatgcagttgggaaatgcttctcaaagtacctcagcaatattaaatttctcctgtaccatgtttgcaatgtatgcaaattcatccctctctatctgattttaaagcattaaagtgcaatgcagctgggaaatgcttctcaaagcgccttacattatttttcatccagtaaagcagggtttggataatttcagaatctttaagaataaagtgaaagagaacagcacagttcaaacctttatttcgaaatttcttttgaagcaccagtgctcattgttattaaacccgtgcttcatcttcctgtatgaactgtctatgccagttgcccaccctacttagttcacatgaaatttattgtcggtagagaaaagataatacacaggaggaactgtgcatatttgattttgatgagcgtgtgtatagttatacccttgaattcagccactagaaaattgtcataagagtccatccatggattgcagccattgctgaatgctaaatgaaattggttgtggtctaagtcttaacacacttttgaagtagcataaaaaagtatcagttcattcagagtatttttgttgcacctatattaccactgtagaaactatcacaattcacaaaaaaacattttttaatcacccatttccaaaaactacatacttgttcatattcttttcacaaaatgacacatccataacatgaaatggaactgaaatgatagacttgtctgagttactggatctagatgaatttgacattctagatgtgattgcccttccagggtgatatatttccctgttcctcgtgtcacacataaaaacaggtggaataaacacatggatcaaaacaataagcatgatggtgctcttacagaagtgcagttttgtaaaattatgcataattatacataatgctttgaaacatgtgcttaaatgtgtggttgtgatatttcttttagaatgacagtagtggtttgctatgaaatttactctctctctttctctctctctctctctctctctctctctctctctctctctctcataaaatggatgactattcaggtaaacttctcatgtagtttcaggactcacagccctataaaattttcatgctgggggtttggggctgtattgcaaagttatgtatttcacatatccatgcctgtttgcagatattatgtggtcataataatgaagtttggtttgtaaggttctcaaataatggaagctacctggtgtcatcttcaagtgattgcactgccataatttggaaggtggaaaatgatgatacattgaccaagaagcactgcctccagggtcacgaaaaaccaatttcctttgcttcctggagcccaaatgacagaatgctgctcacttgtggtactggtgaatcattaaaactgtggaatgttgatactggtgaatgtaaccttaaattcagaggctcagcagactgcatcatcagttcatgtgcatggtttcctaattcggagaaaatagtatgtgccagctcggagcctgcaagtgctccaaataggatcttcacttgtgatctagaaggccaaaatctggaagtatgggctggagatagaataccaaaagtcagtgatctcgctgtgacacctgatggccgacacctaatctttgtatcttgcaacgatatctggattagggaacttccaagggggcgggaatggagatttcgtgagaagcagacgatttcatctctttctctctcaggtgatgggcagtcactcattgtgaaccttaacagtcaggagattcatctgtggaaaattaatgaaagttgtactgtgcctgaaaagttcatggggcacaagcaagacaagtttgtgattaggtcttgctttggtggttcaaactcttcgttcattgctagtggcagtgaggattcacaggtctacatttggaagaggcacgtggagatgccgattaaggttctacatggccacacgatgattgtgaactgtgtaagctggaatcctgcaaggccccacatgctggcttctgctagcgacgaccgcacggttcgaatatgggtagggcgcaaaaatgcaacaaagtaaacgctgttgaagtgtgaagttttgtatgtctgtgtaaatagttgtacatctggactgcatccacaaacctgtttgggacaatgctctgttcttcacccctgatgaatatgtcgtcgtagctatttgttcagaaataaacctgcaacagccataggtagccggtgctgctgtgtccagatgtgtgcctggctaaccggtgagttttgacatgtgtacaggacaaagatgcatcagaactttgtacatcttgttagtatatgccttggacactcgaagtgctgaaatatgccttctgttgctgtggatctagtgttcgtgtccttttatctttttcgcttggttcatgtgctatcttgctttttgtttagaataccccataacttctttctgatgtccttttcaggtgactttgcaacctttggcatggtcaacaaatatgtataagatttgtaacagcattataattggctagaatcgtgcactagcaaactgtccagcacctcttagcacattttatgtacttgtagttttgctagacagttttggggtgatatcttttcacccttgagagaggggatgaatagatgatattgtaaattttgctcaaaacaacacaaacttggtttataatatgggttagagtaaataaaaccaagtttaagagtatagagaagagagataaaaactcttcacttgattgctctcttgaaataagtattaaactaggagcaatattccaagtgaatatgagaactcaagaagtcaataattgcaataaag

SEQ ID NO: 10140 - DNA, 3127 bp, Zea Mays
cactcctccaaccaagcgttctgcttccgtcctccaatgcccacagtttctgagagaaaagaaaccgacagctcgacccggatcatctctgactccctgcagaatcaatcatcggttccacactatctcttccaaaatttcgttgataacacctggcaagttttttatcgcacctaaaattctatctgtctgttgtctggcgctgctgtatcactctgaatttttggttctggcccaaatcttgttctttttccggttcttctgatcccgtctttatcctctcaaatccactaaaccactccaaagatagaatttttctgcatccgaagcccagatatttttttccttcggtttgttccggcggcaggggtgcgaaatccctcaagctggcaaccccggcgcggccatggacctccccgagagctctgtcccccgcgcagacaagggcccggcccctcgccgtctttgccccgtcgaccgcgaggagctggtgcgcgccatggcacagtcgctctactcgctcgggtacaggcgggcggcggccgcgctcgaggcggagtccggcgtgccactgtacccgccggagcatgaccgcctgctgctggaagtgatggccggtcagtgggacgcgtccgcggagatcgtccgctcggtcgccggcgtcggcgaagcggaccgcacggtcgcggagttcctggtgtggaggggctactacttggagctcctggggatgcgcggtgacgctggcctgcgccgggcgagggaggtgctacggcgtcggattgcgccgctcggcgtcgacaggaggtgcgtacacttgctggcgcgcgccatggtctccagcgagggggccgttgcgccggaggccgtggttgggtggaggattgcggtgttcttggatttggtcgaggtgttgccaccatggttccatgtggctagtgggcggttagagcatttggtggagagtgcggtaaccaagcaagtagaatcttgtatatatcacaatttgccggatgagatcactctgtttgaagatcataggtgccatgaagagcatatcccctcccaatgtgcacaggtgcgagttaaacagattgttgacttgtttcccagtttcgacaaatgtccaagcttatcagttgtataagaatgcggaacgaaattaccgaactcacatatcaaggccatcaatttacaatagggaaatatttcacgaacaacccatttctacatatagcagcactccttaaaagttttagatatttggtcttcttccaagttagtttaataagcaattcagtatggctattcatttcagcgatttaaatttcttctataccatgtttgcaatgtatgcagattgatccctatctatatttgattttggaagcataaaagtgcaatgcagttgggaaatgcttctcaaagtacctcagcaatattaaatttctcctgtaccatgtttgcaatgttctcaaataatggaagctacctggtgtcatcttcaagtgattgcactgccataatttggaaggtggaaaatgatgatacattgaccaagaagcactgcctccagggtcacgaaaaaccaatttcctttgcttcctggagcccaaatgacagaatgctgctcacttgtggtactggtgaatcattaaaactgtggaatgttgatactggtgaatgtaaccttaaattcagaggctcagcagactgcatcatcagttcatgtgcatggtttcctaattcggagaaaatagtatgtgccagctcggagcctgcaagtgctccaaataggatcttcacttgtgatctagaaggccaaaatctggaagtatgggctggagatagaataccaaaagtcagtgatctcgctgtgacacctgatggccgacacctaatctttgtatcttgcaacgatatctggattagggaacttccaagggggcgggaatggagatttcgtgagaagcagacgatttcatctctttctctctcaggtgatgggcagtcactcattgtgaaccttaacagtcaggagattcatctgtggaaaattaatgaaagttgtactgtgcctgaaaagttcatggggcacaagcaagacaagtttgtgattaggtcttgctttggtggttcaaactcttcgttcattgctagtggcagtgaggattcacaggtctacatttggaagaggcacgtggagatgccgattaaggttctacatggccacacgatgattgtgaactgtgtaagctggaatcctgcaaggccccacatgctggcttctgctagcgacgaccgcacggttcgaatatgggtagggcgcaaaaatgcaacaaagtaaacgctgttgaagtgtgaagttttgtatgtctgtgtaaatagttgtacatctggactgcatccacaaacctgtttgggacaatgctctgttcttcacccctgatgaatatgtcgtcgtagctatttgttcagaaataaacctgcaacagccataggtagccggtgctgctgtgtccagatgtgtgcctggctaaccggtgagttttgacatgtgtacaggacaaagatgcatcagaactttgtacatcttgttagtatatgccttggacactcgaagtgctgaaatatgccttctgttgctgtggatctagtgttcgtgtccttttatctttttcgcttggttcatgtgctatcttgctttttgtttagaataccccataacttctttctgatgtccttttcaggtgactttgcaacctttggcatggtcaacaaatatgtataagatttgtaacagcattataattggctagaatcgtgcactagcaaactgtccagcacctcttagcacattttatgtacttgtagttttgctagacagttttggggtgatatcttttcacccttgagagaggggatgaatagatgatattgtaaattttgctcaaaacaacacaaacttggtttataatatgggttagagtaaataaaaccaagtttaagagtatagagaagagagataaaaactcttcacttgattgctctcttgaaataagtattaaactaggagcaatattccaagtgaatatgagaactcaagaagtcaataattgcaataaag

SEQ ID NO: 10141 - DNA, 2884 bp, Zea Mays
cactcctccaaccaagcgttctgcttccgtcctccaatgcccacagtttctgagagaaaagaaaccgacagctcgacccggatcatctctgactccctgcagaatcaatcatcggttccacactatctcttccaaaatttcgttgataacacctggcaagttttttatcgcacctaaaattctatctgtctgttgtctggcgctgctgtatcactctgaatttttggttctggcccaaatcttgttctttttccggttcttctgatcccgtctttatcctctcaaatccactaaaccactccaaagatagaatttttctgcatccgaagcccagatatttttttccttcggtttgttccggcggcaggggtgcgaaatccctcaagctggcaaccccggcgcggccatggacctccccgagagctctgtcccccgcgcagacaagggcccggcccctcgccgtctttgccccgtcgaccgcgaggagctggtgcgcgccatggcacagtcgctctactcgctcgggtacaggcgggcggcggccgcgctcgaggcggagtccggcgtgccactgtacccgccggagcatgaccgcctgctgctggaagtgatggccggtcagtgggacgcgtccgcggagatcgtccgctcggtcgccggcgtcggcgaagcggaccgcacggtcgcggagttcctggtgtggaggggctactacttggagctcctggggatgcgcggtgacgctggcctgcgccgggcgagggaggtgctacggcgtcggattgcgccgctcggcgtcgacaggaggtgcgtacacttgctggcgcgcgccatggtctccagcgagggggccgttgcgccggaggccgtggttgggtggaggattgcggtgttcttggatttggtcgaggtgttgccaccatggttccatgtggctagtgggcggttagagcatttggtggagagtgcggtaaccaagcaagtagaatcttgtatatatcacaatttgccggatgagatcactctgtttgaagatcataggtgccatgaagagcatatcccctcccaatgtgcacagattgatccctatctatatttgattttggaagcataaaagtgcaatgcagttgggaaatgcttctcaaagtacctcagcaatattaaatttctcctgtaccatgtttgcaatatattatgtggtcataataatgaagtttggtttgtaaggttctcaaataatggaagctacctggtgtcatcttcaagtgattgcactgccataatttggaaggtggaaaatgatgatacattgaccaagaagcactgcctccagggtcacgaaaaaccaatttcctttgcttcctggagcccaaatgacagaatgctgctcacttgtggtactggtgaatcattaaaactgtggaatgttgatactggtgaatgtaaccttaaattcagaggctcagcagactgcatcatcagttcatgtgcatggtttcctaattcggagaaaatagtatgtgccagctcggagcctgcaagtgctccaaataggatcttcacttgtgatctagaaggccaaaatctggaagtatgggctggagatagaataccaaaagtcagtgatctcgctgtgacacctgatggccgacacctaatctttgtatcttgcaacgatatctggattagggaacttccaagggggcgggaatggagatttcgtgagaagcagacgatttcatctctttctctctcaggtgatgggcagtcactcattgtgaaccttaacagtcaggagattcatctgtggaaaattaatgaaagttgtactgtgcctgaaaagttcatggggcacaagcaagacaagtttgtgattaggtcttgctttggtggttcaaactcttcgttcattgctagtggcagtgaggattcacaggtctacatttggaagaggcacgtggagatgccgattaaggttctacatggccacacgatgattgtgaactgtgtaagctggaatcctgcaaggccccacatgctggcttctgctagcgacgaccgcacggttcgaatatgggtagggcgcaaaaatgcaacaaagtaaacgctgttgaagtgtgaagttttgtatgtctgtgtaaatagttgtacatctggactgcatccacaaacctgtttgggacaatgctctgttcttcacccctgatgaatatgtcgtcgtagctatttgttcagaaataaacctgcaacagccataggtagccggtgctgctgtgtccagatgtgtgcctggctaaccggtgagttttgacatgtgtacaggacaaagatgcatcagaactttgtacatcttgttagtatatgccttggacactcgaagtgctgaaatatgccttctgttgctgtggatctagtgttcgtgtccttttatctttttcgcttggttcatgtgctatcttgctttttgtttagaataccccataacttctttctgatgtccttttcaggtgactttgcaacctttggcatggtcaacaaatatgtataagatttgtaacagcattataattggctagaatcgtgcactagcaaactgtccagcacctcttagcacattttatgtacttgtagttttgctagacagttttggggtgatatcttttcacccttgagagaggggatgaatagatgatattgtaaattttgctcaaaacaacacaaacttggtttataatatgggttagagtaaataaaaccaagtttaagagtatagagaagagagataaaaactcttcacttgattgctctcttgaaataagtattaaactaggagcaatattccaagtgaatatgagaactcaagaagtcaataattgcaataaag

SEQ ID NO: 10142 - DNA, 3165 bp, Zea Mays
cactcctccaaccaagcgttctgcttccgtcctccaatgcccacagtttctgagagaaaagaaaccgacagctcgacccggatcatctctgactccctgcagaatcaatcatcggttccacactatctcttccaaaatttcgttgataacacctggcaagttttttatcgcacctaaaattctatctgtctgttgtctggcgctgctgtatcactctgaatttttggttctggcccaaatcttgttctttttccggttcttctgatcccgtctttatcctctcaaatccactaaaccactccaaagatagaatttttctgcatccgaagcccagatatttttttccttcggtttgttccggcggcaggggtgcgaaatccctcaagctggcaaccccggcgcggccatggacctccccgagagctctgtcccccgcgcagacaagggcccggcccctcgccgtctttgccccgtcgaccgcgaggagctggtgcgcgccatggcacagtcgctctactcgctcgggtacaggcgggcggcggccgcgctcgaggcggagtccggcgtgccactgtacccgccggagcatgaccgcctgctgctggaagtgatggccggtcagtgggacgcgtccgcggagatcgtccgctcggtcgccggcgtcggcgaagcggaccgcacggtcgcggagttcctggtgtggaggggctactacttggagctcctggggatgcgcggtgacgctggcctgcgccgggcgagggaggtgctacggcgtcggattgcgccgctcggcgtcgacaggaggtgcgtacacttgctggcgcgcgccatggtctccagcgagggggccgttgcgccggaggccgtggttgggtggaggattgcggtgttcttggatttggtcgaggtgttgccaccatggttccatgtggctagtgggcggttagagcatttggtggagagtgcggtaaccaagcaagtagaatcttgtatatatcacaatttgccggatgagatcactctgtttgaagatcataggtgccatgaagagcatatcccctcccaatgtgcacaggtgcgagttaaacagattgttgacttgtttcccagtttcgacaaatgtccaagcttatcagttgtataagaatgcggaacgaaattaccgaactcacatatcaaggccatcaatttacaatagggaaatatttcacgaacaacccatttctacatatagcagcactccttaaaagttttagatatttggtcttcttccaagttagtttaataagcaattcagtatggctattcatttcagcgatttaaatttcttctataccatgtttgcaatgtatgcagattgatccctatctatatttgattttggaagcataaaagtgcaatgcagttgggaaatgcttctcaaagtacctcagcaatattaaatttctcctgtaccatgtttgcaatatattatgtggtcataataatgaagtttggtttgtaaggttctcaaataatggaagctacctggtgtcatcttcaagtgattgcactgccataatttggaaggtggaaaatgatgatacattgaccaagaagcactgcctccagggtcacgaaaaaccaatttcctttgcttcctggagcccaaatgacagaatgctgctcacttgtggtactggtgaatcattaaaactgtggaatgttgatactggtgaatgtaaccttaaattcagaggctcagcagactgcatcatcagttcatgtgcatggtttcctaattcggagaaaatagtatgtgccagctcggagcctgcaagtgctccaaataggatcttcacttgtgatctagaaggccaaaatctggaagtatgggctggagatagaataccaaaagtcagtgatctcgctgtgacacctgatggccgacacctaatctttgtatcttgcaacgatatctggattagggaacttccaagggggcgggaatggagatttcgtgagaagcagacgatttcatctctttctctctcaggtgatgggcagtcactcattgtgaaccttaacagtcaggagattcatctgtggaaaattaatgaaagttgtactgtgcctgaaaagttcatggggcacaagcaagacaagtttgtgattaggtcttgctttggtggttcaaactcttcgttcattgctagtggcagtgaggattcacaggtctacatttggaagaggcacgtggagatgccgattaaggttctacatggccacacgatgattgtgaactgtgtaagctggaatcctgcaaggccccacatgctggcttctgctagcgacgaccgcacggttcgaatatgggtagggcgcaaaaatgcaacaaagtaaacgctgttgaagtgtgaagttttgtatgtctgtgtaaatagttgtacatctggactgcatccacaaacctgtttgggacaatgctctgttcttcacccctgatgaatatgtcgtcgtagctatttgttcagaaataaacctgcaacagccataggtagccggtgctgctgtgtccagatgtgtgcctggctaaccggtgagttttgacatgtgtacaggacaaagatgcatcagaactttgtacatcttgttagtatatgccttggacactcgaagtgctgaaatatgccttctgttgctgtggatctagtgttcgtgtccttttatctttttcgcttggttcatgtgctatcttgctttttgtttagaataccccataacttctttctgatgtccttttcaggtgactttgcaacctttggcatggtcaacaaatatgtataagatttgtaacagcattataattggctagaatcgtgcactagcaaactgtccagcacctcttagcacattttatgtacttgtagttttgctagacagttttggggtgatatcttttcacccttgagagaggggatgaatagatgatattgtaaattttgctcaaaacaacacaaacttggtttataatatgggttagagtaaataaaaccaagtttaagagtatagagaagagagataaaaactcttcacttgattgctctcttgaaataagtattaaactaggagcaatattccaagtgaatatgagaactcaagaagtcaataattgcaataaag

SEQ ID NO: 10143 - DNA, 3064 bp, Zea Mays
cactcctccaaccaagcgttctgcttccgtcctccaatgcccacagtttctgagagaaaagaaaccgacagctcgacccggatcatctctgactccctgcagaatcaatcatcggttccacactatctcttccaaaatttcgttgataacacctgattgatccctatctatatttgattttggaagcataaaagtgcaatgcagttgggaaatgcttctcaaagtacctcagcaatattaaatttctcctgtaccatgtttgcaatgtatgcaaattcatccctctctatctgattttaaagcattaaagtgcaatgcagctgggaaatgcttctcaaagcgccttacattatttttcatccagtaaagcagggtttggataatttcagaatctttaagaataaagtgaaagagaacagcacagttcaaacctttatttcgaaatttcttttgaagcaccagtgctcattgttattaaacccgtgcttcatcttcctgtatgaactgtctatgccagttgcccaccctacttagttcacatgaaatttattgtcggtagagaaaagataatacacaggaggaactgtgcatatttgattttgatgagcgtgtgtatagttatacccttgaattcagccactagaaaattgtcataagagtccatccatggattgcagccattgctgaatgctaaatgaaattggttgtggtctaagtcttaacacacttttgaagtagcataaaaaagtatcagttcattcagagtatttttgttgcacctatattaccactgtagaaactatcacaattcacaaaaaaacattttttaatcacccatttccaaaaactacatacttgttcatattcttttcacaaaatgacacatccataacatgaaatggaactgaaatgatagacttgtctgagttactggatctagatgaatttgacattctagatgtgattgcccttccagggtgatatatttccctgttcctcgtgtcacacataaaaacaggtggaataaacacatggatcaaaacaataagcatgatggtgctcttacagaagtgcagttttgtaaaattatgcataattatacataatgctttgaaacatgtgcttaaatgtgtggttgtgatatttcttttagaatgacagtagtggtttgctatgaaatttactctctctctttctctctctctctctctctctctctctctctctctctctctctcataaaatggatgactattcaggtaaacttctcatgtagtttcaggactcacagccctataaaattttcatgctgggggtttggggctgtattgcaaagttatgtatttcacatatccatgcctgtttgcagatattatgtggtcataataatgaagtttggtttgtaaggttctcaaataatggaagctacctggtgtcatcttcaagtgattgcactgccataatttggaaggtggaaaatgatgatacattgaccaagaagcactgcctccagggtcacgaaaaaccaatttcctttgcttcctggagcccaaatgacagaatgctgctcacttgtggtactggtgaatcattaaaactgtggaatgttgatactggtgaatgtaaccttaaattcagaggctcagcagactgcatcatcagttcatgtgcatggtttcctaattcggagaaaatagtatgtgccagctcggagcctgcaagtgctccaaataggatcttcacttgtgatctagaaggccaaaatctggaagtatgggctggagatagaataccaaaagtcagtgatctcgctgtgacacctgatggccgacacctaatctttgtatcttgcaacgatatctggattagggaacttccaagggggcgggaatggagatttcgtgagaagcagacgatttcatctctttctctctcaggtgatgggcagtcactcattgtgaaccttaacagtcaggagattcatctgtggaaaattaatgaaagttgtactgtgcctgaaaagttcatggggcacaagcaagacaagtttgtgattaggtcttgctttggtggttcaaactcttcgttcattgctagtggcagtgaggattcacaggtctacatttggaagaggcacgtggagatgccgattaaggttctacatggccacacgatgattgtgaactgtgtaagctggaatcctgcaaggccccacatgctggcttctgctagcgacgaccgcacggttcgaatatgggtagggcgcaaaaatgcaacaaagtaaacgctgttgaagtgtgaagttttgtatgtctgtgtaaatagttgtacatctggactgcatccacaaacctgtttgggacaatgctctgttcttcacccctgatgaatatgtcgtcgtagctatttgttcagaaataaacctgcaacagccataggtagccggtgctgctgtgtccagatgtgtgcctggctaaccggtgagttttgacatgtgtacaggacaaagatgcatcagaactttgtacatcttgttagtatatgccttggacactcgaagtgctgaaatatgccttctgttgctgtggatctagtgttcgtgtccttttatctttttcgcttggttcatgtgctatcttgctttttgtttagaataccccataacttctttctgatgtccttttcaggtgactttgcaacctttggcatggtcaacaaatatgtataagatttgtaacagcattataattggctagaatcgtgcactagcaaactgtccagcacctcttagcacattttatgtacttgtagttttgctagacagttttggggtgatatcttttcacccttgagagaggggatgaatagatgatattgtaaattttgctcaaaacaacacaaacttggtttataatatgggttagagtaaataaaaccaagtttaagagtatagagaagagagataaaaactcttcacttgattgctctcttgaaataagtattaaactaggagcaatattccaagtgaatatgagaactcaagaagtcaataattgcaataaag

SEQ ID NO: 10144 - DNA, 2502 bp, Zea Mays
cactcctccaaccaagcgttctgcttccgtcctccaatgcccacagtttctgagagaaaagaaaccgacagctcgacccggatcatctctgactccctgcagaatcaatcatcggttccacactatctcttccaaaatttcgttgataacacctggcaagttttttatcgcacctaaaattctatctgtctgttgtctggcgctgctgtatcactctgaatttttggttctggcccaaatcttgttctttttccggttcttctgatcccgtctttatcctctcaaatccactaaaccactccaaagatagaatttttctgcatccgaagcccagatatttttttccttcggtttgttccggcggcaggggtgcgaaatccctcaagctggcaaccccggcgcggccatggacctccccgagagctctgtcccccgcgcagacaagggcccggcccctcgccgtctttgccccgtcgaccgcgaggagctggtgcgcgccatggcacagtcgctctactcgctcgggtacaggcgggcggcggccgcgctcgaggcggagtccggcgtgccactgtacccgccggagcatgaccgcctgctgctggaagtgatggccggtcagtgggacgcgtccgcggagatcgtccgctcggtcgccggcgtcggcgaagcggaccgcacggtcgcggagttcctggtgtggaggggctactacttggagctcctggggatgcgcggtgacgctggcctgcgccgggcgagggaggtgctacggcgtcggattgcgccgctcggcgtcgacaggagatattatgtggtcataataatgaagtttggtttgtaaggttctcaaataatggaagctacctggtgtcatcttcaagtgattgcactgccataatttggaaggtggaaaatgatgatacattgaccaagaagcactgcctccagggtcacgaaaaaccaatttcctttgcttcctggagcccaaatgacagaatgctgctcacttgtggtactggtgaatcattaaaactgtggaatgttgatactggtgaatgtaaccttaaattcagaggctcagcagactgcatcatcagttcatgtgcatggtttcctaattcggagaaaatagtatgtgccagctcggagcctgcaagtgctccaaataggatcttcacttgtgatctagaaggccaaaatctggaagtatgggctggagatagaataccaaaagtcagtgatctcgctgtgacacctgatggccgacacctaatctttgtatcttgcaacgatatctggattagggaacttccaagggggcgggaatggagatttcgtgagaagcagacgatttcatctctttctctctcaggtgatgggcagtcactcattgtgaaccttaacagtcaggagattcatctgtggaaaattaatgaaagttgtactgtgcctgaaaagttcatggggcacaagcaagacaagtttgtgattaggtcttgctttggtggttcaaactcttcgttcattgctagtggcagtgaggattcacaggtctacatttggaagaggcacgtggagatgccgattaaggttctacatggccacacgatgattgtgaactgtgtaagctggaatcctgcaaggccccacatgctggcttctgctagcgacgaccgcacggttcgaatatgggtagggcgcaaaaatgcaacaaagtaaacgctgttgaagtgtgaagttttgtatgtctgtgtaaatagttgtacatctggactgcatccacaaacctgtttgggacaatgctctgttcttcacccctgatgaatatgtcgtcgtagctatttgttcagaaataaacctgcaacagccataggtagccggtgctgctgtgtccagatgtgtgcctggctaaccggtgagttttgacatgtgtacaggacaaagatgcatcagaactttgtacatcttgttagtatatgccttggacactcgaagtgctgaaatatgccttctgttgctgtggatctagtgttcgtgtccttttatctttttcgcttggttcatgtgctatcttgctttttgtttagaataccccataacttctttctgatgtccttttcaggtgactttgcaacctttggcatggtcaacaaatatgtataagatttgtaacagcattataattggctagaatcgtgcactagcaaactgtccagcacctcttagcacattttatgtacttgtagttttgctagacagttttggggtgatatcttttcacccttgagagaggggatgaatagatgatattgtaaattttgctcaaaacaacacaaacttggtttataatatgggttagagtaaataaaaccaagtttaagagtatagagaagagagataaaaactcttcacttgattgctctcttgaaataagtattaaactaggagcaatattccaagtgaatatgagaactcaagaagtcaataattgcaataaag

SEQ ID NO: 10145 - DNA, 2735 bp, Zea Mays
cactcctccaaccaagcgttctgcttccgtcctccaatgcccacagtttctgagagaaaagaaaccgacagctcgacccggatcatctctgactccctgcagaatcaatcatcggttccacactatctcttccaaaatttcgttgataacacctggcaagttttttatcgcacctaaaattctatctgtctgttgtctggcgctgctgtatcactctgaatttttggttctggcccaaatcttgttctttttccggttcttctgatcccgtctttatcctctcaaatccactaaaccactccaaagatagaatttttctgcatccgaagcccagatatttttttccttcggtttgttccggcggcaggggtgcgaaatccctcaagctggcaaccccggcgcggccatggacctccccgagagctctgtcccccgcgcagacaagggcccggcccctcgccgtctttgccccgtcgaccgcgaggagctggtgcgcgccatggcacagtcgctctactcgctcgggtacaggcgggcggcggccgcgctcgaggcggagtccggcgtgccactgtacccgccggagcatgaccgcctgctgctggaagtgatggccggtcagtgggacgcgtccgcggagatcgtccgctcggtcgccggcgtcggcgaagcggaccgcacggtcgcggagttcctggtgtggaggggctactacttggagctcctggggatgcgcggtgacgctggcctgcgccgggcgagggaggtgctacggcgtcggattgcgccgctcggcgtcgacaggaggtgcgtacacttgctggcgcgcgccatggtctccagcgagggggccgttgcgccggaggccgtggttgggtggaggattgcggtgttcttggatttggtcgaggtgttgccaccatggttccatgtggctagtgggcggttagagcatttggtggagagtgcggtaaccaagcaagtagaatcttgtatatatcacaatttgccggatgagatcactctgtttgaagatcataggtgccatgaagagcatatcccctcccaatgtgcacaggtgcgagttaaacagattgttgacttgtttcccagtttcgacaaatgtccaagcttatcagttgtataagaatgcggaacgaaattaccgaactcacatatcaaggccatcaatttacaatagggaaatatttcacgaacaacccatttctacatatagcagcactccttaaaagttttagatatttggtcttcttccaagttagtttaataagcaattcagtatggctattcatttcagcgatttaaatttcttctataccatgtttgcaatgtatgcagattgatccctatctatatttgattttggaagcataaaagtgcaatgcagttgggaaatgcttctcaaagtacctcagcaatattaaatttctcctgtaccatgtttgcaatatattatgtggtcataataatgaagtttggtttgtaaggttctcaaataatggaagctacctggtgtcatcttcaagtgattgcactgccataatttggaaggtggaaaatgatgatacattgaccaagaagcactgcctccagggtcacgaaaaaccaatttcctttgcttcctggagcccaaatgacagaatgctgctcacttgtggtactggtgaatcattaaaactgtggaatgttgatactggtgaatgtaaccttaaattcagaggctcagcagactgcatcatcagttcatgtgcatggtttcctaattcggagaaaatagtatgtgccagctcggagcctgcaagtgctccaaataggatcttcacttgtgatctagaaggccaaaatctggaagtatgggctggagatagaataccaaaagtcagtgatctcgctgtgacacctgatggccgacacctaatctttgtatcttgcaacgatatctggattagggaacttccaagggggcgggaatggagatttcgtgagaagcagacgatttcatctctttctctctcaggtgatgggcagtcactcattgtgaaccttaacagtcaggagattcatctgtggaaaattaatgaaagttgtactgtgcctgaaaagttcatggggcacaagcaagacaagtttgtgattaggtcttgctttggtggttcaaactcttcgttcattgctagtggcagtgaggattcacaggtctacatttggaagaggcacgtggagatgccgattaaggttctacatggccacacgatgattgtgaactgtgtaagctggaatcctgcaaggccccacatgctggcttctgctagcgacgaccgcacggttcgaatatgggtgactttgcaacctttggcatggtcaacaaatatgtataagatttgtaacagcattataattggctagaatcgtgcactagcaaactgtccagcacctcttagcacattttatgtacttgtagttttgctagacagttttggggtgatatcttttcacccttgagagaggggatgaatagatgatattgtaaattttgctcaaaacaacacaaacttggtttataatatgggttagagtaaataaaaccaagtttaagagtatagagaagagagataaaaactcttcacttgattgctctcttgaaataagtattaaactaggagcaatattccaagtgaatatgagaactcaagaagtcaataattgcaataaag

SEQ ID NO: 10146 - DNA, 3022 bp, Zea Mays
cactcctccaaccaagcgttctgcttccgtcctccaatgcccacagtttctgagagaaaagaaaccgacagctcgacccggatcatctctgactccctgcagaatcaatcatcggttccacactatctcttccaaaatttcgttgataacacctgattgatccctatctatatttgattttggaagcataaaagtgcaatgcagttgggaaatgcttctcaaagtacctcagcaatattaaatttctcctgtaccatgtttgcaatgtatgcaaattcatccctctctatctgattttaaagcattaaagtgcaatgcagctgggaaatgcttctcaaagcgccttacattatttttcatccagtaaagcagggtttggataatttcagaatctttaagaataaagtgaaagagaacagcacagttcaaacctttatttcgaaatttcttttgaagcaccagtgctcattgttattaaacccgtgcttcatcttcctgtatgaactgtctatgccagttgcccaccctacttagttcacatgaaatttattgtcggtagagaaaagataatacacaggaggaactgtgcatatttgattttgatgagcgtgtgtatagttatacccttgaattcagccactagaaaattgtcataagagtccatccatggattgcagccattgctgaatgctaaatgaaattggttgtggtctaagtcttaacacacttttgaagtagcataaaaaagtatcagttcattcagagtatttttgttgcacctatattaccactgtagaaactatcacaattcacaaaaaaacattttttaatcacccatttccaaaaactacatacttgttcatattcttttcacaaaatgacacatccataacatgaaatggaactgaaatgatagacttgtctgagttactggatctagatgaatttgacattctagatgtgattgcccttccagggtgatatatttccctgttcctcgtgtcacacataaaaacaggtggaataaacacatggatcaaaacaataagcatgatggtgctcttacagaagtgcagttttgtaaaattatgcataattatacataatgctttgaaacatgtgcttaaatgtgtggttgtgatatttcttttagaatgacagtagtggtttgctatgaaatttactctctctctttctctctctctctctctctctctctctctctctctctctctctcataaaatggatgactattcaggtaaacttctcatgtagtttcaggactcacagccctataaaattttcatgctgggggtttggggctgtattgcaaagttatgtatttcacatatccatgcctgtttgcagatattatgtggtcataataatgaagtttggtttgtaaggttctcaaataatggaagctacctggtgtcatcttcaagtgattgcactgccataatttggaagggtcacgaaaaaccaatttcctttgcttcctggagcccaaatgacagaatgctgctcacttgtggtactggtgaatcattaaaactgtggaatgttgatactggtgaatgtaaccttaaattcagaggctcagcagactgcatcatcagttcatgtgcatggtttcctaattcggagaaaatagtatgtgccagctcggagcctgcaagtgctccaaataggatcttcacttgtgatctagaaggccaaaatctggaagtatgggctggagatagaataccaaaagtcagtgatctcgctgtgacacctgatggccgacacctaatctttgtatcttgcaacgatatctggattagggaacttccaagggggcgggaatggagatttcgtgagaagcagacgatttcatctctttctctctcaggtgatgggcagtcactcattgtgaaccttaacagtcaggagattcatctgtggaaaattaatgaaagttgtactgtgcctgaaaagttcatggggcacaagcaagacaagtttgtgattaggtcttgctttggtggttcaaactcttcgttcattgctagtggcagtgaggattcacaggtctacatttggaagaggcacgtggagatgccgattaaggttctacatggccacacgatgattgtgaactgtgtaagctggaatcctgcaaggccccacatgctggcttctgctagcgacgaccgcacggttcgaatatgggtagggcgcaaaaatgcaacaaagtaaacgctgttgaagtgtgaagttttgtatgtctgtgtaaatagttgtacatctggactgcatccacaaacctgtttgggacaatgctctgttcttcacccctgatgaatatgtcgtcgtagctatttgttcagaaataaacctgcaacagccataggtagccggtgctgctgtgtccagatgtgtgcctggctaaccggtgagttttgacatgtgtacaggacaaagatgcatcagaactttgtacatcttgttagtatatgccttggacactcgaagtgctgaaatatgccttctgttgctgtggatctagtgttcgtgtccttttatctttttcgcttggttcatgtgctatcttgctttttgtttagaataccccataacttctttctgatgtccttttcaggtgactttgcaacctttggcatggtcaacaaatatgtataagatttgtaacagcattataattggctagaatcgtgcactagcaaactgtccagcacctcttagcacattttatgtacttgtagttttgctagacagttttggggtgatatcttttcacccttgagagaggggatgaatagatgatattgtaaattttgctcaaaacaacacaaacttggtttataatatgggttagagtaaataaaaccaagtttaagagtatagagaagagagataaaaactcttcacttgattgctctcttgaaataagtattaaactaggagcaatattccaagtgaatatgagaactcaagaagtcaataattgcaataaag

SEQ ID NO: 10147 - DNA, 1770 bp, Zea Mays
ccacactcctccaaccaagcgttctgcttccgtcctccaatgcccacagtttctgagagaaaagaaaccgacagctcgacccggatcatctctgactccctgcagaatcaatcatcggttccacactatctcttccaaaatttcgttgataacacctgattgatccctatctatatttgattttggaagcataaaagtgcaatgcagttgggaaatgcttctcaaagtacctcagcaatattaaatttctcctgtaccatgtttgcaatatattatgtggtcataataatgaagtttggtttgtaaggttctcaaataatggaagctacctggtgtcatcttcaagtgattgcactgccataatttggaagtacatgttgctaggtggaaaatgatgatacattgaccaagaagcactgcctccagggtcacgaaaaaccaatttcctttgcttcctggagcccaaatgacagaatgctgctcacttgtggtactggtgaatcattaaaactgtggaatgttgatactggtgaatgtaaccttaaattcagaggctcagcagactgcatcatcagttcatgtgcatggtttcctaattcggagaaaatagtatgtgccagctcggagcctgcaagtgctccaaataggatcttcacttgtgatctagaaggccaaaatctggaagtatgggctggagatagaataccaaaagtcagtgatctcgctgtgacacctgatggccgacacctaatctttgtatcttgcaacgatatctggattagggaacttccaagggggcgggaatggagatttcgtgagaagcagacgatttcatctctttctctctcaggtgatgggcagtcactcattgtgaaccttaacagtcaggagattcatctgtggaaaattaatgaaagttgtactgtgcctgaaaagttcatggggcacaagcaagacaagtttgtgattaggtcttgctttggtggttcaaactcttcgttcattgctagtggcagtgaggattcacaggtctacatttggaagaggcacgtggagatgccgattaaggttctacatggccacacgatgattgtgaactgtgtaagctggaatcctgcaaggccccacatgctggcttctgctagcgacgaccgcacggttcgaatatgggtagggcgcaaaaatgcaacaaagtaaacgctgttgaagtgtgaagttttgtatgtctgtgtaaatagttgtacatctggactgcatccacaaacctgtttgggacaatgctctgttcttcacccctgatgaatatgtcgtcgtagctatttgttcagaaataaacctgcaacagccataggtagccggtgctgctgtgtccagatgtgtgcctggctaaccggtgactttgcaacctttggcatggtcaacaaatatgtataagatttgtaacagcattataattggctagaatcgtgcactagcaaactgtccagcacctcttagcacattttatgtacttgtagttttgctagacagttttggggtgatatcttttcacccttgagagaggggatgaatagatgatattgtaaattttgctcaaaacaacacaaacttggtttataatatgggttagagtaaataaaaccaagtttaagagtatagagaagagagataaaaactcttcacttgattgctctcttgaaataagtattaaactaggagcaatattccaagtgaatatgagaactcaagaagtcaataattgcaataaag

SEQ ID NO: 10148 - DNA, 1954 bp, Zea Mays
ccaacgcactggaacggtgatcggatgaccacactcctccaaccaagcgttctgcttccgtcctccaatgcccacagtttctgagagaaaagaaaccgacagctcgacccggatcatctctgactccctgcagaatcaatcatcggttccacactatctcttccaaaatttcgttgataacacctgattgatccctatctatatttgattttggaagcataaaagtgcaatgcagttgggaaatgcttctcaaagtacctcagcaatattaaatttctcctgtaccatgtttgcaatgttctcaaataatggaagctacctggtgtcatcttcaagtgattgcactgccataatttggaaggtggaaaatgatgatacattgaccaagaagcactgcctccagggtcacgaaaaaccaatttcctttgcttcctggagcccaaatgacagaatgctgctcacttgtggtactggtgaatcattaaaactgtggaatgttgatactggtgaatgtaaccttaaattcagaggctcagcagactgcatcatcagttcatgtgcatggtttcctaattcggagaaaatagtatgtgccagctcggagcctgcaagtgctccaaataggatcttcacttgtgatctagaaggccaaaatctggaagtatgggctggagatagaataccaaaagtcagtgatctcgctgtgacacctgatggccgacacctaatctttgtatcttgcaacgatatctggattagggaacttccaagggggcgggaatggagatttcgtgagaagcagacgatttcatctctttctctctcaggtgatgggcagtcactcattgtgaaccttaacagtcaggagattcatctgtggaaaattaatgaaagttgtactgtgcctgaaaagttcatggggcacaagcaagacaagtttgtgattaggtcttgctttggtggttcaaactcttcgttcattgctagtggcagtgaggattcacaggtctacatttggaagaggcacgtggagatgccgattaaggttctacatggccacacgatgattgtgaactgtgtaagctggaatcctgcaaggccccacatgctggcttctgctagcgacgaccgcacggttcgaatatgggtagggcgcaaaaatgcaacaaagtaaacgctgttgaagtgtgaagttttgtatgtctgtgtaaatagttgtacatctggactgcatccacaaacctgtttgggacaatgctctgttcttcacccctgatgaatatgtcgtcgtagctatttgttcagaaataaacctgcaacagccataggtagccggtgctgctgtgtccagatgtgtgcctggctaaccggtgagttttgacatgtgtacaggacaaagatgcatcagaactttgtacatcttgttagtatatgccttggacactcgaagtgctgaaatatgccttctgttgctgtggatctagtgttcgtgtccttttatctttttcgcttggttcatgtgctatcttgctttttgtttagaataccccataacttctttctgatgtccttttcaggtgactttgcaacctttggcatggtcaacaaatatgtataagatttgtaacagcattataattggctagaatcgtgcactagcaaactgtccagcacctcttagcacattttatgtacttgtagttttgctagacagttttggggtgatatcttttcacccttgagagaggggatgaatagatgatattgtaaattttgctcaaaacaacacaaacttggtttataatatgggttagagtaaataaaaccaagtttaagagtatagagaagagagataaaaactcttcacttgattgctctcttgaaataagtattaaactaggagcaatattccaagtgaatatgagaactcaagaagtcaataattgcaataaag

SEQ ID NO: 10149 - DNA, 1942 bp, Zea Mays
caaccttcacattcggcggttcagatccaatccccgcacgagctcaacggtacagatgtctccaacgcactggaacggtgatcggatgaccacactcctccaaccaagcgttctgcttccgtcctccaatgcccacagtttctgagagaaaagaaaccgacagctcgacccggatcatctctgactccctgcagaatcaatcatcggttccacactatctcttccaaaatttcgttgataacacctgatattatgtggtcataataatgaagtttggtttgtaaggttctcaaataatggaagctacctggtgtcatcttcaagtgattgcactgccataatttggaaggtggaaaatgatgatacattgaccaagaagcactgcctccagggtcacgaaaaaccaatttcctttgcttcctggagcccaaatgacagaatgctgctcacttgtggtactggtgaatcattaaaactgtggaatgttgatactggtgaatgtaaccttaaattcagaggctcagcagactgcatcatcagttcatgtgcatggtttcctaattcggagaaaatagtatgtgccagctcggagcctgcaagtgctccaaataggatcttcacttgtgatctagaaggccaaaatctggaagtatgggctggagatagaataccaaaagtcagtgatctcgctgtgacacctgatggccgacacctaatctttgtatcttgcaacgatatctggattagggaacttccaagggggcgggaatggagatttcgtgagaagcagacgatttcatctctttctctctcaggtgatgggcagtcactcattgtgaaccttaacagtcaggagattcatctgtggaaaattaatgaaagttgtactgtgcctgaaaagttcatggggcacaagcaagacaagtttgtgattaggtcttgctttggtggttcaaactcttcgttcattgctagtggcagtgaggattcacaggtctacatttggaagaggcacgtggagatgccgattaaggttctacatggccacacgatgattgtgaactgtgtaagctggaatcctgcaaggccccacatgctggcttctgctagcgacgaccgcacggttcgaatatgggtagggcgcaaaaatgcaacaaagtaaacgctgttgaagtgtgaagttttgtatgtctgtgtaaatagttgtacatctggactgcatccacaaacctgtttgggacaatgctctgttcttcacccctgatgaatatgtcgtcgtagctatttgttcagaaataaacctgcaacagccataggtagccggtgctgctgtgtccagatgtgtgcctggctaaccggtgagttttgacatgtgtacaggacaaagatgcatcagaactttgtacatcttgttagtatatgccttggacactcgaagtgctgaaatatgccttctgttgctgtggatctagtgttcgtgtccttttatctttttcgcttggttcatgtgctatcttgctttttgtttagaataccccataacttctttctgatgtccttttcaggtgactttgcaacctttggcatggtcaacaaatatgtataagatttgtaacagcattataattggctagaatcgtgcactagcaaactgtccagcacctcttagcacattttatgtacttgtagttttgctagacagttttggggtgatatcttttcacccttgagagaggggatgaatagatgatattgtaaattttgctcaaaacaacacaaacttggtttataatatgggttagagtaaataaaaccaagtttaagagtatagagaagagagataaaaactcttcacttgattgctctcttgaaataagtattaaactaggagcaatattccaagtgaatatgagaactcaagaagtcaataattgcaataaag

SEQ ID NO: 10150 - DNA, 2084 bp, Zea Mays
ccaaactgaatccacgtgaccgtccgtatcccaaccttcacattcggcggttcagatccaatccccgcacgagctcaacggtacagatgtctccaacgcactggaacggtgatcggatgaccacactcctccaaccaagcgttctgcttccgtcctccaatgcccacagtttctgagagaaaagaaaccgacagctcgacccggatcatctctgactccctgcagaatcaatcatcggttccacactatctcttccaaaatttcgttgataacacctgattgatccctatctatatttgattttggaagcataaaagtgcaatgcagttgggaaatgcttctcaaagtacctcagcaatattaaatttctcctgtaccatgtttgcaatatattatgtggtcataataatgaagtttggtttgtaaggttctcaaataatggaagctacctggtgtcatcttcaagtgattgcactgccataatttggaaggtggaaaatgatgatacattgaccaagaagcactgcctccagggtcacgaaaaaccaatttcctttgcttcctggagcccaaatgacagaatgctgctcacttgtggtactggtgaatcattaaaactgtggaatgttgatactggtgaatgtaaccttaaattcagaggctcagcagactgcatcatcagttcatgtgcatggtttcctaattcggagaaaatagtatgtgccagctcggagcctgcaagtgctccaaataggatcttcacttgtgatctagaaggccaaaatctggaagtatgggctggagatagaataccaaaagtcagtgatctcgctgtgacacctgatggccgacacctaatctttgtatcttgcaacgatatctggattagggaacttccaagggggcgggaatggagatttcgtgagaagcagacgatttcatctctttctctctcaggtgatgggcagtcactcattgtgaaccttaacagtcaggagattcatctgtggaaaattaatgaaagttgtactgtgcctgaaaagttcatggggcacaagcaagacaagtttgtgattaggtcttgctttggtggttcaaactcttcgttcattgctagtggcagtgaggattcacaggtctacatttggaagaggcacgtggagatgccgattaaggttctacatggccacacgatgattgtgaactgtgtaagctggaatcctgcaaggccccacatgctggcttctgctagcgacgaccgcacggttcgaatatgggtagggcgcaaaaatgcaacaaagtaaacgctgttgaagtgtgaagttttgtatgtctgtgtaaatagttgtacatctggactgcatccacaaacctgtttgggacaatgctctgttcttcacccctgatgaatatgtcgtcgtagctatttgttcagaaataaacctgcaacagccataggtagccggtgctgctgtgtccagatgtgtgcctggctaaccggtgagttttgacatgtgtacaggacaaagatgcatcagaactttgtacatcttgttagtatatgccttggacactcgaagtgctgaaatatgccttctgttgctgtggatctagtgttcgtgtccttttatctttttcgcttggttcatgtgctatcttgctttttgtttagaataccccataacttctttctgatgtccttttcaggtgactttgcaacctttggcatggtcaacaaatatgtataagatttgtaacagcattataattggctagaatcgtgcactagcaaactgtccagcacctcttagcacattttatgtacttgtagttttgctagacagttttggggtgatatcttttcacccttgagagaggggatgaatagatgatattgtaaattttgctcaaaacaacacaaacttggtttataatatgggttagagtaaataaaaccaagtttaagagtatagagaagagagataaaaactcttcacttgattgctctcttgaaataagtattaaactaggagcaatattccaagtgaatatgagaactcaagaagtcaataattgcaataaag

SEQ ID NO: 10151 - DNA, 2097 bp, Zea Mays
cactcctccaaccaagcgttctgcttccgtcctccaatgcccacagtttctgagagaaaagaaaccgacagctcgacccggatcatctctgactccctgcagaatcaatcatcggttccacactatctcttccaaaatttcgttgataacacctggcaagttttttatcgcacctaaaattctatctgtctgttgtctggcgctgctgtatcactctgaatttttggttctggcccaaatcttgttctttttccggttcttctgatcccgtctttatcctctcaaatccactaaaccactccaaagatagaatttttctgcatccgaagcccagatatttttttccttcggtttgttccggcggcaggggtgcgaaatccctcaagctggcaaccccggcgcggccatggacctccccgagagctctgtcccccgcgcagacaagggcccggcccctcgccgtctttgccccgtcgaccgcgaggagctggtgcgcgccatggcacagtcgctctactcgctcgggtacaggcgggcggcggccgcgctcgaggcggagtccggcgtgccactgtacccgccggagcatgaccgcctgctgctggaagtgatggccggtcagtgggacgcgtccgcggagatcgtccgctcggtcgccggcgtcggcgaagcggaccgcacggtcgcggagttcctggtgtggaggggctactacttggagctcctggggatgcgcggtgacgctggcctgcgccgggcgagggaggtgctacggcgtcggattgcgccgctcggcgtcgacaggaggtgcgtacacttgctggcgcgcgccatggtctccagcgagggggccgttgcgccggaggccgtggttgggtggaggattgcggtgttcttggatttggtcgaggtgttgccaccatggttccatgtggctagtgggcggttagagcatttggtggagagtgcggtaaccaagcaagtagaatcttgtatatatcacaatttgccggatgagatcactctgtttgaagatcataggtgccatgaagagcatatcccctcccaatgtgcacagattgatccctatctatatttgattttggaagcataaaagtgcaatgcagttgggaaatgcttctcaaagtacctcagcaatattaaatttctcctgtaccatgtttgcaatgtatgcaaattcatccctctctatctgattttaaagcattaaagtgcaatgcagctgggaaatgcttctcaaagcgccttacattatttttcatccagtaaagcagggtttggataatttcagaatctttaagaataaagtgaaagagaacagcacagttcaaacctttatttcgaaatttcttttgaagcaccagtgctcattgttattaaacccgtgcttcatcttcctgtatgaactgtctatgccagttgcccaccctacttagttcacatgaaatttattgtcggtagagaaaagataatacacaggaggaactgtgcatatttgattttgatgagcgtgtgtatagttatacccttgaattcagccactagaaaattgtcataagagtccatccatggattgcagccattgctgaatgctaaatgaaattggttgtggtctaagtcttaacacacttttgaagtagcataaaaaagtatcagttcattcagagtatttttgttgcacctatattaccactgtagaaactatcacaattcacaaaaaaacattttttaatcacccatttccaaaaactacatacttgttcatattcttttcacaaaatgacacatccataacatgaaatggaactgaaatgatagacttgtctgagttactggatctagatgaatttgacattctagatgtgattgcccttccagggtgatatatttccctgttcctcgtgtcacacataaaaacaggtggaataaacacatggatcaaaacaataagcatgatggtgctcttacagaagtgcagttttgtaaaattatgcataattatacataatgctttgaaacatgtgcttaaatgtgtggttgtgatatttcttttagaatgacagtagtggtttgcta

SEQ ID NO: 10152 - DNA, 2577 bp, Zea Mays
cagaaaagaagttatctttctctctctctgctcgactttcctctgcagccggcccatatgaaggacaccacgtgaactcccccgacgactcagtgcgtcttcgccgccgttttcgtcgtcgcagattaaggttcccctcctctaacacgccggcgcttccccccctgccaccgcgacactcagtcgtcgccgccgtcggctctgctgccgtggccaagcgcgttggcagcgaggattgctttagcttgcaggcactttccccacccccaccgccgctgatttcgccgttatgcggtgaagcccttcgcgttgacgggctaatcggctgcctgatttctattatgatggggtaggtgtgctcctggttcgcgtctcggaggaccctcgccgtttatcgatccagtgatgtggagctcacctttctccggctagcgttgtgtcaggggagagtgcttgttgatccctcgggagctggttgagttgtctttcgtttgtgggaaatctgtgcggcagcgtaaggttgctgattcggatggcaccggtgggggatcatattgtggacatcagctccgatgaggaggacttgttcatcggcacttccctaaatatactcctagaacccctcgaccccgttaaatgggtggatgaggtttgcggtgtggctgattatgtggccggggaggatatcgatgacctcatgattatgagtgagatatctgctccaccggtgttgcagaagatagccaagcctgatgagctcgtggttatgggtgagttgtcctcaccacctgccccgcagcagaaggccagtgctaatggtgggtgccatgaggatgatgatgattgtgtagttctagatggtgaccctgataaggcgattacagttgctgaagaggggagcttgggagatggcagttcggatgaattgcagatagtggcggagaaaggcccggtagcatgcagggacttccctcattcacggcattcatgctcaaacttgcctttcagcactacttctcactgccactgttttgtatgtgacgcaccagctccttgcaaatattggggtaacagtacatcagctgatgatcattgccatgctacagacaaggattcaaaatggacatgcatgaggcaaatattcaagcaaaaattgttgccagcatcttttctagaaaaacaccagaacggcgtttactcaacaatgacaccacctagacagcaacatatgcagtgtcatgtttcagtcccacaatcgccttcggtgtcacatgggagtcacccttctcttaccatccaaagtcctcttcttaatgaagggagccaaaaccaacaaagacatccctcagtgagagtctcactgagtgtaggggcaacagtcagttctccaagagctggaagaggtactggcaatgctcacattgctcaaagtactcattcacatgcaatattcaagagagcaggggctgttgctccagtctttgcaacaagaaatgctagccaattctgtccttctgctccagatgatctccttttgcagcaggcattgtctcacgcttctcagcctgttcaagttgcgcctacaaccaatgctttcactggcgcttctcaaaataaccattttcagagatctttcagtgcgccgatagcacctcaggtgcaacaaggtcaacctgcggcacgttaccaggtcgccataaatggaatgcacgccgtagggccgcaacttgcacggtccacctcacttacaactcagagaacacaatgcctcccagaaccagcaataatagatgtcagcacaacaagctggcaagacatacttgctactgtggcatctaatctgggggtagcagattacaacacgagcacccctgagtctcagcatgtaacggttgactctctagccatgcatcccactgcaaaccatgggttggatcttcagcatgagcccattgcagaatcagagaacctgacatattcgcttctgcatgattcatccaatggcgcagcaggtggcagtgttcaggcagatggtcctatgcaaacaccagagaatttggaccatctgattggccagagcaatcctgttccaaatgaagctcacctggatgactttgcgggtgcccccgctaatcaattaccaatagaagaagaagaagctcatcagcctgagatgtcaaggctggagcctacaaacattctgttcgagttcgattgggtttaagcggtgacctgcctggctgcctcatcagcatatccctaacccatgaataataaatcagtgccattgacgtgcccctttctaggtctcctgcataggagacatgtctggtgtccccttgtacagtaattaggctatgtactagaagagtttcgccgtcatgttgtttgttatcatagtggtcagatgttgtggctcttcgggctttagatgttaacaggtctgaagtagaagggtgttgggtgggtgccaagatgcttgtctaaccactggtctacaatttgacaatgtaaggtattgagatacagatgcttgggttggataccaaatttctttactgctggatcattttttct

SEQ ID NO: 10153 - DNA, 2073 bp, Zea Mays
aaactatcgagggggcatgcttccaattttctgcaagtcgagagtcgagaccgccatcgaagcaccggcgccaatgaagacttgaagagggctaaaacgaaaaagatgccaggatgacaaaatttcccactccactcgaattaaaaccctagcggcaaaaccttcgctctgcgccgccgtcgcctgctcccgtcccgccaccacatccgcccaggagctcgccgtcggggaggctgctcgaggagccgcgctgtctctcccgcgccgcgaccttcgccctcgccgccgccatgatctgcgcgagaccatggcaagtgccccatcaccaaggatgagcttactatggatgatatcgtgccggtcaataccaacaaggtcgtgaagcccaggcctttgcaggctgcaagcattccaggactccttgggatttttcagaacgagtgggatgctctcatgctttctaattttgctttggagcagcagctacacacagcaagacaagaacttagtcatgcactctaccagcatgacgctgcctgccgtgttatagccaggttgaagaaggaaagagatgaggctagagcacttttggctcaagctgagagacagattccagcatcagttgcaggagctgctcctgcagctgttgtttccaatggaaaaagagcaatggaagatgaaattggccctgacggaaagaagattcgtcctggtatcaaccctgtcatgattgatgaacttacagagtgtaataccatgctttcagcacagcgtaagaaaagacaggttcctccaactctggcaccattagatgcactcgagagatacactcaaatctccagccatccccttcataagacaaacaaaccaggcattttgtccatggatgttcatccttcaaaggatgttgttgcaactgggggtatcgatacaaatgcagtaatctttgatcggtcatctggtcaaatcttgtgcacgcttactggtcactcaaagaagataaccactttaaagtttgttccacgggatcaactctttgtaactggatcagcagataagactgttcgcatttggcaagagaacgagaatggaaactataactgcgtccatacattgaaagatcatactgctgaggttgaagctgttacagtacatgcgactcagaagtattttgtgagtgcttccaaggataattcgtggtgcttctatgatatttcaacaggatcttgcctgacacaggttggcgaggcttcaggacaagagggatatacatccgcgtctttccatccagatggtcttatccttggaacaggaactactgatgctgttgttaaaatttgggatgtgaagactcagtcgaatgtcgcgaagtttgaggggcatgtaggaccagtcactgctatgtccttctctgaaaatggttacttcctagcgactgctgctcatgatggtgtcaagctttgggatcttcggaaattaagaaattttaggaccttctctccctatgattcagatacgccaacaaatactgtggaatttgattttagtggaaactatcttgccattggtggttcagatataagggtctaccaagtagctaatgttaaggccgaatggaatctcatcaagacattaccagatttatctggaacagggaaagtaacttcggtaaagttcggagcagatgctaagtacatagccgtaggttctatggaccgcaatctacggatatttggcctccctggagacgaccaaatggaggaatcaaccacagcggcagagtgaggaaaatccatggttatcggcattcattgtctatttggccactgtcgagaggtaatccacggagacacaccgctggcgcccgtgacacttggcctgtttggttacttgctaaaaattgctacacatttttgtgccacacttgtttaagcacacttgtttaaggtgtttaaggttatacgctcaaattccgcgtcacagcttgtttgtcactcataagagaatattgcctgtaaaatgagagtctgaacgacttgcccgtaaaatgagatggaaaatcagttagctgta

SEQ ID NO: 10154 - DNA, 672 bp, Zea Mays
ctcagttgaagtagcaattttcctttcgttgatcttttcatacttttgttttttgttcccagcttttaggccctaccatagaaggctgacagtaggcaaatcatgtattaaccttgctacggcgcggcgacggacggcggagacgagattgcgggagtggaggggagggaagggggaaagatgcggcgatgcggggacgatgaggagaagaggctcctcttttataccataccaggcgatgcggggacgatgcgggagtggaggcgcggggcgcgcgagctggcggccggcggcgtttgcgagctggtgggaagcgggaaaagagaggaagagagacgtgcggggttagggatttaggtttttgggttaagttcgacggtgtccacgtggcccacgtatttgatttaagaacgtaggtacccacattcctaataggttaagttcgacggttttggctaaggcccacggacttaatttaagaacgtgggtacccacattcttaaaaacctcatgaacttaactaatgtaagaacgtcggtacccacgttcttaacaaaaacccacgaacatttatcagtttcttgtagtgtatgagtgaactgctggacacggtcttacatatgcaataggttttcatgatgtatcaaactgaaacacacgacaaaatttttt

SEQ ID NO: 10155 - DNA, 1550 bp, Zea Mays
ccgctgggtacactctgttcttcgtatttatgcatgtttcattgttgtttactgcttatgcgagtagttatacacacatgcacatacatgtcatcacatatatcgcactgattatctggattaaattaaaactaaaaatgcctaactctctaacagtcattgtgttgttcgttttcatagatcatcttatgcaattatttgtgtgttgtcggcggcgcgctatggctaccggcgaagaactacctgatccccatggacggagctggtacctaatgcctgacaaacgcgctgataaacacagtcatgttaatcattgggaacgtgcagcagcagggcaccggtgtcagctttgacaccgccaagggcgccatcgtcttcacccccaacaagtgttagcctgcctcttggggagtagctgactattactctctattgcgctaggtagcatgaagaaccgatattcaaattactctcttacactctactacactgatgaacataaataactggtacttacatgacctaccaaacaagagattcatgcgttcctttaacttctccatcaactggaccaaaagctactgatagatcagccaacacacctatgtcagtgatgtgtgatgatggactgccagctacgtgaggcaacaatagaaacatttatgttgataaggcaccggttcaagcaagcaaaaggaaccttacaagtgagttggtccctcctgcatattcacgagctataataaattattcaatgattctcaaacccaccaaagtgctacaaagaaaagattgtgctaaacactttaaaggggtcaagagtcacgcatacggtgaagagatagaaaagagtttcacaaagctgcttgtagaagaactaaaacaaagagaagaggaggcaacacaggctcaacaagaggctgatgttaagttgatcgaggccaaaaagttagcttcacagtatcagaaggaggctgacaaatgcagctcaagcatggataacctatgaagaagatagggagaactcagcggaagcattggtccaacaaaagaaactgacttctttgtgggagcaaagggcttgggagcttggatggagacccgagaatgtcaaggcacttctaaagtagtaaaaccagtggaaggtgttggatactatgtgtagcaatagatcttattgcaaatacgggcccactaagagctcgagacgatgaggaaacaaatgtgtttctggttgagcggactcgactcacttgacatgccaaggggcctacttgtccatagtaaatttatattcaatttgtagtataattccattgttgtttgtgaacactgttgtgtgttgggatggtcataggattacattgttcattttttctgggtgttctaaaaggagaaaagtttgtctaggggtggtgacaataaagaaattatctgcagttcttaagttctttcttcttgctagcattagcctttccatagataattgttgtttcaattcacatggtttcattgtcctcttattgataatgtggttggggtttagttgt

SEQ ID NO: 10156 - DNA, 2095 bp, Zea Mays
cgtccagcccgagcctgagcctcccgccccagcccaccacaaatcgcgcacgccccagccctcatccgtgacggagcctccattcacgccgtcacactcgtgctacaccaccgcggctgctgatggcgcccctcatccgaccgcatcagcaacctgtgcttcgcccccacgaccagtaggtctgcccgcgttagcaacccgtgctccgcccccacgactagcaggccaggcatgaatctcgcccccacgcctggctatggcgcccatgctcctcccccacgcccagcggttccgtgaagtccacccccaccttccctgcactctggttccacgaagtccactgcgcgccgtctttggaaggtccacccccaggcaaaaaaacgccatttacatgaagaatcgtcaccaccctgctggagcgtcatcgcgtgggcctggcgttgtggccgttggcggtggaactagacgcgtcacgggtgccgccgccgacgcgcggtgaccgctggtgcgccacggcaccggtgcggccagacccggacccaccgcagcgcgtctggctcttcatcgcctccacccgctccggcgtctccaccacctccttcatcgagggccggctgtggagctcgccggtcaggcagccgagcgtcagttgcgtgaacacctgcctggagttgtactggcccttgaaccacgggtccatgagccgcgccagcctccgacggtctgccaggtacggcttcgcccagtcagccaggctcagctgcccgctcggccggttcgagtccagtgcccgctgccccaacagcatctccagcatcaccacgccgacatggtggtttctttcacgaaagtgacaatgcacactcctggaatggccgttcatgattcttgtgcgatatttatccacttggccgcagccaccgctggtgcatgatcattgtcacggaggcaggggagtagctgactattactctctattgcgctaggtagcatgaagaaccgatattcaaattactctcttacactctactacactgatgaacataaataactggtacttacatgacctaccaaacaagagattcatgcgttcctttaacttctccatcaactggaccaaaagctactgatagatcagccaacacacctatgtcagtgatgtgtgatgatggactgccagctacgtgaggcaacaatagaaacatttatgttgataaggcaccggttcaagcaagcaaaaggaaccttacaagtgagttggtccctcctgcatattcacgagctataataaattattcaatgattctcaaacccaccaaagtgctacaaagaaaagattgtgctaaacactttaaaggggtcaagagtcacgcatacggtgaagagatagaaaagagtttcacaaagctgcttgtagaagaactaaaacaaagagaagaggaggcaacacaggctcaacaagaggctgatgttaagttgatcgaggccaaaaagttagcttcacagtatcagaaggaggctgacaaatgcagctcaagcatggataacctatgaagaagatagggagaactcagcggaagcattggtccaacaaaagaaactgacttctttgtgggagcaaagggcttgggagcttggatggagacccgagaatgtcaaggcacttctaaagtagtaaaaccagtggaaggtgttggatactatgtgtagcaatagatcttattgcaaatacgggcccactaagagctcgagacgatgaggaaacaaatgtgtttctggttgagcggactcgactcacttgacatgccaaggggcctacttgtccatagtaaatttatattcaatttgtagtataattccattgttgtttgtgaacactgttgtgtgttgggatggtcataggattacattgttcattttttctgggtgttctaaaaggagaaaagtttgtctaggggtggtgacaataaagaaattatctgcagttcttaagttctttcttcttgctagcattagcctttccatagataattgttgtttcaattcacatggtttcattgtcctcttattgataatgtggttggggtttagttgt

SEQ ID NO: 10157 - DNA, 1740 bp, Zea Mays
ccgaccgcatcagcaacctgtgcttcgcccccacgaccagtaggtctgcccgcgttagcaacccgtgctccgcccccacgactagcaggccaggcatgaatctcgcccccacgcctggctatggcgcccatgctcctcccccacgcccagcggttccgtgaagtccacccccaccttccctgcactctggttccacgaagtccactgcgcgccgtctttggaaggtccacccccaggcaaaaaaacgccatttacatgaagaatcgtcaccaccctgctggagcgtcatcgcgtgggcctggcgttgtggccgttggcggtggaactagacgcgtcacgggtgccgccgccgacgcgcggtgaccgctggtgcgccacggcaccggtgcggccagacccggacccaccgcagcgcgtctggctcttcatcgcctccacccgctccggcgtctccaccacctccttcatcgagggccggctgtggagctcgccggtcaggcagccgagcgtcagttgcgtgaacacctgcctggagttgtactggcccttgaaccacgggtccatgagccgcgccagcctccgacggtctgccaggtacggcttcgcccagtcagccaggctcagctgcccgctcggccggttcgagtccagtgcccgctgccccaacagcatctccagcatcaccacgccgacatggtggtttctttcacgaaagtgacaatgcacactcctggaatggccgttcatgattcttgtgcgatatttatccacttggccgcagccaccgctggtgcatgatcattgtcacggaggcaggcatgtgcttaagacttgtgtagactatttgttcacttgtttgagtagtagtatcatgcagatcattgtcacggaggcaggtatgtgctcaagactagaaatacatttaaatacattcatgaacttagattctctcgtttagaatttagaaattggtatgaatctagagtagtgtatgcacgtagtttgatagattactaaaaaattcttcaaaatttcgccaaacaatgttctactcttttgggaaatctgggtctgatagataactgcacacaactagcagtttcctaaaatttgatggtggtattttaattcgtttaggctgatgcctgtagggagctttacaattagctgcatgtaactaggttcttagataattgttggatgtcgaccacataccctgtaatgttccttttagtgcataccaaggccataaggatttttgttctctttagtcacttagtgacacaaaaagtggtaccataaaatttatctcatagtattaaaatcctcgctggaaggttttcaattttttagccctcagtgttctttctatgctattttatttctcacaactaaaaaattattttggaaccttgctgttagtgccttttcttatcttgtcaatgtgtccttccatcttgtattagtttgctttcgtttttacattaactagaacacatgctctggttgtggtttcctctttttatgctacaggcttggttagctaccatatcactcgctatctacaaggcttttgatcatctcggcatgttaaaaaagaagaaatgcttctagttgtaaaggaaaggaaggcaaatgtaatgctaatgagagtgatttagtaatttacgagatactgagctgatattgatgtcattgttggattaatgtggggcttggcccaaattaatactcaataat

SEQ ID NO: 10158 - DNA, 1316 bp, Zea Mays
cgcagatctcgtctccgcgacggacgcctccgccccaccctcctccccacgccatccgcgccgccatcaagggatctcctaccaacaacggacgcctccctctcctccgcgatcctccaagcgcacagatcccgtctccgcgacgccatcccactaccgtccagcccgagcctgagcctcccgccccagcccaccacaaatcgcgcacgccccagccctcatccgtgacggagcctccattcacgccgtcacactcgtgctacaccaccgcggctgctgatggcgcccctcatccgaccgcatcagcaacctgtgcttcgcccccacgaccagtaggtctgcccgcgttagcaacccgtgctccgcccccacgactagcaggccaggcatgaatctcgcccccacgcctggctatggcgcccatgctcctcccccacgcccagcggttccgtgaagtccacccccaccttccctgcactctggttccacgaagtccactgcgcgccgtctttggaaggtccacccccaggcaaaaaaacgccatttacatgaagaatcgtcaccaccctgctggagcgtcatcgcgtgggcctggcgttgtggccgttggcggtggaactagacgcgtcacgggtgccgccgccgacgcgcggtgaccgctggtgcgccacggcaccggtgcggccagacccggacccaccgcagcgcgtctggctcttcatcgcctccacccgctccggcgtctccaccacctccttcatcgagggccggctgtggagctcgccggtcaggcagccgagcgtcagttgcgtgaacacctgcctggagttgtactggcccttgaaccacgggtccatgagccgcgccagcctccgacggtctgccaggtacggcttcgcccagtcagccaggctcagctgcccgctcggccggttcgagtccagtgcccgctgccccaacagcatctccagcatcaccacgccgacatggtggtttctttcacgaaagtgacaatgcacactcctggaatggccgttcatgattcttgtgcgatatttatccacttggccgcagccaccgctggtgcatgatcattgtcacggaggcaggcttggttagctaccatatcactcgctatctacaaggcttttgatcatctcggcatgttaaaaaagaagaaatgcttctagttgtaaaggaaaggaaggcaaatgtaatgctaatgagagtgatttagtaatttacgagatactgagctgatattgatgtcattgttggattaatgtggggcttggcccaaattaatactcaataat

SEQ ID NO: 10159 - DNA, 6313 bp, Zea Mays
aatgattcagaacagaatgacatttgtacagtaacctggcaggttaaagcaaagcatcccatatgttaacttatcagtaggaaacagaaatattcgacttgcaaaattctaagccatgcttttcaatgttagtgtcatgtacaatagcagtgtgaatcagtgagaaaattatgcaaacctcttcatcttgtaaatctttgaactgtggtaacaggagacgttcagcaaattcaatgtatgatcgaggaatagattcagttattccatcagcaaacgtaaacaatgatgagtcagctactgttgaactttgttgaaggagaccatcaggactcactatcgatcataaacatacacacagaaaaaaacattcagattagcttctctacaatatgtggaataacaacagaaaaacttgtatactgcatgcagtaaatatttaagatatgctattacataatcctttcctcaaacacacaggagagctgtgcaggaggaaaaaagggaagagcccttacaaacacacacaaacaccacaacttgcgagcttgtcaggacgtgatgaacatggacgtccccaacagcaacacgctcatgaacaaagtaaagatcgatctcaacatgcttcatgctctggtgctgaacggggttcatagatagaaatggcattgatgttgtcgcaataaacaagtgtgctcctagtgagggggctgtgaaactcctagaggagctggcgcaaccaactcaccgtagccaccccgttaacgacaacctggtacccatcctcagtgctcgagcgggaggccacgagctaacatttagaggatcaagatatgaggtaggccccaaaaaaacaccacgtaaccaaaggtagactggcgggtgtcggggcacacaacccagtcagcgtcggtgtagacgaccaattcatgtgtgaggaacactgaagatggagctcatagtcaacatacccggaaggtaccaaaggatccacttgaccgcgctcaggtgcggcttccagagatcatgcatgtaaagatagacctgctagacatgatacacaatgtcaggttgggtgaaggttagatactaaagagcatcgccaaggttgtggtaggtagtgtggtcactgatagggcattgtcgccatagaccttggcctgcatgtccaccggtgtcgcacatcgcttgcaacccagcatgacagcgcactgtaggatatccggggtgtattggcgttgctgaagaaacaagccatctaggagacgcacaacaacaatccccaaaaaatgatgaagaggacccttcatgacgaactcgtactgaaggacaataatgatctggtgcagcaggcctgaagaagtggcagtgagcacaatgtcatcaacatacaagaggagacagtgtcactgccacaccggtagatgaacagagaggtgtccgacttaggtgccgtttggttcacatattggtaacgtaatgggtaaccgataacgttaaatcatgtttgtttaagtccaaccgtaatcgataccacactacaaatggatacctccttattcaaatttgttaccgccggtattcgagtgtgaatcgttaccattatcatttacgttacatttcgtgaaccaaacgacaccttagccttagcaaagcccagcgagagtaaatatgtggcaaacctgctataccaagcgtgggggtgcttcagaccatagagagacttgttgagcttgcagatcatgtcaggatgagcagagtcaacaaaaccgataggctgactgtaataacagtctctgtaagagtcctgtggaggaaggcattcttgacgtccagctgatgaacgacatagacagtagccggcttcaccattggactgaacgtgtcatcgtagtcaaccacatgtcggagaagtcgagtgcatagacagggttgccagcgatccagcggaggccaacgggaggaggagggggcacaaggtccgattgagggcggtaggtagcccaaagggaatctaggggcacaggtgccatgcggatgcaacaggtccgtaggcgggagcggcgtgggtgaacctgcaagtggaaaaacaaagggtggctaactagagggagctacagggttaaggtcaagaagaaagtccaacttgataaggcggtcagtggtggaccgggagggggcaagaagaggaaatccatagcgaagagacgataagtggtgaggtcaaagacactggtgcgctttgtgatcacgagagtaacagaggaagacacgacgggtggagcaaggggcaagtttatggtgagtagtggtagaaaggttaggatagtaggcacaactaaaaacacgaagatggtcgtaggatggagtggtgccaaaaagagcaaagtgggatatagaggtgtgaatcaccttagtaggaagtcaactaaagagatagatggttgtgtggagactctcatcctagtagtgaacaagaatggatgactaaaatagtaaagagcgcatgatgttgttagtagtctaaatcatgcgctcagccttgccattctgagaagtgtagggcaggacatccagagttgtacaccatgggaggagaatgatcaagaggaattatcaaactcacggccattgtcacactggataaccataatggtttgaccaaactgagtagaaacccaagagaagaagtgcagaagagtcgcaaatgtgtcggactttgaacgcaaggaaaaagtccgcgaataatgagagcacaagattatatgtataacccaaaacactgataataggataagtccataaatcacagtgtatgagatcaaaattatgcacatcctgagagtggctagggaaaggaaatcgaacatgacaacctagctgatatacatggcatagatgcttagagttgcccctagtacaagagatgattgaactactacacaactaggacaacatgttagggctagaatgactaagtcaacgatggcaagtagtggaagtagttagtccgtacgactacagtgaggacaaagatgatgtaataggtggagaagtggatgcagacagccacatggtgtacagggggctggagctatcatagctgacgagaaggctccaagtagtgagatcctttatggacatgccaaaaatatcaaactcaatagagcaaagttacctatggtaaactgatgaacagataaaagattttgaatgatatgagagatgacaagaacattgcgaagatagaagggcctagcaagaaccgaatcacttacagaggtgaccaggagaatgttcacattgcccacaatgataggtgaaggatgagatgggagagatgggtgggaaaagtataccagggtccatagtggtgtgataggaagtgtcggaataagtgacccagtcagtgacaacatgagccagggtcattgtgctgaacgagctagcaactgactgttgatcccacccaacagaccacgggttccaggacggaactgagtggggtgataggggtagaagcggtggttgaggtgccggtggcacaaagggaagtgggccgagaggataccccgggtcaagcatcgtcaagtgagccgggtagggtggaggcagacatggtgaaggtccaccaggggatggacttgtccacatgaagatacagccagtccacgggttgtagagagaggccaaggggcatcccctagccatccccatccctacggccaaccatcctccgacggtgatcaccacccctagaccccacacctgccccatgcctaggctgagagggagggcgcgtggagacggaggccgaagggacagacgagcgcgatgacgagcgccccaacgtaggagtggaagagggcaggcacgaggacaagccccgagggtggagctgtaaagagcagtagtagcatcagagccaagaggcgcccccttggtgagctcctcaaagatgaggtcattgtgaaccttgtgaaaagacaggaatggaattgagagagtggtccaagtccagaggtgattgtagtgctcattgaggtcgcggaggaggttgaggataagtgtgcgattggagacaggctgaccgaggttacaaaaggaggtcaccatgcctttcatctggcagcaatactcgatgatggagaggtaccctagacgaaggttcagaagccagcgccgaggtggtgcatgagcctcgtggttgcagaggaactactcttcaatggcaaccgaggtctgatgggtagtgctgtcatgccggcaaacgacttcttgcaactcgacggtgatcgtcccgaggatttaggagagaaccacactattcatccgccgctaggaggggatagtgagggacaccgtgtcaccaagaatgtggtcgtccagggtgtagtgctgcaggatgaggaggacgaggttgcgccagcgggcatgggtggaggaagccgggtcgaggatgacgaggaccaaagatcggatgtccaggacatccgtcgcctgaacgtggaggtcatcgccaacggccttatacgctgaaggggggttgaccacatggggcttcgggagaggctcgaggtagggagaaccaagtatatggcactcaacctcagcaactaggcgagagcagcaacacgttcgcgttcccgatcaacagccactgtcgccttagtagtcatgagggctacagccagggtagagtgggcactcacgaagttggacgcggagtggtgtggggcgcttaggcctaggccagcatcatcatggccgaggccagctgtgccaaaggtacctaggctcgtgccaaagctagtggtggccaggccgggggcggcctggccgacagcgcctgcgttgtgggcttgtggcctgctgggggagtggaggaccgatcgctctcgtaccgggggcgaccaggccaacgacgcctaggccagggatgaccaggctagggggcgaccagcccgatagaggctaggccttcacccgcagcggctggggcaggcggccggatggctcgcaacgactgaaggttggcgacgacggcagggttggtggaaaatggctagggtgggagagggaggtaagagtctagataccatgttagggaaaatggaaccctaatccattgagtgggatgagtattacatatattagagttacatgggctaggctctaggcccataacacttagacagaaatgaaatagtctaacatagtttgtctcaaccaacaacatcccattggtctacagtcaagagaattcttcgttatcttaatgatacccctcaaatgaggttgtgtttcactaagtctagctcattgatgcgcttagtgccttttttatgccgactgggttggtgattctgatgattgtcccagtacttgtggccatgccatatttgcaatcttgtttcatggagtgatcgtaaacagcctattatatctcgttctagtatcgagccagagtataaagttgttgccgatgctgttgctgaattgatttagtcgttctagtactgaggcggagtataaagttgttgatgctactgatgaattgatttgggcacaaattttattaatgaaattaggtgtctcatttccttgaacgctcagcctttgatgtgataatattattgtcacatatctatgtgctaattcggtttttcatcgtcgcttgaaacatgttgaagtggattaccattttgtacaggagtgagtttctcgtcaacaactcgacatgcgtcctaatttgtctggtgatcagttagcttatgtgatgactaagcctctgccattgccatcattcactaggattcagaatagtccgaacttagtctcctttagtttagattgagatggacattaaacatagatagttttatctatgatagtagggtattatccttactttgaaatccaagtaatctacgatctcggaagctccaccttactttctatcgaggcctgttatagttaattaagatcctacgtgatttcatctatgatctcatcgtgtacattgctactatataatgcaaaggtcggtatgatgatctgtgactcgatcacatccttgaccaaaccccatagagagagaattcttatatgactagatgtattgtgtgtattctgatgtattgtgtgtgattgtctctatattggacctaggcccacttacccctattattaatatatcgcccaaccctggtttagggacaaggtttcacttctatcatggtatctcgctaggtccctttctcttctccccttcctcccacccctagctgccggctggccgccctggtcgttgtcc

SEQ ID NO: 10160 - DNA, 1276 bp, Zea Mays
gaaaaaaagagctgggacccacctactatagatatagatatagatgggcctcgttcctttataatacgatctagcttgatccatcatcctcaaattatgataactgccttctagccgcagccggagctacttctaatccggaatccaaaggagtcgagcttttcgtactaccatcgcccgggcatcgctttcttcccactgctttcgtcctgttttattgctcctcctctcaacttattgttcttgtgaataccgtacgtagtagttcttgtgaatatcaatctaggcgtagggcttgcaagattcgcttcgtgccgttgggaaaacactggtatatgcttagcccttctcttccttgaggtttaagggggaaagatatcgtcttctaaactgaggagagttatgtatcgccttagcttatctgctgccttgttttacgaatctgacttcaccctaaagaacaataagaagtcaatgggtttggtttctgaccgcacttctctacaggcatcccacccgtcctcttcctccagcagctcaaggtacgcacaggaaaccacatcttgaaccacggaattagccgtgataggtttcttcttccgctcggtactcatctaccctaatcttcccctcgcagtggattccactaggttcttaacctcttcccaattcttaaactgaaacctgcgatgtctaatccaactcggcacctaaccagcttgtcagcatcgtaagtttgcctcaacattccccctagaaatagaataagaatgtaaatctactttcatttagggatgatactttctttttttttctagaactagaataagtaagtatgctctggagtaaaaggattcgaacctttgcatgccggtaccaaaaaccgatgccttaccacttggctatactccaaacggtcggttcctggggagagggggaagggagaagcagggctcgaagaaaacgagccgtgcaaggacgcggggatatagcaagtaagctgcaaggttttccctttaggaccgactacaacaagctcgcgactctaatagaaactaagggtcagctctctgctctatttgcttgcaatgcgttgcctatcaaagtcggcgaacgcttccaccccctcttgcccttgttacgcaacacgccaacaaagaaccttggttccgttgcgccctgtactgtattccgaggcgaccatttcgcgcggttcgatccatttcccgatccgaaaaatccgataacgtacctatatgagtgggatggatggtaa

SEQ ID NO: 10161 - DNA, 3085 bp, Zea Mays
atggccaccccctccacctccgctccgtcgccgtcgccgtcctccgccttcccactcaccaccaccacacgcttcccccgctcatgctcctgccccgtgcgagcctccgcgctcgccgagcggcggcgcacgcggcggcgccgggcgcccgatggtgggggcgccggtggggaccgctcggcggccgccggggcggtggagaagggcctgcgcctggtcttcctcgagcagctcgcggagcgcgcgagggctgccgacgccacgggcgtggccgacaccatctacgacatggtcgccgcggggctttcgcccgggccgcgctccttccacggcctcgtcgccgcgcatgtcctcgctggcaacgctgaaggcgccatgcaatctcttagaagggaactcagttctggtgtgcgccctctacatgaaacttttgtggctctggtccgtgtttttgccaagaagggtctttctaccaggggcatggagatccttgctgccatggagagatataagtatgatattcgcaaggcctggctaattcttgtaggctacttgtggaattcctgaagttgcctttgcaacatttgaaaacatggaatatggaggtgaagattacatgaaacctgatacagagtcttataactgggttatacaagcatttactagagctacgtcctatgacagggcagcggatgtcgcagaattactcgggatgatggtggaagatcacaaacgcattcaacctaatgcaagaacttatgcgttgttagtggaatgctttacaaagtactgtatggttaatgaatcaatcaggcattttcgtgctttacaaagaatccctggaggaacagaagtcctttacaatgaaggaaattgtggtgacccactttctctctatctacgatcattgtgcctcgatggcctgttgagttgcttgaggctttagaagcaatggctaatgataaccaaagtattgcacctcgagcaatgatcttaaacagaaaatatcgcacattggtgagctcctggatagaaccattacaagaagaagctgatgttggttttgaaattgattatgtggccagatatattgaagaaggaggtcttacaggagagcgcaaacgttgggtgcctcgcagaggaaaaactcctttggatccagatgaatttggatttgcctattcaaatccgatagaaacatcctttaaacagcgatgctttgaggaattgaagttatatcatcgaaaactcctaattacgttgagaaatgaaggccctggtattttgggtgatgtctctgaagaagatgtacgcagagttattgaaaggctaaaaaagttagttgtagggccaaagaaaaatgttgttaagcccaaggcggcaagcaaaatggtagtatctgaactgaaaactgagcttgaagctcaaggattacctactgatggaactagacaagtgctttaccagagagttcaaaaggctaggagaatcaatcgctcacgtggtgtaccactttgggttcctcctgtagaagacgaggaagaggttgatgaagatttagatgagctgatctcacgaatcaagccagaagatgggaacacggagttctggaaacgccgttttctgggagaaactcgaaactatctttgtgaagaagatagtaaagaagacggtcaagatttagatgatgaattggaagatgatgatgacaacgatgatgatgaggatgacgatgaatctgtaaaagaagcagaagaagatgagatagatgatgaagaggttgttgagcaaacagaaaatcaagttggtgatgacactaaagataaaccagcaaaagaacccaaccatcatcttcaaatgataggggtacagttattgaaggatatagagaggacacctgtttcttcaaagaaattaaagcggatgccagagattgatgatgatgaagactggtttcctgaagatccaattgaagcctttaaggttatgcgggaggagaggatgttcgatgtatcagacatgtatactactgcagatgcctggggatggacgtgggaaagagaaataaagaacaagatgccacgtaagtggtcacaagaatgggaggttgagttggctatcaagataatgcacaaggtaatagaactgggtggtactccgacaattggtgattgtgccattatattgcgagctgctatgagagcaccactcccatctgcttttataccaatattgcaaacaacacacagtctaggttataagtttggaagcccactgtatgacgaagtagtcctattgtgccttgatctggaagaaattgacgcagccattgcagtagttgcggaaatggagacttgtggggttaaggtgccagatgaaaccttggacaaggtgcttgcgtccaaacggtctggaaattctgccctcccaccacctacggaggagtaatcaatttggacatgcgagacttctgctgctcgtgcttgacgtgacaccagaaaatcacaagcaatgcatatgtttggagcttctcctggaaaagaacatgctgtatgatagtttgtcggtgctgtgtccaacgatagaggagatatgaagttgttagtatgatacctggcatggtatatttgattagtccgttgaatttttgtatggatggtgaagcatgagaaaaggtcgagtttttttttataactggtggaatggtgtgggtgcgttgtcttagggtgctttgggtttggcttctgggagttgcttttgcttcaaaaagtcaaaagctgattaaagtgatagaaacaagaactttcggattttaactttttgctttttaaaatggtcaaaacagttgtttagagacatagataacaagtagaatttcaagtagaatttctacttgtttgaatcaaataatttaaagttttttatatagtttacaacacaacgcagtttaaccaaatacatccttaatcacttctgctaaaataccacgtctgctttaagatctagattctgtcagagagttaagacttttctagttgtattttaatccagaaaattgatatgaaataactagtgtggatctaat

SEQ ID NO: 10162 - DNA, 3325 bp, Zea Mays
atggccaccccctccacctccgctccgtcgccgtcgccgtcctccgccttcccactcaccaccaccacacgcttcccccgctcatgctcctgccccgtgcgagcctccgcgctcgccgagcggcggcgcacgcggcggcgccgggcgcccgatggtgggggcgccggtggggaccgctcggcggccgccggggcggtggagaagggcctgcgcctggtcttcctcgagcagctcgcggagcgcgcgagggctgccgacgccacgggcgtggccgacaccatctacgacatggtcgccgcggggctttcgcccgggccgcgctccttccacggcctcgtcgccgcgcatgtcctcgctggcaacgctgaaggcgccatgcaatctcttagaagggaactcagttctggtgtgcgccctctacatgaaacttttgtggctctggtccgtgtttttgccaagaagggtctttctaccaggggcatggagatccttgctgccatggagagatataagtatgatattcgcaaggcctggctaattcttaggaactagtgaagaatcattatctcgaggatgccaatacggtatttctgaaaggggcaaaaggcggtctacgaggaactgatgatatttatgatcttctgattgaagaagattgcaaagctggagatcactccaatgctttgacagttgcttaccaaatggaggcttatggaagaatggcaaccacattccattttaattgccttctcagcgtgcaggctacttgtggaattcctgaagttgcctttgcaacatttgaaaacatggaatatggaggtgaagattacatgaaacctgatacagagtcttataactgggttatacaagcatttactagagctacgtcctatgacagggcagcggatgtcgcagaattactcgggatgatggtggaagatcacaaacgcattcaacctaatgcaagaacttatgcgttgttagtggaatgctttacaaagtactgtatggttaatgaatcaatcaggcattttcgtgctttacaaagaatccctggaggaacagaagtcctttacaatgaaggaaattgtggtgacccactttctctctatctacgatcattgtgcctcgatggtaacttaatttttataaccaggaaggcctgttgagttgcttgaggctttagaagcaatggctaatgataaccaaagtattgcacctcgagcaatgatcttaaacagaaaatatcgcacattggtgagctcctggatagaaccattacaagaagaagctgatgttggttttgaaattgattatgtggccagatatattgaagaaggaggtcttacaggagagcgcaaacgttgggtgcctcgcagaggaaaaactcctttggatccagatgaatttggatttgcctattcaaatccgatagaaacatcctttaaacagcgatgctttgaggaattgaagttatatcatcgaaaactcctaattacgttgagaaatgaaggccctggtattttgggtgatgtctctgaagaagatgtacgcagagttattgaaaggctaaaaaagttagttgtagggccaaagaaaaatgttgttaagcccaaggcggcaagcaaaatggtagtatctgaactgaaaactgagcttgaagctcaaggattacctactgatggaactagacaagtgctttaccagagagttcaaaaggctaggagaatcaatcgctcacgtggtgtaccactttgggttcctcctgtagaagacgaggaagaggttgatgaagatttagatgagctgatctcacgaatcaagccagaagatgggaacacggagttctggaaacgccgttttctgggagaaactcgaaactatctttgtgaagaagatagtaaagaagacggtcaagatttagatgatgaattggaagatgatgatgacaacgatgatgatgaggatgacgatgaatctgtaaaagaagcagaagaagatgagatagatgatgaagaggttgttgagcaaacagaaaatcaagttggtgatgacactaaagataaaccagcaaaagaacccaaccatcatcttcaaatgataggggtacagttattgaaggatatagagaggacacctgtttcttcaaagaaattaaagcggatgccagagattgatgatgatgaagactggtttcctgaagatccaattgaagcctttaaggttatgcgggaggagaggatgttcgatgtatcagacatgtatactactgcagatgcctggggatggacgtgggaaagagaaataaagaacaagatgccacgtaagtggtcacaagaatgggaggttgagttggctatcaagataatgcacaaggtaatagaactgggtggtactccgacaattggtgattgtgccattatattgcgagctgctatgagagcaccactcccatctgcttttataccaatattgcaaacaacacacagtctaggttataagtttggaagcccactgtatgacgaagtagtcctattgtgccttgatctggaagaaattgacgcagccattgcagtagttgcggaaatggagacttgtggggttaaggtgccagatgaaaccttggacaaggtgcttgcgtccaaacggtctggaaattctgccctcccaccacctacggaggagtaatcaatttggacatgcgagacttctgctgctcgtgcttgacgtgacaccagaaaatcacaagcaatgcatatgtttggagcttctcctggaaaagaacatgctgtatgatagtttgtcggtgctgtgtccaacgatagaggagatatgaagttgttagtatgatacctggcatggtatatttgattagtccgttgaatttttgtatggatggtgaagcatgagaaaaggtcgagtttttttttataactggtggaatggtgtgggtgcgttgtcttagggtgctttgggtttggcttctgggagttgcttttgcttcaaaaagtcaaaagctgattaaagtgatagaaacaagaactttcggattttaactttttgctttttaaaatggtcaaaacagttgtttagagacatagataacaagtagaatttcaagtagaatttctacttgtttgaatcaaataatttaaagttttttatatagtttacaacacaacgcagtttaaccaaatacatccttaatcacttctgctaaaataccacgtctgctttaagatctagattctgtcagagagttaagacttttctagttgtattttaatccagaaaattgatatgaaataactagtgtggatctaat

SEQ ID NO: 10163 - DNA, 3390 bp, Zea Mays
caccgagccttatccaaagcccttcccttcactgtcccgctaaaccccggccacgaccacgatggccaccccctccacctccgctccgtcgccgtcgccgtcctccgccttcccactcaccaccaccacacgcttcccccgctcatgctcctgccccgtgcgagcctccgcgctcgccgagcggcggcgcacgcggcggcgccgggcgcccgatggtgggggcgccggtggggaccgctcggcggccgccggggcggtggagaagggcctgcgcctggtcttcctcgagcagctcgcggagcgcgcgagggctgccgacgccacgggcgtggccgacaccatctacgacatggtcgccgcggggctttcgcccgggccgcgctccttccacggcctcgtcgccgcgcatgtcctcgctggcaacgctgaaggcgccatgcaatctcttagaagggaactcagttctggtgtgcgccctctacatgaaacttttgtggctctggtccgtgtttttgccaagaagggtctttctaccaggggcatggagatccttgctgccatggagagatataagtatgatattcgcaaggcctggctaattcttgtagaggaactagtgaagaatcattatctcgaggatgccaatacggtatttctgaaaggggcaaaaggcggtctacgaggaactgatgatatttatgatcttctgattgaagaagattgcaaagctggagatcactccaatgctttgacagttgcttaccaaatggaggcttatggaagaatggcaaccacattccattttaattgccttctcagcgtgcaggctacttgtggaattcctgaagttgcctttgcaacatttgaaaacatggaatatggaggtgaagattacatgaaacctgatacagagtcttataactgggttatacaagcatttactagagctacgtcctatgacagggcagcggatgtcgcagaattactcgggatgatggtggaagatcacaaacgcattcaacctaatgcaagaacttatgcgttgttagtggaatgctttacaaagtactgtatggttaatgaatcaatcaggcattttcgtgctttacaaagaatccctggaggaacagaagtcctttacaatgaaggaaattgtggtgacccactttctctctatctacgatcattgtgcctcgatggtaacttaatttttataaccaggaaggcctgttgagttgcttgaggctttagaagcaatggctaatgataaccaaagtattgcacctcgagcaatgatcttaaacagaaaatatcgcacattggtgagctcctggatagaaccattacaagaagaagctgatgttggttttgaaattgattatgtggccagatatattgaagaaggaggtcttacaggagagcgcaaacgttgggtgcctcgcagaggaaaaactcctttggatccagatgaatttggatttgcctattcaaatccgatagaaacatcctttaaacagcgatgctttgaggaattgaagttatatcatcgaaaactcctaattacgttgagaaatgaaggccctggtattttgggtgatgtctctgaagaagatgtacgcagagttattgaaaggctaaaaaagttagttgtagggccaaagaaaaatgttgttaagcccaaggcggcaagcaaaatggtagtatctgaactgaaaactgagcttgaagctcaaggattacctactgatggaactagacaagtgctttaccagagagttcaaaaggctaggagaatcaatcgctcacgtggtgtaccactttgggttcctcctgtagaagacgaggaagaggttgatgaagatttagatgagctgatctcacgaatcaagccagaagatgggaacacggagttctggaaacgccgttttctgggagaaactcgaaactatctttgtgaagaagatagtaaagaagacggtcaagatttagatgatgaattggaagatgatgatgacaacgatgatgatgaggatgacgatgaatctgtaaaagaagcagaagaagatgagatagatgatgaagaggttgttgagcaaacagaaaatcaagttggtgatgacactaaagataaaccagcaaaagaacccaaccatcatcttcaaatgataggggtacagttattgaaggatatagagaggacacctgtttcttcaaagaaattaaagcggatgccagagattgatgatgatgaagactggtttcctgaagatccaattgaagcctttaaggttatgcgggaggagaggatgttcgatgtatcagacatgtatactactgcagatgcctggggatggacgtgggaaagagaaataaagaacaagatgccacgtaagtggtcacaagaatgggaggttgagttggctatcaagataatgcacaaggtaatagaactgggtggtactccgacaattggtgattgtgccattatattgcgagctgctatgagagcaccactcccatctgcttttataccaatattgcaaacaacacacagtctaggttataagtttggaagcccactgtatgacgaagtagtcctattgtgccttgatctggaagaaattgacgcagccattgcagtagttgcggaaatggagacttgtggggttaaggtgccagatgaaaccttggacaaggtgcttgcgtccaaacggtctggaaattctgccctcccaccacctacggaggagtaatcaatttggacatgcgagacttctgctgctcgtgcttgacgtgacaccagaaaatcacaagcaatgcatatgtttggagcttctcctggaaaagaacatgctgtatgatagtttgtcggtgctgtgtccaacgatagaggagatatgaagttgttagtatgatacctggcatggtatatttgattagtccgttgaatttttgtatggatggtgaagcatgagaaaaggtcgagtttttttttataactggtggaatggtgtgggtgcgttgtcttagggtgctttgggtttggcttctgggagttgcttttgcttcaaaaagtcaaaagctgattaaagtgatagaaacaagaactttcggattttaactttttgctttttaaaatggtcaaaacagttgtttagagacatagataacaagtagaatttcaagtagaatttctacttgtttgaatcaaataatttaaagttttttatatagtttacaacacaacgcagtttaaccaaatacatccttaatcacttctgctaaaataccacgtctgctttaagatctagattctgtcagagagttaagacttttctagttgtattttaatccagaaaattgatatgaaataactagtgtggatctaat

SEQ ID NO: 10164 - DNA, 2351 bp, Zea Mays
gaaacaccgagccttatccaaagcccttcccttcactgtcccgctaaaccccggccacgaccacgatggccaccccctccacctccgctccgtcgccgtcgccgtcctccgccttcccactcaccaccaccacacgcttcccccgctcatgctcctgccccgtgcgagcctccgcgctcgccgagcggcggcgcacgcggcggcgccgggcgcccgatggtgggggcgccggtggggaccgctcggcggccgccggggcggtggagaagggcctgcgcctggtcttcctcgagcagctcgcggagcgcgcgagggctgccgacgccacgggcgtggccgacaccatctacgacatggtcgccgcggggctttcgcccgggccgcgctccttccacggcctcgtcgccgcgcatgtcctcgctggcaacgctgaaggcgccatgcaatctcttagaagggaactcagttctggtgtgcgccctctacatgaaacttttgtggctctggtccgtgtttttgccaagaagggtctttctaccaggggcatggagatccttgctgccatggagagatataagtatgatattcgcaaggcctggctaattcttgtagaggaactagtgaagaatcattatctcgaggatgccaatacggtatttctgaaaggggcaaaaggcggtctacgaggaactgatgatatttatgatcttctgattgaagaagattgcaaagctggagatcactccaatgctttgacagttgcttaccaaatggaggcttatggaagaatggcaaccacattccattttaattgccttctcagcgtgcaggctacttgtggaattcctgaagttgcctttgcaacatttgaaaacatggaatatggaggtgaagattacatgaaacctgatacagagtcttataactgggttatacaagcatttactagagctacgtcctatgacagggcagcggatgtcgcagaattactcgggatgatggtggaagatcacaaacgcattcaacctaatgcaagaacttatgcgttgttgagcaaacagaaaatcaagttggtgatgacactaaagataaaccagcaaaagaacccaaccatcatcttcaaatgataggggtacagttattgaaggatatagagaggacacctgtttcttcaaagaaattaaagcggatgccagagattgatgatgatgaagactggtttcctgaagatccaattgaagcctttaaggttatgcgggaggagaggatgttcgatgtatcagacatgtatactactgcagatgcctggggatggacgtgggaaagagaaataaagaacaagatgccacgtaagtggtcacaagaatgggaggttgagttggctatcaagataatgcacaaggtaatagaactgggtggtactccgacaattggtgattgtgccattatattgcgagctgctatgagagcaccactcccatctgcttttataccaatattgcaaacaacacacagtctaggttataagtttggaagcccactgtatgacgaagtagtcctattgtgccttgatctggaagaaattgacgcagccattgcagtagttgcggaaatggagacttgtggggttaaggtgccagatgaaaccttggacaaggtgcttgcgtccaaacggtctggaaattctgccctcccaccacctacggaggagtaatcaatttggacatgcgagacttctgctgctcgtgcttgacgtgacaccagaaaatcacaagcaatgcatatgtttggagcttctcctggaaaagaacatgctgtatgatagtttgtcggtgctgtgtccaacgatagaggagatatgaagttgttagtatgatacctggcatggtatatttgattagtccgttgaatttttgtatggatggtgaagcatgagaaaaggtcgagtttttttttataactggtggaatggtgtgggtgcgttgtcttagggtgctttgggtttggcttctgggagttgcttttgcttcaaaaagtcaaaagctgattaaagtgatagaaacaagaactttcggattttaactttttgctttttaaaatggtcaaaacagttgtttagagacatagataacaagtagaatttcaagtagaatttctacttgtttgaatcaaataatttaaagttttttatatagtttacaacacaacgcagtttaaccaaatacatccttaatcacttctgctaaaataccacgtctgctttaagatctagattctgtcagagagttaagacttttctagttgtattttaatccagaaaattgatatgaaataactagtgtggatctaat

SEQ ID NO: 10165 - DNA, 3339 bp, Zea Mays
cagaaacaccgagccttatccaaagcccttcccttcactgtcccgctaaaccccggccacgaccacgatggccaccccctccacctccgctccgtcgccgtcgccgtcctccgccttcccactcaccaccaccacacgcttcccccgctcatgctcctgccccgtgcgagcctccgcgctcgccgagcggcggcgcacgcggcggcgccgggcgcccgatggtgggggcgccggtggggaccgctcggcggccgccggggcggtggagaagggcctgcgcctggtcttcctcgagcagctcgcggagcgcgcgagggctgccgacgccacgggcgtggccgacaccatctacgacatggtcgccgcggggctttcgcccgggccgcgctccttccacggcctcgtcgccgcgcatgtcctcgctggcaacgctgaaggcgccatgcaatctcttagaagggaactcagttctggtgtgcgccctctacatgaaacttttgtggctctggtccgtgtttttgccaagaagggtctttctaccaggggcatggagatccttgctgccatggagagatataaaggaactagtgaagaatcattatctcgaggatgccaatacggtatttctgaaaggggcaaaaggcggtctacgaggaactgatgatatttatgatcttctgattgaagaagattgcaaagctggagatcactccaatgctttgacagttgcttaccaaatggaggcttatggaagaatggcaaccacattccattttaattgccttctcagcgtgcaggctacttgtggaattcctgaagttgcctttgcaacatttgaaaacatggaatatggaggtgaagattacatgaaacctgatacagagtcttataactgggttatacaagcatttactagagctacgtcctatgacagggcagcggatgtcgcagaattactcgggatgatggtggaagatcacaaacgcattcaacctaatgcaagaacttatgcgttgttagtggaatgctttacaaagtactgtatggttaatgaatcaatcaggcattttcgtgctttacaaagaatccctggaggaacagaagtcctttacaatgaaggaaattgtggtgacccactttctctctatctacgatcattgtgcctcgatggaaggcctgttgagttgcttgaggctttagaagcaatggctaatgataaccaaagtattgcacctcgagcaatgatcttaaacagaaaatatcgcacattggtgagctcctggatagaaccattacaagaagaagctgatgttggttttgaaattgattatgtggccagatatattgaagaaggaggtcttacaggagagcgcaaacgttgggtgcctcgcagaggaaaaactcctttggatccagatgaatttggatttgcctattcaaatccgatagaaacatcctttaaacagcgatgctttgaggaattgaagttatatcatcgaaaactcctaattacgttgagaaatgaaggccctggtattttgggtgatgtctctgaagaagatgtacgcagagttattgaaaggctaaaaaagttagttgtagggccaaagaaaaatgttgttaagcccaaggcggcaagcaaaatggtagtatctgaactgaaaactgagcttgaagctcaaggattacctactgatggaactagacaagtgctttaccagagagttcaaaaggctaggagaatcaatcgctcacgtggtgtaccactttgggttcctcctgtagaagacgaggaagaggttgatgaagatttagatgagctgatctcacgaatcaagccagaagatgggaacacggagttctggaaacgccgttttctgggagaaactcgaaactatctttgtgaagaagatagtaaagaagacggtcaagatttagatgatgaattggaagatgatgatgacaacgatgatgatgaggatgacgatgaatctgtaaaagaagcagaagaagatgagatagatgatgaagaggttgttgagcaaacagaaaatcaagttggtgatgacactaaagataaaccagcaaaagaacccaaccatcatcttcaaatgataggggtacagttattgaaggatatagagaggacacctgtttcttcaaagaaattaaagcggatgccagagattgatgatgatgaagactggtttcctgaagatccaattgaagcctttaaggttatgcgggaggagaggatgttcgatgtatcagacatgtatactactgcagatgcctggggatggacgtgggaaagagaaataaagaacaagatgccacgtaagtggtcacaagaatgggaggttgagttggctatcaagataatgcacaaggtaatagaactgggtggtactccgacaattggtgattgtgccattatattgcgagctgctatgagagcaccactcccatctgcttttataccaatattgcaaacaacacacagtctaggttataagtttggaagcccactgtatgacgaagtagtcctattgtgccttgatctggaagaaattgacgcagccattgcagtagttgcggaaatggagacttgtggggttaaggtgccagatgaaaccttggacaaggtgcttgcgtccaaacggtctggaaattctgccctcccaccacctacggaggagtaatcaatttggacatgcgagacttctgctgctcgtgcttgacgtgacaccagaaaatcacaagcaatgcatatgtttggagcttctcctggaaaagaacatgctgtatgatagtttgtcggtgctgtgtccaacgatagaggagatatgaagttgttagtatgatacctggcatggtatatttgattagtccgttgaatttttgtatggatggtgaagcatgagaaaaggtcgagtttttttttataactggtggaatggtgtgggtgcgttgtcttagggtgctttgggtttggcttctgggagttgcttttgcttcaaaaagtcaaaagctgattaaagtgatagaaacaagaactttcggattttaactttttgctttttaaaatggtcaaaacagttgtttagagacatagataacaagtagaatttcaagtagaatttctacttgtttgaatcaaataatttaaagttttttatatagtttacaacacaacgcagtttaaccaaatacatccttaatcacttctgctaaaataccacgtctgctttaagatctagattctgtcagagagttaagacttttctagttgtattttaatccagaaaattgatatgaaataactagtgtggatctaat

SEQ ID NO: 10166 - DNA, 3442 bp, Zea Mays
acagtatttttcagactacctgaacttcagcaggtgcagtgcaggtagggaaccaattttcccaacttcagaaacaccgagccttatccaaagcccttcccttcactgtcccgctaaaccccggccacgaccacgatggccaccccctccacctccgctccgtcgccgtcgccgtcctccgccttcccactcaccaccaccacacgcttcccccgctcatgctcctgccccgtgcgagcctccgcgctcgccgagcggcggcgcacgcggcggcgccgggcgcccgatggtgggggcgccggtggggaccgctcggcggccgccggggcggtggagaagggcctgcgcctggtcttcctcgagcagctcgcggagcgcgcgagggctgccgacgccacgggcgtggccgacaccatctacgacatggtcgccgcggggctttcgcccgggccgcgctccttccacggcctcgtcgccgcgcatgtcctcgctggcaacgctgaaggcgccatgcaatctcttagaagggaactcagttctggtgtgcgccctctacatgaaacttttgtggctctggtccgtgtttttgccaagaagggtctttctaccaggggcatggagatccttgctgccatggagagatataagtatgatattcgcaaggcctggctaattcttgtagaggaactagtgaagaatcattatctcgaggatgccaatacggtatttctgaaaggggcaaaaggcggtctacgaggaactgatgatatttatgatcttctgattgaagaagattgcaaagctggagatcactccaatgctttgacagttgcttaccaaatggaggcttatggaagaatggcaaccacattccattttaattgccttctcagcgtgcaggctacttgtggaattcctgaagttgcctttgcaacatttgaaaacatggaatatggaggtgaagattacatgaaacctgatacagagtcttataactgggttatacaagcatttactagagctacgtcctatgacagggcagcggatgtcgcagaattactcgggatgatggtggaagatcacaaacgcattcaacctaatgcaagaacttatgcgttgttagtggaatgctttacaaagtactgtatggttaatgaatcaatcaggcattttcgtgctttacaaagaatccctggaggaacagaagtcctttacaatgaaggaaattgtggtgacccactttctctctatctacgatcattgtgcctcgatggaaggcctgttgagttgcttgaggctttagaagcaatggctaatgataaccaaagtattgcacctcgagcaatgatcttaaacagaaaatatcgcacattggtgagctcctggatagaaccattacaagaagaagctgatgttggttttgaaattgattatgtggccagatatattgaagaaggaggtcttacaggagagcgcaaacgttgggtgcctcgcagaggaaaaactcctttggatccagatgaatttggatttgcctattcaaatccgatagaaacatcctttaaacagcgatgctttgaggaattgaagttatatcatcgaaaactcctaattacgttgagaaatgaaggccctggtattttgggtgatgtctctgaagaagatgtacgcagagttattgaaaggctaaaaaagttagttgtagggccaaagaaaaatgttgttaagcccaaggcggcaagcaaaatggtagtatctgaactgaaaactgagcttgaagctcaaggattacctactgatggaactagacaagtgctttaccagagagttcaaaaggctaggagaatcaatcgctcacgtggtgtaccactttgggttcctcctgtagaagacgaggaagaggttgatgaagatttagatgagctgatctcacgaatcaagccagaagatgggaacacggagttctggaaacgccgttttctgggagaaactcgaaactatctttgtgaagaagatagtaaagaagacggtcaagatttagatgatgaattggaagatgatgatgacaacgatgatgatgaggatgacgatgaatctgtaaaagaagcagaagaagatgagatagatgatgaagaggttgttgagcaaacagaaaatcaagttggtgatgacactaaagataaaccagcaaaagaacccaaccatcatcttcaaatgataggggtacagttattgaaggatatagagaggacacctgtttcttcaaagaaattaaagcggatgccagagattgatgatgatgaagactggtttcctgaagatccaattgaagcctttaaggttatgcgggaggagaggatgttcgatgtatcagacatgtatactactgcagatgcctggggatggacgtgggaaagagaaataaagaacaagatgccacgtaagtggtcacaagaatgggaggttgagttggctatcaagataatgcacaaggtaatagaactgggtggtactccgacaattggtgattgtgccattatattgcgagctgctatgagagcaccactcccatctgcttttataccaatattgcaaacaacacacagtctaggttataagtttggaagcccactgtatgacgaagtagtcctattgtgccttgatctggaagaaattgacgcagccattgcagtagttgcggaaatggagacttgtggggttaaggtgccagatgaaaccttggacaaggtgcttgcgtccaaacggtctggaaattctgccctcccaccacctacggaggagtaatcaatttggacatgcgagacttctgctgctcgtgcttgacgtgacaccagaaaatcacaagcaatgcatatgtttggagcttctcctggaaaagaacatgctgtatgatagtttgtcggtgctgtgtccaacgatagaggagatatgaagttgttagtatgatacctggcatggtatatttgattagtccgttgaatttttgtatggatggtgaagcatgagaaaaggtcgagtttttttttataactggtggaatggtgtgggtgcgttgtcttagggtgctttgggtttggcttctgggagttgcttttgcttcaaaaagtcaaaagctgattaaagtgatagaaacaagaactttcggattttaactttttgctttttaaaatggtcaaaacagttgtttagagacatagataacaagtagaatttcaagtagaatttctacttgtttgaatcaaataatttaaagttttttatatagtttacaacacaacgcagtttaaccaaatacatccttaatcacttctgctaaaataccacgtctgctttaagatctagattctgtcagagagttaagacttttctagttgtattttaatccagaaaattgatatgaaataactagtgtggatctaat

SEQ ID NO: 10167 - DNA, 3438 bp, Zea Mays
acagtatttttcagactacctgaacttcagcaggtgcagtgcaggtagggaaccaattttcccaacttcagaaacaccgagccttatccaaagcccttcccttcactgtcccgctaaaccccggccacgaccacgatggccaccccctccacctccgctccgtcgccgtcgccgtcctccgccttcccactcaccaccaccacacgcttcccccgctcatgctcctgccccgtgcgagcctccgcgctcgccgagcggcggcgcacgcggcggcgccgggcgcccgatggtgggggcgccggtggggaccgctcggcggccgccggggcggtggagaagggcctgcgcctggtcttcctcgagcagctcgcggagcgcgcgagggctgccgacgccacgggcgtggccgacaccatctacgacatggtcgccgcggggctttcgcccgggccgcgctccttccacggcctcgtcgccgcgcatgtcctcgctggcaacgctgaaggcgccatgcaatctcttagaagggaactcagttctggtgtgcgccctctacatgaaacttttgtggctctggtccgtgtttttgccaagaagggtctttctaccaggggcatggagatccttgctgccatggagagatataagtatgatattcgcaaggcctggctaattcttgtagaggaactagtgaagaatcattatctcgaggatgccaatacggtatttctgaaaggggcaaaaggcggtctacgaggaactgatgatatttatgatcttctgattgaagaagattgcaaagctggagatcactccaatgctttgacagttgcttaccaaatggaggcttatggaagaatggcaaccacattccattttaattgccttctcagcgtgcaggctacttgtggaattcctgaagttgcctttgcaacatttgaaaacatggaatatggaggtgaagattacatgaaacctgatacagagtcttataactgggttatacaagcatttactagagctacgtcctatgacagggcagcggatgtcgcagaattactcgggatgatggtggaagatcacaaacgcattcaacctaatgcaagaacttatgcgttgttagtggaatgctttacaaagtactgtatggttaatgaatcaatcaggcattttcgtgctttacaaagaatccctggaggaacagaagtcctttacaatgaaggaaattgtggtgacccactttctctctatctacgatcattgtgcctcgatggcctgttgagttgcttgaggctttagaagcaatggctaatgataaccaaagtattgcacctcgagcaatgatcttaaacagaaaatatcgcacattggtgagctcctggatagaaccattacaagaagaagctgatgttggttttgaaattgattatgtggccagatatattgaagaaggaggtcttacaggagagcgcaaacgttgggtgcctcgcagaggaaaaactcctttggatccagatgaatttggatttgcctattcaaatccgatagaaacatcctttaaacagcgatgctttgaggaattgaagttatatcatcgaaaactcctaattacgttgagaaatgaaggccctggtattttgggtgatgtctctgaagaagatgtacgcagagttattgaaaggctaaaaaagttagttgtagggccaaagaaaaatgttgttaagcccaaggcggcaagcaaaatggtagtatctgaactgaaaactgagcttgaagctcaaggattacctactgatggaactagacaagtgctttaccagagagttcaaaaggctaggagaatcaatcgctcacgtggtgtaccactttgggttcctcctgtagaagacgaggaagaggttgatgaagatttagatgagctgatctcacgaatcaagccagaagatgggaacacggagttctggaaacgccgttttctgggagaaactcgaaactatctttgtgaagaagatagtaaagaagacggtcaagatttagatgatgaattggaagatgatgatgacaacgatgatgatgaggatgacgatgaatctgtaaaagaagcagaagaagatgagatagatgatgaagaggttgttgagcaaacagaaaatcaagttggtgatgacactaaagataaaccagcaaaagaacccaaccatcatcttcaaatgataggggtacagttattgaaggatatagagaggacacctgtttcttcaaagaaattaaagcggatgccagagattgatgatgatgaagactggtttcctgaagatccaattgaagcctttaaggttatgcgggaggagaggatgttcgatgtatcagacatgtatactactgcagatgcctggggatggacgtgggaaagagaaataaagaacaagatgccacgtaagtggtcacaagaatgggaggttgagttggctatcaagataatgcacaaggtaatagaactgggtggtactccgacaattggtgattgtgccattatattgcgagctgctatgagagcaccactcccatctgcttttataccaatattgcaaacaacacacagtctaggttataagtttggaagcccactgtatgacgaagtagtcctattgtgccttgatctggaagaaattgacgcagccattgcagtagttgcggaaatggagacttgtggggttaaggtgccagatgaaaccttggacaaggtgcttgcgtccaaacggtctggaaattctgccctcccaccacctacggaggagtaatcaatttggacatgcgagacttctgctgctcgtgcttgacgtgacaccagaaaatcacaagcaatgcatatgtttggagcttctcctggaaaagaacatgctgtatgatagtttgtcggtgctgtgtccaacgatagaggagatatgaagttgttagtatgatacctggcatggtatatttgattagtccgttgaatttttgtatggatggtgaagcatgagaaaaggtcgagtttttttttataactggtggaatggtgtgggtgcgttgtcttagggtgctttgggtttggcttctgggagttgcttttgcttcaaaaagtcaaaagctgattaaagtgatagaaacaagaactttcggattttaactttttgctttttaaaatggtcaaaacagttgtttagagacatagataacaagtagaatttcaagtagaatttctacttgtttgaatcaaataatttaaagttttttatatagtttacaacacaacgcagtttaaccaaatacatccttaatcacttctgctaaaataccacgtctgctttaagatctagattctgtcagagagttaagacttttctagttgtattttaatccagaaaattgatatgaaataactagtgtggatctaat

SEQ ID NO: 10168 - DNA, 1612 bp, Zea Mays
gtaccccgaaagaggactactatgatgagttcgatgaaatctaggaaactcgtttgctaagatggaagagggcaatgactactatgttgttaggaaaggtgatgtggtggcagtttacaaaactctaagtgattgccagggtcagatttgctcttcggtatctggtcctgctgcaagtgcctacaagggtcactcttggagcagaggaaaggaggaatacctgtcttcacggggactaagtgatgctacatacgtaatcaatgcagccgaactcagggaagatatacttggcccccttgtgccctgtagtttccaggacatacttggttctagttcaaatcaactggctccaaatcatataggcttccataatgttatagcatctcagactggagcacaatatgttgatctgaaccatgaagccagatctagttcatccagacatatctcaccagcaaatttcaatcataccggaactgttgatgcacaacctatctcaaaacaatacatggtgggtattcttcattttgatggtgcttcaaaagggaacccaggtaaagcaggtgctggagctgtgcttatgactgaagatggaagagtggtataataaaatacttagtgcacttgatttttttttgtttgtggttgctccatctatcacttggttcactgatgttatcacataaccttgaagatatctcggcttcgtgagggtcttggtgtcgctactaataatgttgctgagtatcgaggcctgatcttaggactgaaatatgcgattcggcatggattcaagagaattaaagtacatggggactctcaacttgtctgcaatcaggtgaatggtgtttggcaaacgaagcagccgaatatgatggagctgtgcactgaagcgagaaagctaaaagagaacttccattcctttgagatcatccatgttcgacgggagtggaatgctgaggcggatcgtcaggcgaacatcggtatcacgcttgcaagtggcgccgtgtttgaggagcgtggtgacatctgatacatagctagcaacgtatgtatttaactaactagcttgacctttgacttgcacctttgtcgagcttctatgctgctctgcagcagccatcaggagctgaggtgatggcctgccgtctagtaggcactatatccaattactttacactagttggacctatttcaccatcaagctgctacggaagcctgatttctgctatggggcctcagtttgatgtgaaactgtgctttggaagcttgatgttgctcgataagttgatctatgaatggagaattttaatttgtcagctagcctttagatcgctatttagattttggatttgaacactctttgaactagcatccttaggctatcttcaacaccttactcataatcatactcatattcaaactttattctgtatagtggaaaacagtggtgaattcacggacatggtctaacgtttcatgccatgaattttggtagaattaacatattccttttgcatataaaaatttgagtaaaaatgtattaacgatccttgaacttggtgtgctgtgttacttaggtcattaaaaggggcggatgcaagaggtagtc

SEQ ID NO: 10169 - DNA, 1724 bp, Zea Mays
cccaacagcagcctctagtccctcacatcgacctgcccgtcgccagcccctcacgttgtcctgcccaccgccagcccctcctctgccccccgccggccgcccacctccagccccacctctacccgccgccctcctctggccgcctcccctcctctggccgccgcccaggcacccaccgccagccgtcgaggcctgcaccgccctctaatcaccgcccaggcgtccacctctgactgccgcccacctccagccgtcgaggcttctggtggaaactcgtttgctaagatggaagagggcaatgactactatgttgttaggaaaggtgatgtggtggcagtttacaaaactctaagtgattgccagggtcagatttgctcttcggtgcctacaagggtcactcttggagcagaggaaaggaggaatacctgtcttcacggggactaagtgatgctacatacgtaatcaatgcagccgaactcagggaagatatacttggcccccttgtgccctgtagtttccaggacatacttggttctagttcaaatcaactggctccaaatcatataggcttccataatgttatagcatctcagactggagcacaatatgttgatctgaaccatgaagccagatctagttcatccagacatatctcaccagcaaatttcaatcataccggaactgttgatgcacaacctatctcaaaacaatacatggtgggtattcttcattttgatggtgcttcaaaagggaacccaggtaaagcaggtgctggagctgtgcttatgactgaagatggaagagtgatatctcggcttcgtgagggtcttggtgtcgctactaataatgttgctgagtatcgaggcctgatcttaggactgaaatatgcgattcggcatggattcaagagaattaaagtacatggggactctcaacttgtctgcaatcaggtgaatggtgtttggcaaacgaagcagccgaatatgatggagctgtgcactgaagcgagaaagctaaaagagaacttccattcctttgagatcatccatgttcgacgggagtggaatgctgaggcggatcgtcaggcgaacatcggtatcacgcttgcaagtggcgccgtgtttgaggagcgtggtgacatctgatacatagctagcaacgtatgtatttaactaactagcttgacctttgacttgcacctttgtcgagcttctatgctgctctgcagcagccatcaggagctgaggtgatggcctgccgtctagtaggcactatatccaattactttacactagttggacctatttcaccatcaagctgctacggaagcctgatttctgctatggggcctcagtttgatgtgaaactgtgctttggaagcttgatgttgctcgataagttgatctatgaatggagaattttaatttgtcagctagcctttagatcgctatttagattttggatttgaacactctttgaactagcatccttaggctatcttcaacaccttactcataatcatactcatattcaaactttattctgtatagtggaaaacagtggtgaattcacggacatggtctaacgtttcatgccatgaattttggtagaattaacatattccttttgcatataaaaatttgagtaaaaatgtattaacgatccttgaacttggtgtgctgtgttacttaggtcattaaaaggggcggatgcaagaggtagtc

SEQ ID NO: 10170 - DNA, 1789 bp, Zea Mays
aacatcagaaaggcccattagtccattacacaccataaaccctaaacccaacagcagcctctagtccctcacatcgacctgcccgtcgccagcccctcacgttgtcctgcccaccgccagcccctcctctgccccccgccggccgcccacctccagccccacctctacccgccgccctcctctggccgcctcccctcctctggccgccgcccaggcacccaccgccagccgtcgaggcctgcaccgccctctaatcaccgcccaggcgtccacctctgactgccgcccacctccagccgtcgaggcttctggtggaaactcgtttgctaagatggaagagggcaatgactactatgttgttaggaaaggtgatgtggtggcagtttacaaaactctaagtgattgccagggtcagatttgctcttcggtatctggtcctgctgcaagtgcctacaagggtcactcttggagcagaggaaaggaggaatacctgtcttcacggggactaagtgatgctacatacgtaatcaatgcagccgaactcagggaagatatacttggcccccttgtgccctgtagtttccaggacatacttggttctagttcaaatcaactggctccaaatcatataggcttccataatgttatagcatctcagactggagcacaatatgttgatctgaaccatgaagccagatctagttcatccagacatatctcaccagcaaatttcaatcataccggaactgttgatgcacaacctatctcaaaacaatacatggtgggtattcttcattttgatggtgcttcaaaagggaacccaggtaaagcaggtgctggagctgtgcttatgactgaagatggaagagtgatatctcggcttcgtgagggtcttggtgtcgctactaataatgttgctgagtatcgaggcctgatcttaggactgaaatatgcgattcggcatggattcaagagaattaaagtacatggggactctcaacttgtctgcaatcaggtgaatggtgtttggcaaacgaagcagccgaatatgatggagctgtgcactgaagcgagaaagctaaaagagaacttccattcctttgagatcatccatgttcgacgggagtggaatgctgaggcggatcgtcaggcgaacatcggtatcacgcttgcaagtggcgccgtgtttgaggagcgtggtgacatctgatacatagctagcaacgtatgtatttaactaactagcttgacctttgacttgcacctttgtcgagcttctatgctgctctgcagcagccatcaggagctgaggtgatggcctgccgtctagtaggcactatatccaattactttacactagttggacctatttcaccatcaagctgctacggaagcctgatttctgctatggggcctcagtttgatgtgaaactgtgctttggaagcttgatgttgctcgataagttgatctatgaatggagaattttaatttgtcagctagcctttagatcgctatttagattttggatttgaacactctttgaactagcatccttaggctatcttcaacaccttactcataatcatactcatattcaaactttattctgtatagtggaaaacagtggtgaattcacggacatggtctaacgtttcatgccatgaattttggtagaattaacatattccttttgcatataaaaatttgagtaaaaatgtattaacgatccttgaacttggtgtgctgtgttacttaggtcattaaaaggggcggatgcaagaggtagtc

SEQ ID NO: 10171 - DNA, 854 bp, Zea Mays
cccaacagcagcctctagtccctcacatcgacctgcccgtcgccagcccctcacgttgtcctgcccaccgccagcccctcctctgccccccgccggccgcccacctccagccccacctctacccgccgccctcctctggccgcctcccctcctctggccgccgcccaggcacccaccgccagccgtcgaggcctgcaccgccctctaatcaccgcccaggcgtccacctctgactgccgcccacctccagccgtcgaggcttctggtggaaactcgtttgctaagatggaagagggcaatgactactatgttgttaggaaaggtgatgtggtggcagtttacaaaactctaagtgattgccagggtcagatttgctcttcggtatctggtcctgctgcaagtgcctacaagggtcactcttggagcagaggaaaggaggaatacctgtcttcacggggactaagtgatgctacatacgtaatcaatgcagccgaactcagggaagatatacttggcccccttgtgccctgtagtttccaggacatacttggttctagttcaaatcaactggctccaaatcatataggcttccataatgttatagcatctcagactggagcacaatatgttgatctgaaccatgaagccagatctagttcatccagacatatctcaccagcaaatttcaatcataccggaactgttgatgcacaacctatctcaaaacaatacgtttcggacttttggcgtatttcttcttttcctggcgtatttcttcttttcctttacttttgaggctgagtactggtaatttcttgtcctttggagacttcttatttcttgtatattatttg

SEQ ID NO: 10172 - DNA, 745 bp, Zea Mays
cccaacagcagcctctagtccctcacatcgacctgcccgtcgccagcccctcacgttgtcctgcccaccgccagcccctcctctgccccccgccggccgcccacctccagccccacctctacccgccgccctcctctggccgcctcccctcctctggccgccgcccaggcacccaccgccagccgtcgaggcctgcaccgccctctaatcaccgcccaggcgtccacctctgactgccgcccacctccagccgtcgaggcttctggtggaaactcgtttgctaagatggaagagggcaatgactactatgttgttaggaaaggtgatgtggtggcagtttacaaaactctaagtgattgccagggtcagatttgctcttcggtatctggtcctgctgcaagtgcctacaagggtcactcttggagcagaggaaaggaggaatacctgtcttcacggggactaagtgatgctacatacgtaatcaatgcagccgaactcagggaagatatacttggcccccttgtgccctgtagtttccaggacatacttggttctagttcaaatcaactggctccaaatcatataggcttccataatgttatagcatctcagactggagcacaatatgttgatctgaaccataagacgctccggctatcccttcggactctacccgaccaagacgcatcatcaggcgttcaaggaaagatcattcacgtcgaagaagatttgcgttgcgctctgc

SEQ ID NO: 10173 - DNA, 1978 bp, Zea Mays
atggttgattttgtcagggaaggttttcttgggagtactcatgaattccgaaacaggttccagaaccccattgaaaatgggcaacacacgaattcaacatcagatgatgtgaagatcatgaaccaacgatcacacatcttgtttgaacaactgaaaggttttgtccagcgaaagagcatgaacgttgtgaagaatgatctaccaccaaagaaggtttttgttattactgtaaagctctcacagctgcagaggaagctatacaaaaggttcttggatgttcatggtttctcaagtagtggttattcagaaaaatctcacaggtccttctttgccaagtaccagacattatcccaggtatggaatcatccggggctcctccagatggctaaagaacaaagaggaaatttgcgtcgtgaagacgcggttgagaattttatgatggatgagagttcaagcgatgataatgttgaaaattacttgcctaatggaggaaagtaactggtgggaggaacttttagatgagaatacttatatgaaagcagattacagtggcaaaatgaccttgctccttgatatcctgtcaaaaagttctgaattaggcgacaaagtattagtgtttagccagagtttgaccactctggatttagtagagttttatctggcaaaattgcaaatcaatggaaaagaaggcaaacattggaagcgggggaaggattggtacaggcttgatgggagcactccatcttctgatcgtcagaatcttgtggagatgtttaatgaccttgaaaacacaagagtgaaatgcacattgatatcaactcgtgctggatccctgggtatcaaccttcatgctgcaaatcgcgtggttcttcttgatggatcatggaatccaacacatgatctgcaagccatttatcgagtttggaggtatggccagaccaaacctgtatatgcctaccgcctaatggcacatcaaacaatggaagagaaaatatataagcgccaggtgacaaaggaaggccttgcagcaagggtggtggatagacagcaagtttcaagaaccatctccaaagaagagatgctgcatctttttgaatttggtgaagaggaattaatggaacagaacgagaatggttctactatgattgagaagccatccacttctaacactattaaaacctctgtgcctgttcctgtcgacagtctcatgctgagcctgctcagtgagcaaactcggtggatttcaggttaccatgaacatgaagctctcctccaagaaaatgaagaagaaaagcttacaaaggaggagcaggacctggctttgtccgaatgggagtcattgaggaaagctgcatctgatcctgagagaaaatcaagcatgagcgcagttccaacatatcccaatcctgtgcggccacttaagcctgcttcaagaagccggcaactgcagcaacctaaggctaactcaaataaccaaaagaagtgcaccaacttaacccacttgctgactctgagaagccatggcacaaaagcagggtgcacgacaacctgtaacgagtgcggccaggaaattagttgggagactctaaacagagatggtagatcgagatgatgcctgtctctgtggcattgccagatttttttggggtctttatgtaatgttaacgtccaggtagcagtatatatattgcgtatacgagagtattagagtaggtagaatgtagaatggacaaaaaatggctcttgtggtacacatggtagaacgcatgggatgcaaaaaatgaacgatcacattgttatggaatgtagtcgtaacaagatgtttgttatgcacttattgtcattttcttttccttatcctcagcgctagctattttaagtcaagtgtttgtctgaaatttgccaatcggaaggcataactttataggtttaaaataatgaatactaataatgtcttggaaccgattctcttacctcg

SEQ ID NO: 10174 - DNA, 2044 bp, Zea Mays
atggttgattttgtcagggaaggttttcttgggagtactcatgaattccgaaacaggttccagaaccccattgaaaatgggcaacacacgaattcaacatcagatgatgtgaagatcatgaaccaacgatcacacatcttgtttgaacaactgaaaggttttgtccagcgaaagagcatgaacgttgtgaagaatgatctaccaccaaagaaggtttttgttattactgtaaagctctcacagctgcagaggaagctatacaaaaggttcttggatgttcatggtttctcaagtagtggttattcagaaaaatctcacaggtccttctttgccaagtaccagacattatcccaggtatggaatcatccggggctcctccagatggctaaagaacaaagaggaaatttgcgtcgtgaagacgcggttgagaattttatgatggatgagagttcaagcgatgataatgttgaaaattacttgcctaatggagagaagcaaaaggataaagctgatcagcagtccaagaaaagcaacatcattatgaatgagattgtaggaaagtaactggtgggaggaacttttagatgagaatacttatatgaaagcagattacagtggcaaaatgaccttgctccttgatatcctgtcaaaaagttctgaattaggcgacaaagtattagtgtttagccagagtttgaccactctggatttagtagagttttatctggcaaaattgcaaatcaatggaaaagaaggcaaacattggaagcgggggaaggattggtacaggcttgatgggagcactccatcttctgatcgtcagaatcttgtggagatgtttaatgaccttgaaaacacaagagtgaaatgcacattgatatcaactcgtgctggatccctgggtatcaaccttcatgctgcaaatcgcgtggttcttcttgatggatcatggaatccaacacatgatctgcaagccatttatcgagtttggaggtatggccagaccaaacctgtatatgcctaccgcctaatggcacatcaaacaatggaagagaaaatatataagcgccaggtgacaaaggaaggccttgcagcaagggtggtggatagacagcaagtttcaagaaccatctccaaagaagagatgctgcatctttttgaatttggtgaagaggaattaatggaacagaacgagaatggttctactatgattgagaagccatccacttctaacactattaaaacctctgtgcctgttcctgtcgacagtctcatgctgagcctgctcagtgagcaaactcggtggatttcaggttaccatgaacatgaagctctcctccaagaaaatgaagaagaaaagcttacaaaggaggagcaggacctggctttgtccgaatgggagtcattgaggaaagctgcatctgatcctgagagaaaatcaagcatgagcgcagttccaacatatcccaatcctgtgcggccacttaagcctgcttcaagaagccggcaactgcagcaacctaaggctaactcaaataaccaaaagaagtgcaccaacttaacccacttgctgactctgagaagccatggcacaaaagcagggtgcacgacaacctgtaacgagtgcggccaggaaattagttgggagactctaaacagagatggtagatcgagatgatgcctgtctctgtggcattgccagatttttttggggtctttatgtaatgttaacgtccaggtagcagtatatatattgcgtatacgagagtattagagtaggtagaatgtagaatggacaaaaaatggctcttgtggtacacatggtagaacgcatgggatgcaaaaaatgaacgatcacattgttatggaatgtagtcgtaacaagatgtttgttatgcacttattgtcattttcttttccttatcctcagcgctagctattttaagtcaagtgtttgtctgaaatttgccaatcggaaggcataactttataggtttaaaataatgaatactaataatgtcttggaaccgattctcttacctcg

SEQ ID NO: 10175 - DNA, 1842 bp, Zea Mays
atggttgattttgtcagggaaggttttcttgggagtactcatgaattccgaaacaggttccagaaccccattgaaaatgggcaacacacgaattcaacatcagatgatgtgaagatcatgaaccaacgatcacacatcttgtttgaacaactgaaaggttttgtccagcgaaagagcatgaacgttgtgaagaatgatctaccaccaaagaaggtttttgttattactgtaaagctctcacagctgcagaggaagctatacaaaaggttcttggatgttcatggtttctcaagtagtggttattcagaaaaatctcacaggtccttctttgccaagtaccagacattatcccaggaaagtaactggtgggaggaacttttagatgagaatacttatatgaaagcagattacagtggcaaaatgaccttgctccttgatatcctgtcaaaaagttctgaattaggcgacaaagtattagtgtttagccagagtttgaccactctggatttagtagagttttatctggcaaaattgcaaatcaatggaaaagaaggcaaacattggaagcgggggaaggattggtacaggcttgatgggagcactccatcttctgatcgtcagaatcttgtggagatgtttaatgaccttgaaaacacaagagtgaaatgcacattgatatcaactcgtgctggatccctgggtatcaaccttcatgctgcaaatcgcgtggttcttcttgatggatcatggaatccaacacatgatctgcaagccatttatcgagtttggaggtatggccagaccaaacctgtatatgcctaccgcctaatggcacatcaaacaatggaagagaaaatatataagcgccaggtgacaaaggaaggccttgcagcaagggtggtggatagacagcaagtttcaagaaccatctccaaagaagagatgctgcatctttttgaatttggtgaagaggaattaatggaacagaacgagaatggttctactatgattgagaagccatccacttctaacactattaaaacctctgtgcctgttcctgtcgacagtctcatgctgagcctgctcagtgagcaaactcggtggatttcaggttaccatgaacatgaagctctcctccaagaaaatgaagaagaaaagcttacaaaggaggagcaggacctggctttgtccgaatgggagtcattgaggaaagctgcatctgatcctgagagaaaatcaagcatgagcgcagttccaacatatcccaatcctgtgcggccacttaagcctgcttcaagaagccggcaactgcagcaacctaaggctaactcaaataaccaaaagaagtgcaccaacttaacccacttgctgactctgagaagccatggcacaaaagcagggtgcacgacaacctgtaacgagtgcggccaggaaattagttgggagactctaaacagagatggtagatcgagatgatgcctgtctctgtggcattgccagatttttttggggtctttatgtaatgttaacgtccaggtagcagtatatatattgcgtatacgagagtattagagtaggtagaatgtagaatggacaaaaaatggctcttgtggtacacatggtagaacgcatgggatgcaaaaaatgaacgatcacattgttatggaatgtagtcgtaacaagatgtttgttatgcacttattgtcattttcttttccttatcctcagcgctagctattttaagtcaagtgtttgtctgaaatttgccaatcggaaggcataactttataggtttaaaataatgaatactaataatgtcttggaaccgattctcttacctcg

SEQ ID NO: 10176 - DNA, 2056 bp, Zea Mays
ttttcaatcttgtgagcagatggttgattttgtcagggaaggttttcttgggagtactcatgaattccgaaacaggttccagaaccccattgaaaatgggcaacacacgaattcaacatcagatgatgtgaagatcatgaaccaacgatcacacatcttgtttgaacaactgaaaggttttgtccagcgaaagagcatgaacgttgtgaagaatgatctaccaccaaagaaggtttttgttattactgtaaagctctcacagctgcagaggaagctatacaaaaggttcttggatgttcatggtttctcaagtagtggttattcagaaaaatctcacaggtccttctttgccaagtaccagacattatcccaggtatggaatcatccggggctcctccagatggctaaagaacaaagaggaaatttgcgtcgtgaagacgcggttgagaattttatgatggatgagagttcaagcgatgataatgttgaaaattacttgcctaatggagagaagcaaaaggataaagctgatcagcagtccaagaaaagcaacatcattatgaatgaggaaagtaactggtgggaggaacttttagatgagaatacttatatgaaagcagattacagtggcaaaatgaccttgctccttgatatcctgtcaaaaagttctgaattaggcgacaaagtattagtgtttagccagagtttgaccactctggatttagtagagttttatctggcaaaattgcaaatcaatggaaaagaaggcaaacattggaagcgggggaaggattggtacaggcttgatgggagcactccatcttctgatcgtcagaatcttgtggagatgtttaatgaccttgaaaacacaagagtgaaatgcacattgatatcaactcgtgctggatccctgggtatcaaccttcatgctgcaaatcgcgtggttcttcttgatggatcatggaatccaacacatgatctgcaagccatttatcgagtttggaggtatggccagaccaaacctgtatatgcctaccgcctaatggcacatcaaacaatggaagagaaaatatataagcgccaggtgacaaaggaaggccttgcagcaagggtggtggatagacagcaagtttcaagaaccatctccaaagaagagatgctgcatctttttgaatttggtgaagaggaattaatggaacagaacgagaatggttctactatgattgagaagccatccacttctaacactattaaaacctctgtgcctgttcctgtcgacagtctcatgctgagcctgctcagtgagcaaactcggtggatttcaggttaccatgaacatgaagctctcctccaagaaaatgaagaagaaaagcttacaaaggaggagcaggacctggctttgtccgaatgggagtcattgaggaaagctgcatctgatcctgagagaaaatcaagcatgagcgcagttccaacatatcccaatcctgtgcggccacttaagcctgcttcaagaagccggcaactgcagcaacctaaggctaactcaaataaccaaaagaagtgcaccaacttaacccacttgctgactctgagaagccatggcacaaaagcagggtgcacgacaacctgtaacgagtgcggccaggaaattagttgggagactctaaacagagatggtagatcgagatgatgcctgtctctgtggcattgccagatttttttggggtctttatgtaatgttaacgtccaggtagcagtatatatattgcgtatacgagagtattagagtaggtagaatgtagaatggacaaaaaatggctcttgtggtacacatggtagaacgcatgggatgcaaaaaatgaacgatcacattgttatggaatgtagtcgtaacaagatgtttgttatgcacttattgtcattttcttttccttatcctcagcgctagctattttaagtcaagtgtttgtctgaaatttgccaatcggaaggcataactttataggtttaaaataatgaatactaataatgtcttggaaccgattctcttacctcg

SEQ ID NO: 10177 - DNA, 2104 bp, Zea Mays
cggaagggtggcctcgtgtgtgggcgtggccagggcgacactccttcgccctctccctacaacccgtggaccggccacatctccatgtggcccggactatccccgggtggacctccacacccaccttggccctagcctgctcaattgacgctgcccaacccgagttatccttccggcccctttcccccgctcctctggcacctcatccaccgcaccactacttcccttgcctccactcgttccgtcctggaacccgtggtctggtggatgggatcgcagtctctggccaactccttcagtataatgaccctggccccctgccttcgttgactgggttgctgattttagtgcttcctaccacaccgctccagacgctggtaagggaagaggatgacgcaaaaataatgaagtgcctgcagcgccgtttgaaaggaaaaaggatgagagactggtgtaaggagaactttggtttggtctcatcatgtgacgagaagcctcctctaccagaaaatggcgttttaggtgctaaaagtgactgtccttcatctaaaaaactcaaaactgatgaaaacaaagtttctattgagatatgaagcatacatgtgaagatgatgataatgagaagagattgaaaactgtgatagttgaaagcgatgatgatatgcagatagatagcaaacaagctttacaaaaggatggtgaaggtagttcaacagaatttgaaaaagtggttgatatcattgatcttgatctcttcccaagccctaagctccctaataaaagtttgcataaaactttcaaatgtactatttgctctgaaatgctgaatgcctctgatgtgcatcgccaccctgtcttggatgttgttgtttgtggatcatgcagatttcttgtgatagagaagaatcgccttgaggatcctgtatctggtagttattgcacttggtgtgcacaaagtgaactgattcaaagttgtagttcttgtaagcttcttttctgtacaaattgcttgtcaaggaatttaggtgaagaatgcttatcagaagctaaagccactggttggcagtgttgctgctgtgtacccagtcaactagagctcttaatttctgaatgtgacaaggccctcagtggtgtggaatcttccgattcagagactagcaatgcagagctttctggatcagagaataatggtcctgttagcaagcaaaaaatgaagaagagtattagaagaattatggatgatacagaacttggtgaagaaacaaagcgtaaaattgcaatggagaaggcaaggcaagaccatttgaagtcaatgcaagagcaatctgccaccaagttaaggagcaagaatgttggaaatccctttgaaactccactggaaatctgtttacaggatgctggggatggacatgtagtcaaccttgccagggaggaggatgaggaacctgttaggattccaagcagcatgtcttctaaactgaagcctcatcaggttgaaggaataaggtttatgtgggaaaatgttattcaatctgttaaaaaggtcaaatccagggataaaggtcttgggtgcattttggcgcataacatgggccttgggaaaacttttcaggtctgtgttgggctgttggcttatagcttggatatatatttacattttcttcaagagttattcgttcattgtatgctgcacctattgtacccatgacaatcaattatgtgctggaactagatcatgcatgccagaaacttcaatttttgtacatgtattcttatatttgtgatgaagttattgttgggctgacatcaattttgagttcaatgcatcgtgggcccttgttaagagatgtcacttaggtccacaaactttgtaaatacatttttgggctgacattcaattttgagttaaatgcacgccgtgggagagaaaggtgtaagacgtagagttatcaaactccctttcattgtcgcactgaagagcttggatggtacgaccgaattgagtcgacactcacgcgaagaagtgagaaaggtgggaggtgttagacttacaacagaggggaaaggtccacaaatagtgagagaagtcatccagaatggcgag

SEQ ID NO: 10178 - DNA, 2145 bp, Zea Mays
atgctgctggaatgaacttcccagactctataagacaattgaaagtcaagttccaaatgtttgtcaaactgaagcatggaagagcaggacacattgggctggttctcaagtgcctgaagaagctacccaatccattaaaaaggccgatgaatacctccagtcttgcagacctgtacggagaaaacatgggaggttgctggaggaaggtgctagtggttttcttgctgggaaagttcctgttggggatgatgattctgttaagtgtcatgagaaaagttggagctctttcaatgaacttattaaatctaaggagagtgctgagaatacatttggtagcagtaactgggcatcagtttatcttgcaagtaccccccaggaagcagccgcattaggtctccagtttcctggagttgatgaggtaagggaagaggatgacgcaaaaataatgaagtgcctgcagcgccgtttgaaaggaaaaaggatgagagactggtgtaaggagaactttggtttggtctcatcatgtgacgagaagcctcctctaccagaaaatggcgttttaggtgctaaaagtgactgtccttcatctaaaaaactcaaaactgatgaaaacaaagtttctattgagatatgaagcatacatgtgaagatgatgataatgagaagagattgaaaactgtgatagttgaaagcgatgatgatatgcagatagatagcaaacaagctttacaaaaggatggtgaaggtagttcaacagaatttgaaaaagtggttgatatcattgatcttgatctcttcccaagccctaagctccctaataaaagtttgcataaaactttcaaatgtactatttgctctgaaatgctgaatgcctctgatgtgcatcgccaccctgtcttggatgttgttgtttgtggatcatgcagatttcttgtgatagagaagaatcgccttgaggatcctgtatctggtagttattgcacttggtgtgcacaaagtgaactgattcaaagttgtagttcttgtaagcttcttttctgtacaaattgcttgtcaaggaatttaggtgaagaatgcttatcagaagctaaagccactggttggcagtgttgctgctgtgtacccagtcaactagagctcttaatttctgaatgtgacaaggccctcagtggtgtggaatcttccgattcagagactagcaatgcagagctttctggatcagagaataatggtcctgttagcaagcaaaaaatgaagaagagtattagaagaattatggatgatacagaacttggtgaagaaacaaagcgtaaaattgcaatggagaaggcaaggcaagaccatttgaagtcaatgcaagagcaatctgccaccaagttaaggagcaagaatgttggaaatccctttgaaactccactggaaatctgtttacaggatgctggggatggacatgtagtcaaccttgccagggaggaggatgaggaacctgttaggattccaagcagcatgtcttctaaactgaagcctcatcaggttgaaggaataaggtttatgtgggaaaatgttattcaatctgttaaaaaggtcaaatccagggataaaggtcttgggtgcattttggcgcataacatgggccttgggaaaacttttcaggtctgtgttgggctgttggcttatagcttggatatatatttacattttcttcaagagttattcgttcattgtatgctgcacctattgtacccatgacaatcaattatgtgctggaactagatcatgcatgccagaaacttcaatttttgtacatgtattcttatatttgtgatgaagttattgttgggctgacatcaattttgagttcaatgcatcgtgggcccttgttaagagatgtcacttaggtccacaaactttgtaaatacatttttgggctgacattcaattttgagttaaatgcacgccgtgggagagaaaggtgtaagacgtagagttatcaaactccctttcattgtcgcactgaagagcttggatggtacgaccgaattgagtcgacactcacgcgaagaagtgagaaaggtgggaggtgttagacttacaacagaggggaaaggtccacaaatagtgagagaagtcatccagaatggcgag

SEQ ID NO: 10179 - DNA, 2197 bp, Zea Mays
ggatgctgctggaatgaacttcccagactctataagacaattgaaagtcaagttccaaatgtttgtcaaactgaagcatggaagagcaggacacattgggctggttctcaagtgcctgaagaagctacccaatccattaaaaaggccgatgaatacctccagtcttgcagacctgtacggagaaaacatgggaggttgctggaggaaggtgctagtggttttcttgctgggaaagttcctgttggggatgatgattctgttaagtgtcatgagaaaagttggagctctttcaatgaacttattaaatctaaggagagtgctgagaatacatttggtagcagtaactgggcatcagtttatcttgcaagtaccccccaggaagcagccgcattaggtctccagtttcctggagttgatgaggtgtagatgaagtagagctttctgaggaacagagaaggaaatacagaaaggtaagggaagaggatgacgcaaaaataatgaagtgcctgcagcgccgtttgaaaggaaaaaggatgagagactggtgtaaggagaactttggtttggtctcatcatgtgacgagaagcctcctctaccagaaaatggcgttttaggtgctaaaagtgactgtccttcatctaaaaaactcaaaactgatgaaaacaaagtttctattgagatatgaagcatacatgtgaagatgatgataatgagaagagattgaaaactgtgatagttgaaagcgatgatgatatgcagatagatagcaaacaagctttacaaaaggatggtgaaggtagttcaacagaatttgaaaaagtggttgatatcattgatcttgatctcttcccaagccctaagctccctaataaaagtttgcataaaactttcaaatgtactatttgctctgaaatgctgaatgcctctgatgtgcatcgccaccctgtcttggatgttgttgtttgtggatcatgcagatttcttgtgatagagaagaatcgccttgaggatcctgtatctggtagttattgcacttggtgtgcacaaagtgaactgattcaaagttgtagttcttgtaagcttcttttctgtacaaattgcttgtcaaggaatttaggtgaagaatgcttatcagaagctaaagccactggttggcagtgttgctgctgtgtacccagtcaactagagctcttaatttctgaatgtgacaaggccctcagtggtgtggaatcttccgattcagagactagcaatgcagagctttctggatcagagaataatggtcctgttagcaagcaaaaaatgaagaagagtattagaagaattatggatgatacagaacttggtgaagaaacaaagcgtaaaattgcaatggagaaggcaaggcaagaccatttgaagtcaatgcaagagcaatctgccaccaagttaaggagcaagaatgttggaaatccctttgaaactccactggaaatctgtttacaggatgctggggatggacatgtagtcaaccttgccagggaggaggatgaggaacctgttaggattccaagcagcatgtcttctaaactgaagcctcatcaggttgaaggaataaggtttatgtgggaaaatgttattcaatctgttaaaaaggtcaaatccagggataaaggtcttgggtgcattttggcgcataacatgggccttgggaaaacttttcaggtctgtgttgggctgttggcttatagcttggatatatatttacattttcttcaagagttattcgttcattgtatgctgcacctattgtacccatgacaatcaattatgtgctggaactagatcatgcatgccagaaacttcaatttttgtacatgtattcttatatttgtgatgaagttattgttgggctgacatcaattttgagttcaatgcatcgtgggcccttgttaagagatgtcacttaggtccacaaactttgtaaatacatttttgggctgacattcaattttgagttaaatgcacgccgtgggagagaaaggtgtaagacgtagagttatcaaactccctttcattgtcgcactgaagagcttggatggtacgaccgaattgagtcgacactcacgcgaagaagtgagaaaggtgggaggtgttagacttacaacagaggggaaaggtccacaaatagtgagagaagtcatccagaatggcgag

SEQ ID NO: 10180 - DNA, 2475 bp, Zea Mays
ggatgctgctggaatgaacttcccagactctataagacaattgaaagtcaagttccaaatgtttgtcaaactgaagcatggaagagcaggacacattgggctggttctcaagtgcctgaagaagctacccaatccattaaaaaggccgatgaatacctccagtcttgcagacctgtacggagaaaacatgggaggttgctggaggaaggtgctagtggttttcttgctgggaaagttcctgttggggatgatgattctgttaagtgtcatgagaaaagttggagctctttcaatgaacttattaaatctaaggagagtgctgagaatacatttggtagcagtaactgggcatcagtttatcttgcaagtaccccccaggaagcagccgcattaggtctccagtttcctggagttgatgagaataacagaggggagaatcctaaccccaccctgtgttgaaatgttgtcttcctgcaatgttaggacaaagttgtttttagccttccttttttctgcccacgttaaaattaatgataatgaatatagacatataaacaaactacattcatagcttattgaatgaatgtgtatttgccctaaaacgaactataatttggtacagagggagtattatattgctatgattctgtaggtagaggagatatctgaagttgatggtgattttgatgatataaaaggtgtagatgaagtagagctttctgaggaacagagaaggaaatacagaaaggtaagggaagaggatgacgcaaaaataatgaagtgcctgcagcgccgtttgaaaggaaaaaggatgagagactggtgtaaggagaactttggtttggtctcatcatgtgacgagaagcctcctctaccagaaaatggcgttttaggtgctaaaagtgactgtccttcatctaaaaaactcaaaactgatgaaaacaaagtttctattgagatatgaagcatacatgtgaagatgatgataatgagaagagattgaaaactgtgatagttgaaagcgatgatgatatgcagatagatagcaaacaagctttacaaaaggatggtgaaggtagttcaacagaatttgaaaaagtggttgatatcattgatcttgatctcttcccaagccctaagctccctaataaaagtttgcataaaactttcaaatgtactatttgctctgaaatgctgaatgcctctgatgtgcatcgccaccctgtcttggatgttgttgtttgtggatcatgcagatttcttgtgatagagaagaatcgccttgaggatcctgtatctggtagttattgcacttggtgtgcacaaagtgaactgattcaaagttgtagttcttgtaagcttcttttctgtacaaattgcttgtcaaggaatttaggtgaagaatgcttatcagaagctaaagccactggttggcagtgttgctgctgtgtacccagtcaactagagctcttaatttctgaatgtgacaaggccctcagtggtgtggaatcttccgattcagagactagcaatgcagagctttctggatcagagaataatggtcctgttagcaagcaaaaaatgaagaagagtattagaagaattatggatgatacagaacttggtgaagaaacaaagcgtaaaattgcaatggagaaggcaaggcaagaccatttgaagtcaatgcaagagcaatctgccaccaagttaaggagcaagaatgttggaaatccctttgaaactccactggaaatctgtttacaggatgctggggatggacatgtagtcaaccttgccagggaggaggatgaggaacctgttaggattccaagcagcatgtcttctaaactgaagcctcatcaggttgaaggaataaggtttatgtgggaaaatgttattcaatctgttaaaaaggtcaaatccagggataaaggtcttgggtgcattttggcgcataacatgggccttgggaaaacttttcaggtctgtgttgggctgttggcttatagcttggatatatatttacattttcttcaagagttattcgttcattgtatgctgcacctattgtacccatgacaatcaattatgtgctggaactagatcatgcatgccagaaacttcaatttttgtacatgtattcttatatttgtgatgaagttattgttgggctgacatcaattttgagttcaatgcatcgtgggcccttgttaagagatgtcacttaggtccacaaactttgtaaatacatttttgggctgacattcaattttgagttaaatgcacgccgtgggagagaaaggtgtaagacgtagagttatcaaactccctttcattgtcgcactgaagagcttggatggtacgaccgaattgagtcgacactcacgcgaagaagtgagaaaggtgggaggtgttagacttacaacagaggggaaaggtccacaaatagtgagagaagtcatccagaatggcgag

SEQ ID NO: 10181 - DNA, 2313 bp, Zea Mays
ggatgctgctggaatgaacttcccagactctataagacaattgaaagtcaagttccaaatgtttgtcaaactgaagcatggaagagcaggacacattgggctggttctcaagtgcctgaagaagctacccaatccattaaaaaggccgatgaatacctccagtcttgcagacctgtacggagaaaacatgggaggttgctggaggaaggtgctagtggttttcttgctgggaaagttcctgttggggatgatgattctgttaagtgtcatgagaaaagttggagctctttcaatgaacttattaaatctaaggagagtgctgagaatacatttggtagcagtaactgggcatcagtttatcttgcaagtaccccccaggaagcagccgcattaggtctccagtttcctggagttgatgagaataacagaggggagaatcctaaccccaccctgtgttgaaatgttgtcttcctgcaatgttaggacaaaggtagaggagatatctgaagttgatggtgattttgatgatataaaaggtgtagatgaagtagagctttctgaggaacagagaaggaaatacagaaaggtaagggaagaggatgacgcaaaaataatgaagtgcctgcagcgccgtttgaaaggaaaaaggatgagagactggtgtaaggagaactttggtttggtctcatcatgtgacgagaagcctcctctaccagaaaatggcgttttaggtgctaaaagtgactgtccttcatctaaaaaactcaaaactgatgaaaacaaagtttctattgagatatgaagcatacatgtgaagatgatgataatgagaagagattgaaaactgtgatagttgaaagcgatgatgatatgcagatagatagcaaacaagctttacaaaaggatggtgaaggtagttcaacagaatttgaaaaagtggttgatatcattgatcttgatctcttcccaagccctaagctccctaataaaagtttgcataaaactttcaaatgtactatttgctctgaaatgctgaatgcctctgatgtgcatcgccaccctgtcttggatgttgttgtttgtggatcatgcagatttcttgtgatagagaagaatcgccttgaggatcctgtatctggtagttattgcacttggtgtgcacaaagtgaactgattcaaagttgtagttcttgtaagcttcttttctgtacaaattgcttgtcaaggaatttaggtgaagaatgcttatcagaagctaaagccactggttggcagtgttgctgctgtgtacccagtcaactagagctcttaatttctgaatgtgacaaggccctcagtggtgtggaatcttccgattcagagactagcaatgcagagctttctggatcagagaataatggtcctgttagcaagcaaaaaatgaagaagagtattagaagaattatggatgatacagaacttggtgaagaaacaaagcgtaaaattgcaatggagaaggcaaggcaagaccatttgaagtcaatgcaagagcaatctgccaccaagttaaggagcaagaatgttggaaatccctttgaaactccactggaaatctgtttacaggatgctggggatggacatgtagtcaaccttgccagggaggaggatgaggaacctgttaggattccaagcagcatgtcttctaaactgaagcctcatcaggttgaaggaataaggtttatgtgggaaaatgttattcaatctgttaaaaaggtcaaatccagggataaaggtcttgggtgcattttggcgcataacatgggccttgggaaaacttttcaggtctgtgttgggctgttggcttatagcttggatatatatttacattttcttcaagagttattcgttcattgtatgctgcacctattgtacccatgacaatcaattatgtgctggaactagatcatgcatgccagaaacttcaatttttgtacatgtattcttatatttgtgatgaagttattgttgggctgacatcaattttgagttcaatgcatcgtgggcccttgttaagagatgtcacttaggtccacaaactttgtaaatacatttttgggctgacattcaattttgagttaaatgcacgccgtgggagagaaaggtgtaagacgtagagttatcaaactccctttcattgtcgcactgaagagcttggatggtacgaccgaattgagtcgacactcacgcgaagaagtgagaaaggtgggaggtgttagacttacaacagaggggaaaggtccacaaatagtgagagaagtcatccagaatggcgag

SEQ ID NO: 10182 - DNA, 2244 bp, Zea Mays
tggatgctgctggaatgaacttcccagactctataagacaattgaaagtcaagttccaaatgtttgtcaaactgaagcatggaagagcaggacacattgggctggttctcaagtgcctgaagaagctacccaatccattaaaaaggccgatgaatacctccagtcttgcagacctgtacggagaaaacatgggaggttgctggaggaaggtgctagtggttttcttgctgggaaagttcctgttggggatgatgattctgttaagtgtcatgagaaaagttggagctctttcaatgaacttattaaatctaaggagagtgctgagaatacatttggtagcagtaactgggcatcagtttatcttgcaagtaccccccaggaagcagccgcattaggtctccagtttcctggagttgatgaggtagaggagatatctgaagttgatggtgattttgatgatataaaaggtgtagatgaagtagagctttctgaggaacagagaaggaaatacagaaaggtaagggaagaggatgacgcaaaaataatgaagtgcctgcagcgccgtttgaaaggaaaaaggatgagagactggtgtaaggagaactttggtttggtctcatcatgtgacgagaagcctcctctaccagaaaatggcgttttaggtgctaaaagtgactgtccttcatctaaaaaactcaaaactgatgaaaacaaagtttctattgagatatgaagcatacatgtgaagatgatgataatgagaagagattgaaaactgtgatagttgaaagcgatgatgatatgcagatagatagcaaacaagctttacaaaaggatggtgaaggtagttcaacagaatttgaaaaagtggttgatatcattgatcttgatctcttcccaagccctaagctccctaataaaagtttgcataaaactttcaaatgtactatttgctctgaaatgctgaatgcctctgatgtgcatcgccaccctgtcttggatgttgttgtttgtggatcatgcagatttcttgtgatagagaagaatcgccttgaggatcctgtatctggtagttattgcacttggtgtgcacaaagtgaactgattcaaagttgtagttcttgtaagcttcttttctgtacaaattgcttgtcaaggaatttaggtgaagaatgcttatcagaagctaaagccactggttggcagtgttgctgctgtgtacccagtcaactagagctcttaatttctgaatgtgacaaggccctcagtggtgtggaatcttccgattcagagactagcaatgcagagctttctggatcagagaataatggtcctgttagcaagcaaaaaatgaagaagagtattagaagaattatggatgatacagaacttggtgaagaaacaaagcgtaaaattgcaatggagaaggcaaggcaagaccatttgaagtcaatgcaagagcaatctgccaccaagttaaggagcaagaatgttggaaatccctttgaaactccactggaaatctgtttacaggatgctggggatggacatgtagtcaaccttgccagggaggaggatgaggaacctgttaggattccaagcagcatgtcttctaaactgaagcctcatcaggttgaaggaataaggtttatgtgggaaaatgttattcaatctgttaaaaaggtcaaatccagggataaaggtcttgggtgcattttggcgcataacatgggccttgggaaaacttttcaggtctgtgttgggctgttggcttatagcttggatatatatttacattttcttcaagagttattcgttcattgtatgctgcacctattgtacccatgacaatcaattatgtgctggaactagatcatgcatgccagaaacttcaatttttgtacatgtattcttatatttgtgatgaagttattgttgggctgacatcaattttgagttcaatgcatcgtgggcccttgttaagagatgtcacttaggtccacaaactttgtaaatacatttttgggctgacattcaattttgagttaaatgcacgccgtgggagagaaaggtgtaagacgtagagttatcaaactccctttcattgtcgcactgaagagcttggatggtacgaccgaattgagtcgacactcacgcgaagaagtgagaaaggtgggaggtgttagacttacaacagaggggaaaggtccacaaatagtgagagaagtcatccagaatggcgag

SEQ ID NO: 10183 - DNA, 2268 bp, Zea Mays
tggatgctgctggaatgaacttcccagactctataagacaattgaaagtcaagttccaaatgtttgtcaaactgaagcatggaagagcaggacacattgggctggttctcaagtgcctgaagaagctacccaatccattaaaaaggccgatgaatacctccagtcttgcagacctgtacggagaaaacatgggaggttgctggaggaaggtgctagtggttttcttgctgggaaagttcctgttggggatgatgattctgttaagtgtcatgagaaaagttggagctctttcaatgaacttattaaatctaaggagagtgctgagaatacatttggtagcagtaactgggcatcagtttatcttgcaagtaccccccaggaagcagccgcattaggtctccagtttcctggagttgatgagaataacagaggggagaatcctaaccccaccctgtgttgaaatgttgtcttcctgcaatgttaggacaaaggtgtagatgaagtagagctttctgaggaacagagaaggaaatacagaaaggtaagggaagaggatgacgcaaaaataatgaagtgcctgcagcgccgtttgaaaggaaaaaggatgagagactggtgtaaggagaactttggtttggtctcatcatgtgacgagaagcctcctctaccagaaaatggcgttttaggtgctaaaagtgactgtccttcatctaaaaaactcaaaactgatgaaaacaaagtttctattgagatatgaagcatacatgtgaagatgatgataatgagaagagattgaaaactgtgatagttgaaagcgatgatgatatgcagatagatagcaaacaagctttacaaaaggatggtgaaggtagttcaacagaatttgaaaaagtggttgatatcattgatcttgatctcttcccaagccctaagctccctaataaaagtttgcataaaactttcaaatgtactatttgctctgaaatgctgaatgcctctgatgtgcatcgccaccctgtcttggatgttgttgtttgtggatcatgcagatttcttgtgatagagaagaatcgccttgaggatcctgtatctggtagttattgcacttggtgtgcacaaagtgaactgattcaaagttgtagttcttgtaagcttcttttctgtacaaattgcttgtcaaggaatttaggtgaagaatgcttatcagaagctaaagccactggttggcagtgttgctgctgtgtacccagtcaactagagctcttaatttctgaatgtgacaaggccctcagtggtgtggaatcttccgattcagagactagcaatgcagagctttctggatcagagaataatggtcctgttagcaagcaaaaaatgaagaagagtattagaagaattatggatgatacagaacttggtgaagaaacaaagcgtaaaattgcaatggagaaggcaaggcaagaccatttgaagtcaatgcaagagcaatctgccaccaagttaaggagcaagaatgttggaaatccctttgaaactccactggaaatctgtttacaggatgctggggatggacatgtagtcaaccttgccagggaggaggatgaggaacctgttaggattccaagcagcatgtcttctaaactgaagcctcatcaggttgaaggaataaggtttatgtgggaaaatgttattcaatctgttaaaaaggtcaaatccagggataaaggtcttgggtgcattttggcgcataacatgggccttgggaaaacttttcaggtctgtgttgggctgttggcttatagcttggatatatatttacattttcttcaagagttattcgttcattgtatgctgcacctattgtacccatgacaatcaattatgtgctggaactagatcatgcatgccagaaacttcaatttttgtacatgtattcttatatttgtgatgaagttattgttgggctgacatcaattttgagttcaatgcatcgtgggcccttgttaagagatgtcacttaggtccacaaactttgtaaatacatttttgggctgacattcaattttgagttaaatgcacgccgtgggagagaaaggtgtaagacgtagagttatcaaactccctttcattgtcgcactgaagagcttggatggtacgaccgaattgagtcgacactcacgcgaagaagtgagaaaggtgggaggtgttagacttacaacagaggggaaaggtccacaaatagtgagagaagtcatccagaatggcgag

SEQ ID NO: 10184 - DNA, 2406 bp, Zea Mays
tggatgctgctggaatgaacttcccagactctataagacaattgaaagtcaagttccaaatgtttgtcaaactgaagcatggaagagcaggacacattgggctggttctcaagtgcctgaagaagctacccaatccattaaaaaggccgatgaatacctccagtcttgcagacctgtacggagaaaacatgggaggttgctggaggaaggtgctagtggttttcttgctgggaaagttcctgttggggatgatgattctgttaagtgtcatgagaaaagttggagctctttcaatgaacttattaaatctaaggagagtgctgagaatacatttggtagcagtaactgggcatcagtttatcttgcaagtaccccccaggaagcagccgcattaggtctccagtttcctggagttgatgagttgtttttagccttccttttttctgcccacgttaaaattaatgataatgaatatagacatataaacaaactacattcatagcttattgaatgaatgtgtatttgccctaaaacgaactataatttggtacagagggagtattatattgctatgattctgtaggtagaggagatatctgaagttgatggtgattttgatgatataaaaggtgtagatgaagtagagctttctgaggaacagagaaggaaatacagaaaggtaagggaagaggatgacgcaaaaataatgaagtgcctgcagcgccgtttgaaaggaaaaaggatgagagactggtgtaaggagaactttggtttggtctcatcatgtgacgagaagcctcctctaccagaaaatggcgttttaggtgctaaaagtgactgtccttcatctaaaaaactcaaaactgatgaaaacaaagtttctattgagatatgaagcatacatgtgaagatgatgataatgagaagagattgaaaactgtgatagttgaaagcgatgatgatatgcagatagatagcaaacaagctttacaaaaggatggtgaaggtagttcaacagaatttgaaaaagtggttgatatcattgatcttgatctcttcccaagccctaagctccctaataaaagtttgcataaaactttcaaatgtactatttgctctgaaatgctgaatgcctctgatgtgcatcgccaccctgtcttggatgttgttgtttgtggatcatgcagatttcttgtgatagagaagaatcgccttgaggatcctgtatctggtagttattgcacttggtgtgcacaaagtgaactgattcaaagttgtagttcttgtaagcttcttttctgtacaaattgcttgtcaaggaatttaggtgaagaatgcttatcagaagctaaagccactggttggcagtgttgctgctgtgtacccagtcaactagagctcttaatttctgaatgtgacaaggccctcagtggtgtggaatcttccgattcagagactagcaatgcagagctttctggatcagagaataatggtcctgttagcaagcaaaaaatgaagaagagtattagaagaattatggatgatacagaacttggtgaagaaacaaagcgtaaaattgcaatggagaaggcaaggcaagaccatttgaagtcaatgcaagagcaatctgccaccaagttaaggagcaagaatgttggaaatccctttgaaactccactggaaatctgtttacaggatgctggggatggacatgtagtcaaccttgccagggaggaggatgaggaacctgttaggattccaagcagcatgtcttctaaactgaagcctcatcaggttgaaggaataaggtttatgtgggaaaatgttattcaatctgttaaaaaggtcaaatccagggataaaggtcttgggtgcattttggcgcataacatgggccttgggaaaacttttcaggtctgtgttgggctgttggcttatagcttggatatatatttacattttcttcaagagttattcgttcattgtatgctgcacctattgtacccatgacaatcaattatgtgctggaactagatcatgcatgccagaaacttcaatttttgtacatgtattcttatatttgtgatgaagttattgttgggctgacatcaattttgagttcaatgcatcgtgggcccttgttaagagatgtcacttaggtccacaaactttgtaaatacatttttgggctgacattcaattttgagttaaatgcacgccgtgggagagaaaggtgtaagacgtagagttatcaaactccctttcattgtcgcactgaagagcttggatggtacgaccgaattgagtcgacactcacgcgaagaagtgagaaaggtgggaggtgttagacttacaacagaggggaaaggtccacaaatagtgagagaagtcatccagaatggcgag

SEQ ID NO: 10185 - DNA, 869 bp, Zea Mays
aaaggacccacgtccctgacgcacggcgacggtgtggaaccgtgcaaaccgaggggtaatcgatcgtgggaaagttgaagcgtcgagagcacttttcccttcagtgagtttgccgcgcgcgctgttcctcactccccgcccctcatccacgagaccacgacgaacttgtgctatcgccgccgccctacgcaggttccgaggccttgactggtctcttgtttggccgcgagcatcaccagtaaaatagtcaatgtatgcaaagttggaaccatatatatttctgtagagtaaatgatatagtactagatgaatagtatggataaggatgggatattgtctgatgaaaacttggcaaagatggaatctgctcaaccaaacggacagcgggagcataaggagcctccacgcacaacagtggacaacaatgtgaatgaagaaacatccactactgatgatgattcagaggccaattcatacgagttctttgttcgagaatcagataatgaacaagcttcagcatctgaggaaggcactgaggtacctctgactgaggaagaagttgaagaattggttgttgaattccttgaagtcgagagcaaagcagctcaagcacaaagagtcacttgaaaaaagagtcactggacaaaattgaaactgaagtaagattggagttatctgaaaggctttcaaggggatgagttagaatcagctgtgtcaactgagatggagcaattccagatgcaatgggaaaatgaacttgatgatctagagatccgtagttctattcttctggtaatgttttcccccgtaatttatgtgtgtccatgttacatttactaactgccatttccccttgtttctcagatcga

SEQ ID NO: 10186 - DNA, 788 bp, Zea Mays
acggcgacggtgtggaaccgtgcaaaccgaggggtaatcgatcgtgggaaagttgaagcgtcgagagcacttttcccttcagtgagtttgccgcgcgcgctgttcctcactccccgcccctcatccacgagaccacgacgaacttgtgctatcgccgccgccctacgcaggttccgaggccttgactggtctcttgtttggccgcgagcatcaccagtaaaatagtcaatgtatgcaaagttggaaccatatatatttctgtagagtaaatgatatagtactagatgaatagtatggataaggatgggatattgtctgatgaaaacttggcaaagatggaatctgctcaaccaaacggacagcgggtagatataataatcattgactctcaaagtgatgaaaataaaattggtgtggaaactagcataagagagagttccttgaaggagcataaggagcctccacgcacaacagtggacaacaatgtgaatgaagaaacatccactactgatgatgattcagaggccaattcatacgagttctttgttcgagaatcagataatgaacaagcttcagcatctgaggaaggcactgaggtacctctgactgaggaagaagttgaagaattggttgttgaattccttgaagtcgagagcaaagcagctcaagcacaaagagtcacttgaaaaaagagtcactggacaaaattgaaactgaagtaagattggagttatctgaaaggctttcaaggggatgagtgtgcactgatatattgctttaatttaaat

SEQ ID NO: 10187 - DNA, 1569 bp, Zea Mays
tcatgattcaagcacggcgctacttctgtgtcacttttttgttggctaaagttgctttcccattacattttctgttcccagaattataatgacatggagatcacagagagaccagagcccagaggttctaaagttagaatgagtcgtccatttctccttgtaagaagtacagtgactggcttggcaatatcctcccacccaatacccatgtgcaacttcacacagggtttctgttgcctgcctacccccgctcctcctactgctaccccagctacaatcttccccaccatcttgctaacttttccaactgagaatcacacgtctacatgttacaacaaatgcaagcatccgagcgcaacgacggtgatagctgaagaaaccagtgacagcgccgagtgcgatctccatctctggtcgccgccgccggcgtagaccatcccgaggtagccgtatccgtagccgccgccgccgccagttctcccgccggcgtagttgacgcccctgtacccggtttcttcggcgtcgttcctgccaaagaaaaaaacaacaacaccgtttcaagaacaaaaaaataaatacaccgcgataacagcatctgcaagcgcagactgggcgtgaacgtgatggggttttagactgcgcgtgaagtgccggtgaagctcagatctaccaccgctgtcacgagcgcgcaaaggaataggaattcgattccgaggaacgtgctgggactctctggggactgggagagtgatgatggaccgaaacggacgaaggaggagccgcggcccgcggcgcttcccttttcgctggacggactaggatgcacgcgctgccattgggggagacggtgggggcaggagtgaaccattctgtcgttccgactggacccgcagcaagattaactggtttagcaaaggatgaacaaacggtatagtgcacagcgtccccgttgggtatttgctattctagcatgtgggttggggtaaccctacatgggatctgagctgagccgttgattgttcggatgacagatctgagtagccaagatgtcagctgatacgaatgtctgactccatgaaccgcgcgcgtcttgtgcgagttgtgttgtgacggtgctttactgctatttcagcggcaatcgcagcccagccaatcataccatacataccctccccaagtggcaagtggtggtcggctggtccacagcaccagcacaaggtcattcacacactagacagggcagggtgggtgggtgggacaagttgacaaaaggtgaaaagggcatttgtttgtttgtttatatgcaaaagagcgcaggatccggccatccttccgggcgacaaaaccatcggccggtggcgcgcatgcggagacgcagagtgactacgactgcctaccgccgcactgggacaaagactaaaaatgtcatgaactcatgtcagatgttccatgcagtactgggacaaagactggaaattggtatgcatccaaactcaagcagacattcctcgaatcagacattcctcgaatcaggcaaagtatagtaaattaggtagcaatccaaacatg

SEQ ID NO: 10188 - DNA, 1669 bp, Zea Mays
aatcgcttaccgcctttctctgcacagcctcgacgtggaactgggccagtaagcaagggactctggcggtctggcactctggcccgacccgagaacctcaaccaaaacctctcctcagcaccgccgcgtcgctccgcgtcccgtccacagctctccgctgccgtccagtgaccccgccgcgccttgcagcggcgacggaggggccagcaagtcagccatgacgatccgcatagcgccgggcgtgggcgcgaacctgctcgggcagcactcggcggagcgcaaccaggacgccaccacctacgtcggcaacctcgaccctcagtggcggcggcgcaacgatattgcaaggacagcgcgagtggcggcagattgaatggttgctgtgaaaactgtttccgaggagcttctatgggaattatttgtccaagcaggccctgttgttaatgtgtatgtcccaaaagacagagttacaaatttacaccagggatatggatttgtagaattcaggagtgaggaagatgcagattatgccattaagattttgaacatgatcaaactatatgggaagcccataagagtaaacaaggcttcacaggataagaagagcttggacgttggagcaaatctgtttattggcaatcttgatccggatgttgatgaaaagctcctttatgataccttcagtgcatttggagtgattgtgactaatcctaagataatgcgagaccctgaaactggaaattctagaggctttggctttgtgagctatgaatccttcgagtcatctgatcaagcaatagaggccatgaacaaccaacatttgtgcaaccggccaatcactgtctcttatgcttacaagaaagacacaaaaggagagcgccatggcacaccagcagagcgactgctggcatcaaacaatccaggatctcagaagaataggccacacacaatgtttgcaagtggtccgccgacccaaggtcttccaaatggtggtccgcctgtgccacggccttttggcaatggcacaattccgggacagattcaacacattcgacaaccaccaccaccaccacctgttggacaattcccccctccaatgcagatgcacgggcaacctgcctggcccgctcaacattctatgcctccccacatgtcatctcaactccagtacaggctcccgatgaggccaccaccaccaaatatgatgccccctccggttggcatggtaaggccgccacctcctcccaccggtatgtcagcaccacatatgtggatgccacccccacccccaccctcatcacaacaaggtggaatgcccccgcctcccatgtctatgccgccaccgcctccaccaccatctggttaaacacacgcaaaggaaagtaccgtgtggtcaatgtgcaagctgtaactgtagaccaaggatgctggttcctttcatatatctccctgtaacttgtccacgctaggtgaagatgaaattttggagttcacctgacagatacaaacgcgagattaacatgtatttttcttctgttgaagatgaatgtatttttgtggttgcgtacccattttttgtgttccctaatgccccgatacgtttacaacgatcactatgcacatgttctgttgccactgaactattgaaggtggatatttcaaacaaagc

SEQ ID NO: 10189 - DNA, 1686 bp, Zea Mays
aatcgcttaccgcctttctctgcacagcctcgacgtggaactgggccagtaagcaagggactctggcggtctggcactctggcccgacccgagaacctcaaccaaaacctctcctcagcaccgccgcgtcgctccgcgtcccgtccacagctctccgctgccgtccagtgaccccgccgcgccttgcagcggcgacggaggggccagcaagtcagccatgacgatccgcatagcgccgggcgtgggcgcgaacctgctcgggcagcactcggcggagcgcaaccaggacgccaccacctacgtcggcaacctcgaccctcagtggcggcggcgcaacgatattgcaaggacagcgcgagtggcggcagattgaatggttgctgtgaaaactgtgcgtgtttttgctaggtttccgaggagcttctatgggaattatttgtccaagcaggccctgttgttaatgtgtatgtcccaaaagacagagttacaaatttacaccagggatatggatttgtagaattcaggagtgaggaagatgcagattatgccattaagattttgaacatgatcaaactatatgggaagcccataagagtaaacaaggcttcacaggataagaagagcttggacgttggagcaaatctgtttattggcaatcttgatccggatgttgatgaaaagctcctttatgataccttcagtgcatttggagtgattgtgactaatcctaagataatgcgagaccctgaaactggaaattctagaggctttggctttgtgagctatgaatccttcgagtcatctgatcaagcaatagaggccatgaacaaccaacatttgtgcaaccggccaatcactgtctcttatgcttacaagaaagacacaaaaggagagcgccatggcacaccagcagagcgactgctggcatcaaacaatccaggatctcagaagaataggccacacacaatgtttgcaagtggtccgccgacccaaggtcttccaaatggtggtccgcctgtgccacggccttttggcaatggcacaattccgggacagattcaacacattcgacaaccaccaccaccaccacctgttggacaattcccccctccaatgcagatgcacgggcaacctgcctggcccgctcaacattctatgcctccccacatgtcatctcaactccagtacaggctcccgatgaggccaccaccaccaaatatgatgccccctccggttggcatggtaaggccgccacctcctcccaccggtatgtcagcaccacatatgtggatgccacccccacccccaccctcatcacaacaaggtggaatgcccccgcctcccatgtctatgccgccaccgcctccaccaccatctggttaaacacacgcaaaggaaagtaccgtgtggtcaatgtgcaagctgtaactgtagaccaaggatgctggttcctttcatatatctccctgtaacttgtccacgctaggtgaagatgaaattttggagttcacctgacagatacaaacgcgagattaacatgtatttttcttctgttgaagatgaatgtatttttgtggttgcgtacccattttttgtgttccctaatgccccgatacgtttacaacgatcactatgcacatgttctgttgccactgaactattgaaggtggatatttcaaacaaagc

SEQ ID NO: 10190 - DNA, 655 bp, Zea Mays
ttgtgtaagacctgacagaaacaatcatcggcttgtggggaagatacaaaataatgaggaattacatgcctaaagagatcaagaataaaatggttctactgaaacccctacaagatgccttccactctgtgactcgtcattgggttcactcagattctactgccccttgacggaatgctttgctctgtggatgatgatcctgagcatggtgaggcattgatagcaaatgtggagtgcccacactgctgccggatgttctgtgcccagtgtaaggttccatgacacactggtgtcgcttgcgcagagttcaagttccaacgaccgaggaaggatgagcagggcagagaggacctactgccgaggaaggttgaacaagagagcaagtggcaaggtgccccgagtgcaagatatatgtggagaagatcaggggctatgtatttatcatttacgggtactactcacgaatagaacattcattacactgagtacaaatgatgatcatcatctttgttccaatttacaggtgcagccattgattctgctacctttgtgcatccccaatgtctagggacaaccgttgttgcaaaacctgcaatcgaacctggggaatgccttgaaatcgccaagctctctacttgaaggaaagaaactcata

SEQ ID NO: 10191 - DNA, 1335 bp, Zea Mays
actgataactcattgttcagatatgcgttaagcaatggttgttactattttgtgtaagacctgacagaaacaatcatcggcttgtggggaagatacaaaataatgaggaattacatgcctaaagttggtactcttggccttgatatgatgttcctgacatgtactgtgcagatggtcatatttctaggagtgccattttcagaatgacatcacttattcatttggagtactcatctgagcactgagttgctaccttaagattacctatttcatgttctttaaaaacagcttaccaatttcatggaattactctttgtacatagtacacaacagcttcaacacggatacgatatatagttgtttcacaagatggcatcggtttagtagaattgatggcatataagcttagaactcagtttcctttgcttgtacatttatattgactgcccccgcaaataaaatttaacaatgtgcccctgaaactaagatagaatctctacatacggaatcactaaatggttgtattttccaatataaattgcacatcatttcgtctggataagtcaacatgagaccacttttgctaggatatttgtatttgtagatattgggacacaaaactaaaaatattatgagtcttagctaaactccttcagaggcacattgtattatgagctaacccgatttgtttttttagcttccagcacttccatattccgctcattgtgtatttttttcttaatatcactgtactatatgtcacaaccttttcatgcattgaccaataacttagcatttgtaatgggtttctcctttctgtatcattatgtatttatgtgtacttctagggagtaccattttcttcatgttggcgatgaaatgctacaatctaagtcgcttggtcgagattcatatgtctttggagatcaagaataaaatggttctactgaaacccctacaagatgccttccactctgtgactcgtcattgggttcactcagattctactgccccttgacggaatgctttgctctgtggatgatgatcctgagcatgagttcaagttccaacgaccgaggaaggatgagcagggcagagaggacctactgccgaggaaggttgaacaagagagcaagtggcaaggtgccccgagtgcaagatatatgtggagaagatcaggggctatgtatttatcatttacgggtgcagccattgattctgctacctttgtgcatccccaatgtctagggacaaccgttgttgcaaaacctgcaatcgaacctggggaatgccttgaaatcgccaagctctctacttgaaggaaagaaactcata

SEQ ID NO: 10192 - DNA, 2416 bp, Zea Mays
acggacccgagatatttcttcaattctttgagccattcgcgtctgcgtccgctcccccatatccgatcgatctttgagccattcgcgtctgcgtccgctcccccatatccgatcgatccactgcacctcgcgagcgatagggcaactcccctgcacgaatccactgctcctcgtccctgcgccgccgccgctcgacggagtcggcctcatcgccgctcggaatcaagtctcccccccaacgcacacacatgctcgccagatcccctccgtctccaccgccgtggtcgagcaagtgggtcaagtcgctggtggccctcaaggtggccgagaaggcggcgggacataagggtggccataggtaccatctcaggtggagctagccggtcgtgtccacggcgagcgctagcgagcgcagtgcgctggcgtccgaggcttctgcggcttcgactgactcgtattcgttgaaacaaactgaagcagcgctattagggatcagcgaggttgaggaagtccagctggaagttgctcgcctcggtgaaacgcgcggacccgaccagggcgcctgccctggtgatgcggcagccgccggggccggggccgagggtgacggcgcaaccctgcctgacgagctggccggtggacaccaggttcaaatccagaccagggacgtaccacacgtcgtcgaggacgatgcgctccgtgcgcaccgacccgcttccgcggactcgcagcggcagctctcttccattgaccacctggtggacgacggcgccctcaccgttgttgccattgccgtggccgccggtcagaagcaggctctggttgcccgtcatatgatgcaccgctgcagacgcggcgaaccaggtcgatgactcacgcggcggactgcatttgacccgtctgcttgcatcgtcctcgcctctcgctcctttattatgtccaaggaaacaagtctcgaatctggccacttggagcaggaagcagaatggaactagaacggccaggatgaagacacagacgaatgttgttacgacctcgctggagctgacggcaccgaatgaaccgtgaggctcaggatgggattctagatttgaacagcacaacatataggccggtttgctgttgggtgtggtgaagatgatgcaagtatctcagagcttgaaaatcttgatatgataactggtcatgtggaaattagcaaccttaaaaatctaagggatccaagtgaggcagaaaaggccatgtgaagcagaagaataatatatggagtttggagttggattggtcttcaagtcaaaccaaggaagagttagtatcagatgcggaacaagaccagggtgtgcttggtgctcttgaaccaccatcacaaattaagaacatgagaatctgcggttatagaggcctctgtttgccacactggatgatgcaaaatgattcttgttgtgcagataaactgataaagcaaaccagcatatgtcagttgctttctctaacggatatgacactagaaggatttccaaacttgaagtatatacgaggacttttggtgtttggttcgctcaagtccctgaacctgctcagaatggctaatttagaggagctgtggactacaacaaatggttctaaaattcatgggtgctgttttcctgtcctgtctgagctatgtataacaggctgcccaaaactgaatgtgaagccctacttcccaccttcattgattacattgtcttttgaagacagcaatgagcagctgttatccccaagcagtttttcccatcggcttcctctatctgccgatgagccatcgtcgtcctgcaacgtgcattcagattcagcagcccttcgtctcaagaaactacggctgccaggctcatcatcgagttgggggtacctgcggcactgcgctgaactggagatcttgcacattgagtgctgcaatgacatggcagaattgcttgagatccttcaaaacctaacatcacatccatgtagcagttgtctataatgggttgtcaggcccttggcaagctgcctgactagcttggcgaactgcgctctttacgatggctgagcatcatggcgaccccattaattgacaacctcccagagtcgacaaaccaaacttacgtccctgtctctctacagattagtcgctgggacaatctgaagcagctgcctgacgtgatgcagcacctcacctcccttgagagactcaacctgatatgctgtggtgaactgactgtgctgccgaaaatgactgataatgtgttgagcactttgggggaaatgactgataactcattgttcagatatgcgttaagcaatggttgttactattttgtgtaagacctgacagaaacaatcatcggcttgtgggggaaatcccctttgaggaattacatgcctaaagatggta

SEQ ID NO: 10193 - DNA, 2184 bp, Zea Mays
acgcagccctcgtctcccgggtgttgtacgagctgcacgcggggcacttgtgccccagcacgtggaaccgcacgctcgaggtcgcgctgcagtcgttgcacaggatccacacctgcactcacaccacagcgttcatttgccgttcagttccagcaatcggcaccccggacaggttcagagctcgtcaaacagcgagccatggctgtggaaaagatgtaacgggacgacgaacgagtgggcggtcggcttcttaccatgtgcttctggtagatgtcaggcatcggcgtggccgcgacctcctcgtcgagcttccgccatgtggccgacatgtcgcaggcggacctcgagcacactgggcatgagaagctgccaaagaccaaacagggctgagactgtaaggtcactgcgactaaaagaggatgttgtgaggtggcaccgtttctcagctccgaagagaacggtatatatgcttactgatggtgtgctctcatctcgttcatgcactccaaatggatggtatgcccacattgcagcacgctgatgtccttcgtggagtcgaacagatactgtgaaaaaaaacagagggaaaccttctcaatatcaagagattggaacattcagagtgaatgttccgttgaaacggaggtctctcacctcaaagcagacggggcagttgtgatgcattgctctttcgacgcagtggtgggaatccttcaagacattgctgtagcaacaccctgtcggacggcaacaaggacaccaataagggcgcgagtgaaatctttgctgcatagcatggttacagaatcttagcagaaagaagtccgcgcagaaactcaccacatttatcacagtggaaaaagttctccacgccgccggttctgcataaacaacaagaagacgaggaacccgaatttatcagttttgaacggctgacagaagttttacacttctgcgcgtcaagtctttagacgtagccatcagcgtggtggtgcttacctacatattccacatccgtcacagtggtactggccctttgagacctggaccaagagcagtacagtatgtacgtgaagaagaagggggaaaaaagaaacgcagtaaacaacgcatcgagttcagtttctttgttcatcgtctgggattcgagtacgcttacatcatcatcgaagaacttgcatactttacagaagtacttgcccatgcaggccccacagctggagcagttctgttgcacctgccgatgggaatgagcagtttccatgcagttagcagtagtagtacagccaaaagatgcgtgctcctgaaaaactgttgtaggagtacgttttggtagacaacttacgtcctgttccttggagcagagagaacagatcacctgcgcaacagctccagttaagtctcgattcatatgagttcagtgacagaagggaacagttactggaatcgttatcttaagaacaggcatgctgtgcccatggccacccagaaattttttttttaaacaaaatagatggatggtatgattctatatgaatcgaaacaacatatatgcatcatcaggaaacaggataggaacgtttatcgaatcaggcatatactctcaaaaaaaaaaggataagaatcgaacatgattgctttagccgatcgacgtcagattcactgctaataggtccaaagacacctgtcaggacacgtcactatatccaggtcctcaactatgcagcactcaaactcaatcaaatcagctggaagcagttagaccctgttcagtttgacggtgagatgtgcctctgacggtatccctttctcatatattctccaatcccagacgcctgtccttggcttcaagtggcacccgtgaccccggctttctcttgaaaaatcctgtggaccacgcagtgccggccacttggtgcggagcacatcgcggaaagcagtcaagtttttagtgacacgcaagtgaagtgcagaacggctcccagagcactgagctgagctgatatggccttatctgaagaagcttttaagtgtgagaaaaatcagggatgcctaaccaaaaaaaaaaatctaaggtcgctagaacactaaaagctagtagtagtataaccttgtgcgattgcgtttcgtacttgtctgtagaagggtaaggaggacaagaaatcttaggaaaggtttgtgttg

SEQ ID NO: 10194 - DNA, 2261 bp, Zea Mays
tccaccgccatcagcgctcgcctgaggccggaggggaccttttcgtggctgccggtatcctgtcctccacgcaggacacgcacccgccgcagcccccgccgccaccggatctctcgccaaggacaggctggtgcaggaggccactcccagatcccgtcatccgccgccattaacgccctcctgctagatcccgtcattcgctgcgaatctccattcagctccccctcgcgctttcatcgtcgccgtggaccgctcgctggcgctgacctctcccaagcgcggcacagtggtgcgggtgccgtacaaggtctcgatcccgctgggcagggtgaagacgaccacgccgggtgggaacaaggaccggccggagcagaagtacgtgcaggcttcgagttctggttcatgggcttcgtcaggtaccaggtgtccctgcacgaactggagaaggccatcgagcaggcgaacgttcggggccagatccaccgactcccgtttgacggcctcgcgttgtgcttttgtgtggctattcgttcactggagaaggccattgaactattgagtaagaggaaagttcaggggagaattcttttgtgtggctattcgttcaattacatttctgggacagcatcaataaagaaagtatctcacacgaccaggaatcttggagcagttggctttgttgttgctgtggagaatatttacccaggaataaaatttgaccctgtaccagtcagcatccctagaattctcatcacagatgtcagcaaaacggaggtattgcagagccttatttcatatttgcatatggttgccatttgtagacaacatcatacatagacatatggaaaaatgagaccgtatattcatgaatagatcaataaatatgcaatttagttattgaaatagcatgaattgggcttcaaaaaacaatgtgcaaagaggtgcaagatagtggcatgaattctatatggctgctgctactgctactataggatgactgggcggaaaggtaaagtacctatgcatgtttggtccttgtatgaaaatttctcttataattagacgcagtcctcgtgttgaaaccatgaagcaatctatcaatttccttttcatattattgttactattactaatacttcttagtacctttcatatcttctttgttggtggctcctgttgggtctatagcctaccctaacttacttgggatgaaaaggctttgctgctgttttattgagatgacattaactttggttctacaggatcttatagactactacaattcttccaccataatagattgggctggaagggctacaaccttcaaagcaacagcagacatacttgctcctggcaatctcatatgggctgcatgggcgcctaatggaacagatgaatcaaactatgctggtgaaggatttgcaatggtttctggaactagcatggccacaccgcatttcgctggcattgcagcactaataaagcagaagaacccaaagtggagcccctcagcaataaaatctgccatgatgacaacaaccaatacactggacaaagggagtcgtcctctcagagcgcagcagtacacaacatcggaaatgatgacactttctcaggccacaccgtttgattgtggtagtggcgctgttaacccaaaagctgccctttaacagttataattacccagagattagtgatgctaagaagagtcctgggtgacaatttttgttccagcattttgaaaaatactcaaagaattttttattaataatttgactaaaattcataaggtgaaatatacttccttcttggcactatgattatcttggcccaactttactacccctaatgcattttggatgctattacagacactgtgccggatgtatataattaatgctggtcaaggcttcaagatgttatggagcacaataaaatcattcctcgatccaaaaactgcttccaagatccatgtttgtaatgctttgttaagcactgatttgattgcatcttgtgtaatttgatatactgataatattcagtgtttcctttgaaggttcttgggaataagtagcaacataagttgctcgaaataattgacgagtggttagtattttgtttgtgtgtcgtacatttatgttgtttattacttccattctaatttctgcttaatgcatgcatgcagtgaactgccagaattttttggtggcaaatctctactaactattaagttagtagtgtagactgcccccgcctccgcc

SEQ ID NO: 10195 - DNA, 1335 bp, Zea Mays
ctatgctatttttatgggcaactactactccctcaattccaaattgcacgaggaaatggtgatggctgacatgcaaataaggcctggagaaggctgggaatactgtcctagaaataccttgaggaaagtcacaaaagttctgttagatgagttcaatgtgacaatgaaggcaggttttgaaaatgaatttttccttcgcagaaaattagtaagtaatggagttgagatgtggattccatatgataataccaattactgctcaacttcagcatttgatggtgcatcatccatattacaagaagtatattcttccctcaaagattcaggcattgttgttgaacagttgcatgctgaagctggaaaagggcagtttgagatagccttgaagtatatcttgtgcactgttgcggctgacaaactcatatatgctcgtgagactattaagtcgattgctcgaaagcatggactggtagcaacatttcttccaaagcctgatttggatgattttggatctggttctcacgtgcatctgagcttgtgggagaacgatcagaatgtttttatggggtcaagtaaagataactttcatggaatgtcaaaaactggagaacagttccttgctggagtgtatcatcaccttccgtcaatattggcatttaccgctcctcacccaaacagctacgaccggattcagccagatacttggagtggagcttatctatgctgggggaaagagaacagggaggctccattaagaaccgcatgcccacctggtgtgcctcttgatttagtcagcaacttcgagatcaaatccttcgatggttgcgcaaatccgcacttgggtcttgctgctatcgtagctgctggcatcgatgggctaagaagacaccttaagttacctgagccaattgaatcaaacccttctgatcactcttcaaaactgaaaaggctaccgcagaacctgcaggaatctgtagaatcgctttctgcagataaggttttgcatgagttaattggtgataaacttgtcacaactgctatagctatacggaaggctgagatcaatcactttgcgaagaatccgggtgcacttaaggatctcatcgaccgttactagggcaaaagaacggaatgagaagctacatcttcttggacgtggcaaggggtttcactgtatgaccaaccgagagactggaagaataaattttgttccaatggttaacttcggattctcatatcctgtgactgaacttttgtgactgaacttttgatacccagtgtttctcttatcaaataataaaggttatttaaatttttaaaatgagaaatgctagg

SEQ ID NO: 10196 - DNA, 2623 bp, Zea Mays
cgtctccttgcctcctgatgaatcatgaatgcctggggtccttgggactgagaagcctgagggacattgctgcattgtacaactgcgaggcctcacttgagaaggtggagaagtttagaagtgctgaaggattgaaatcgattggctcaaaatgcttccaagctgccaacatatctgttatacttatagatgatggcatagcattcgacaaaatgctagacctggagtctcacaaggcatttgctcctgtagttggcagagttctgagaatagaaaggctagcagaaacaatcatcaatgctgagtcattcagtggatcaagctggacactggactcattcactgaaagctacatatctaagctgaattcagtttctaaccaaattgttgcattaaaaagcatagctgcatatagaagcggtttagagatcaatcccaatgttagcaagactgatgcagaggatggtcttcgtaaggagctaacaggtcctaggccatttcggattacaaacaagaacctgattgactacctatttacctgcagtcttggaattgctgtttcacttagcctgccagtgcaaattcacacaggttttggagataaggacctagacttgcgaaagtgcaacccactacatttgcgcgctgttcttgaggacgaaagatttgctaagtgccaaattgttcttttacatgcttcttatccattttctaaggaagcatcctatcttgcatctgtttactcccaggtttaccttgattttggcttggcgattccaaaacttagtgttcatggaatgacatcgtccctgaaagagcttctggagctagctcccataaagaaggtcatgttcagtacagatgggtatgcttttccagagacatattacctaggtgcaaaaagggcacgggatgttgtttaccgtgtcctatctgctgcatgtgaagatggtgaccttagcattcaggaagctatcgaagctattgaggacatctttagaagaaatgcattgaatttgtacaagttaaatgttgtcaatggatcaataaatcatgaaactgccatagttggtaaaagggtgtcattgtcttctgttgaggaagatgtgctctttgttcgaataatctggtgcgatgcttctggtcaacatagatgccgcgtcgtgccagctggacgattttatgagattacgaggaataagggtgttggtctgacttttgcagcaatgggaatgacctcattttgtgatggcccagcggatgggtcgaaccttactggtgtaggcgagatcagacttgtaccagatatgccaacactcgttaggctaccatggcacgaggaaatggtgatggctgacatgcaaataaggcctggagaaggctgggaatactgtcctagaaataccttgaggaaagtcacaaaagttctgttagatgagttcaatgtgacaatgaaggcaggttttgaaaatgaatttttccttcgcagaaaattagtaagtaatggagttgagatgtggattccatatgataataccaattactgctcaacttcagcatttgatggtgcatcatccatattacaagaagtatattcttccctcaaagattcaggcattgttgttgaacagttgcatgctgaagctggaaaagggcagtttgagatagccttgaagtatatcttgtgcactgttgcggctgacaaactcatatatgctcgtgagactattaagtcgattgctcgaaagcatggactggtagcaacatttcttccaaagcctgatttggatgattttggatctggttctcacgtgcatctgagcttgtgggagaacgatcagaatgtttttatggggtcaagtaaagataactttcatggaatgtcaaaaactggagaacagttccttgctggagtgtatcatcaccttccgtcaatattggcatttaccgctcctcacccaaacagctacgaccggattcagccagatacttggagtggagcttatctatgctgggggaaagagaacagggaggctccattaagaaccgcatgcccacctggtgtgcctcttgatttagtcagcaacttcgagatcaaatccttcgatggttgcgcaaatccgcacttgggtcttgctgctatcgtagctgctggcatcgatgggctaagaagacaccttaagttacctgagccaattgaatcaaacccttctgatcactcttcaaaactgaaaaggctaccgcagaacctgcaggaatctgtagaatcgctttctgcagataaggttttgcatgagttaattggtgataaacttgtcacaactgctatagctatacggaaggctgagatcaatcactttgcgaagaatccgggtgcacttaaggatctcatcgaccgttactagggcaaaagaacggaatgagaagctacatcttcttggacgtggcaaggggtttcactgtatgaccaaccgagagactggaagaataaattttgttccaatggttaacttcggattctcatatcctgtgactgaacttttgtgactgaacttttgatacccagtgtttctcttatcaaataataaaggttatttaaatttttaaaatgagaaatgctagg

SEQ ID NO: 10197 - DNA, 2620 bp, Zea Mays
gtctgccttgccatcgtgcagtagaacgtggtggctgtataagaagcctgagggacattgctgcattgtacaactgcgaggcctcacttgagaaggtggagaagtttagaagtgctgaaggattgaaatcgattggctcaaaatgcttccaagctgccaacatatctgttatacttatagatgatggcatagcattcgacaaaatgctagacctggagtctcacaaggcatttgctcctgtagttggcagagttctgagaatagaaaggctagcagaaacaatcatcaatgctgagtcattcagtggatcaagctggacactggactcattcactgaaagctacatatctaagctgaattcagtttctaaccaaattgttgcattaaaaagcatagctgcatatagaagcggtttagagatcaatcccaatgttagcaagactgatgcagaggatggtcttcgtaaggagctaacaggtcctaggccatttcggattacaaacaagaacctgattgactacctatttacctgcagtcttggaattgctgtttcacttagcctgccagtgcaaattcacacaggttttggagataaggacctagacttgcgaaagtgcaacccactacatttgcgcgctgttcttgaggacgaaagatttgctaagtgccaaattgttcttttacatgcttcttatccattttctaaggaagcatcctatcttgcatctgtttactcccaggtttaccttgattttggcttggcgattccaaaacttagtgttcatggaatgacatcgtccctgaaagagcttctggagctagctcccataaagaaggtcatgttcagtacagatgggtatgcttttccagagacatattacctaggtgcaaaaagggcacgggatgttgtttaccgtgtcctatctgctgcatgtgaagatggtgaccttagcattcaggaagctatcgaagctattgaggacatctttagaagaaatgcattgaatttgtacaagttaaatgttgtcaatggatcaataaatcatgaaactgccatagttggtaaaagggtgtcattgtcttctgttgaggaagatgtgctctttgttcgaataatctggtgcgatgcttctggtcaacatagatgccgcgtcgtgccagctggacgattttatgagattacgaggaataagggtgttggtctgacttttgcagcaatgggaatgacctcattttgtgatggcccagcggatgggtcgaaccttactggtgtaggcgagatcagacttgtaccagatatgccaacactcgttaggctaccatggtcaaggcacgaggaaatggtgatggctgacatgcaaataaggcctggagaaggctgggaatactgtcctagaaataccttgaggaaagtcacaaaagttctgttagatgagttcaatgtgacaatgaaggcaggttttgaaaatgaatttttccttcgcagaaaattagtaagtaatggagttgagatgtggattccatatgataataccaattactgctcaacttcagcatttgatggtgcatcatccatattacaagaagtatattcttccctcaaagattcaggcattgttgttgaacagttgcatgctgaagctggaaaagggcagtttgagatagccttgaagtatatcttgtgcactgttgcggctgacaaactcatatatgctcgtgagactattaagtcgattgctcgaaagcatggactggtagcaacatttcttccaaagcctgatttggatgattttggatctggttctcacgtgcatctgagcttgtgggagaacgatcagaatgtttttatggggtcaagtaaagataactttcatggaatgtcaaaaactggagaacagttccttgctggagtgtatcatcaccttccgtcaatattggcatttaccgctcctcacccaaacagctacgaccggattcagccagatacttggagtggagcttatctatgctgggggaaagagaacagggaggctccattaagaaccgcatgcccacctggtgtgcctcttgatttagtcagcaacttcgagatcaaatccttcgatggttgcgcaaatccgcacttgggtcttgctgctatcgtagctgctggcatcgatgggctaagaagacaccttaagttacctgagccaattgaatcaaacccttctgatcactcttcaaaactgaaaaggctaccgcagaacctgcaggaatctgtagaatcgctttctgcagataaggttttgcatgagttaattggtgataaacttgtcacaactgctatagctatacggaaggctgagatcaatcactttgcgaagaatccgggtgcacttaaggatctcatcgaccgttactagggcaaaagaacggaatgagaagctacatcttcttggacgtggcaaggggtttcactgtatgaccaaccgagagactggaagaataaattttgttccaatggttaacttcggattctcatatcctgtgactgaacttttgtgactgaacttttgatacccagtgtttctcttatcaaataataaaggttatttaaatttttaaaatgagaaatgctagg

SEQ ID NO: 10198 - DNA, 2994 bp, Zea Mays
gccccgccatttatttatataaaaactcggcacggcacggcgacacggcgtgcaccgtgcagcagttcgtcgttcggctccgcctatcccgcagacggagccaccgcttcggtcaaacgtggccgactcactcgtagatccttaggcagcgagcgcgcgagcggcggcggagaccgcgaggggagggtcccggagggtgatggaggcgaggtacgaggtgctgcggcgcgcgacggaggaggtggccgcggtggacgcgcacgcgcacaacctggtggagcacggctccgcgttcccctttctccgctgcttctccgaggccgagggggacgcgctcgcgctcgcgccccactccctctccttcaagagaagcctgagggacattgctgcattgtacaactgcgaggcctcacttgagaaggtggagaagtttagaagtgctgaaggattgaaatcgattggctcaaaatgcttccaagctgccaacatatctgttatacttatagatgatggcatagcattcgacaaaatgctagacctggagtctcacaaggcatttgctcctgtagttggcagagttctgagaatagaaaggctagcagaaacaatcatcaatgctgagtcattcagtggatcaagctggacactggactcattcactgaaagctacatatctaagctgaattcagtttctaaccaaattgttgcattaaaaagcatagctgcatatagaagcggtttagagatcaatcccaatgttagcaagactgatgcagaggatggtcttcgtaaggagctaacaggtcctaggccatttcggattacaaacaagaacctgattgactacctatttacctgcagtcttggaattgctgtttcacttagcctgccagtgcaaattcacacaggttttggagataaggacctagacttgcgaaagtgcaacccactacatttgcgcgctgttcttgaggacgaaagatttgctaagtgccaaattgttcttttacatgcttcttatccattttctaaggaagcatcctatcttgcatctgtttactcccaggtttaccttgattttggcttggcgattccaaaacttagtgttcatggaatgacatcgtccctgaaagagcttctggagctagctcccataaagaaggtcatgttcagtacagatgggtatgcttttccagagacatattacctaggtgcaaaaagggcacgggatgttgtttaccgtgtcctatctgctgcatgtgaagatggtgaccttagcattcaggaagctatcgaagctattgaggacatctttagaagaaatgcattgaatttgtacaagttaaatgttgtcaatggatcaataaatcatgaaactgccatagttggtaaaagggtgtcattgtcttctgttgaggaagatgtgctctttgttcgaataatctggtgcgatgcttctggtcaacatagatgccgcgtcgtgccagctggacgattttatgagattacgaggaataagggtgttggtctgacttttgcagcaatgggaatgacctcattttgtgatggcccagcggatgggtcgaaccttactggtgtaggcgagatcagacttgtaccagatatgccaacactcgttaggctaccatgttcctatgctatttttatgggcaactactactccctcaattccaaattgtcaaggcacgaggaaatggtgatggctgacatgcaaataaggcctggagaaggctgggaatactgtcctagaaataccttgaggaaagtcacaaaagttctgttagatgagttcaatgtgacaatgaaggcaggttttgaaaatgaatttttccttcgcagaaaattagtaagtaatggagttgagatgtggattccatatgataataccaattactgctcaacttcagcatttgatggtgcatcatccatattacaagaagtatattcttccctcaaagattcaggcattgttgttgaacagttgcatgctgaagctggaaaagggcagtttgagatagccttgaagtatatcttgtgcactgttgcggctgacaaactcatatatgctcgtgagactattaagtcgattgctcgaaagcatggactggtagcaacatttcttccaaagcctgatttggatgattttggatctggttctcacgtgcatctgagcttgtgggagaacgatcagaatgtttttatggggtcaagtaaagataactttcatggaatgtcaaaaactggagaacagttccttgctggagtgtatcatcaccttccgtcaatattggcatttaccgctcctcacccaaacagctacgaccggattcagccagatacttggagtggagcttatctatgctgggggaaagagaacagggaggctccattaagaaccgcatgcccacctggtgtgcctcttgatttagtcagcaacttcgagatcaaatccttcgatggttgcgcaaatccgcacttgggtcttgctgctatcgtagctgctggcatcgatgggctaagaagacaccttaagttacctgagccaattgaatcaaacccttctgatcactcttcaaaactgaaaaggctaccgcagaacctgcaggaatctgtagaatcgctttctgcagataaggttttgcatgagttaattggtgataaacttgtcacaactgctatagctatacggaaggctgagatcaatcactttgcgaagaatccgggtgcacttaaggatctcatcgaccgttactagggcaaaagaacggaatgagaagctacatcttcttggacgtggcaaggggtttcactgtatgaccaaccgagagactggaagaataaattttgttccaatggttaacttcggattctcatatcctgtgactgaacttttgtgactgaacttttgatacccagtgtttctcttatcaaataataaaggttatttaaatttttaaaatgagaaatgctagg

SEQ ID NO: 10199 - DNA, 2656 bp, Zea Mays
gccccgccatttatttatataaaaactcggcacggcacggcgacacggcgtgcaccgtgcagcagttcgtcgttcggctccgcctatcccgcagacggagccaccgcttcggtcaaacgtggccgactcactcgtagatccttaggcagcgagcgcgcgagcggcggcggagaccgcgaggggagggtcccggagggtgatggaggcgaggtacgaggtgctgcggcgcgcgacggaggaggtggccgcggtggacgcgcacgcgcacaacctggtggagcacggctccgcgttcccctttctccgctgcttctccgaggccgagggggacgcgctcgcgctcgcgccccactccctctccttcaagagaagcctgagggacattgctgcattgtacaactgcgaggcctcacttgagaaggtggagaagtttagaagtgctgaaggattgaaatcgattggctcaaaatgcttccaagctgccaacatatctgttatacttatagatgatggcatagcattcgacaaaatgctagacctggagtctcacaaggcatttgctcctgtagttggcagagttctgagaatagaaaggctagcagaaacaatcatcaatgctttttggagataaggacctagacttgcgaaagtgcaacccactacatttgcgcgctgttcttgaggacgaaagatttgctaagtgccaaattgttcttttacatgcttcttatccattttctaaggaagcatcctatcttgcatctgtttactcccaggtttaccttgattttggcttggcgattccaaaacttagtgttcatggaatgacatcgtccctgaaagagcttctggagctagctcccataaagaaggtcatgttcagtacagatgggtatgcttttccagagacatattacctaggtgcaaaaagggcacgggatgttgtttaccgtgtcctatctgctgcatgtgaagatggtgaccttagcattcaggaagctatcgaagctattgaggacatctttagaagaaatgcattgaatttgtacaagttaaatgttgtcaatggatcaataaatcatgaaactgccatagttggtaaaagggtgtcattgtcttctgttgaggaagatgtgctctttgttcgaataatctggtgcgatgcttctggtcaacatagatgccgcgtcgtgccagctggacgattttatgagattacgaggaataagggtgttggtctgacttttgcagcaatgggaatgacctcattttgtgatggcccagcggatgggtcgaaccttactggtgtaggcgagatcagacttgtaccagatatgccaacactcgttaggctaccatggtcaaggcacgaggaaatggtgatggctgacatgcaaataaggcctggagaaggctgggaatactgtcctagaaataccttgaggaaagtcacaaaagttctgttagatgagttcaatgtgacaatgaaggcaggttttgaaaatgaatttttccttcgcagaaaattagtaagtaatggagttgagatgtggattccatatgataataccaattactgctcaacttcagcatttgatggtgcatcatccatattacaagaagtatattcttccctcaaagattcaggcattgttgttgaacagttgcatgctgaagctggaaaagggcagtttgagatagccttgaagtatatcttgtgcactgttgcggctgacaaactcatatatgctcgtgagactattaagtcgattgctcgaaagcatggactggtagcaacatttcttccaaagcctgatttggatgattttggatctggttctcacgtgcatctgagcttgtgggagaacgatcagaatgtttttatggggtcaagtaaagataactttcatggaatgtcaaaaactggagaacagttccttgctggagtgtatcatcaccttccgtcaatattggcatttaccgctcctcacccaaacagctacgaccggattcagccagatacttggagtggagcttatctatgctgggggaaagagaacagggaggctccattaagaaccgcatgcccacctggtgtgcctcttgatttagtcagcaacttcgagatcaaatccttcgatggttgcgcaaatccgcacttgggtcttgctgctatcgtagctgctggcatcgatgggctaagaagacaccttaagttacctgagccaattgaatcaaacccttctgatcactcttcaaaactgaaaaggctaccgcagaacctgcaggaatctgtagaatcgctttctgcagataaggttttgcatgagttaattggtgataaacttgtcacaactgctatagctatacggaaggctgagatcaatcactttgcgaagaatccgggtgcacttaaggatctcatcgaccgttactagggcaaaagaacggaatgagaagctacatcttcttggacgtggcaaggggtttcactgtatgaccaaccgagagactggaagaataaattttgttccaatggttaacttcggattctcatatcctgtgactgaacttttgtgactgaacttttgatacccagtgtttctcttatcaaataataaaggttatttaaatttttaaaatgagaaatgctagg

SEQ ID NO: 10200 - DNA, 3121 bp, Zea Mays
gccccgccatttatttatataaaaactcggcacggcacggcgacacggcgtgcaccgtgcagcagttcgtcgttcggctccgcctatcccgcagacggagccaccgcttcggtcaaacgtggccgactcactcgtagatccttaggcagcgagcgcgcgagcggcggcggagaccgcgaggggagggtcccggagggtgatggaggcgaggtacgaggtgctgcggcgcgcgacggaggaggtggccgcggtggacgcgcacgcgcacaacctggtggagcacggctccgcgttcccctttctccgctgcttctccgaggccgagggggacgcgctcgcgctcgcgccccactccctctccttcaagtgcggcatgcggatggcagcaactttatggggtctgccttgccatcgtgcagtagaacgtggtggctgtatagtacgcctttggtcgtctccttgcctcctgatgaatcatgaatgcctggggtccttgggactggtggggctgcttgttcggaaactggaaccgtgtcttgcatagaagcctgagggacattgctgcattgtacaactgcgaggcctcacttgagaaggtggagaagtttagaagtgctgaaggattgaaatcgattggctcaaaatgcttccaagctgccaacatatctgttatacttatagatgatggcatagcattcgacaaaatgctagacctggagtctcacaaggcatttgctcctgtagttggcagagttctgagaatagaaaggctagcagaaacaatcatcaatgctgagtcattcagtggatcaagctggacactggactcattcactgaaagctacatatctaagctgaattcagtttctaaccaaattgttgcattaaaaagcatagctgcatatagaagcggtttagagatcaatcccaatgttagcaagactgatgcagaggatggtcttcgtaaggagctaacaggtcctaggccatttcggattacaaacaagaacctgattgactacctatttacctgcagtcttggaattgctgtttcacttagcctgccagtgcaaattcacacaggttttggagataaggacctagacttgcgaaagtgcaacccactacatttgcgcgctgttcttgaggacgaaagatttgctaagtgccaaattgttcttttacatgcttcttatccattttctaaggaagcatcctatcttgcatctgtttactcccaggtttaccttgattttggcttggcgattccaaaacttagtgttcatggaatgacatcgtccctgaaagagcttctggagctagctcccataaagaaggtcatgttcagtacagatgggtatgcttttccagagacatattacctaggtgcaaaaagggcacgggatgttgtttaccgtgtcctatctgctgcatgtgaagatggtgaccttagcattcaggaagctatcgaagctattgaggacatctttagaagaaatgcattgaatttgtacaagttaaatgttgtcaatggatcaataaatcatgaaactgccatagttggtaaaagggtgtcattgtcttctgttgaggaagatgtgctctttgttcgaataatctggtgcgatgcttctggtcaacatagatgccgcgtcgtgccagctggacgattttatgagattacgaggaataagggtgttggtctgacttttgcagcaatgggaatgacctcattttgtgatggcccagcggatgggtcgaaccttactggtgtaggcgagatcagacttgtaccagatatgccaacactcgttaggctaccatggtcaaggcacgaggaaatggtgatggctgacatgcaaataaggcctggagaaggctgggaatactgtcctagaaataccttgaggaaagtcacaaaagttctgttagatgagttcaatgtgacaatgaaggcaggttttgaaaatgaatttttccttcgcagaaaattagtaagtaatggagttgagatgtggattccatatgataataccaattactgctcaacttcagcatttgatggtgcatcatccatattacaagaagtatattcttccctcaaagattcaggcattgttgttgaacagttgcatgctgaagctggaaaagggcagtttgagatagccttgaagtatatcttgtgcactgttgcggctgacaaactcatatatgctcgtgagactattaagtcgattgctcgaaagcatggactggtagcaacatttcttccaaagcctgatttggatgattttggatctggttctcacgtgcatctgagcttgtgggagaacgatcagaatgtttttatggggtcaagtaaagataactttcatggaatgtcaaaaactggagaacagttccttgctggagtgtatcatcaccttccgtcaatattggcatttaccgctcctcacccaaacagctacgaccggattcagccagatacttggagtggagcttatctatgctgggggaaagagaacagggaggctccattaagaaccgcatgcccacctggtgtgcctcttgatttagtcagcaacttcgagatcaaatccttcgatggttgcgcaaatccgcacttgggtcttgctgctatcgtagctgctggcatcgatgggctaagaagacaccttaagttacctgagccaattgaatcaaacccttctgatcactcttcaaaactgaaaaggctaccgcagaacctgcaggaatctgtagaatcgctttctgcagataaggttttgcatgagttaattggtgataaacttgtcacaactgctatagctatacggaaggctgagatcaatcactttgcgaagaatccgggtgcacttaaggatctcatcgaccgttactagggcaaaagaacggaatgagaagctacatcttcttggacgtggcaaggggtttcactgtatgaccaaccgagagactggaagaataaattttgttccaatggttaacttcggattctcatatcctgtgactgaacttttgtgactgaacttttgatacccagtgtttctcttatcaaataataaaggttatttaaatttttaaaatgagaaatgctagg

SEQ ID NO: 10201 - DNA, 2940 bp, Zea Mays
gccccgccatttatttatataaaaactcggcacggcacggcgacacggcgtgcaccgtgcagcagttcgtcgttcggctccgcctatcccgcagacggagccaccgcttcggtcaaacgtggccgactcactcgtagatccttaggcagcgagcgcgcgagcggcggcggagaccgcgaggggagggtcccggagggtgatggaggcgaggtacgaggtgctgcggcgcgcgacggaggaggtggccgcggtggacgcgcacgcgcacaacctggtggagcacggctccgcgttcccctttctccgctgcttctccgaggccgagggggacgcgctcgcgctcgcgccccactccctctccttcaagagaagcctgagggacattgctgcattgtacaactgcgaggcctcacttgagaaggtggagaagtttagaagtgctgaaggattgaaatcgattggctcaaaatgcttccaagctgccaacatatctgttatacttatagatgatggcatagcattcgacaaaatgctagacctggagtctcacaaggcatttgctcctgtagttggcagagttctgagaatagaaaggctagcagaaacaatcatcaatgctgagtcattcagtggatcaagctggacactggactcattcactgaaagctacatatctaagctgaattcagtttctaaccaaattgttgcattaaaaagcatagctgcatatagaagcggtttagagatcaatcccaatgttagcaagactgatgcagaggatggtcttcgtaaggagctaacaggtcctaggccatttcggattacaaacaagaacctgattgactacctatttacctgcagtcttggaattgctgtttcacttagcctgccagtgcaaattcacacaggttttggagataaggacctagacttgcgaaagtgcaacccactacatttgcgcgctgttcttgaggacgaaagatttgctaagtgccaaattgttcttttacatgcttcttatccattttctaaggaagcatcctatcttgcatctgtttactcccaggtttaccttgattttggcttggcgattccaaaacttagtgttcatggaatgacatcgtccctgaaagagcttctggagctagctcccataaagaaggtcatgttcagtacagatgggtatgcttttccagagacatattacctaggtgcaaaaagggcacgggatgttgtttaccgtgtcctatctgctgcatgtgaagatggtgaccttagcattcaggaagctatcgaagctattgaggacatctttagaagaaatgcattgaatttgtacaagttaaatgttgtcaatggatcaataaatcatgaaactgccatagttggtaaaagggtgtcattgtcttctgttgaggaagatgtgctctttgttcgaataatctggtgcgatgcttctggtcaacatagatgccgcgtcgtgccagctggacgattttatgagattacgaggaataagggtgttggtctgacttttgcagcaatgggaatgacctcattttgtgatggcccagcggatgggtcgaaccttactggtgtaggcgagatcagacttgtaccagatatgccaacactcgttaggctaccatggcacgaggaaatggtgatggctgacatgcaaataaggcctggagaaggctgggaatactgtcctagaaataccttgaggaaagtcacaaaagttctgttagatgagttcaatgtgacaatgaaggcaggttttgaaaatgaatttttccttcgcagaaaattagtaagtaatggagttgagatgtggattccatatgataataccaattactgctcaacttcagcatttgatggtgcatcatccatattacaagaagtatattcttccctcaaagattcaggcattgttgttgaacagttgcatgctgaagctggaaaagggcagtttgagatagccttgaagtatatcttgtgcactgttgcggctgacaaactcatatatgctcgtgagactattaagtcgattgctcgaaagcatggactggtagcaacatttcttccaaagcctgatttggatgattttggatctggttctcacgtgcatctgagcttgtgggagaacgatcagaatgtttttatggggtcaagtaaagataactttcatggaatgtcaaaaactggagaacagttccttgctggagtgtatcatcaccttccgtcaatattggcatttaccgctcctcacccaaacagctacgaccggattcagccagatacttggagtggagcttatctatgctgggggaaagagaacagggaggctccattaagaaccgcatgcccacctggtgtgcctcttgatttagtcagcaacttcgagatcaaatccttcgatggttgcgcaaatccgcacttgggtcttgctgctatcgtagctgctggcatcgatgggctaagaagacaccttaagttacctgagccaattgaatcaaacccttctgatcactcttcaaaactgaaaaggctaccgcagaacctgcaggaatctgtagaatcgctttctgcagataaggttttgcatgagttaattggtgataaacttgtcacaactgctatagctatacggaaggctgagatcaatcactttgcgaagaatccgggtgcacttaaggatctcatcgaccgttactagggcaaaagaacggaatgagaagctacatcttcttggacgtggcaaggggtttcactgtatgaccaaccgagagactggaagaataaattttgttccaatggttaacttcggattctcatatcctgtgactgaacttttgtgactgaacttttgatacccagtgtttctcttatcaaataataaaggttatttaaatttttaaaatgagaaatgctagg

SEQ ID NO: 10202 - DNA, 1488 bp, Zea Mays
ttttctttagtgtgtggtggaatcctccagactggttagcttgccaccaactttgggttcactgacttctcttcgtgaactgtgtgttgcaaagaacaggcttgataacttgcctgtagaaataggactgctgaagcacctccaggtcctcatagcaaataacaacaggataacttcattgccttcatcaataggagattgtgaatctctcactgtggttcacctgtcatcaaatctcttaactgaactgccagagacctttgcgaaccttcgtaatcttaagaatttgcttataagcaacaatggccttacgtccttgccagcagcgtttttcaaaaagtgctcgcagcttactacactggatctccatggcacagaaatcacaaatgatgttcttcgacaggtggaggggtgggaagagttcgaccagcggcggaggcagaaacatcagaagcagctcgacttccgtgttggctcatctggtgtgttcgatgaaggcgcggatgatgataataggcgaaggtgactgcctgaaaattgtgagcataatactttgctacgatatttctcccaaagaaccgtagaaatgtacaactgaaaactacttctatggagcccgagatgtacaacctttttcattcagtcacgtagatagacacgtcaggaaaacaacatccttggaaagccatggcagataatgaggtaataataacaacgccgcactcatgcgacgcccccattgaccctgataacctgcccgttcacccagcccgaggcctcgctcgccaggaacgccaccacgggcgctatgtctgtcgtctcggctatacccatggagttctttatcctctctaggaacgcctcatccttcccggcaaggaagagctccgtgcgcacagggcccggcgccaccacgttggccgtgatccccttcgccgccacctccttggccaggaccctcgtcatcgcctccacagcggcgttggacgcagcgtacgccgcgtagcccggcggcagcacggcaaccgtcgtggacgagaacgtcatgatgcgcccaccgctgttgggggggatgcgccgggcggcctcccggcacaccaggaacttgccgcgcgtgttcaccgcgaacgtggcgtcgaagtcctcgacggcagtgtcggccagcgcggggtacttggcgtccatgatgcccgcgcaggcgaccactacgtggggcggggacccgaatgcctcctcggcgcggtcgaagagcgcgcgcacggcggccgggtcggagacgtccgcgcgcacggccacggcgcggaggccgcgcgaggcgagctccgcgacgagctcctcggccttggccgggttggtggcgtagttgaccacgacacgcgcgccgagcgcggcgaggtgggacgacacctcgcggccgatgccccgggagccaccggtgacgagcgcgatgcggccttcgagcgccggcgcggtggacactgctgccat

SEQ ID NO: 10203 - DNA, 2101 bp, Zea Mays
cttcgagtcttgtcttgtgggctgtgcctgtgacggactgacggcacagaggtaatggaggccgcgcctaccaccatcaccgtccaggtcaagttcgccgggcggacgatccccgtggaggtcccggcagcggcttccggcgcggagctgaagcgcctcctccagccgctgaccaatgtcctcccgcgcggccagaggctcatctgcaaaggcaaagtgctccaggatgccgcaagcctgagctcgatgcaagtagtgggcggatccaaggtgatgctcatcgcgtcgcaggggctccatcagggggatggtcctatcacaaataatagcagtagctcagcaacaactgtgagaaggccttcaaatgttaaggagaatcaaacacaaaagccagaggtagttgtcaccaaaagccgatctgagcgctggaagttaacaggtgttgttgcgctgcaagactgtgacttgaaggtaatacctgaagaagtctgggattgtggcacctcgatacgaatactagacattagctacaactgtatcaaggaaattccacacaaaatctctgctcttaaatctctaaataaattgctcctaactgaaaatgatatagttgatgatagcatctgctgggaaggtctatcatgtcttcaaaagctattgaatttatctttaagcgaaaaccgactggttagcttgccaccaactttgggttcactgacttctcttcgtgaactgtgtgttgcaaagaacaggcttgataacttgcctgtagaaataggactgctgaagcacctccaggtcctcatagcaaataacaacaggataacttcattgccttcatcaataggagattgtgaatctctcactgtggttcacctgtcatcaaatctcttaactgaactgccagagacctttgcgaaccttcgtaatcttaagcagcgtttttcaaaaagtgctcgcagcttactacactggatctccatggcacagaaatcacaaatgatgttcttcgacaggtggaggggtgggaagagttcgaccagcggcggaggcagaaacatcagaagcagctcgacttccgtgttggctcatctggtgtgttcgatgaaggcgcggatgatgataataggcgaaggtgactgcctgaaaattgtgagcataatactttgctacgatatttctcccaaagaaccgtagaaatgtacaactgaaaactacttctatggagcccgagatgtacaacctttttcattcagtcacgtagatagacacgtcaggaaaacaacatccttggaaagccatggcagataatgaggtaataataacaacgccgcactcatgcgacgcccccattgaccctgataacctgcccgttcacccagcccgaggcctcgctcgccaggaacgccaccacgggcgctatgtctgtcgtctcggctatacccatggagttctttatcctctctaggaacgcctcatccttcccggcaaggaagagctccgtgcgcacagggcccggcgccaccacgttggccgtgatccccttcgccgccacctccttggccaggaccctcgtcatcgcctccacagcggcgttggacgcagcgtacgccgcgtagcccggcggcagcacggcaaccgtcgtggacgagaacgtcatgatgcgcccaccgctgttgggggggatgcgccgggcggcctcccggcacaccaggaacttgccgcgcgtgttcaccgcgaacgtggcgtcgaagtcctcgacggcagtgtcggccagcgcggggtacttggcgtccatgatgcccgcgcaggcgaccactacgtggggcggggacccgaatgcctcctcggcgcggtcgaagagcgcgcgcacggcggccgggtcggagacgtccgcgcgcacggccacggcgcggaggccgcgcgaggcgagctccgcgacgagctcctcggccttggccgggttggtggcgtagttgaccacgacacgcgcgccgagcgcggcgaggtgggacgacacctcgcggccgatgccccgggagccaccggtgacgagcgcgatgcggccttcgagcgccggcgcggtggacactgctgccat

SEQ ID NO: 10204 - DNA, 2226 bp, Zea Mays
gtaaaatatcatttttttctctagggagagagggaagggggcggccgttgtttctcaacagagtagagtcgaaacagaatcctgacttcgagtcttgtcttgtgggctgtgcctgtgacggactgacggcacagaggtaatggaggccgcgcctaccaccatcaccgtccaggtcaagttcgccgggcggacgatccccgtggaggtcccggcagcggcttccggcgcggagctgaagcgcctcctccagccgctgaccaatgtcctcccgcgcggccagaggctcatctgcaaaggcaaagtgctccaggatgccgcaagcctgagctcgatgcaagtagtgggcggatccaaggtgatgctcatcgcgtcgcaggggctccatcagggggatggtcctatcacaaataatagcagtagctcagcaacaactgtgagaaggccttcaaatgttaaggagaatcaaacacaaaagccagaggtagttgtcaccaaaagccgatctgagcgctggaagttaacaggtgttgttgcgctgcaagactgtgacttgaaggtaatacctgaagaagtctgggattgtggcacctcgatacgaatactagacattagctacaactgtatcaaggaaattccacacaaaatctctgctcttaaatctctaaataaattgctcctaactgaaaatgatatagttgatgatagcatctgctgggaaggtctatcatgtcttcaaaagctattgaatttatctttaagcgaaaaccgactggttagcttgccaccaactttgggttcactgacttctcttcgtgaactgtgtgttgcaaagaacaggcttgataacttgcctgtagaaataggactgctgaagcacctccaggtcctcatagcaaataacaacaggataacttcattgccttcatcaataggagattgtgaatctctcactgtggttcacctgtcatcaaatctcttaactgaactgccagagacctttgcgaaccttcgtaatcttaagaatttgcttataagcaacaatggccttacgtccttgccagcagcgtttttcaaaaagtgctcgcagcttactacactggatctccatggcacagaaatcacaaatgatgttcttcgacaggtggaggggtgggaagagttcgaccagcggcggaggcagaaacatcagaagcagctcgacttccgtgttggctcatctggtgtgttcgatgaaggcgcggatgatgataataggcgaaggtgactgcctgaaaattgtgagcataatactttgctacgatatttctcccaaagaaccgtagaaatgtacaactgaaaactacttctatggagcccgagatgtacaacctttttcattcagtcacgtagatagacacgtcaggaaaacaacatccttggaaagccatggcagataatgaggtaataataacaacgccgcactcatgcgacgcccccattgaccctgataacctgcccgttcacccagcccgaggcctcgctcgccaggaacgccaccacgggcgctatgtctgtcgtctcggctatacccatggagttctttatcctctctaggaacgcctcatccttcccggcaaggaagagctccgtgcgcacagggcccggcgccaccacgttggccgtgatccccttcgccgccacctccttggccaggaccctcgtcatcgcctccacagcggcgttggacgcagcgtacgccgcgtagcccggcggcagcacggcaaccgtcgtggacgagaacgtcatgatgcgcccaccgctgttgggggggatgcgccgggcggcctcccggcacaccaggaacttgccgcgcgtgttcaccgcgaacgtggcgtcgaagtcctcgacggcagtgtcggccagcgcggggtacttggcgtccatgatgcccgcgcaggcgaccactacgtggggcggggacccgaatgcctcctcggcgcggtcgaagagcgcgcgcacggcggccgggtcggagacgtccgcgcgcacggccacggcgcggaggccgcgcgaggcgagctccgcgacgagctcctcggccttggccgggttggtggcgtagttgaccacgacacgcgcgccgagcgcggcgaggtgggacgacacctcgcggccgatgccccgggagccaccggtgacgagcgcgatgcggccttcgagcgccggcgcggtggacactgctgccat

SEQ ID NO: 10205 - DNA, 856 bp, Zea Mays
atgcaatgcagcgggtcatcatccacctcggctcactccactcactgcaccgagctcactggcaatggctaccagcaccaagctcgtggcccttggctttgccgtcctcctgagcatcggcttctccgatgcagcgagggtagttaggcttggtagccatgcgtctgcgggaggtggaggtggcggcgggggaggcggctccgggtcgactgggggtggctttggcggtgggtcgggcggtggcggtggttacggcataggtaagggtggcggggactggtggaacaatttcgtctctagtatagcaggtggtggaggaggaggacaaggcggaggcggtggcaccaatggtgggtccgggtccggcggtgggtccggttatggttctggcagcagctcgactgcagcctctggccccagcagtggcaactacgccgacgctgagggcaagggcggcggtggcggcggcggatcccaaggcggctctggtggcggtggaggctctgggtccggatccggcagcggtggaatccactgagcttgcacttcagtagctagagcctagagccccgcattagtgtcagtccattctgtggttttttgctgtctttgttacgagaattaatcaggaataaagcgtaatgggcttcgtgattgtagttcgagtaggtagcaaagcatgcaactgatatgaatgcatgtaatggctatctacgagtgtgtgcccctagctgtaatctgtttctcatcgatcgttaaggtcgttgcatccggttttatttatcttctgaaaccaaaatacattggaactcttatagtctcttgctactgttgaatgtgactattgagtattaac

SEQ ID NO: 10206 - DNA, 2784 bp, Zea Mays
cagcgccagcgcggcagagagtcgagaccttctagctaggccgctgccacgtcaaaactagctcctccagacaaccaatcagctagccgaagccggtcgattagcatgcagcagcgctagtagacgtcgtctccgggtctccactctccacacagaaacccatacaaaatccgcatccagaatcaccggagatacgagtccgcgcgtacgttgcagttgaattgtgaagagaggctgtgcgcagtgctgctgctgcttcttcttcttcgacgcatgcacgcacatggatggtgctgctgagtgctgacctccggccgtacgtgatcttcgatctccacacggcggcaagcgatcgagaggcgtggttcccgtggcgtcaaccgacacctagcagctgctagctcatctgcttgatctctagctgagactccgagcaaaatgtgtatgtcgcggaccagcaataaatacccgtgcctggaggagattacatcaattgatcagcgtggcaggcatcaaaaacagtcgaggccgctgcgaggcagcagccaggaacaacaagctaggccccctcacgcagaccgcacgaccgagcgcgcggcattgaccgacccatcgccgccgccgccgcctcgatcgaccatgacgcttgcgagcacggacaaggtggtgctgggatgcatcgcgttcagcatcttctgggtgctggccgtcttcccctcggtgccgttcatgccggtgggccgcaccgcgggctcgctcctgggcgccatgctcatggtgctcttccgcgtgatgaccccggaggaggcctacaaggccatcgacctcccgatcctgggcctgctcttcggcaccatggtggtcagcatcttcctggagcgcgccgacatgttcaagtacctcggcagcgcgctggcgtggcggagccggggcagcaaggacctgctgttccgcgtctgcctcgtgtccgccgtggccagcgcgctcttcaccaacgacacctgctgcgtggtgctcaccgagttcatcctcaagctggcgcggcagaacaacctgcccccgcagccgttcctgctggccctcgcctccagctccaacatcggctcctccgccacgcccatcggcaacccgcagaacctcgtcatcgccgtgcagagcggcatcaccttcggccagttcctcgtcggcgtcttcccggccatgatcgtcggcgtcgccgccaacacctgcatcctgctctgctacttctggatgtcgcgcgcctcgtccgtcaacgggggcggcgccgacgccgactgcgtcggcgagctcatccgccggagcgatagcctcagccgggccgacactacgctaggcatgagcatgaggagccggagctacaactcggagggcggcgacatccaggtcgccatcaggtccatgcgcgcgtccagcatgtcgcaggagatggtggaggtgtccaccgtctgcgacaggcgcgacgacggcggtgccgggcccagaaaggtcaccaggaccaccagccaccagcgcagcgtcatcatcgaggacgcgcccgaggctgacgccgccgacgacgacgacgatggccacaagggcaaggacggtgacagcgtcaccaacaaggagaagaggtggaaggtgctcgtgtggaagactgccgtgtatctcaccacccttgggatgctggccgcgctcctcatggggctcaacatgtcctggtccgccatcactgctgctcttgtccttctcgcgcttgatttcactgacgcacaggcgtgcctggagaaggtgtcatactctttgctgatcttcttctgcggcatgttcataacggtcgacggcttcaacaggaccggcatacccaatgcgctctgggagctggtcgaaccgcactcgagaatcgacagcgccaaaggcacggcgcttctcgcagtcgtgatcctagtcctttcaaatgtggcctcaaacgttccaactgttcttctgctgggcacaagggtggcagcgtcagcaggcacaatctccccagagtcagagaagaaagcctggctcatactagcatgggtgagcacggtggccggcaacctgaccctcttgggctcggcggcgaacctgatcgtctgcgagcaggcgcggcgggcacagttcttcgggtacaacctcaccttctggagccacctccgcttcggcttgccgtcgacgatcatcatcacggcgatcggcctgctcatcgtcgccagttactgaaccccacacaagctagggtctcggcctcgcacaaacggcggggtgtgtagccagatggcaggcagaacgctgcagaaaacagcatgcagcactgcctgacatcgaaggagatgttgtactgattggcctttgtttgtacgttgtaacagtttttatgtcgttcgtgtaagtctgtacgtttcgcgcaaccgatgccgcaaggcgccgggttgcccatctgctaaggcaaataatgcgcaagactagtagatggcatggagtatagaaggccggcaccactgttctaggaaggcaaaaacttgctctagctagttcaggtaggagagccggcgaaaatgtatggtgtgcttctcgatttggtaatgtcaagggacttgtccttatgtttggagcaaagaaacatggttgtacgattgtgccactagtacacagaagctctataataacggttctagagctatttgtggtgacgtttttcagtaccgtcagtgctaggggttagtggaaatcgatatttccaatggtggctatttt

SEQ ID NO: 10207 - DNA, 2682 bp, Zea Mays
cagcgccagcgcggcagagagtcgagaccttctagctaggccgctgccacgtcaaaactagctcctccagacaaccaatcagctagccgaagccggtcgattagcatgcagcagcgctagtagacgtcgtctccgggtctccactctccacacagaaacccatacaaaatccgcatccagaatcaccggagatacgagtccgcgcgtacgttgcagttgaattgtgaagagaggctgtgcgcagtgctgctgctgcttcttcttcttcgacgcatgcacgcacatggatggtgctgctgagtgctgacctccggccgtacgtgatcttcgatctccacacggcggcaagcgatcgagaggcgtggttcccgtggcgtcaaccgacacctagcagctgctagctcatctgcttgatctctagctgagactccgagcaaaatcagccaggaacaacaagctaggccccctcacgcagaccgcacgaccgagcgcgcggcattgaccgacccatcgccgccgccgccgcctcgatcgaccatgacgcttgcgagcacggacaaggtggtgctgggatgcatcgcgttcagcatcttctgggtgctggccgtcttcccctcggtgccgttcatgccggtgggccgcaccgcgggctcgctcctgggcgccatgctcatggtgctcttccgcgtgatgaccccggaggaggcctacaaggccatcgacctcccgatcctgggcctgctcttcggcaccatggtggtcagcatcttcctggagcgcgccgacatgttcaagtacctcggcagcgcgctggcgtggcggagccggggcagcaaggacctgctgttccgcgtctgcctcgtgtccgccgtggccagcgcgctcttcaccaacgacacctgctgcgtggtgctcaccgagttcatcctcaagctggcgcggcagaacaacctgcccccgcagccgttcctgctggccctcgcctccagctccaacatcggctcctccgccacgcccatcggcaacccgcagaacctcgtcatcgccgtgcagagcggcatcaccttcggccagttcctcgtcggcgtcttcccggccatgatcgtcggcgtcgccgccaacacctgcatcctgctctgctacttctggatgtcgcgcgcctcgtccgtcaacgggggcggcgccgacgccgactgcgtcggcgagctcatccgccggagcgatagcctcagccgggccgacactacgctaggcatgagcatgaggagccggagctacaactcggagggcggcgacatccaggtcgccatcaggtccatgcgcgcgtccagcatgtcgcaggagatggtggaggtgtccaccgtctgcgacaggcgcgacgacggcggtgccgggcccagaaaggtcaccaggaccaccagccaccagcgcagcgtcatcatcgaggacgcgcccgaggctgacgccgccgacgacgacgacgatggccacaagggcaaggacggtgacagcgtcaccaacaaggagaagaggtggaaggtgctcgtgtggaagactgccgtgtatctcaccacccttgggatgctggccgcgctcctcatggggctcaacatgtcctggtccgccatcactgctgctcttgtccttctcgcgcttgatttcactgacgcacaggcgtgcctggagaaggtgtcatactctttgctgatcttcttctgcggcatgttcataacggtcgacggcttcaacaggaccggcatacccaatgcgctctgggagctggtcgaaccgcactcgagaatcgacagcgccaaaggcacggcgcttctcgcagtcgtgatcctagtcctttcaaatgtggcctcaaacgttccaactgttcttctgctgggcacaagggtggcagcgtcagcaggcacaatctccccagagtcagagaagaaagcctggctcatactagcatgggtgagcacggtggccggcaacctgaccctcttgggctcggcggcgaacctgatcgtctgcgagcaggcgcggcgggcacagttcttcgggtacaacctcaccttctggagccacctccgcttcggcttgccgtcgacgatcatcatcacggcgatcggcctgctcatcgtcgccagttactgaaccccacacaagctagggtctcggcctcgcacaaacggcggggtgtgtagccagatggcaggcagaacgctgcagaaaacagcatgcagcactgcctgacatcgaaggagatgttgtactgattggcctttgtttgtacgttgtaacagtttttatgtcgttcgtgtaagtctgtacgtttcgcgcaaccgatgccgcaaggcgccgggttgcccatctgctaaggcaaataatgcgcaagactagtagatggcatggagtatagaaggccggcaccactgttctaggaaggcaaaaacttgctctagctagttcaggtaggagagccggcgaaaatgtatggtgtgcttctcgatttggtaatgtcaagggacttgtccttatgtttggagcaaagaaacatggttgtacgattgtgccactagtacacagaagctctataataacggttctagagctatttgtggtgacgtttttcagtaccgtcagtgctaggggttagtggaaatcgatatttccaatggtggctatttt

SEQ ID NO: 10208 - DNA, 2686 bp, Zea Mays
cagcgccagcgcggcagagagtcgagaccttctagctaggccgctgccacgtcaaaactagctcctccagacaaccaatcagctagccgaagccggtcgattagcatgcagcagcgctagtagacgtcgtctccgggtctccactctccacacagaaacccatacaaaatccgcatccagaatcaccggagatacgagtccgcgcgtacgttgcagttgaattgtgaagagaggctgtgcgcagtgctgctgctgcttcttcttcttcgacgcatgcacgcacatggatggtgctgctgagtgctgacctccggccgtacgtgatcttcgatctccacacggcggcaagcgatcgagaggcgtggttcccgtggcgtcaaccgacacctagcagctgctagctcatctgcttgatctctagctgagactccgagcaaaatgcagcagccaggaacaacaagctaggccccctcacgcagaccgcacgaccgagcgcgcggcattgaccgacccatcgccgccgccgccgcctcgatcgaccatgacgcttgcgagcacggacaaggtggtgctgggatgcatcgcgttcagcatcttctgggtgctggccgtcttcccctcggtgccgttcatgccggtgggccgcaccgcgggctcgctcctgggcgccatgctcatggtgctcttccgcgtgatgaccccggaggaggcctacaaggccatcgacctcccgatcctgggcctgctcttcggcaccatggtggtcagcatcttcctggagcgcgccgacatgttcaagtacctcggcagcgcgctggcgtggcggagccggggcagcaaggacctgctgttccgcgtctgcctcgtgtccgccgtggccagcgcgctcttcaccaacgacacctgctgcgtggtgctcaccgagttcatcctcaagctggcgcggcagaacaacctgcccccgcagccgttcctgctggccctcgcctccagctccaacatcggctcctccgccacgcccatcggcaacccgcagaacctcgtcatcgccgtgcagagcggcatcaccttcggccagttcctcgtcggcgtcttcccggccatgatcgtcggcgtcgccgccaacacctgcatcctgctctgctacttctggatgtcgcgcgcctcgtccgtcaacgggggcggcgccgacgccgactgcgtcggcgagctcatccgccggagcgatagcctcagccgggccgacactacgctaggcatgagcatgaggagccggagctacaactcggagggcggcgacatccaggtcgccatcaggtccatgcgcgcgtccagcatgtcgcaggagatggtggaggtgtccaccgtctgcgacaggcgcgacgacggcggtgccgggcccagaaaggtcaccaggaccaccagccaccagcgcagcgtcatcatcgaggacgcgcccgaggctgacgccgccgacgacgacgacgatggccacaagggcaaggacggtgacagcgtcaccaacaaggagaagaggtggaaggtgctcgtgtggaagactgccgtgtatctcaccacccttgggatgctggccgcgctcctcatggggctcaacatgtcctggtccgccatcactgctgctcttgtccttctcgcgcttgatttcactgacgcacaggcgtgcctggagaaggtgtcatactctttgctgatcttcttctgcggcatgttcataacggtcgacggcttcaacaggaccggcatacccaatgcgctctgggagctggtcgaaccgcactcgagaatcgacagcgccaaaggcacggcgcttctcgcagtcgtgatcctagtcctttcaaatgtggcctcaaacgttccaactgttcttctgctgggcacaagggtggcagcgtcagcaggcacaatctccccagagtcagagaagaaagcctggctcatactagcatgggtgagcacggtggccggcaacctgaccctcttgggctcggcggcgaacctgatcgtctgcgagcaggcgcggcgggcacagttcttcgggtacaacctcaccttctggagccacctccgcttcggcttgccgtcgacgatcatcatcacggcgatcggcctgctcatcgtcgccagttactgaaccccacacaagctagggtctcggcctcgcacaaacggcggggtgtgtagccagatggcaggcagaacgctgcagaaaacagcatgcagcactgcctgacatcgaaggagatgttgtactgattggcctttgtttgtacgttgtaacagtttttatgtcgttcgtgtaagtctgtacgtttcgcgcaaccgatgccgcaaggcgccgggttgcccatctgctaaggcaaataatgcgcaagactagtagatggcatggagtatagaaggccggcaccactgttctaggaaggcaaaaacttgctctagctagttcaggtaggagagccggcgaaaatgtatggtgtgcttctcgatttggtaatgtcaagggacttgtccttatgtttggagcaaagaaacatggttgtacgattgtgccactagtacacagaagctctataataacggttctagagctatttgtggtgacgtttttcagtaccgtcagtgctaggggttagtggaaatcgatatttccaatggtggctatttt

SEQ ID NO: 10209 - DNA, 1433 bp, Zea Mays
cagcgccagcgcggcagagagtcgagaccttctagctaggccgctgccacgtcaaaactagctcctccagacaaccaatcagctagccgaagccggtcgattagcatgcagcagcgctagtagacgtcgtctccgggtctccactctccacacagaaacccatacaaaatccgcatccagaatcaccggagatacgagtccgcgcgtacgttgcagttgaattgtgaagagaggctgtgcgcagtgctgctgctgcttcttcttcttcgacgcatgcacgcacatggatggtgctgctgagtgctgacctccggccgtacgtgatcttcgatctccacacggcggcaagcgatcgagaggcgtggttcccgtggcgtcaaccgacacctagcagctgctagctcatctgcttgatctctagctgagactccgagcaaaatgtgtcatactctttgctgatcttcttctgcggcatgttcataacggtcgacggcttcaacaggaccggcatacccaatgcgctctgggagctggtcgaaccgcactcgagaatcgacagcgccaaaggcacggcgcttctcgcagtcgtgatcctagtcctttcaaatgtggcctcaaacgttccaactgttcttctgctgggcacaagggtggcagcgtcagcaggcacaatctccccagagtcagagaagaaagcctggctcatactagcatgggtgagcacggtggccggcaacctgaccctcttgggctcggcggcgaacctgatcgtctgcgagcaggcgcggcgggcacagttcttcgggtacaacctcaccttctggagccacctccgcttcggcttgccgtcgacgatcatcatcacggcgatcggcctgctcatcgtcgccagttactgaaccccacacaagctagggtctcggcctcgcacaaacggcggggtgtgtagccagatggcaggcagaacgctgcagaaaacagcatgcagcactgcctgacatcgaaggagatgttgtactgattggcctttgtttgtacgttgtaacagtttttatgtcgttcgtgtaagtctgtacgtttcgcgcaaccgatgccgcaaggcgccgggttgcccatctgctaaggcaaataatgcgcaagactagtagatggcatggagtatagaaggccggcaccactgttctaggaaggcaaaaacttgctctagctagttcaggtaggagagccggcgaaaatgtatggtgtgcttctcgatttggtaatgtcaagggacttgtccttatgtttggagcaaagaaacatggttgtacgattgtgccactagtacacagaagctctataataacggttctagagctatttgtggtgacgtttttcagtaccgtcagtgctaggggttagtggaaatcgatatttccaatggtggctatttt

SEQ ID NO: 10210 - DNA, 648 bp, Zea Mays
ggaattcttcgtcgaattcaaggggccggccgaaagtatctaccaaggcggtgtctggaaggttagggtagaactgcctgatgcatatccttacaaatccccgtccatcggcttcatcaacaagatttatcacccaaatgtcgatgagatgtctggctctgtatgtttagatgtcataaaccaaacatggagcccaatgtttgatctagtaaatgtttttgaagtattccttccacagctgttactatatccaaatccttctgatccattaaatggggaggctgcagcactgatgatgcgtgatcgtcctgtttatgaacagaaagtgaaagaatattgtgagaagtatgccaaaccagaggacgctggtatcactccggaagacaagtccagtgatgaagagcttagcgaggaggaagacgactccggtgatgaagctatacttggcaatcctgatccctagtctgagttggaagaagccagtccagctcatcaatacaatgtttattgcagaaattgcaattaaacaaaaactgaaaaacaaaaaaactttggatggcatgtaaataagtgtaccttgtatgttctccaatgttgtttccttcatttggctgatcgaaattctgattgctcttacatccccccccc

SEQ ID NO: 10211 - DNA, 1794 bp, Zea Mays
ttacaaaccaccacccgccgctttcctcagttggtctcctcctcacgcagcacaatccctcctagagcaaaagtcctaaaggcctcaattagattagacaaaaaagacgcgattggatcactggcgagggaggcgtgtttaggggggtggcgaccgaagctagccgccgagctcggcagcgttttgcgtgattgattgcgtccctaatcctcactcttttgcttcgttcgctttgtccctttcatcatcccctgtgcttgtctcgccttccacaaccctctccctcttccatctcatttccgctgcggctgcaacaataaaataataagtctcgtgcaggcgaaggacgtacgacgacgcggacgcaccgtcaaagtctacaggctgcgcaatccctttctccctcttatccccaaggcgaggagctgagggggggcccttctgctgctgttcttgtttccccgctctccaagatgtcgtccccgagcaagcgccgcgagatggaccttatgaagctgtgaggatgctggacctctcttggatgatgagcgactacaaggtggagatggtgaacgatgggatgcaggaattcttcgtcgaattcaaggggccggccgaaagtatctaccaaggcggtgtctggaaggttagggtagaactgcctgatgcatatccttacaaatccccgtccatcggcttcatcaacaagatttatcaccctaatgtcgatgagatgtctggctctgtatgtttagatgtcataaaccaaacatggagcccaatgtttgatctagtaaatgtttttgaagtattccttccacagctgttactatatccaaatccttctgatccattaaatggggaggctgcagcactgatgatgcgtgatcgtcctgtttatgaacagaaagggaaaggcgaaggacgtacgacgacgcggacgcaccgtcaaagtctacaggctgcgcaatccctttctccctcttatccccaaggcgaggagctgagggggggggggggcccttctgctgctgttcttgtttccccgctctccaagatgtcgtccccgagcaagcgccgcgagatggaccttatgaagctgatgatgagcgactacaaggtcgagatggtgaacgatgggatgcaggaattcttcgtcgaattcaaggggccggccgaaagtatctaccaaggcggtgtctggaaggttagggtagaactgcctgatgcatatccttacaaatccccgtccatcggcttcatcaacaagatttatcacccaaatgtcgatgagatgtctggctctgtatgtttagatgtcataaaccaaacatggagcccaatgtttgatctagtaaatgtttttgaagtattccttccacagctgttactatatccaaatccttctgatccattaaatggggaggctgcagcactgatgatgcgtgatcgtcctgtttatgaacagaaagtgaaagaatattgtgagaagtatgccaaaccagaggacgctggtatcactccggaagacaagtccagtgatgaagagcttagcgaggaggaagacgactccggtgatgaagctatacttggcaatcctgatccctagtctgagttggaagaagccagtccagctcatcaatacaatgtttattgcagaaattgcaattaaacaaaaactgaaaaacaaaaaaactttggatggcatgtaaataagtgtaccttgtatgttctccaatgttgtttccttcatttggctgatcgaaattctgattgctcttacatccccccccc

SEQ ID NO: 10212 - DNA, 1210 bp, Zea Mays
ttacaaaccaccacccgccgctttcctcagttggtctcctcctcacgcagcacaatccctcctagagcaaaagtcctaaaggcctcaattagattagacaaaaaagacgcgattggatcactggcgagggaggcgtgtttaggggggtggcgaccgaagctagccgccgagctcggcagcgttttgcgtgattgattgcgtccctaatcctcactcttttgcttcgttcgctttgtccctttcatcatcccctgtgcttgtctcgccttccacaaccctctccctcttccatctcatttccgctgcggctgcaacaataaaataataagtctcgtgcaggcgaaggacgtacgacgacgcggacgcaccgtcaaagtctacaggctgcgcaatccctttctccctcttatccccaaggcgaggagctgagggggggcccttctgctgctgttcttgtttccccgctctccaagatgtcgtccccgagcaagcgccgcgagatggaccttatgaagctgatgatgagcgactacaaggtggagatggtgaacgatgggatgcaggaattcttcgtcgaattcaaggggccggccgaaagtatctaccaaggcggtgtctggaaggttagggtagaactgcctgatgcatatccttacaaatccccgtccatcggcttcatcaacaagatttatcaccctaatgtcgatgagatgtctggctctgtatgtttagatgtcataaaccaaacatggagcccaatgtttgatctagtaaatgtttttgaagtattccttccacagctgttactatatccaaatccttctgatccattaaatggggaggctgcagcactgatgatgcgtgatcgtcctgtttatgaacagaaagtgaaagaatattgtgagaagtatgccaaaccagaggacgctggtatcactccggaagacaagtccagtgatgaagagcttagcgaggaggaagacgactccggtgatgaagctatacttggcaatcctgatccctagtctgagttggaagaagccagtccagctcatcaatacaatgtttattgcagaaattgcaattaaacaaaaactgaaaaacaaaaaaactttggatggcatgtaaataagtgtaccttgtatgttctccaatgttgtttccttcatttggctgatcgaaattctgattgctcttacatccccccccc

SEQ ID NO: 10213 - DNA, 1960 bp, Zea Mays
ctccatttacaaaccaccacccgccgctttcctcagttggtctcctcctcacgcagcacaatccctcctagagcaaaagtcctaaaggcctcaattagattagacaaaaaagacgcgattggatcactggcgagggaggcgtgtttaggggggtggcgaccgaagctagccgccgagctcggcagcgttttgcgtgattgattgcgtccctaatcctcactcttttgcttcgttcgctttgtccctttcatcatcccctgtgcttgtctcgccttccacaaccctctccctcttccatctcatttccgctgcggctgcaacaataaaataataagtctcgtgcaggcgaaggacgtacgacgacgcggacgcaccgtcaaagtctacaggctgcgcaatccctttctccctcttatccccaaggcgaggagctgagggggggcccttctgctgctgttcttgtttccccgctctccaagatgtcgtccccgagcaagcgccgcgagatggaccttatgaagctgatgatgagcgactacaaggtggagatggtgaacgatgggatgcaggaattcttcgtcgaattcaaggggccggccgaaagtatctaccaaggcggtgtctggaaggttagggtagaactgcctgatgcatatccttacaaatccccgtccatcggcttcatcaacaagatttatcaccctaatgtcgatgagatgtctggctctgtatgtttagatgtcataaaccaaacatggagcccaatgtttgatctagtaaatgtttttgaagtattccttccacagctgttactatatccaaatccttctgatccattaaatggggaggctgcagcactgatgatgcgtgatcgtcctgtttatgaacagaaagggaaaggcgaaggacgtacgacgacgcggacgcaccgtcaaagtctacaggctgcgcaatccctttctccctcttatccccaaggcgaggagctgagggggggggggggcccttctgctgctgttcttgtttccccgctctccaagatgtcgtccccgagcaagcgccgcgagatggaccttatgaagctgatgatgagcgactacaaggtcgagatggtgaacgatgggatgcaggaattcttcgtcgaattcaaggggccggccgaaaatgttgtggggtggaagttcagtttcaggaaaactgccagtctccactgttgatcgtgttcagatattcttgtccgtttagcttcatccttgattggttgctcagttgacccgaaccgtccttccttttcagtcatagtttatcacaggattttgccaaataaattcgtactcaatttggtaggtatctaccaaggcggtgtctggaaggttagggtagaactgcctgatgcatatccttacaaatccccgtccatcggcttcatcaacaagatttatcacccaaatgtcgatgagatgtctggctctgtatgtttagatgtcataaaccaaacatggagcccaatgtttgatctagtaaatgtttttgaagtattccttccacagctgttactatatccaaatccttctgatccattaaatggggaggctgcagcactgatgatgcgtgatcgtcctgtttatgaacagaaagtgaaagaatattgtgagaagtatgccaaaccagaggacgctggtatcactccggaagacaagtccagtgatgaagagcttagcgaggaggaagacgactccggtgatgaagctatacttggcaatcctgatccctagtctgagttggaagaagccagtccagctcatcaatacaatgtttattgcagaaattgcaattaaacaaaaactgaaaaacaaaaaaactttggatggcatgtaaataagtgtaccttgtatgttctccaatgttgtttccttcatttggctgatcgaaattctgattgctcttacatccccccccc

SEQ ID NO: 10214 - DNA, 1075 bp, Zea Mays
tctcgccgcctctccatttacaaaccaccacccgccgctttcctcagttggtctcctcctcacgcagcacaatccctcctagagcaaaagtcctaaaggcctcaattagattagacaaaaaagacgcgattggatcactggcgagggaggcgtgtttaggggggtggcgaccgaagctagccgccgagctcggcagcgttttgcgcgaaggacgtacgacgacgcggacgcaccgtcaaagtctacaggctgcgcaatccctttctccctcttatccccaaggcgaggagctgagggggggcccttctgctgctgttcttgtttccccgctctccaagatgtcgtccccgagcaagcgccgcgagatggaccttatgaagctgatgatgagcgactacaaggtcgagatggtgaacgatgggatgcaggaattcttcgtcgaattcaaggggccggccgaaagtatctaccaaggcggtgtctggaaggttagggtagaactgcctgatgcatatccttacaaatccccgtccatcggcttcatcaacaagatttatcacccaaatgtcgatgagatgtctggctctgtatgtttagatgtcataaaccaaacatggagcccaatgtttgatctagtaaatgtttttgaagtattccttccacagctgttactatatccaaatccttctgatccattaaatggggaggctgcagcactgatgatgcgtgatcgtcctgtttatgaacagaaagtgaaagaatattgtgagaagtatgccaaaccagaggacgctggtatcactccggaagacaagtccagtgatgaagagcttagcgaggaggaagacgactccggtgatgaagctatacttggcaatcctgatccctagtctgagttggaagaagccagtccagctcatcaatacaatgtttattgcagaaattgcaattaaacaaaaactgaaaaacaaaaaaactttggatggcatgtaaataagtgtaccttgtatgttctccaatgttgtttccttcatttggctgatcgaaattctgattgctcttacatccccccccc

SEQ ID NO: 10215 - DNA, 1673 bp, Zea Mays
acgagaggaaaacggatgcaaattaaccggcaccagatctcgccgcctctccatttacaaaccaccacccgccgctttcctcagttggtctcctcctcacgcagcacaatccctcctagagcaaaagtcctaaaggcctcaattagattagacaaaaaagacgcgattggatcactggcgagggaggcgtgtttaggggggtggcgaccgaagctagccgccgagctcggcagcgttttgcgcgaaggacgtacgacgacgcggacgcaccgtcaaagtctacaggctgcgcaatccctttctccctcttatccccaaggcgaggagctgagggggggcccttctgctgctgttcttgtttccccgctctccaagatgtcgtccccgagcaagcgccgcgagatggaccttatgaagctgatgatgagcgactacaaggtggagatggtgaacgatgggatgcaggaattcttcgtcgaattcaaggggccggccgaaagtatctaccaaggcggtgtctggaaggttagggtagaactgcctgatgcatatccttacaaatccccgtccatcggcttcatcaacaagatttatcaccctaatgtcgatgagatgtctggctctgtatgtttagatgtcataaaccaaacatggagcccaatgtttgatctagtaaatgtttttgaagtattccttccacagctgttactatatccaaatccttctgatccattaaatggggaggctgcagcactgatgatgcgtgatcgtcctgtttatgaacagaaagggaaaggcgaaggacgtacgacgacgcggacgcaccgtcaaagtctacaggctgcgcaatccctttctccctcttatccccaaggcgaggagctgagggggggggggggcccttctgctgctgttcttgtttccccgctctccaagatgtcgtccccgagcaagcgccgcgagatggaccttatgaagctgatgatgagcgactacaaggtcgagatggtgaacgatgggatgcaggaattcttcgtcgaattcaaggggccggccgaaagtatctaccaaggcggtgtctggaaggttagggtagaactgcctgatgcatatccttacaaatccccgtccatcggcttcatcaacaagatttatcacccaaatgtcgatgagatgtctggctctgtatgtttagatgtcataaaccaaacatggagcccaatgtttgatctagtaaatgtttttgaagtattccttccacagctgttactatatccaaatccttctgatccattaaatggggaggctgcagcactgatgatgcgtgatcgtcctgtttatgaacagaaagtgaaagaatattgtgagaagtatgccaaaccagaggacgctggtatcactccggaagacaagtccagtgatgaagagcttagcgaggaggaagacgactccggtgatgaagctatacttggcaatcctgatccctagtctgagttggaagaagccagtccagctcatcaatacaatgtttattgcagaaattgcaattaaacaaaaactgaaaaacaaaaaaactttggatggcatgtaaataagtgtaccttgtatgttctccaatgttgtttccttcatttggctgatcgaaattctgattgctcttacatccccccccc

SEQ ID NO: 10216 - DNA, 1574 bp, Zea Mays
gtagtcagtaactacgagaggaaaacggatgcaaattaaccggcaccagatctcgccgcctctccatttacaaaccaccacccgccgctttcctcagttggtctcctcctcacgcagcacaatccctcctagagcaaaagtcctaaaggcctcaattagattagacaaaaaagacgcgattggatcactggcgagggaggcgtgtttaggggggtggcgaccgaagctagccgccgagctcggcagcgttttgcgtgattgattgcgtccctaatcctcactcttttgcttcgttcgctttgtccctttcatcatcccctgtgcttgtctcgccttccacaaccctctccctcttccatctcatttccgctgcggctgcaacaataaaataataagtctcgtgcaggcgaaggacgtacgacgacgcggacgcaccgtcaaagtctacaggctgcgcaatccctttctccctcttatccccaaggcgaggagctgagggggggcccttctgctgctgttcttgtttccccgctctccaagatgtcgtccccgagcaagcgccgcgagatggaccttatgaagctgatgatgagcgactacaaggtggagatggtgaacgatgggatgcaggaattcttcgtcgaattcaaggggccggccgaaagtatctaccaaggcggtgtctggaaggttagggtagaactgcctgatgcatatccttacaaatccccgtccatcggcttcatcaacaagatttatcaccctaatgtcgatgagatgtctggctctgtatgtttagatgtcataaaccaaacatggagcccaatgtttgatctagtaaatgtttttgaagtattccttccacagctgttactatatccaaatccttctgatccattaaatggggaggctgcagcactgatgatgcgtgatcgtcctgtttatgaacagaaagggaaaggtatctaccaaggcggtgtctggaaggttagggtagaactgcctgatgcatatccttacaaatccccgtccatcggcttcatcaacaagatttatcacccaaatgtcgatgagatgtctggctctgtatgtttagatgtcataaaccaaacatggagcccaatgtttgatctagtaaatgtttttgaagtattccttccacagctgttactatatccaaatccttctgatccattaaatggggaggctgcagcactgatgatgcgtgatcgtcctgtttatgaacagaaagtgaaagaatattgtgagaagtatgccaaaccagaggacgctggtatcactccggaagacaagtccagtgatgaagagcttagcgaggaggaagacgactccggtgatgaagctatacttggcaatcctgatccctagtctgagttggaagaagccagtccagctcatcaatacaatgtttattgcagaaattgcaattaaacaaaaactgaaaaacaaaaaaactttggatggcatgtaaataagtgtaccttgtatgttctccaatgttgtttccttcatttggctgatcgaaattctgattgctcttacatccccccccc

SEQ ID NO: 10217 - DNA, 1211 bp, Zea Mays
ccactcttcacaggctcacggtagtcagtaactacgagaggaaaacggatgcaaattaaccggcaccagatctcgccgcctctccatttacaaaccaccacccgccgctttcctcagttggtctcctcctcacgcagcacaatccctcctagagcaaaagtcctaaaggcctcaattagattagacaaaaaagacgcgattggatcactggcgagggaggcgtgtttaggggggtggcgaccgaagctagccgccgagctcggcagcgttttgcgtgattgattgcgtccctaatcctcactcttttgcttcgttcgctttgtccctttcatcatcccctgcgaaggacgtacgacgacgcggacgcaccgtcaaagtctacaggctgcgcaatccctttctccctcttatccccaaggcgaggagctgagggggggcccttctgctgctgttcttgtttccccgctctccaagatgtcgtccccgagcaagcgccgcgagatggaccttatgaagctgatgatgagcgactacaaggtggagatggtgaacgatgggatgcaggaattcttcgtcgaattcaaggggccggccgaaagtatctaccaaggcggtgtctggaaggttagggtagaactgcctgatgcatatccttacaaatccccgtccatcggcttcatcaacaagatttatcacccaaatgtcgatgagatgtctggctctgtatgtttagatgtcataaaccaaacatggagcccaatgtttgatctagtaaatgtttttgaagtattccttccacagctgttactatatccaaatccttctgatccattaaatggggaggctgcagcactgatgatgcgtgatcgtcctgtttatgaacagaaagtgaaagaatattgtgagaagtatgccaaaccagaggacgctggtatcactccggaagacaagtccagtgatgaagagcttagcgaggaggaagacgactccggtgatgaagctatacttggcaatcctgatccctagtctgagttggaagaagccagtccagctcatcaatacaatgtttattgcagaaattgcaattaaacaaaaactgaaaaacaaaaaaactttggatggcatgtaaataagtgtaccttgtatgttctccaatgttgtttccttcatttggctgatcgaaattctgattgctcttacatccccccccc

SEQ ID NO: 10218 - DNA, 1036 bp, Zea Mays
ccttacctcgccttgctgccttattaacaaatatggtttttccttagctagatcgcttctttgctaggcagtcctgctccaccacttggccatagctggtgaaggtctctgctattggtgaaggtcgtgagtggaatttcaattcgtccttgtggccaagcagacattccagaatggaccgggaaacgttcatcgccttacgatgatccacgcacactgaggtttcttggagaacctattctgcttccaggaagtaccgaacatcttgatggcgcttccattggaaaagggaggcaagatgactgcaactgtcagttcccaggttccattgcttgtatcaggtttcatgtcgcagaaaagaagatcgaactgaagcatgagctaggctcagcatactatgaaatggggtttcataggatcggcgaggatttagcactgacatggacgaaggatgaggagacgaaattcaacagcactgtccaggacaacatgcctgcgtctaagaacaagctctgggacaagctgcttgccgtcttgcatgccaaaggcaaagaaggccttgtgagttattaccacaatgttttccaggtctggcgacgggcctaccagaaccgcctggctggaaatgctgatagtgatgacgattccatagagcctggtttcctatactttcgtcaaggtggtgatcggagccgctccaggtcagctgcttcttccaggaaacggaggagatcttaggagactgtttgatcctgaatttccaggaaacggaggagatcagctacttcctgttgaactcgaatgaagaatattgttaaggctggacatagaaatggtgataagtgagggtagaattctgttgggacctaattaacttctctgcgaatagccgtgctggtggtttgttagtgctttgttggtccaatggtaatgctattgtgttgtcatttagcctaccttgaggaaggtagattcacttttatatgactttcttgcatgaatgcaattttaattgctttttggttcatgttttttt

SEQ ID NO: 10219 - DNA, 2502 bp, Zea Mays
atgacccaaacaactctttcactagcagtagctgaagagataatggatcataattggactcaagcatcggcacctgcaacattcaggtacgagcacagctgtgacatgaacagcagcaaatggtgcacaaccgtgctagttcaaggcagtttgtctctaaaagcacttctggtgcacaatagacgccccgtctcatcatactcgcccttggtgatatgctggttttcagggaaaacgaccttggccaatatcgcaccacccaaccaggccgagtaccttgctaggttctcggacatgtattcaggggggctggaagaaacattgctcaagttagtaatagccagggaagtgaggaggggattgactaggagcagcaatgagggtaccttcacaagtgatggaaagattgctgaagcagacagatttgcttctctctggaacctgtcctcaaagccttgaggaagaaaaaaagtgagataaaccttagtgattaaatgagtctaagcaaaactacaagagtttagattaaatatgcataaagatccacaagttgtatacacaactgtccaagagagccaattgaacatgcaaagctgtaaccatggcatgaaatgtagctgttgcctgttgctattgctacctaattcttacttaaccaacatacttcccacttccagttgtgctattgctacctaattcttacttaaccaacatacttcccacttccagttgtgctattgctacctaattcttacttaaccaacatactttccacctccagttgtgctattgctacccatattcactacaatgtttgactacttatccaaaggacaagtatcaaatgaaacttcaaagttctaacagaacatcaaagctggcactctttattattagggaacataacaacagagaatgtcccggactagtggtgcataggttggcatccatacaatcagttcataccgaaggcagattttcatcttgaatgaagctgcgttcaactagaaaacatatgttaaatccacaaaagtttaaaacaaaatgatattacttaccctatacagctaattgatatgcatttgacctatagctaaaaaaactcggccggtagggaaagaccgccctcccgatattaaattaagaagagaccgaatcatggtttcgactgataaaatccattctgcccactctacaacggcccagcgggagggtggcgcgcaggacataacccaagaacgggtgggacacagcgaggggatttttttaaccaagcccgaagttagggatcgaaccaggacctggagatgctactcggaagccttaaccattacgttagaggccctttcgctatttgacctatgactcacaaggttgaataaagcaaaggtgcacatcaaaaacaaaaggcaactaaccagtcattgatgtggtgccaccacataacatggtattttcaagcagctgacgatggtactctgatgaaacatttgaggcgctagtaactagctggtgaacgataccataatcttccaagcccaatatatgtggttgaaataaagcttcaccaacaatgtacctctctttctcaattgttatgacctggagaaagaagcggaagtgcctttctggttggcaagagctttctatagccttcaaaagccaactgatcttctgtgcaacatgcatactgctctttcagcctctcaacatcagaaacatcaaggtttactgatggattagtttttcagttcgtgtgaaaagaggtttgtcaagtcaactaccccaatctctaatctcttagaagctgtgttgaacagctgcttcacaaactggagcaatatctggtaaaatagaagcaaatgtcactctccaacatcaaccttgcttgctgaccactaattagtgaagtaaaacaagcactggatggccataactgaaccaaaatgtaggcaaagtctactttagttaaagctagccgatcaaaagatttggtatgccacgtgtattttgcaaagtagtcaactatgccacactaaacaaatcacccaaaaatgaggaagaactttgaaatcctaaagaaacaacaatcacaagataaatgcaagtacaaacagttttaaaccacaagcatgcagtcacattcccgtaaatgaaccaataccttaagaaatactatgatgcataccctaggagcaaccggcacctaaaaaactcaacctgtgggggtatgatagcccccaggcatagcatgatagagaagacctcatgcaggtcgaggaaacctctgatcctacaccccactcatacaaattggcactgcagcctatgtaagcaacctgggtcaggtcttagacctatgttttggtatggaagagacaaggagatttttttaaacccaggctaaggaccttgctaataaagccactaagctggcacctagaaaatccaaaaaaaactcgagctacaggaggtaagacagccctggaatttgtattaaga

SEQ ID NO: 10220 - DNA, 2150 bp, Zea Mays
gccacctacgcgcacccgcgccgtgatcccacgagacctcgcgaccccacatgtcatgaacgtcaagcacattaattcgtcctctctccgctgcccctcctatctcctcgcgagcaccgctggcctcgcttaacggcctgatctcccagccgccgcttccgcctcgcgtcccaccggtctccatctacatgcagccgcgctcgccaccgccgtcggaggcgcctgcgccctccgacgccatcatgatgcccggcgtgggcggcgtggagccggccgtcacgttgggccaggtgccgcgctggagcgaccccgaccagcgcatcttcctcgcctccacgtccgaagaggcgtccgcggaggacgacggatccggcacgacctctgcgtctggcttcatctctttctccgacccgctcacggtcgacgacggcgccgtcgggggtggccacgccgggggtgcctcgcgcttccccgtcgaccaggagatcaactctaggatctatctctggcgtggccagccctggaacctcgaggtcgacgcggtcgtcaattctaccaacgagagcttggacgaggcgcacagtagcccggggttgcatgctgctgccgggtcagggctcgccgaggagtgcgccaccttgggaggttgccgaactgggatggccaagatgaccaatgcctacgatctgcctgcaaggaaggtcatccataccgtgggccccaaatatgctgtcaagtatcacacagctgcagagaatgcacttagtcactgctatcggtcctgcttggaactgctcattgagaatggtcttgaaagcatcgcaatgggttgtatatacacagaagctaaaaactaccctcgtgaaccagctgctcatgtggcaataagaactgttagacgtttcctggagaagcaaaaagacaaaatagctggtgttgttttttgtactacatcatcatctgacacagagatatacaaacgattgctcccactatatttccctcgggacaagcaggaggaatatattgcgatagtaaagctcccagctgatgttggggatgagaatggtgagacggcaatagatgaaaggaaaataagaataagacctttgcctgctggtgtgctagacagaacagtgtctgcaaatcttgttgatcttcctctttccaattctggatcggcattgaagaggggttctttcaagttggattcatacttggatccttcatttatgtcaataattaaagatccagatctgcggcgcaaggagcagtgggaaaaatccgctcaagctcaaaagggatttaattatgctaggttatttggatatggggatctaggttgcccttcattatctgcagcagaggaatactcacttcattcacgatacctcactaaagcaaattctcttaatctttcagagattgctgaaatgaaaataatttatcgtggtggagttgatattgaaggacgcccggttatggtggttgttggtgcacactttcttcttcgatgccttgaccttgaacggtttgttcttcatgtagtgaaggagtttgaacctttgattcagaagccatatacaattgtatatttccactccgcagcatcattacaaccgcaaccagatttaggatttatgaagcggttacaacaaatactaggacggaaacatcagcgcaaccttcatgcaatttatgtactccacccaacgttgggtttgagaacagctgttttggcaatgcaaatgtttgtagatggagaggtctggaagaaagttgtatatgtggataggcttgtgcagctgttcagatatgtaccacgcgagcaacttacaattcctgactttgtttttcagcacgatctggaggtgaatggtgggaggggcctaattgtagacccaagaacaaagcacatataccagaggacgtccagttgatatatgccagttctgaggcctgaagttttgcttgagcttacaaaacaacaaaaaactttggaaagtacaagtcaccctgggactgaagagttgaagctcctgtcaactggcttctcaacctagttccgcaaagctaagcattttggattcacatttatatttcaataaaaaacaaaaagaatgtaaaaatgcacaatataaaaacaagag

SEQ ID NO: 10221 - DNA, 1931 bp, Zea Mays
cctctctccgctgcccctcctatctcctcgcgagcaccgctggcctcgcttaacggcctgatctcccagccgccgcttccgcctcgcgtcccaccggtctccatctacatgcagccgcgctcgccaccgccgtcggaggcgcctgcgccctccgacgccatcatgatgcccggcgtgggcggcgtggagccggccgtcacgttgggccaggtgccgcgctggagcgaccccgaccagcgcatcttcctcgcctccacgtccgaagaggcgtccgcggaggacgacggatccggcacgacctctgcgtctggcttcatctctttctccgacccgctcacggtcgacgacggcgccgtcgggggtggccacgccgggggtgcctcgcgcttccccgtcgaccaggagatcaactctaggatctatctctggcgtggccagccctggaacctcgaggtcgacgcggtcgtcaattctaccaacgagagcttggacgaggcgcacagtagcccggggttgcatgctgctgccgggtcagggctcgccgaggagtgcgccaccttgggaggttgccgaactgggatggccaagatgaccaatgcctacgatctgcctgcaaggaaggtcatccataccgtgggccccaaatatgctgtcaagtatcacacagctgcagagaatgcacttagtcactgctatcggtcctgcttggaactgctcattgagaatggtcttgaaagcatcgcaatgggttgtatatacacagaagctaaaaactaccctcgtgaaccagctgctcatgtggcaataagaactgttagacgtttcctggagaagcaaaaagacaaaatagctggtgttgttttttgtactacatcatcatctgacacagagatatacaaacgattgctcccactatatttccctcgggacaagcaggaggaatatattgcgatagtaaagctcccagctgatgttggggatgagaatggtgagacggcaatagatgaaaggaaaataagaataagacctttgcctgctggtgtgctagacagaacagtgtctgcaaatcttgttgatcttcctctttccaattctggatcggcattgaagaggggttctttcaagttggattcatacttggatccttcatttatgtcaataattaaagatccagatctgcggcgcaaggagcagtgggaaaaatccgctcaagctcaaaagggatttaattatgctaggttatttggatatggggatctaggttgcccttcattatctgcagcagaggaatactcacttcattcacgatacctcactaaagcaaattctcttaatctttcagagattgctgaaatgaaaataatttatcgtggtggagttgatattgaaggacgcccggttatggtggttgttggtgcacactttcttcttcgatgccttgaccttgaacggtttgttcttcatgtagtgaaggagtttgaacctttgattcagaagccatatacaattgtatatttccactccgcagcatcattacaaccgcaaccagatttaggatttatgaagcggttacaacaaatactaggacggaaacatcagcgcaaccttcatgcaatttatgtactccacccaacgttgggtttgagaacagctgttttggcaatgcaaatgtttgtagatggagaggtctggaagaaagttgtatatgtggataggcttgtgcagctgttcagatatgtaccacgcgagcaacttacaattcctgactttgtttttcagcacgatctggaggtgaatggtgggaggggcctaattgtagacccaagaacaaagcacatataccagaggacgtccagttgatatatgccagttctgaggcctgaagtttgttagttcttgcacttgcttgagcttacaaaacaacaaaaaac

SEQ ID NO: 10222 - DNA, 1141 bp, Zea Mays
attaattcgtcctctctccgctgcccctcctatctcctcgcgagcaccgctggcctcgcttaacggcctgatctcccagccgccgcttccgcctcgcgtcccaccggtctccatctacatgcagccgcgctcgccaccgccgtcggaggcgcctgcgccctccgacgccatcatgatgcccggcgtgggcggcgtggagccggccgtcacgttgggccaggtgccgcgctggagcgaccccgaccagcgcatcttcctcgcctccacgtccgaagaggcgtccgcggaggacgacggatccggcacgacctctgcgtctggcttcatctctttctccgacccgctcacggtcgacgacggcgccgtcgggggtggccacgccgggggtgcctcgcgcttccccgtcgaccaggagatcaactctaggatctatctctggcgtggccagccctggaacctcgaggtcgacgcggtcgtcaattctaccaacgagagcttggacgaggcgcacagtagcccggggttgcatgctgctgccgggtcagggctcgccgaggagtgcgccaccttgggaggttgccgaactgggatggccaagatgaccaatgcctacgatctgcctgcaaggaaggtcatccataccgtgggccccaaatatgctgtcaagtatcacacagctgcagagaatgcacttagtcactgctatcggtcctgcttggaactgctcattgagaatggtcttgaaagcatcgcaatgggttgtatatacacagaagctaaaaactaccctcgtgaaccagctgctcatgtggcaataagaactgttagacgtttcctggagaagcaaaaagacaaaatagctggtgttgttttttgtactacatcatcatctgacacagagatatacaaacgattgctcccactatatttccctcgggacaagcaggaggaatatattgcgatagtaaagctcccagctgatgttggggatgagaatggtgagacggcaatagatgaaaggaaaataagaataagacctttgcctgctggtgtgctagacagaacagtgtctgcaaatcttgttgatcttcctctttccaattctggatcggcattgaagaggtggttagcactcctcagg

SEQ ID NO: 10223 - DNA, 4381 bp, Zea Mays
tgaggtcacttcaatgccatcatctaggatgtcaacaatgtcagttggcttgcccaaaggctcatttgaacccattgcaaacttacctgtggcaaccccacttccaaatatgatttgcataggcatatagttctctatgggcctattgaggtaatcagcatcttttgggtgatcctattgagttagcaactcaagttagaacaagagaatttgaagtggaagagtggctttaacaggttagaaaaatagaaggtattggtcttaaccttgatgtaagcagcataatgaccctcttctaagcttatgacaaagttatcctcatcccaaagagcgccactaatgtccttcagtttgcaaaccttgacccacctagacctccacttacgaaggtgattgtacacttgttcgcgagagcttgctcgcgggggagctcgagggggagaagagacgtgagagggagagatgggaggggagaggaggcgacggcgaaaccctagcgcgaggcgagcgcgaggagagcgcgagtggccgagcgcagtctggctcacgtggaacacgccttttggccgtatcccacgagcctggctgaggccaatgttttgcatgagcgtggcctggcccagacacacgtccaagcaaccaaacacacggagctgtctgatttttgcatctccagagttttgcacgggcgcatgcacccaaccaaacacacggcaaatatttcacttagcccagcataaagacctcagctgcgccttttcgagtcactgccaagtgggaccagctttacagggacaccgaaatgacgcctcccctccaccttgtcacgccgggagcctgcgaccgcgccgccgccggcccgtccgttctccagccgcaccctgcggagcccgtgggcgagactatgagcatggcggagggttctcgcatgctgcgggcaaatgactgcaatgttgtgtgggcaagctgaaatagagttatacatcgaaagcttggctaatgctagcagtcgcagtaatcccaggataagtccgaactgcaaccaaaactcatgggcactcgggtgccagcctggctgggcttgcatggtatcaggcaccgaaccatctgatggaccatcagctgaattggttccgcaaagagcagagagctgcaggccatgttgtccgggtttcttctgccctcggggcctgacatgcatgatgccttgtcctttgggtgcttattgtccacttgggacattgaacgacactactggactttgtgatccgtatttttaccaaattactccaggaaagagcactgcatgtggtgcagcagattcttgggctgatattgttacaactaatgatatcttctgccctccagggcactactgtccatccacaacccagaaatacaattgcagcagtgggcactattgccgcaaaggttccaccgatgaaaagaagtgcttttggaaaaacacttgcaaggataatgcgataaaagaaaatctgactttttatggcattatattaattgctatcttgggctttgttttgctactggtgtacaactgttctggcctattcatttcatttcaagtaaaaatgtcatccagatctcgtaaaaaggctgcaaaaagggcagataagtcagccgcagcacgtgaaagatggaaattggcaaaagaacttatactgcggcatgaggttcccactgaagggttcgggcatgcttataatcaggcagatacggatagagctatgaagacaaacaatgataaattaacattctctggagtggtgtctctagctactgaaattaggccacgaaggccaacacttgaagtggctttcagaggtctaacgctatctattggaaaaaagaaacttctgcaatgtgttacaggaaaactttcaccaggtagggtcacagctataatgggcccttctggagcaggaaagactacttttctcaatgctgtattaggtaaaacgtctgggtacaagaaggatggggtagtccttataaatgggttacctggattaatgcagtcatataagaagataattggttttgtgcctcaagatgatattgtccatgggaacctgaccgtcgaggaaaatctgtggtttagttcatgttgcaggttaagcaaaggcatgtcaagatctcataaggttagaattcttgaacgggttattgagtcattagggcttaaagaaattagaaattctctcgttgggactgtggagaagcggggcatttctggaggacaaaggaaacgtgttaatgttgggattgaaatggttatggaaccatctcttctgatattagacgagccaactacaggtttagacagtgcttcctctcagctacttctaagggcacttcgacatgaagcacttgaaggtgtaaatgtttgtgcagtggttcaccaaccgagctatactttgttcaacatgtttgatgactttgtccttttggcaagaggtggccttattgcttatcatggacctatatatgaagttgaaacgtacttcgcaggtctggggatcaaggtgccagaccgtgagaatcctccagactatttcattgacattttagagggaatagtaaagacaaaaatgaggggaaatgtcacacctaaacacttgccactcctttggatgctacataatggttatgaagttccagatgatttgcagaaggaccttgagaacatcgatacaattcgtgagttatatactgttcggtccatttctagcgaacagtcttcagaagaacagtcagaaaatacagattctgtgcaccgtaatctgagtcaatcaaatgaattactggaaaggaaaacacctggtgtgtttgcacaatatgggtactatttggggagggtagcaaagcaaaggttgcgtgaagctacacagcaggccgttgattacctaatattgtgtattgctggtatatgcattggtacaattgctagagttcgagatgattcattcggtgtagcttcttatggatataccataatggcagtttcactgctatgccagcttgcgtcattgcggtcattttcacctgaaaaattgcaatattggagggagagagaatctggcatgagctctctagcttactttcttgcaagagatactgttgaccatttcaatactgccgttaagccaatcatatttctctcaacattttatttcttcaataacccacggtcgactcttagagacaattatttggttttactggccctaatttattgtgtaaccggcataggttactcttttgctatttggtttgagctcggattagcacagttgagctctgcaatagtacctgttgttctggtcctggtgggcactaaacctgaccttccgagggttataagggaattgtgctatccaaagtgggctctagaagcattcatcattgcaggagcaaaaaaatattcaggtgtgtggctcatcactagatgtggagcattgatccaaggggactatgatatcaacgattttaatctttgcatcaccattattatactctatggtgtgctcttccgtcttgttgcgtttcttagcatgttaaagttgaaatagatgatccagtgtcgtcacaacctgttcaagaacattgtctattctccaatttgtgaagtgtgtaatattgaagatgaaacttctgatcaaatcatcttccgctgtggttttgctgtggccttcttggaggcaattgttttttcatggcctactgatcaaccgatcagcgagttataccggacggagttccatccctgaggagcagtttggaactttcattgcattatgctgctggcagctttggaagcgttggaatggtatcgtctccaggaatgaaactcaatccctgcagcaggtcttagcagcttgtaaaattgaggctcaactttggcgtctcagaatgccagtagcctccagagccatagcagatctctggtgcaatttgtttaactatgtaatgcaactctgccaaagcaaagcctctctcctccacgccgacaaaacattttgtgccagctcaaatgtaatcaggcccttcaaattttgaaataaaataaatttgggggaacacatcctccggtgacatttcaaaaaaaagaagggtcttgtcatcttatggacaagagggatagcgtagagttttatcttactgtacacctttgattattttgtttgatatatatactacatgaaagaagactatctcatataggaagctgcactcgggagtagagcaaaacaaatatatactgaattttgtatctacaattgttgtccgtaatcccgtgagaatggaatgtaaaccaatattttcctaatgtatatggacacagttcttttatgggaac

SEQ ID NO: 10224 - DNA, 4386 bp, Zea Mays
tgaggtcacttcaatgccatcatctaggatgtcaacaatgtcagttggcttgcccaaaggctcatttgaacccattgcaaacttacctgtggcaaccccacttccaaatatgatttgcataggcatatagttctctatgggcctattgaggtaatcagcatcttttgggtgatcctattgagttagcaactcaagttagaacaagagaatttgaagtggaagagtggctttaacaggttagaaaaatagaaggtattggtcttaaccttgatgtaagcagcataatgaccctcttctaagcttatgacaaagttatcctcatcccaaagagcgccactaatgtccttcagtttgcaaaccttgacccacctagacctccacttacgaaggtgattgtacacttgttcgcgagagcttgctcgcgggggagctcgagggggagaagagacgtgagagggagagatgggaggggagaggaggcgacggcgaaaccctagcgcgaggcgagcgcgaggagagcgcgagtggccgagcgcagtctggctcacgtggaacacgccttttggccgtatcccacgagcctggctgaggccaatgttttgcatgagcgtggcctggcccagacacacgtccaagcaaccaaacacacggagctgtctgatttttgcatctccagagttttgcacgggcgcatgcacccaaccaaacacacggcaaatatttcacttagcccagcataaagacctcagctgcgccttttcgagtcactgccaagtgggaccagctttacagggacaccgaaatgacgcctcccctccaccttgtcacgccgggagcctgcgaccgcgccgccgccggcccgtccgttctccagccgcaccctgcggagcccgtgggcgagactatgagcatggcggagggttctcgcatgctgcgggcaaatgactgcaatgttgtgtgggcaagctgaaatagagttatacatcgaaagcttggctaatgctagcagtcgcagtaatcccaggataagtccgaactgcaaccaaaactcatgggcactcgggtgccagcctggctgggcttgcatggtatcaggcaccgaaccatctgatggaccatcagctgaattggttccgcaaagagcagagagctgcaggccatgttgtccgggtttcttctgccctcggggcctgacatgcatgatgccttgtcctttgggtgcttattgtccacttgggacattgaacgacactactggactttgtgatccgtatttttaccaaattactccaggaaagagcactgcatgtggtgcagcagattcttgggctgatattgttacaactaatgatatcttctgccctccagggcactactgtccatccacaacccagaaatacaattgcagcagtgggcactattgccgcaaaggttccaccgatgaaaagaagtgcttttggaaaaacacttgcaaggataatgcgataaaagaaaatctgactttttatggcattatattaattgctatcttgggctttgttttgctactggtgtacaactgttctggcctattcatttcatttcaagtaaaaatgtcatccagatctcgtaaaaaggctgcaaaaagggcagataagtcagccgcagcacgtgaaagatggaaattggcaaaagaacttatactgcggcatgaggttcccactgaagggttcgggcatgcttataatcaggcagatacggatagagctatgaagacaaacaatgataaattaacattctctggagtggtgtctctagctactgaaattaggccacgaaggccaacacttgaagtggctttcagaggtctaacgctatctattggaaaaaagaaacttctgcaatgtgttacaggaaaactttcaccaggtagggtcacagctataatgggcccttctggagcaggaaagactacttttctcaatgctgtattaggtaaaacgtctgggtacaagaaggatggggtagtccttataaatgggttacctggattaatgcagtcatataagaagataattggttttgtgcctcaagatgatattgtccatgggaacctgaccgtcgaggaaaatctgtggtttagttcatgttgcaggttaagcaaaggcatgtcaagatctcataaggttagaattcttgaacgggttattgagtcattagggcttaaagaaattagaaattctctcgttgggactgtggagaagcggggcatttctggaggacaaaggaaacgtgttaatgttgggattgaaatggttatggaaccatctcttctgatattagacgagccaactacaggtttagacagtgcttcctctcagctacttctaagggcacttcgacatgaagcacttgaaggtgtaaatgtttgtgcagtggttcaccaaccgagctatactttgttcaacatgtttgatgactttgtccttttggcaagaggtggccttattgcttatcatggacctatatatgaagttgaaacgtacttcgcaggtctggggatcaaggtgccagaccgtgagaatcctccagactatttcattgacattttagagggaatagtaaagacaaaaatgaggggaaatgtcacacctaaacacttgccactcctttggatgctacataatggttatgaagttccagatgatttgcagaaggaccttgagaacatcgatacaattcgtgagttatatactgttcggtccatttctagcgaacagtcttcagaagaacagtcagaaaatacagattctgtgcaccgtaatctgagtcaatcaaatgaattactggaaaggaaaacacctggtgtgtttgcacaatatgggtactatttggggagggtagcaaagcaaaggttgcgtgaagctacacagcaggccgttgattacctaatattgtgtattgctggtatatgcattggtacaattgctagagttcgagatgattcattcggtgtagcttcttatggatataccataatggcagtttcactgctatgccagcttgcgtcattgcggtcattttcacctgaaaaattgcaatattggagggagagagaatctggcatgagctctctagcttactttcttgcaagagatactgttgaccatttcaatactgccgttaagccaatcatatttctctcaacattttatttcttcaataacccacggtcgactcttagagacaattatttggttttactggccctaatttattgtgtaaccggcataggttactcttttgctatttggtttgagctcggattagcacagttgagctctgcaatagtacctgttgttctggtcctggtgggcactaaacctgaccttccgagggttataagggaattgtgctatccaaagtgggctctagaagcattcatcattgcaggagcaaaaaaatattcaggtgtgtggctcatcactagatgtggagcattgatccaaggggactatgatatcaacgattttaatctttgcatcaccattattatactctatggtgtgctcttccgtcttgttgcgtttcttagcatgttaaagttgaaatagatggcaggatccagtgtcgtcacaacctgttcaagaacattgtctattctccaatttgtgaagtgtgtaatattgaagatgaaacttctgatcaaatcatcttccgctgtggttttgctgtggccttcttggaggcaattgttttttcatggcctactgatcaaccgatcagcgagttataccggacggagttccatccctgaggagcagtttggaactttcattgcattatgctgctggcagctttggaagcgttggaatggtatcgtctccaggaatgaaactcaatccctgcagcaggtcttagcagcttgtaaaattgaggctcaactttggcgtctcagaatgccagtagcctccagagccatagcagatctctggtgcaatttgtttaactatgtaatgcaactctgccaaagcaaagcctctctcctccacgccgacaaaacattttgtgccagctcaaatgtaatcaggcccttcaaattttgaaataaaataaatttgggggaacacatcctccggtgacatttcaaaaaaaagaagggtcttgtcatcttatggacaagagggatagcgtagagttttatcttactgtacacctttgattattttgtttgatatatatactacatgaaagaagactatctcatataggaagctgcactcgggagtagagcaaaacaaatatatactgaattttgtatctacaattgttgtccgtaatcccgtgagaatggaatgtaaaccaatattttcctaatgtatatggacacagttcttttatgggaac

SEQ ID NO: 10225 - DNA, 5000 bp, Zea Mays
tgaggtcacttcaatgccatcatctaggatgtcaacaatgtcagttggcttgcccaaaggctcatttgaacccattgcaaacttacctgtggcaaccccacttccaaatatgatttgcataggcatatagttctctatgggcctattgaggtaatcagcatcttttgggtgatcctattgagttagcaactcaagttagaacaagagaatttgaagtggaagagtggctttaacaggttagaaaaatagaaggtattggtcttaaccttgatgtaagcagcataatgaccctcttctaagcttatgacaaagttatcctcatcccaaagagcgccactaatgtccttcagtttgcaaaccttgacccacctagacctccacttacgaaggtgattgtacacttgttcgcgagagcttgctcgcgggggagctcgagggggagaagagacgtgagagggagagatgggaggggagaggaggcgacggcgaaaccctagcgcgaggcgagcgcgaggagagcgcgagtggccgagcgcagtctggctcacgtggaacacgccttttggccgtatcccacgagcctggctgaggccaatgttttgcatgagcgtggcctggcccagacacacgtccaagcaaccaaacacacggagctgtctgatttttgcatctccagagttttgcacgggcgcatgcacccaaccaaacacacggcaaatatttcacttagcccagcataaagacctcagctgcgccttttcgagtcactgccaagtgggaccagctttacagggacaccgaaatgacgcctcccctccaccttgtcacgccgggagcctgcgaccgcgccgccgccggcccgtccgttctccagccgcaccctgcggagcccgtgggcgagactatgagcatggcggagggttctcgcatgctgcgggcaaatgactgcaatgttgtgtgggcaagctgaaatagagttatacatcgaaagcttggctaatgctagcagtcgcagtaatcccaggataagtccgaactgcaaccaaaactcatgggcactcgggtgccagcctggctgggcttgcatggtatcaggcaccgaaccatctgatggaccatcagctgaattggttccgcaaagagcagagagctgcaggccatgttgtccgggtttcttctgccctcggggcctgacatgcatgatgccttgtcctttgggtgcttattgtccacttgggacattgaacgacactactggactttgtgatccgtatttttaccaaattactccaggaaagagcactgcatgtggtgcagcagattcttgggctgatattgttacaactaatgatatcttctgccctccagggcactactgtccatccacaacccagaaatacaattgcagcagtgggcactattgccgcaaaggttccaccgatgaaaagaagtgcttttggaaaaacacttgcaaggataatgcgataaaagaaaatctgactttttatggcattatattaattgctatcttgggctttgttttgctactggtgtacaactgttctggcctattcatttcatttcaagtaaaaatgtcatccagatctcgtaaaaaggctgcaaaaagggcagataagtcagccgcagcacgtgaaagatggaaattggcaaaagaacttatactgcggcatgaggttcccactgaagggttcgggcatgcttataatcaggcagatacggatagagctatgaagacaaacaatgataaattaacattctctggagtggtgtctctagctactgaaattaggccacgaaggccaacacttgaagtggctttcagaggtctaacgctatctattggaaaaaagaaacttctgcaatgtgttacaggaaaactttcaccaggtagggtcacagctataatgggcccttctggagcaggaaagactacttttctcaatgctgtattaggtaaaacgtctgggtacaagaaggatggggtagtccttataaatgggttacctggattaatgcagtcatataagaagataattggttttgtgcctcaagatgatattgtccatgggaacctgaccgtcgaggaaaatctgtggtttagttcatgttgcaggttaagcaaaggcatgtcaagatctcataaggttagaattcttgaacgggttattgagtcattagggcttaaagaaattagaaattctctcgttgggactgtggagaagcggggcatttctggaggacaaaggaaacgtgttaatgttgggattgaaatggttatggaaccatctcttctgatattagacgagccaactacaggtttagacagtgcttcctctcagctacttctaagggcacttcgacatgaagcacttgaaggtgtaaatgtttgtgcagtggttcaccaaccgagctatactttgttcaacatgtttgatgactttgtccttttggcaagaggtggccttattgcttatcatggacctatatatgaagttgaaacgtacttcgcaggtctggggatcaaggtgccagaccgtgagaatcctccagactatttcattgacattttagagggaatagtaaagacaaaaatgaggggaaatgtcacacctaaacacttgccactcctttggatgctacataatggttatgaagttccagatgatttgcagaaggaccttgagaacatcgatacaattcgtgagttatatactgttcggtccatttctagcgaacagtcttcagaagaacagtcagaaaatacagattctgtgcaccgtaatctgagtcaatcaaatgaattactggaaaggaaaacacctggtgtgtttgcacaatatgggtactatttggggagggtagcaaagcaaaggttgcgtgaagctacacagcaggccgttgattacctaatattgtgtattgctggtatatgcattggtacaattgctagagttcgagatgattcattcggtgtagcttcttatggatataccataatggcagtttcactgctatgccagcttgcgtcattgcggtcattttcacctgaaaaattgcaatattggagggagagagaatctggcatgagctctctagcttactttcttgcaagagatactgttgaccatttcaatactgccgttaagccaatcatatttctctcaacattttatttcttcaataacccacggtcgactcttagagacaattatttggttttactggccctaatttattgtgtaaccggcataggttactcttttgctatttggtttgagctcggattagcacagttggtaagtagggcatctcttttttgtaatcatgatattaactctactgaaggtggctaatgaactataatgttgtagagctctgcaatagtacctgttgttctggtcctggtgggcactaaacctgaccttccgagggttataagggaattgtgctatccaaagtgggctctagaagcattcatcattgcaggagcaaaaaaatattcaggtgtgtggctcatcactagatgtggagcattgatccaaggggactatgatatcaacgattttaatctttgcatcaccattattatactctatggtgtgctcttccgtcttgttgcgtttcttagcatgttaaagttgaaatagatgtaagtatacatacgcttcttttttttttcacttcacatctatgttactgctcccacaattctaaactataaggcgtttatgtttttctaggtacattacttttattaggcaacgactgctatgcaagcagtccttctgtgcaagagtgcaagcaaaccatctgatccattagatcgtgatccaaccgtaggtcacatttaacacttaaacccttccaccaccagcccattaatctttataaaaaaacccctgacaaaccatgattgtatctgtggttggatcgtaatctaatggatcagatagcttgcttgcacgcttgcacagaaggactgcttgcatagcagttgttgcccttttattatgcatttagacatagtgtatatcttagtgcatattaaaacctatatatttagaaaagctaaattgtcttataaagtggaaatattactttaacgatgaagtttcgtgatcgaaatattttgtctgcaaaagcccaacgctgtcaagggtccggttcttcatctagcttctcctgcagggcaggatccagtgtcgtcacaacctgttcaagaacattgtctattctccaatttgtgaagtgtgtaatattgaagatgaaacttctgatcaaatcatcttccgctgtggttttgctgtggccttcttggaggcaattgttttttcatggcctactgatcaaccgatcagcgagttataccggacggagttccatccctgaggagcagtttggaactttcattgcattatgctgctggcagctttggaagcgttggaatggtatcgtctccaggaatgaaactcaatccctgcagcaggtcttagcagcttgtaaaattgaggctcaactttggcgtctcagaatgccagtagcctccagagccatagcagatctctggtgcaatttgtttaactatgtaatgcaactctgccaaagcaaagcctctctcctccacgccgacaaaacattttgtgccagctcaaatgtaatcaggcccttcaaattttgaaataaaataaatttgggggaacacatcctccggtgacatttcaaaaaaaagaagggtcttgtcatcttatggacaagagggatagcgtagagttttatcttactgtacacctttgattattttgtttgatatatatactacatgaaagaagactatctcatataggaagctgcactcgggagtagagcaaaacaaatatatactgaattttgtatctacaattgttgtccgtaatcccgtgagaatggaatgtaaaccaatattttcctaatgtatatggacacagttcttttatgggaac

SEQ ID NO: 10226 - DNA, 3860 bp, Zea Mays
cgccgcggttgactataacccgtcgtgtttccgtggtcaccgccgtctagcttcttaggtagctgccatgcgcgccgccgttgtcctcctcatctctgtcgtcgcgctgtcgctgctccgcccggcgcgatgccagctaccgccaggcggcgttgtcggccgcgcgccgccgccgatcgcgcaggtgatcgagggcgcgccgccgctgccggtcgtgcagccgcaggacggcctcgagaaggacctccggtccgtcagcgacaagctcaccgccgagctgcagaagaagtacggcttctgcatggccgacgcgcaaaccgatttcaacctgacgttcgactacaccgccgacccgagcttcgcctccgactgcatggagcagacaagagggcaaatgactgcaatgttgtgtgggcaagctgaaatagagttatacatcgaaagcttggctaatgctagcagtcgcagtaatcccaggataagtccgaactgcaaccaaaactcatgggcactcgggtgccagcctggctgggcttgcatggtatcaggcaccgaaccatctgatggaccatcagctgaattggttccgcaaagagcagagagctgcaggccatgttgtccgggtttcttctgccctcggggcctgacatgcatgatgccttgtcctttgggtgcttattgtccacttgggacattgaacgacactactggactttgtgatccgtatttttaccaaattactccaggaaagagcactgcatgtggtgcagcagattcttgggctgatattgttacaactaatgatatcttctgccctccagggcactactgtccatccacaacccagaaatacaattgcagcagtgggcactattgccgcaaaggttccaccgatgaaaagataacggcacatatatttgcagagtgcttttggaaaaacacttgcaaggataatgcgataaaagaaaatctgactttttatggcattatattaattgctatcttgggctttgttttgctactggtgtacaactgttctggcctattcatttcatttcaagtaaaaatgtcatccagatctcgtaaaaaggctgcaaaaagggcagataagtcagccgcagcacgtgaaagatggaaattggcaaaagaacttatactgcggcatgaggttcccactgaagggttcgggcatgcttataatcaggcagatacggatagagctatgaagacaaacaatgataaattaacattctctggagtggtgtctctagctactgaaattaggccacgaaggccaacacttgaagtggctttcagaggtctaacgctatctattggaaaaaagaaacttctgcaatgtgttacaggaaaactttcaccaggtagggtcacagctataatgggcccttctggagcaggaaagactacttttctcaatgctgtattaggtaaaacgtctgggtacaagaaggatggggtagtccttataaatgggttacctggattaatgcagtcatataagaagataattggttttgtgcctcaagatgatattgtccatgggaacctgaccgtcgaggaaaatctgtggtttagttcatgttgcaggttaagcaaaggcatgtcaagatctcataaggttagaattcttgaacgggttattgagtcattagggcttaaagaaattagaaattctctcgttgggactgtggagaagcggggcatttctggaggacaaaggaaacgtgttaatgttgggattgaaatggttatggaaccatctcttctgatattagacgagccaactacaggtttagacagtgcttcctctcagctacttctaagggcacttcgacatgaagcacttgaaggtgtaaatgtttgtgcagtggttcaccaaccgagctatactttgttcaacatgtttgatgactttgtccttttggcaagaggtggccttattgcttatcatggacctatatatgaagttgaaacgtacttcgcaggtctggggatcaaggtgccagaccgtgagaatcctccagactatttcattgacattttagagggaatagtaaagacaaaaatgaggggaaatgtcacacctaaacacttgccactcctttggatgctacataatggttatgaagttccagatgatttgcagaaggaccttgagaacatcgatacaattcgtgagttatatactgttcggtccatttctagcgaacagtcttcagaagaacagtcagaaaatacagattctgtgcaccgtaatctgagtcaatcaaatgaattactggaaaggaaaacacctggtgtgtttgcacaatatgggtactatttggggagggtagcaaagcaaaggttgcgtgaagctacacagcaggccgttgattacctaatattgtgtattgctggtatatgcattggtacaattgctagagttcgagatgattcattcggtgtagcttcttatggatataccataatggcagtttcactgctatgccagcttgcgtcattgcggtcattttcacctgaaaaattgcaatattggagggagagagaatctggcatgagctctctagcttactttcttgcaagagatactgttgaccatttcaatactgccgttaagccaatcatatttctctcaacattttatttcttcaataacccacggtcgactcttagagacaattatttggttttactggccctaatttattgtgtaaccggcataggttactcttttgctatttggtttgagctcggattagcacagttgagctctgcaatagtacctgttgttctggtcctggtgggcactaaacctgaccttccgagggttataagggaattgtgctatccaaagtgggctctagaagcattcatcattgcaggagcaaaaaaatattcaggtgtgtggctcatcactagatgtggagcattgatccaaggggactatgatatcaacgattttaatctttgcatcaccattattatactctatggtgtgctcttccgtcttgttgcgtttcttagcatgttaaagttgaaatagatggcaggatccagtgtcgtcacaacctgttcaagaacattgtctattctccaatttgtgaagtgtgtaatattgaagatgaaacttctgatcaaatcatcttccgctgtggttttgctgtggccttcttggaggcaattgttttttcatggcctactgatcaaccgatcagcgagttataccggacggagttccatccctgaggagcagtttggaactttcattgcattatgctgctggcagctttggaagcgttggaatggtatcgtctccaggaatgaaactcaatccctgcagcaggtcttagcagcttgtaaaattgaggctcaactttggcgtctcagaatgccagtagcctccagagccatagcagatctctggtgcaatttgtttaactatgtaatgcaactctgccaaagcaaagcctctctcctccacgccgacaaaacattttgtgccagctcaaatgtaatcaggcccttcaaattttgaaataaaataaatttgggggaacacatcctccggtgacatttcaaaaaaaagaagggtcttgtcatcttatggacaagagggatagcgtagagttttatcttactgtacacctttgattattttgtttgatatatatactacatgaaagaagactatctcatataggaagctgcactcgggagtagagcaaaacaaatatatactgaattttgtatctacaattgttgtccgtaatcccgtgagaatggaatgtaaaccaatattttcctaatgtatatggacacagttcttttatgggaac

SEQ ID NO: 10227 - DNA, 2613 bp, Zea Mays
gagccctactgccctagggttgaggaaggagaagaaggactactcgacggcgatactagagaggaaaaagtcaccgaaccgccttgtcgtcgacgaggccaccaacgacgataactccgtcgtcgcactgcaccctgacaccatggagaggctgcagctcttccgcggcgatactgtgctcctcaagggtaagaagaggaaagacactgtttgcattgtccttgcggatgaaacctgtgaggagccaaaggttcggatgaacaaggttgtccgccagaacctgagggtgaggcttggtgatgtggtttctgtccaccagtgccaggatgtgaaatatgggaagcgtgtgcacattcttccaattgatgatacagttgaaggcattacagggaacctgtttgatgccttcttgaaaccatacttcctagaagcatacaggcccgtgaggaaaggagaccttttccttgtcaggggtggaatgagaagcgtggaattcaaagtgatagagactgacccttctgaatattgtatcgttgccccagatactgaaatattttgtgatggggagcctattaagagagaggatgaggagcgtcttgatgaagttggttatgatgatgttggtggagttagaaagcaaatggcccaaatcagagagcttgttgagcttccactacgccatcctcagcttttcaaatctattggtgtgaagccaccaaagggcatattgctgtatgggccacctggttctggaaagactcttattgctcgtgctgttgctaatgagactggagcctttttctttctgatcaatggcccagagattatgtcgaagttagcaggagagagtgagagcaatctcagaaaggcatttgaagaagcagagaagaatgctccatctatcattttcattgatgaaattgattccattgcacccaagagagaaaagaccaatggagaagtagaacgtcgtattgtttcacagctactgactcttatggatggactcaaatctcgttcccatgttattgttatgggtgctacaaaccggccaaacagcatcgatcctgctcttagaagatttggaaggtttgaccgggaaattgacattggagttcctgatgaagttggccggcttgaggttctccgtattcacactaagaacatgaagctagctgaagatgttaatttggaactcatttcaaaggatacccatggatacgttggtgctgatcttgctgctctttgtactgaggctgctcttcagtgcattcgtgagaagatggacatcatagatcttgaggatgagacaatagatgcagagatattgaactcgatggctgttacaaatgaccatttcaagactgcgcttggaacaagcaacccatctgctctccgtgaaactgttgttgaagtcccaaatgtctcttgggaggatattggtgggctggagaatgtcaagagggagctccaggagactgttcaatatcctgtggaacatccagagaagttcgagaagtttggcatgtctccatccaaaggagttctgttttatggtcctcctggttgtggtaaaaccttgttggcgaaggcaattgccaacgagtgccaggctaacttcatcagtgtcaagggtcctgaattgcttaccatgtggtttggtgagagtgaagccaacgtccgcgaaatttttgataaggctcgccaatctgctccttgtgtcctcttctttgatgagcttgactcaattgcgactcagagaggaagtagtgtgggtgatgctggaggcgcggctgatagagtgcttaatcagctactgaccgagatggatggcatgaacgccaagaaaactgtgtttattattggtgctacaaacaggcctgacatcattgatcctgctcttctgaggccagggcgtcttgaccagctgatctacattccactgcctgatgagcagtctaggctccagatcttcaaggcctgcctaaggaagtcccctgtggcaaaggatgtggacctgaatgctcttgctaagtacacacaagggttcagtggagcagatatcacagaaatttgccagcgtgcgtgcaaatatgcaatcagagagaacattgagaaggacattgagagggaaaggcggatgaaggacaaccctgaggcgatggaggaagatgaagtggacgagattgccgagatcaaagcagctcacttcgaggagtctatgaagtatgctcggcgcagtgtcagtgatgctgatatccgcaagtaccaggcgttcgcccagacgttgcagcagtcccgtgggttcggcagcgagttccgcttctcagagcagtcggcgacagctggtgctgctgcagccgatccgtttgcttcggctggtgctgcggctgacgatgacgatctatacagctaggtgtcctgttgggttggttctgggttgtgcaatatcagtctcatcagtcatctgtttaaaactctgattatacttagacacgggatgtcatgcaatgatatttgttttccgtacatttggacgttgagataatgcctgtttattttatgccatactctccatgccattttatgaatgattgtttgtcattgagtata

SEQ ID NO: 10228 - DNA, 2630 bp, Zea Mays
gtacgatgtcgctccctcttctccccgtccgatccgatctggaaggagaagaaggactactcgacggcgatactagagaggaaaaagtcaccgaaccgccttgtcgtcgacgaggccaccaacgacgataactccgtcgtcgcactgcaccctgacaccatggagaggctgcagctcttccgcggcgatactgtgctcctcaagggtaagaagaggaaagacactgtttgcattgtccttgcggatgaaacctgtgaggagccaaaggttcggatgaacaaggttgtccgccagaacctgagggtgaggcttggtgatgtggtttctgtccaccagtgccaggatgtgaaatatgggaagcgtgtgcacattcttccaattgatgatacagttgaaggcattacagggaacctgtttgatgccttcttgaaaccatacttcctagaagcatacaggcccgtgaggaaaggagaccttttccttgtcaggggtggaatgagaagcgtggaattcaaagtgatagagactgacccttctgaatattgtatcgttgccccagatactgaaatattttgtgatggggagcctattaagagagaggatgaggagcgtcttgatgaagttggttatgatgatgttggtggagttagaaagcaaatggcccaaatcagagagcttgttgagcttccactacgccatcctcagcttttcaaatctattggtgtgaagccaccaaagggcatattgctgtatgggccacctggttctggaaagactcttattgctcgtgctgttgctaatgagactggagcctttttctttctgatcaatggcccagagattatgtcgaagttagcaggagagagtgagagcaatctcagaaaggcatttgaagaagcagagaagaatgctccatctatcattttcattgatgaaattgattccattgcacccaagagagaaaagaccaatggagaagtagaacgtcgtattgtttcacagctactgactcttatggatggactcaaatctcgttcccatgttattgttatgggtgctacaaaccggccaaacagcatcgatcctgctcttagaagatttggaaggtttgaccgggaaattgacattggagttcctgatgaagttggccggcttgaggttctccgtattcacactaagaacatgaagctagctgaagatgttaatttggaactcatttcaaaggatacccatggatacgttggtgctgatcttgctgctctttgtactgaggctgctcttcagtgcattcgtgagaagatggacatcatagatcttgaggatgagacaatagatgcagagatattgaactcgatggctgttacaaatgaccatttcaagactgcgcttggaacaagcaacccatctgctctccgtgaaactgttgttgaagtcccaaatgtctcttgggaggatattggtgggctggagaatgtcaagagggagctccaggagactgttcaatatcctgtggaacatccagagaagttcgagaagtttggcatgtctccatccaaaggagttctgttttatggtcctcctggttgtggtaaaaccttgttggcgaaggcaattgccaacgagtgccaggctaacttcatcagtgtcaagggtcctgaattgcttaccatgtggtttggtgagagtgaagccaacgtccgcgaaatttttgataaggctcgccaatctgctccttgtgtcctcttctttgatgagcttgactcaattgcgactcagagaggaagtagtgtgggtgatgctggaggcgcggctgatagagtgcttaatcagctactgaccgagatggatggcatgaacgccaagaaaactgtgtttattattggtgctacaaacaggcctgacatcattgatcctgctcttctgaggccagggcgtcttgaccagctgatctacattccactgcctgatgagcagtctaggctccagatcttcaaggcctgcctaaggaagtcccctgtggcaaaggatgtggacctgaatgctcttgctaagtacacacaagggttcagtggagcagatatcacagaaatttgccagcgtgcgtgcaaatatgcaatcagagagaacattgagaaggacattgagagggaaaggcggatgaaggacaaccctgaggcgatggaggaagatgaagtggacgagattgccgagatcaaagcagctcacttcgaggagtctatgaagtatgctcggcgcagtgtcagtgatgctgatatccgcaagtaccaggcgttcgcccagacgttgcagcagtcccgtgggttcggcagcgagttccgcttctcagagcagtcggcgacagctggtgctgctgcagccgatccgtttgcttcggctggtgctgcggctgacgatgacgatctatacagctaggtgtcctgttgggttggttctgggttgtgcaatatcagtctcatcagtcatctgtttaaaactctgattatacttagacacgggatgtcatgcaatgatatttgttttccgtacatttggacgttgagataatgcctgtttattttatgccatactctccatgccattttatgaatgattgtttgtcattgagtata

SEQ ID NO: 10229 - DNA, 2709 bp, Zea Mays
cgagttccaaaccctcgccgcaagaaagaagctataaaggaaagctaatcccccttccttgagtcctccgcatctcgcattctcgccggtgctgctgcaattaacgccacccccggccaaccgcctgaaaactacctctgccgccggcgccgccatccccaacatggcgagccaaggggagccctcggcctctgcttccgatccgaaggagaagaaggactactcgacggcgatactagagaggaaaaagtcaccgaaccgccttgtcgtcgacgaggccaccaacgacgataactccgtcgtcgcactgcaccctgacaccatggagaggctgcagctcttccgcggcgatactgtgctcctcaagggtaagaagaggaaagacactgtttgcattgtccttgcggatgaaacctgtgaggagccaaaggttcggatgaacaaggttgtccgccagaacctgagggtgaggcttggtgatgtggtttctgtccaccagtgccaggatgtgaaatatgggaagcgtgtgcacattcttccaattgatgatacagttgaaggcattacagggaacctgtttgatgccttcttgaaaccatacttcctagaagcatacaggcccgtgaggaaaggagaccttttccttgtcaggggtggaatgagaagcgtggaattcaaagtgatagagactgacccttctgaatattgtatcgttgccccagatactgaaatattttgtgatggggagcctattaagagagaggatgaggagcgtcttgatgaagttggttatgatgatgttggtggagttagaaagcaaatggcccaaatcagagagcttgttgagcttccactacgccatcctcagcttttcaaatctattggtgtgaagccaccaaagggcatattgctgtatgggccacctggttctggaaagactcttattgctcgtgctgttgctaatgagactggagcctttttctttctgatcaatggcccagagattatgtcgaagttagcaggagagagtgagagcaatctcagaaaggcatttgaagaagcagagaagaatgctccatctatcattttcattgatgaaattgattccattgcacccaagagagaaaagaccaatggagaagtagaacgtcgtattgtttcacagctactgactcttatggatggactcaaatctcgttcccatgttattgttatgggtgctacaaaccggccaaacagcatcgatcctgctcttagaagatttggaaggtttgaccgggaaattgacattggagttcctgatgaagttggccggcttgaggttctccgtattcacactaagaacatgaagctagctgaagattgcattcgtgagaagatggacatcatagatcttgaggatgagacaatagatgcagagatattgaactcgatggctgttacaaatgaccatttcaagactgcgcttggaacaagcaacccatctgctctccgtgaaactgttgttgaagtcccaaatgtctcttgggaggatattggtgggctggagaatgtcaagagggagctccaggagactgttcaatatcctgtggaacatccagagaagttcgagaagtttggcatgtctccatccaaaggagttctgttttatggtcctcctggttgtggtaaaaccttgttggcgaaggcaattgccaacgagtgccaggctaacttcatcagtgtcaagggtcctgaattgcttaccatgtggtttggtgagagtgaagccaacgtccgcgaaatttttgataaggctcgccaatctgctccttgtgtcctcttctttgatgagcttgactcaattgcgactcagagaggaagtagtgtgggtgatgctggaggcgcggctgatagagtgcttaatcagctactgaccgagatggatggcatgaacgccaagaaaactgtgtttattattggtgctacaaacaggcctgacatcattgatcctgctcttctgaggccagggcgtcttgaccagctgatctacattccactgcctgatgagcagtctaggctccagatcttcaaggcctgcctaaggaagtcccctgtggcaaaggatgtggacctgaatgctcttgctaagtacacacaagggttcagtggagcagatatcacagaaatttgccagcgtgcgtgcaaatatgcaatcagagagaacattgagaaggacattgagagggaaaggcggatgaaggacaaccctgaggcgatggaggaagatgaagtggacgagattgccgagatcaaagcagctcacttcgaggagtctatgaagtatgctcggcgcagtgtcagtgatgctgatatccgcaagtaccaggcgttcgcccagacgttgcagcagtcccgtgggttcggcagcgagttccgcttctcagagcagtcggcgacagctggtgctgctgcagccgatccgtttgcttcggctggtgctgcggctgacgatgacgatctatacagctaggtgtcctgttgggttggttctgggttgtgcaatatcagtctcatcagtcatctgtttaaaactctgattatacttagacacgggatgtcatgcaatgatatttgttttccgtacatttggacgttgagataatgcctgtttattttatgccatactctccatgccattttatgaatgattgtttgtcattgagtata

SEQ ID NO: 10230 - DNA, 711 bp, Zea Mays
gttcctggttggagaattcctcacgtcacctgcaactcgaactgctgcacggcttcaccacgtttaactcccccaggaaaacccccagccgtcacctgccccagcgttcgctctccatgtttcttagccccggcatccaccctgtacttgctcgtttccaagctgtgctccagcgagcttctctgtagttcttccccaatcgctcgctctcagcctgtccggtcctgcgtacttcaacacctttctccagctgtccgagctccacctcgtcgtcgtcctgctgtttcagcgtcgtatccctctacctcatcgcagcagcaccggtgctctcgtcgtcgctgagctcttggcgcgccgtgacatcatcgtcgttttctcgccggccgcgcttgacccacagctccttcgcgtcgtcgtcttggacaacccgtagcctctgctccgacctcgtcgcactcgcgctcctcacacccgacaagccgtcgtgctcggcgtgttttctccgtgcggccttacgggttcctctcgcttcatcggcttgtcgcgtgttagagcagaacaccaagaagaagaattgatctttgtaaaggaggaacctgctccagtgctgttgatccagtgatggactccatctaactgcttatcggagtagaagggttttagatcttctcctgcaataaggccggggcaggataatgattaataattggg

SEQ ID NO: 10231 - DNA, 2002 bp, Zea Mays
gttcctggttggagaattcctcacgtcacctgcaactcgaactgctgcacggcttcaccacgtttaactcccccaggaaaacccccagccgtcacctgccccagcgttcgctctccatgtttcttagccccggcatccaccctgtacttgctcgtttccaagctgtgctccagcgagcttctctgtagttcttccccaatcgctcgctctcagcctgtccggtcctgcgtacttcaacacctttctccagctgtccgagctccacctcgtcgtcgtcctgctgtttcagcgtcgtatccctctacctcatcgcagcagcaccggtgctctcgtcgtcgctgagctcttggcgcgccgtgacatcatcgtcgttttctcgccggccgcgcttgacccacagctccttcgcgtcgtcgtcttggacaacccgtagcctctgctccgacctcgtcgcactcgcgctcctcacacccgacaagccgtcgtgctcggcgtgttttctccgtgcggccttacgggttcctctcgcttcatcggcttgtcgcgtgttagagcagaacaccaagaagaagaattgatctttgtaaaggaggaacctgctccagtgctgttgatccagtgatggactccatctaactgcttatcggagtagaagggttttagatcttctcctgcaataaggcaagccccggtgcatttgccaccttccttgtattacaaaattttatcacttatatgctgcattaggtaataggagttgaatgattaaacacttgatgcattaccatccttgaaagattgattatcataccttgttacctgttttataaaaactagtaatgcttagttatgcttatagattaagaaaaatgtttttgatctatgactcatgatttttaaaaagaaaaagggcttgggatgatggaggcatcctccgcggggatgaattcatcattcaagcagggtacctctgccaggtatcaaactttgagaatttgtttaaaaataagaccagacgttgagctggacaggtcgcccgtctgtgtcgatcaaggaccgtaccgattgtaggcctgttgatctaggaccttttaactggccacatacctcgtcatgggaaagcctgaacccggctactccatatgtgaaaagacaatcgcgcactgggagtggagagacggcgggagtggcgtgtacccacctggcatgtggctggatggtggagtaccgtactctcgggtggcgcggaccggttcacgtagtggaggacccgtgggaatggtagacatatgcaagggttaagtgctacatatgtcgtgtggctggagatccccagctgggtattaatcgattcgaatcgccgttacttctcggtcatgaagactggatcactgctctgcatcgtagataacaagtataacagagttttggttaaaagcaatctagtgtaggccaagtgaatgatctagattaggagaatctagagacaggttagtagattcaggtaataacctaacttgtgaaataaaacttggcttaaggatccattattagtaagcttttatgcaaaaaggagtcattgataattgatgagcttttcccttgattccccaaaagctagcatgcccttgagagtctttttcttagtcgggtaagtcttgctgagtaattgcctacttagggttttattccctatgttgttgtaggaaagatttttgatgccttggctttattagttgctccttatggaggtcttgaagcttagattacttatgtgaatcttttatggaaaggcttcacctttccaagtattgtagttaagttatgcactctaaagactatcaggacttgtaataatttcattcccttttatgttgtaagacttgagttctagaatgtaaagtgtattttgtaaaagtcttcctctctatctccaatgtgtgtatcaattgtgattactgtaatatgcctgttatgtgggagatccttgggatgatgagtt

SEQ ID NO: 10232 - DNA, 1386 bp, Zea Mays
agttattactcaaaatccatgccattaaaaaggacttcaactccaagcggaacacttctactcccgttgttaaacggcactaccaacgaaacaacgaggaagaaggccgggagaggaaatcctttggcggcgcgcgcacgcgcggcagacacgtccacatccactgcagcgacgagccagccggtccgcggtcagcagcttggcagcagccccactctggctcccccctccgccatcactgcgcttgtgcgcgcgcacccacccccgcggcccgctcatcacccgcccggtcccgccgcctatttaacgccgcccccaccggggcactcggccctctccgtctcagaacgccccagccttccacctcgaactccgcggcgcccagcgccctcggtaaccgccccccgccccgccacagagacaggtcgacgagacagacaaaggccggccgccatgggagaggacaagaaggcgggcaacaaggacgccgccggcggcgacaagaagaaggacgccggcgccggggccgcgccgcagcccatcgtgctgaaggtcgacttgcactgcgccggctgcgccaacaaggtccgcaaggccatcaagcacgccccaggtgtggagtcggtgacgccggacatggcggcgggtaaggtggtcgtgaccggtccggcggacgcggtggagctcaaggagcgcatcgaggccagggcgaagaagcccgtgcagatcgtctccgccggcgccggcccacccaagaaggagaaggacaaggagaaggagaaggataagaaagcggacggcggcgagaagaaggccgacaaggagaagggtgccgacaagcccaaggaggagaagaagaagcccaaggaggagactgtgacgctgaagatccggctgcactgtgacggctgcatcgagcgcatcaagcgccgcatctccaagatcaaaggcgtgaaggacgtggcgttcgacgccgccaaggacctggtgaaggtgaccggcaccatggacggcgccgctctgccggcgtacctcagggagaagcccttcctccgtgtgagaccaagaaccatgggcttgtcctggattagcggtgtctttagttaaaattatcagtgagtagtagctagcttaagcagtgctccgatccgagatcagttcttccagcagacctgtgtaaatgagagtctcgccgccccgccccgccccgccccggtgtaacgcatcgtcatgtgtaaaatctatccggacccgataaagttttgcccttctgtcatcgctaatcgccatttgcgacgccgctgatagtgctcagttaacggccaagttggacgtggtgtcgtgtcgccgtcgacggtgaggtcagcgacgtcggtgagacccgca

SEQ ID NO: 10233 - DNA, 1730 bp, Zea Mays
agttattactcaaaatccatgccattaaaaaggacttcaactccaagcggaacacttctactcccgttgttaaacggcactaccaacgaaacaacgaggaagaaggccgggagaggaaatcctttggcggcgcgcgcacgcgcggcagacacgtccacatccactgcagcgacgagccagccggtccgcggtcagcagcttggcagcagccccactctggctcccccctccgccatcactgcgcttgtgcgcgcgcacccacccccgcggcccgctcatcacccgcccggtcccgccgcctatttaacgccgcccccaccggggcactcggccctctccgtctcagaacgccccagccttccacctcgaactccgcggcgcccagcgccctcggtaaccgccccccgccccgccacagagacaggtcgacgagacagacaaaggccggccgccatgggagaggacaagaaggcgggcaacaaggacgccgccggcggcgacaagaagaaggacgccggcgccggggccgcgccgcagcccatcgtgctgaaggtcgacttgcactgcgccggctgcgccaacaaggtccgcaaggccatcaagcacgccccaggtgtggagtcggtgacgccggacatggcggcgggtaaggtggtcgtgaccggtccggcggacgcggtggagctcaaggagcgcatcgaggccagggcgaagaagcccgtgcagatcgtctccgccggcgccggcccacccaagaaggagaaggacaaggagaaggagaaggataagaaagcggacggcggcgagaagaaggccgacaaggagaagggtgccgacaagcccaaggaggagaagaagaagcccaaggaggagactgtgacgctgaagatccggctgcactgtgacggctgcatcgagcgcatcaagcgccgcatctccaagatcaaaggcgtgaaggacgtggcgttcgacgccgccaaggacctggtgaaggtgaccggcaccatggacggcgccgctctgccggcgtacctcagggagaagctcagccgggacgtggaagtggtggcgcccggcaagaaggacggcggcggcggcggtgacaagaaggacaagggcgcaggagacgggggagataagaagaaggacggtggcggcggcggcggcggctccaggcggctactacggtgccgccccaccgcccaaccaccacgccggcttctaccccaacggcggcggcgtccattacccgcccgcgccagcctacgcgtacggccccacccacctccacgcgccccagatgttcagcgacgagaaccccaacgcctgctccgtcatgtgaactcgctcgcttcgccggtttgccgccgccgccgcgccttggcacccccttcctccgtgtgagaccaagaaccatgggcttgtcctggattagcggtgtctttagttaaaattatcagtgagtagtagctagcttaagcagtgctccgatccgagatcagttcttccagcagacctgtgtaaatgagagtctcgccgccccgccccgccccgccccggtgtaacgcatcgtcatgtgtaaaatctatccggacccgataaagttttgcccttctgtcatcgctaatcgccatttgcgacgccgctgatagtgctcagttaacggccaagttggacgtggtgtcgtgtcgccgtcgacggtgaggtcagcgacgtcggtgagacccgca

SEQ ID NO: 10234 - DNA, 1295 bp, Zea Mays
tcaccctctcgattaaagcaaaacagaggaataggggaggaaaaaatatttcgataggtctgcggtctgcctgcggctgcggcgccccttgattcatccccggctcgccttcgccggcggtgtcggaacagccagctcgcgctcgccggaggtgtcagggaacagctaggccgcgctcggtttccctttctcttcgcaggattggagccgctgggtcctgaactgcgcggcctgtttcagcgtgaatagcaatcaccatggggtctggatcactaacaatgaagcagaagaaacgagtgaaacatgcaaagaataagtacttgaaacctggtgccttggctcagattcgttatagtaggagtacgagcagggacatcgggaagaaaagaattctgttgaatgcgaaagatgagctggagttgcctccacaacctgaggttctcttagaaagcagtacaacaattttgtcccctgcaagactcaattttaagccatttggtagcaataaggggcagatattgccaaagactccaaagactcctgatgcatctgcgtttgatggtgattcaaatcttgaatcacttccacttgatttgctgatcatgtgttgcttacaccacgacgaacttaaggtggtttttcatgtttcaaaaaggattcgaaaagcagttgaacttgctagacagtaccatttcaactataccactccagatcggagcagacaggagttgctcctgaacagaacccctcttccaacagagcattggcccttcttaagaattgatggcaaggacgtccgcgtttccaccccaaggacaccaagggctccgaaacatgcctctcgcctttcacgcctcaagctggttgacgtgaagccaatcacagctgtccttttccaggagtctcctacccttttcccttcgaagcgtctccgatgctcgatgccaccaccaaggctggcaagacctgcgtgtaaagctgcaccttcgcctagagttttgcggtacgaggaggagctttgcgaggcggtggcgcagaataagcttctctgaagatgcaagaagtgcatggctttcgtctttagtgtatagcttatctgtgtcaagcccctagtttgaattttgcctaagctgccgtcttagattattgtcgtcaggttagtttttagactagtgccagactgtcttatacctgtaataagtatggagcctagctgctttattccatgagtttgtatatatcacataataaaatggacccctttttaatgcatttacgtatacctatatcctttt

SEQ ID NO: 10235 - DNA, 1287 bp, Zea Mays
tcaccctctcgattaaagcaaaacagaggaataggggaggaaaaaatatttcgataggtctgcggtctgcctgcggctgcggcgccccttgattcatccccggctcgccttcgccggcggtgtcggaacagccagctcgcgctcgccggaggtgtcagggaacagctaggccgcgctcggtttccctttctcttcgcaggattggagccgctgggtcctgaactgcgcggcctgtttcagcgtgaatagcaatcaccatggggtctggatcactaacaatgaagcagaagaaacgagtgaaacatgcaaagaataagtacttgaaacctggtgccttggctcagattcgttatagtaggagtacgagcagggacatcgggaagaaaagaattctgttgaatgcgaaagatgagctggagttgcctccacaacctgaggttctcttagaaagcagtacaacaattttgtcccctgcaagactcaattttaagccatttggtagcaataaggggcagatattgccaaagactccaaagactcctgatgcatctgcgtttgatggtgattcaaatcttgaatcacttccacttgatttgctggtaaagatcatgtgttgcttacaccacgacgaacttaaggtggtttttcatgtttcaaaaaggattcgaaaagcaacagtaccatttcaactataccactccagatcggagcagacaggagttgctcctgaacagaacccctcttccaacagagcattggcccttcttaagaattgatggcaaggacgtccgcgtttccaccccaaggacaccaagggctccgaaacatgcctctcgcctttcacgcctcaagctggttgacgtgaagccaatcacagctgtccttttccaggagtctcctacccttttcccttcgaagcgtctccgatgctcgatgccaccaccaaggctggcaagacctgcgtgtaaagctgcaccttcgcctagagttttgcggtacgaggaggagctttgcgaggcggtggcgcagaataagcttctctgaagatgcaagaagtgcatggctttcgtctttagtgtatagcttatctgtgtcaagcccctagtttgaattttgcctaagctgccgtcttagattattgtcgtcaggttagtttttagactagtgccagactgtcttatacctgtaataagtatggagcctagctgctttattccatgagtttgtatatatcacataataaaatggacccctttttaatgcatttacgtatacctatatcctttt

SEQ ID NO: 10236 - DNA, 2561 bp, Zea Mays
caaggtttcaacttgagatggcaatagctctgttaatccagcctctcaagggcactgtacgggggtatttataggtgcctgagtgcccaacgtctcaatgtaaggacgcatgtaccttcaggcacctggactatccccggaatattcctataaaggagggttacagactgtcattacagaaaagttattacaaatcgggcccgtaacacgcttctccgtgcggggcctgttacaatgggccgaatcccacgtgggcctcaaggtcgagtgaggacgtgggacggggcgacgtcgtcgtaggccttcgtctcgtagtgtacaaggcgaagggtggacctcgccggttcttctgctttcgttggcacagcgagaaagacgaaggctggagcgaagggtagcgtcttcgccttcgccccaacaattttccaatttcttttgctcaattttctgaagactatgatcaacctcatatgcctccaaataccaataacgctaacaaaacagcaaacacaggtaatttactaaggtactaggtatatgcccgtgcgttgctacgaaatcgacatgatagaatacactgatatgcaaaagcactaattgttattctatagtctattagcatgttaaggatgtttgcatcaagagctgatttattatcaaccactgcatgcttgtccaattggttgtcaatttgtacttcatttttctccttcgaacaatccattttggcaccattgtaatattgaattcctacgttaataaatttgttacaatcataacaatagcttttttttaactattgcgaatagaggattaaacattaaaagaatagaggttctatatttcctgaactaaaacaatcataacaaaatctacttgctgtatttcctgaactaaaaggttgacaaatgtaaaaggttgtattttttggctatccattggtgaaactataagtatatctttattgtaaaaacatgttcctaaaacgtttgcaaattgtatttgtttgctacatataaacgttgtttgcccttatgttgcaagaaagataataatcaaagactaactttgaagccatatacattgaaaaaatgctcttgtggtttcctgtgccgccaataggcaaaactgatagcaggaacagcaaatagcaaggctccactccaccagcaattgctcatgtagtggaagagctacttcctgcacaaaataaaagatgtcaacagcaaagccatatgttccatacccttaatcactcacgtactaatgtagggtagggaaaaccaaaaggacaaggtagttattgacttgttctgcattcctgcatcccacgaggtacaggttagtagcttcctattgtattccagtattctagtatagcaaattaggttagtagcttcctattgtattccagtattctagtatagcaaattaatagcagtacaacacacataccgctgagccacagactaatagcagcacatagtcatagtaccatgtaacgctctagctcctgattacaaattattttcaacttaattttcaggaaaacgtgcagttattccttaccgctctccagccttgacagcattatgcttgttttggaggtatacattttcccaattaggatgtcatttagatgaaagagtaaggaaggaaaggtcctattgaactcaaggatttcactggacaatctaaataaatcacctggtgattgcatcggggttgtagagttgtatggaggaggtggagaaaagggaggagcatcagtgttctagacaacaaaaaagaaaagtggctgaagaaaagagaagcgatcataagtcagacagaggatcggtctgaggatcgtagcaccactttttttattctgagcagtcagcgtatcatttagtttttatgtaacatagtttggtattgtggataaggaaaagaaggaaacaattaaaatcagttcgagggaaatggttccagaaaaggccctctgagcaacttgtagtcttatacagatcagaaactcaacgttttagacaccgaaaaagagaacaatgagcgttctgcactttctacccccgttacgatggacaattactcctgtcctaaaaagaaagcacaaaaaaggtgtagtacatttgaatttgcgcattcatattccttggtctaatgattcaaagcgtcggtcctaattaactaacaatcttcagtgctctttatctatctaaattttaaataaacagtggtaagatcctaagcacccatttctgcctgttaaacaacacttattgatccaagcgatgaattctatacaactttagggatggatgaggcatcacagctccaatgacatatgtcagtataattaagtaaagtgcatttaaaagaaaacaattagtatatgcaagtgtctggtacatatacaatgtcatagtgggagcaagtgagctcctgagtcccgaatctcgttcccacaaaaaaacaagcaacctctttgactaatcaaattgctaaagaacatttagcaaaaagaacgttgttatttcctttgaataataaattttgac

SEQ ID NO: 10237 - DNA, 1922 bp, Zea Mays
gtcgatcctcctcatttcggcactgggccccactcgtcactcaccctttcaggcctccacggcacctcccgacagggactcccctcctactcctgctctcccagcctgcctttacttctcccgaatgctcgaggcctgcaaagctccagcacatccaatcgcacgacactccctgctgctctctgctgagaggtgctagatctcggactcgccgttgatttgattccaagttaaagacagcgagcaatccatagattgaccggtggagagcgagagaaagcgagagagagaagggaattggttggtaggtggagaccggagggagagctcagctcaggagattgatgcttgcatggtgatgcgggcgcgggcgatggggctgagcagcatccggcgggaggtggccgtccctgtccccgtcgaaggatgccggcatcggcgaggaggaggagcagcaggcgcggtaccccgtgacgttcgcgtacctgatctcggcgtcgacgggggacgcgtcccgcgccgcgcggctgctggcggcgctgtaccacccgggcaacgtgtggatcgtgggcaggcccaacctggtaacctaccgtggccccaccatgctgaccaccacgctgcacgccgtcgccgtgctgctccgcctccgccgccgctgggactggttcatcaacctcagcgcctccgactacccgctcgtcacccaggacggtaccctgtgatgcttgcttgcttgcttgctgttggtcgtccactggatggacagactgtttctgaattttgggggttgcagatttgatggaggcgttcgccgggctgcccagggacctcaacttcatccagcacacgagccacctgggctggaagattccaaattcaacagtagagctcgatctgtagaaagaagcgggcgcggccggtgatcctggacacggcgctgtacgaggacgggagggcggagctgatccgcccggtgaacatctccaccaacctcaggaggctgcccacggcattcaagctcttcacagggtcggcgtggacgatgctgtcgcgggcgttcgcggagtacgtgacgatggggtgggacgacaacctgccgcggacgctgctgctgtaccacgccaacatcgtctcctcgcccgagttctacttccagacggtggcctgcaactcgcgccggttccgcaacgccacggtcaaccacgacctgcacttcatccgctgggacaccccgcccaagcagcacccgctctacctcaccgccagggactaccgccggatgctgctcagcggggccgccttcgcgcgcaagttcagggacggcgaccccgtgctggaccgcatcgacagggacatcctccgccgccgggaccccgccgcccacttcgcctacggcggctggtgctccgaggccggcgaccaaaacggcggcgccgcgctctgctccaacccgcaggagcccgggaggcgcggggccgtcaagcccggcgccgggtccaggcggctcaaggccatgctcaggaagacgctgtcgccgaggaatttcaggaggcagcagtgtaggtaggggaactgttctgttatgttctgatcaaacaaacaggtcgttgactcaattttgtatgtatagaaaaggcagatctgaaacgcatcaaagcggcccaaagccaattttgttcagttgattcgcacaagtctgaattgaattgtagtagggagatactcctggtggttgatcatctcatacacggaataataatggaaggggcattatgcaaactgtttagttatatggtactaaactgtttagtaatacatagatgctcgtcaatttgttggtgacaaacagcaaagccaatgaggaaaacatttgatttatcacaggaaatagcgaaacgaatagtgcgacctttcaatcg

SEQ ID NO: 10238 - DNA, 1823 bp, Zea Mays
gaagctgccacggccgtcgtcgatcctcctcatttcggcactgggccccactcgtcactcaccctttcaggcctccacggcacctcccgacagggactcccctcctactcctgctctcccagcctgcctttacttctcccgaatgctcgaggcctgcaaagctccagcacatccaatcgcacgacactccctgctgctctctgctgagaggtgctagatctcggactcgccgttgatttgattccaagttaaagacagcgagcaatccatagattgaccggtggagagcgagagaaagcgagagagagaagggaattggttggtaggtggagaccggagggagagctcagctcaggagattgatgcttgcatggtgatgcgggcgcgggcgatggggctgagcagcatccggcgggaggtggccgtccctgtccccgtcgaaggatgccggcatcggcgaggaggaggagcagcaggcgcggtaccccgtgacgttcgcgtacctgatctcggcgtcgacgggggacgcgtcccgcgccgcgcggctgctggcggcgctgtaccacccgggcaacgtgtggatcgtgggcaggcccaacctggtaacctaccgtggccccaccatgctgaccaccacgctgcacgccgtcgccgtgctgctccgcctccgccgccgctgggactggttcatcaacctcagcgcctccgactacccgctcgtcacccaggacgatttgatggaggcgttcgccgggctgcccagggacctcaacttcatccagcacacgagccacctgggctggaagataagcgggcgcggccggtgatcctggacacggcgctgtacgaggacgggagggcggagctgatccgcccggtgaacatctccaccaacctcaggaggctgcccacggcattcaagctcttcacagggtcggcgtggacgatgctgtcgcgggcgttcgcggagtacgtgacgatggggtgggacgacaacctgccgcggacgctgctgctgtaccacgccaacatcgtctcctcgcccgagttctacttccagacggtggcctgcaactcgcgccggttccgcaacgccacggtcaaccacgacctgcacttcatccgctgggacaccccgcccaagcagcacccgctctacctcaccgccagggactaccgccggatgctgctcagcggggccgccttcgcgcgcaagttcagggacggcgaccccgtgctggaccgcatcgacagggacatcctccgccgccgggaccccgccgcccacttcgcctacggcggctggtgctccgaggccggcgaccaaaacggcggcgccgcgctctgctccaacccgcaggagcccgggaggcgcggggccgtcaagcccggcgccgggtccaggcggctcaaggccatgctcaggaagacgctgtcgccgaggaatttcaggaggcagcagtgtaggtaggggaactgttctgttatgttctgatcaaacaaacaggtcgttgactcaattttgtatgtatagaaaaggcagatctgaaacgcatcaaagcggcccaaagccaattttgttcagttgattcgcacaagtctgaattgaattgtagtagggagatactcctggtggttgatcatctcatacacggaataataatggaaggggcattatgcaaactgtttagttatatggtactaaactgtttagtaatacatagatgctcgtcaatttgttggtgacaaacagcaaagccaatgaggaaaacatttgatttatcacaggaaatagcgaaacgaatagtgcgacctttcaatcg

SEQ ID NO: 10239 - DNA, 2633 bp, Zea Mays
ctgttttgcatcgaggatgcaccaattttttccctcgagacatgccgcaggagggggcgatgatatgtggatgtggttgttgtctctccgttttcagaacacgtctcgtttgcacgagggtgaagctgccacggccgtcgtcgatcctcctcatttcggcactgggccccactcgtcactcaccctttcaggcctccacggcacctcccgacagggactcccctcctactcctgctctcccagcctgcctttacttctcccgaatgctcgaggcctgcaaagctccagcacatccaatcgcacgacactccctgctgctctctgctgagaggtgctagatctcggactcgccgttgatttgattccaagttaaagacagcgagcaatccatagattgaccggtggagagcgagagaaagcgagagagagaagggaattggttggtaggtggagaccggagggagagctcagctcaggagattgatgcttgcatggtgatgcgggcgcgggcgatggggctgagcagcatccggcgggaggtgctggtctccgccgtcttcacggcgctcctcgtggcctccatcctcctcctcccctcgctcctcctaacgggcgctgggcccatcaggtggccgtccctgtccccgtcgaaggatgccggcatcggcgaggaggaggagcagcaggcgcggtaccccgtgacgttcgcgtacctgatctcggcgtcgacgggggacgcgtcccgcgccgcgcggctgctggcggcgctgtaccacccgggcaacagctacctgctgcacctggaccgggaggcccccgcggaggagcaccggcgtctggcggagctggtgtccgggcgcggcgtgtacgcgcgcgcgggcaacgtgtggatcgtgggcaggcccaacctggtaacctaccgtggccccaccatgctgaccaccacgctgcacgccgtcgccgtgctgctccgcctccgccgccgctgggactggttcatcaacctcagcgcctccgactacccgctcgtcacccaggacggtaccctgtgatgcttgcttgcttgcttgctgttggtcgtccactggatggacagactgtttctgaattttgggggttgcagatttgatggaggcgttcgccgggctgcccagggacctcaacttcatccagcacacgagccacctgggctggaagattagagctcgatctgtagaaagaagcgggcgcggccggtgatcctggacacggcgctgtacgaggacgggagggcggagctgatccgcccggtgaacatctccaccaacctcaggaggctgcccacggcattcaagctcttcacaggtactccgtccattttgctgtaaacctttgaaaacccaaggcaatgccccgcacacaccgaacgagtccgaaaacgtgccttgtggtacaacgcaacggaagcatgcttgtgagcaaccgattaggacagcatggcctcgtcaatcggttgttgatcggactaggggagtgtacggtgccgtactactccccgcggcgcctggctgtgctatggtgtgtcctgtcacacagtcgatgccgtgccagtggttgccctcagactttggccgtccttcgattccgatcgagtgacgggtgtgggcgtgagccgacagccgagcccgtgatggacgaattccggtccggtccggcccagaaagaataatcttatctggaatggcgtctagtcaatggagcagggtcggcgtggacgatgctgtcgcgggcgttcgcggagtacgtgacgatggggtgggacgacaacctgccgcggacgctgctgctgtaccacgccaacatcgtctcctcgcccgagttctacttccagacggtggcctgcaactcgcgccggttccgcaacgccacggtcaaccacgacctgcacttcatccgctgggacaccccgcccaagcagcacccgctctacctcaccgccagggactaccgccggatgctgctcagcggggccgccttcgcgcgcaagttcagggacggcgaccccgtgctggaccgcatcgacagggacatcctccgccgccgggaccccgccgcccacttcgcctacggcggctggtgctccgaggccggcgaccaaaacggcggcgccgcgctctgctccaacccgcaggagcccgggaggcgcggggccgtcaagcccggcgccgggtccaggcggctcaaggccatgctcaggaagacgctgtcgccgaggaatttcaggaggcagcagtgtaggtaggggaactgttctgttatgttctgatcaaacaaacaggtcgttgactcaattttgtatgtatagaaaaggcagatctgaaacgcatcaaagcggcccaaagccaattttgttcagttgattcgcacaagtctgaattgaattgtagtagggagatactcctggtggttgatcatctcatacacggaataataatggaaggggcattatgcaaactgtttagttatatggtactaaactgtttagtaatacatagatgctcgtcaatttgttggtgacaaacagcaaagccaatgaggaaaacatttgatttatcacaggaaatagcgaaacgaatagtgcgacctttcaatcg

SEQ ID NO: 10240 - DNA, 1958 bp, Zea Mays
cgtaaacacactgttttgcatcgaggatgcaccaattttttccctcgagacatgccgcaggagggggcgatgatatgtggatgtggttgttgtctctccgttttcagaacacgtctcgtttgcacgagggtgaagctgccacggccgtcgtcgatcctcctcatttcggcactgggccccactcgtcactcaccctttcaggcctccacggcacctcccgacagggactcccctcctactcctgctctcccagcctgcctttacttctcccgaatgctcgaggcctgcaaagctccagcacatccaatcgcacgacactccctgctgctctctgctgagaggtgctagatctcggactcgccgttgatttgattccaagttaaagacagcgagcaatccatagattgaccggtggagagcgagagaaagcgagagagagaagggaattggttggtaggtggagaccggagggagagctcagctcaggagattgatgcttgcatggtgatgcgggcgcgggcgatggggctgagcagcatccggcgggaggtggccgtccctgtccccgtcgaaggatgccggcatcggcgaggaggaggagcagcaggcgcggtaccccgtgacgttcgcgtacctgatctcggcgtcgacgggggacgcgtcccgcgccgcgcggctgctggcggcgctgtaccacccgggcaacgtgtggatcgtgggcaggcccaacctggtaacctaccgtggccccaccatgctgaccaccacgctgcacgccgtcgccgtgctgctccgcctccgccgccgctgggactggttcatcaacctcagcgcctccgactacccgctcgtcacccaggacgatttgatggaggcgttcgccgggctgcccagggacctcaacttcatccagcacacgagccacctgggctggaagataaagaagcgggcgcggccggtgatcctggacacggcgctgtacgaggacgggagggcggagctgatccgcccggtgaacatctccaccaacctcaggaggctgcccacggcattcaagctcttcacagggtcggcgtggacgatgctgtcgcgggcgttcgcggagtacgtgacgatggggtgggacgacaacctgccgcggacgctgctgctgtaccacgccaacatcgtctcctcgcccgagttctacttccagacggtggcctgcaactcgcgccggttccgcaacgccacggtcaaccacgacctgcacttcatccgctgggacaccccgcccaagcagcacccgctctacctcaccgccagggactaccgccggatgctgctcagcggggccgccttcgcgcgcaagttcagggacggcgaccccgtgctggaccgcatcgacagggacatcctccgccgccgggaccccgccgcccacttcgcctacggcggctggtgctccgaggccggcgaccaaaacggcggcgccgcgctctgctccaacccgcaggagcccgggaggcgcggggccgtcaagcccggcgccgggtccaggcggctcaaggccatgctcaggaagacgctgtcgccgaggaatttcaggaggcagcagtgtaggtaggggaactgttctgttatgttctgatcaaacaaacaggtcgttgactcaattttgtatgtatagaaaaggcagatctgaaacgcatcaaagcggcccaaagccaattttgttcagttgattcgcacaagtctgaattgaattgtagtagggagatactcctggtggttgatcatctcatacacggaataataatggaaggggcattatgcaaactgtttagttatatggtactaaactgtttagtaatacatagatgctcgtcaatttgttggtgacaaacagcaaagccaatgaggaaaacatttgatttatcacaggaaatagcgaaacgaatagtgcgacctttcaatcg

SEQ ID NO: 10241 - DNA, 2854 bp, Zea Mays
gtcagcgtgaggcagcgagggttttaccggctgcccttgcttgttgcaagcgcagggcgctcccaaagctgatcatcttcattatttccctcgccgccgccggcgcccaccaaggcagcgcaacgctcgttcctccaaaggagagatgacgctctaccgtcgtgtcctgctcctccgtcgcctctcccacctccacccctcgcccgttccggccatctgctcctcaccaccacccaccctcgcggggctgctcacccccatggggcgccgccacttcgccttctcgtccgccgaggaggccgccgccgagcgccgccgccgcaagcgccgtctccgcatcgagcctccaatcaacgccctccgccgcgggccacctcccccacgggaccccaacgcgccccgcctcccagacaccacctccgcgctcactggcccgcgcctcagcctccacaaccgcgtccagtccctcatccgctctggtgatctagacggcgcctcagccgctgcccgcgccgccgtctcctcgcgcgtccggcccaccgtcttcacctccaacgccgtggccgcggccatggtccgcgccgcccgccacgatgacgctgtcgccctctttgatttcttcttccgccgctctaatatcgtccccaacatcgtctcctacaacaccctcatcctcgcacactgcgaggccgaccgcgtcgacaccgcgctgcaggtctaccaagacatgctcgcgtctgcgcccttctccccctctgccgtcaccttccgccacctcaccaagggtctcgtcgctgctggccgcatcggtgacgcccttgacctcctccgcgagatgctcagccgcagcgctggcgccgactcactcgtctacaacaacctcatcgctggctacatcgacctcaacgactgggacagggccttcgagctcttcaacgagctcgcagagaggtgccttgtctatgacggtgttgtacacaccacgttcatggagggctactggaggcagggcaaggacaaggaggccatggacaactaccagtcccttcttgatcggggcttcaagatgacgccggccacctgcaacgtgctgctcgagacactcttcaagcacggcaagcacaaggaggccaacgacctatgggagaccatgattgacaaccacaccccgccaagcttcatcggcatcaacgcagagtcctacaatgtcatggttaaccagtgcttcagggagggcaagtttcaggaggcgattgaggtcttccaccgccagcccaggaagaatgtccaaatggacgttggttgcttcaacaacatcattggcaaactctgtgagaatgggatgctagctgaggcaaaaaagctctttgaggagatggagaagaagtcagtacttccagatgtgtacacctacacttaccttgttgactcatgcttcaaggaaggctatgtggaagatacactggaatatttctataaaatggcagatgagaaaccacatgggccaaagttcaatattggtttctttaaccgcatgtttgaagggcttacagaagctggccgtattgatgacgccttgaaggtgtacgggaggatgcctgacaaggaaatcaaaccaaacatgaccacttttgaaatccttgtcaaagccttgtgcaaagaagaggacttggatcaagcaaggggcctagtgatggacatggcaagaggtggtattgtgcctcctcaagggttccgtgagtctgttgttaactttttcaaggaggctggtcgacaggaagaaattgagaaagcttttgaagaaaaacctatgccaacacctcagcctagaacagagtatcagcctaggactgagtatcactctcgcaatgcagacggtgctgctcaaataaaacaacctggctttagctctgctccagcggtgggacctgaatttcttcactctcagccacaacaatccacacttagtaacactccaaatcagcagcctgagtttggctcatctcgatcatggaattcaggtttcggtgctcctcaagcgcagcctggatatggtgcacctcagcctgtacagacaccacagccacagtttggtgcttctcggggtgaaccaggatatagcaacataggaaatcagcatgttcagtttcgctctccccagagagaaccaaaatttagcaaccatccaccacaagttgggtatggtgcccaattgcctcagtcaggatatcgctttgagccccaacaagaacaggttggatttggaaatcaagtagcacaacctgcacatgtggcttcaagacaaccctcatatgacacccgctggagctcaagagattatggatcaacccaagggcaactgggatatggtggtcctcaagcgcagtcatatgaatctcagttaccacatcaccagggaagttttggtatgccacatttccaaaataacaatggcttctatcgatacaaccctggatatggcccatctaatggttcgcagggatttgatgctccccatggtgattctaaaactgctgagagtaccactcctgaagaccggcaacaagcagcatttctgaaagcatgaggtattgatatgactaggattctaggttgcttctctctaatctacggtcttatggtggatatttttatgtgactactgtgtagaactataggcctcaagttcaattacaaacattctattgtagcaaaagacatcttcaagtattattatcaaggaaaaacacatctttgtttcatcttgaaatgcaattagcatgttgagttatacgaatatacatatccactaacatgaggattgaagtcatttcactaaatttgaggaatggac

SEQ ID NO: 10242 - DNA, 2345 bp, Zea Mays
cctctcttggccgccacccttccccctttttcccttggttggccaccccctctcctcccatggcagccgcccaccatttcttcctcctccctagatctccccctcccccacgcagcaaggatcgagaagaggaggaacaagatggattgaagaggaagagaggatcaaggagatgttctaccccccatctattgcagattttcttggggaaaccctaggtaaggatgggatccttgttcctccatataattatgtgcttttggaggttgtggatcatgtggattgaagaattagaggttggattagatgtggggttaggttttgatctcgaatttaatttctgcagaatggcagattcgatagtttctgttcataccagttttccgtggtcttagtggcctcaaaaaaataaaaagtttatatatgagtcgtagataatttgtagatctttccgtggccgcgaagaacacctcaatcggacatcagatcagaaagttattgcagtttgattatagctgtttttcagtctcataattctgtgcagaatctgttctcttaagagttaggcaattttatcaacagaattaaactatgggttggtaaaagaagttgtagataatttcataaactttccagattgttaaagagtgcattcatatgatttgtgaaactccagttatgtttgttttactgtggctgtttctgtttgcctgacaaaaatgagcgggtctgttcactggtaggtttcatcaggtaaatggccgaattgactcttccaactatggagacttatgtagagggataaaagttcttactgccagtagaattccatgatttttggttgagtagtttgtgagatatcgaattttgaagttaactacgctgctgtctaaaacagatccagtcagttatcttgttagaggttttagaacttgtagatggcagaatttaattatccattgaataccgaagttgtagagtattttgtgtagatactcctagattatttgtttgctatcacaactgttataattttaaagatacaaaattaacaaacggcgctgctgctgtatgtcatgtggttcagggtgggagtctttccaccaggtcttggtttcaagtgtaggagcgatttgttgattgttgtcaaatgtttgtgaaatatttgtaataagttttatgcccgctagcaggtggctacactccagatcatgcatagtacatttcttcttcttcgatgaaggcaagtgaatgtagcagtggttgcttccgttctgacctgttatttctattacctacactctaatattcagaagtattggattctttcataattggactctatggtgatgctttacttgcttgcattatgctgatgctcaatcatatattgatgatgataatgattcgagtatgactcgtgagattaattcacacccctgaaggtaaatgaagtatgatttgaggttggtattgtatctgaaggtaaatgaagtattatttgaggttgtattgtttgtgaaggaagtgaagtatattgataaatgcagcatgccatatacattgcatgattcacttgcatctgaagttttgtcgtggcctatggtccaaccgtaccggtacaacttagcatcgtacgttgcccgagaaggggtacgatacggcttcatacccttagaggtatgaaggcagaggacatatgcattgcattcatatgcattcattaaagtggtatttgtagatggtgtggttttatactctaagaggtatgaaggctgaggacttacacattgcattactatgcatacatcgaagtgatatttgcaggtattgttgacgcatgaaagtgttatacaacctattgtggttgttcgaggaaattagatggcattggttattttgggactattgagttctatatctacaagtatttctgatctcaattgtgatccctttaaaatgttgattagttcaatttttttggtttaaatatctcgtcgaaacaattcacttgctgagatgtttcatctcactcttgcattactcaatgcaggtacttgattcatgttgggaatgaggggagtagcagcacgtccaccttcactctcataataacgctgcccaggcacaaccatgatttaattagaaacttctggtcaaaggatgtttgtttttaactagtcatgcacactagttaattcagttcatgatgttatggttatcttcccattgctagcagattattaatgtctagtatgttttcttattatgatatctgtttatactttgttgcttccacgtttatgcaaattttcaaaggagatgttgtcgaaattttatatatg

SEQ ID NO: 10243 - DNA, 3711 bp, Zea Mays
aatgtatttgcatctagttggcgtgaggccaatgacctcatccgatccctttccctttcccatccgcgcgtccctactcctccccctccctcctcaacgacgcgagaagacgcaatcctgggagctccgaaccctagctcctaatttgagccccggtgtcatcgattcctcaggagcccgccgcgattcggctcccgtagcagcatagggctccaccgctccccagctgcatcagcatcgacggcggcggcgcgccgccgcgactacgctcgaggaagcacctagtctcggcgggttctcgttcttggaggccttccataaggcggtttcgtggtgtccgagcccggatctacggcgatctgcaagcggaaggcgatagatgaggcgattcagtggtaacccccaatccggtgggtttccggctggcagaggcggaaaggttcgggccttcggcgggtgatcagatttctccgtgcggcgcgcggcttgtgtctaccgcaacggtgtaggactggagcgcaggagccgacgaggcggtggagatacaaaaaaattgcttgcttgtacacttgttcatgttcatttgttcctgctatctgttgtggtttaaagcatcaattttccgctcaatttaagggcgaagacactttttttgttccttccttgttggtttctatggaataatctctatattacagaagaggagtgtggaaaagcaacaaaaaagaggaatataaaatacaaaaaagatataaccagcagaaaaaagagattttttttgagtgggcaagcaaatggctgtgtattacaagttcaagagtgctagagactttgactcgattccgattgaggggcaattcatctctgttgccaacttgaaggagcggatttttgagtccaagcatctcggcaggggcacagattttgaccttatgatctcaaatgctcagactgatgaagagtatgctgatgaggccactatgataccgaaaaatacgtcagtattgattcggcggataccaggacgaccaaggaagcctattgtcacagaacctgaagagacaaaagctgcagaagatggtgtacaagatgtcatgcccacatcgggtgcttttcttggtgattcatctatgaaatatcctgaagaatctgagtgggatgatgagtttggcaacgaattatatatttctgattcagttccttatcagcctgtttgccaggcggttgatgctattgaaaataaagttgacgaggatagtaaaataaaagcacttattgatacatctgcccttgactatagccaaatccctgatggttatggttctggaagaggctatggtagagggatgggtggaagaatgatggctggacgtggctttggacgtgggctagaacgcaggacacctcctccaggctatgtttgtcacagatgcaaagtacctggtcattttattcaacattgccccacaaatggggatgctagatatgatgtgaaaaggatgaaacccccaactggcattccaaaatcaatgctaatgcaaactccggatggttcatacgcactaccaagtggagctggtgctgttttgaagccaaatgaagctgcttttgagaaggagatagagggcctacctaccacacgtcctgttggtgatcttccaccagagctacgctgcccattgtgcaaagaagtaatgaaggatgctgttctaactagtaaatgctgctttaggagtttctgtgataaatgcatcagggactacataattaacaagtcaatgtgtgtctgtggtgccacaagcatattagctgatgatcttctccctaataaaactctaagagaaaccatcagtcgcatattagaggcaccaccaactagcagtacagaaaatgtgggaagcatggtgcaagtacaggacatggagtcagctctacctgtacaacctaagcataggtctcctgctgtttctgctgcttcaaaggaagaggctaaagcatccacacttgtagaagagtctccagatgctgagagcctcaatggaacaaaagctacaaatattgatgcgagttcttcggataagaaagctttgacagttccagatattgctgaagggaccttggattctaagaaagcgaaagaagataaaccagtagaagcaaccccagtggcaaaagattctcaagaaaagtttcctgcaggggaacaagatactgattttcttttggaagcttcagcggtaaagaagaagaaaaagaagaagccacgtgttcctggaaatgctgaagagcaatggaaaaattttcaagattttggaactgaaaatttttcggggatgcccttgggtccaactggagcattcaacccttactggggcggaggagtgccattgccaatggattacatgaatgcaccgtttcctggtcccatgccttacatgggttatccaccaggtccatttgacccttttggtgggggtgttctcccacaagatccatttatgcccccaggatacatgatgccaggagttcctagggatctttctgaattggcagttaacgctatgggaataaacatgggcccgccagttatgagcagagaagaattcgatcccaggaaacctgaacataggaggagacgtgaaatggatcggttcaatgatagggaaagagagcgtgaccgttctcgagagcgagagcgagaacgggagcgggagcgttccttggagagggagagggagcgggagcgggagcgtggccgttctctggagagggagcgggagcgggttcgagagctggagcgttcccgcgagggtgaccgtgaacggcagcgaggcagggacagggacagggactcacgcagagaggccagagcatcaccaggggccattaatgatagttcctcgatgaggcggaatgataggtcgaggtcccagccggacaggtcggagcgtggcccgccgcagccgtccagccccgaccggcagtcgcgtcgctcctcctccggcaagaagcgttcctcctccgaccgctacgacgacatgccgctcccacctccccctccgctgcccgcgacgcggcacgaggccgagcccgccaaggcaccggggtcgtcgtccaagtccaaggccagcgtcttctcccgcatcagcttccccggagacggcgccaacccctccgacgccaagcgcagccgcagggcctccgacaagccccccgcgcgctcctcttcctcctccaagaagagcgccgcggcagagggcggggacggccgcggccaccgccaccaccgtgagcccgcggccgccgaggaggagaagcctaggcccgctgcctccggtggcgactactacggcggcacggacggagaggagagcgaggacgaggagcagcacttcaagcggcggccgtcctcgtcctcccggcgcgagcgcgagcaggacgcgccggaagagcagccgcgccactcgcgacggtccagggaccacaggcgccggtgagcgtcgccccgtccgtccgtgatatataaatcttagaagcttgagttgggaggtcgtcgcctccgcagatcagagccgtcctgcttccctgtcgcgtcggagttgggccctgtacattgccttcccgcgattatcatgttttgtttaaatcggatcggatcaaatggggattataataagtttgatttgatggatcatcttaatcgctgtttaa

SEQ ID NO: 10244 - DNA, 3684 bp, Zea Mays
aatgtatttgcatctagttggcgtgaggccaatgacctcatccgatccctttccctttcccatccgcgcgtccctactcctccccctccctcctcaacgacgcgagaagacgcaatcctgggagctccgaaccctagctcctaatttgagccccggtgtcatcgattcctcaggagcccgccgcgattcggctcccgtagcagcatagggctccaccgctccccagctgcatcagcatcgacggcggcggcgcgccgccgcgactacgctcgaggaagcacctagtctcggcgggttctcgttcttggaggccttccataaggcggtttcgtggtgtccgagcccggatctacggcgatctgcaagcggaaggcgatagatgaggcgattcagtggtaacccccaatccggtgggtttccggctggcagaggcggaaaggttcgggccttcggcgggtgatcagatttctccgtgcggcgcgcggcttgtgtctaccgcaacggtgtaggactggagcgcaggagccgacgaggcggtggagatacaaaaaaattgcttgcttgtacacttgttcatgttcatttgttcctgctatctgttgtggtttaaagcatcaattttccgctcaatttaagggcgaagacactttttttgttccttccttgttggtttctatggaataatctctatattacagaagaggagtgtggaaaagcaacaaaaaagaggaatataaaatacaaaaaagatataaccagcagaaaaaagagattttttttgagtgggcaagcaaatggctgtgtattacaagttcaagagtgctagagactttgactcgattccgattgaggggcaattcatctctgttgccaacttgaaggagcggatttttgagtccaagcatctcggcaggggcacagattttgaccttatgatctcaaatgctcagactgatgaagagtatgctgatgaggccactatgataccgaaaaatacgtcagtattgattcggcggataccaggacgaccaaggaagcctattgtcacagaacctgaagagacaaaagctgcagaagatggtgtacaagatgtcatgcccacatcgggtgcttttcttggtgattcatctatgaaatatcctgaagaatctgagtgggatgatgagtttggcaacgaattatatatttctgattcagttccttatcagcctgtttgccaggcggttgatgctattgaaaataaagttgacgaggatagtaaaataaaagcacttattgatacatctgcccttgactatagccaaatccctgatggttatggttctggaagaggctatggtagagggatgggtggaagaatgatggctggacgtggctttggacgtgggctagaacgcaggacacctcctccaggctatgtttgtcacagatgcaaagtacctggtcattttattcaacattgccccacaaatggggatgctagatatgatgtgaaaaggatgaaacccccaactggcattccaaaatcaatgctaatgcaaactccggatggttcatacgcactaccaagtggagctggtgctgttttgaagccaaatgaagctgcttttgagaaggagatagagggcctacctaccacacgtcctgttggtgatcttccaccagagctacgctgcccattgtgcaaagaagtaatgaaggatgctgttctaactagtaaatgctgctttaggagtttctgtgataaatgcatcagggactacataattaacaagtcaatgtgtgtctgtggtgccacaagcatattagctgatgatcttctccctaataaaactctaagagaaaccatcagtcgcatattagaggcaccaccaactagcagtacagaaaatgtgggaagcatggtgcaagtacaggacatggagtcagctctacctgtacaacctaagcataggtctcctgctgtttctgctgcttcaaaggaagaggctaaagcatccacacttgtagaagagtctccagatgctgagagcctcaatggaacaaaagctacaaatattgatgcgagttcttcggataagaaagctttgacagttccagatattgctgaagggaccttggattctaagaaagcgaaagaagataaaccagtagaagcaaccccagtggcaaaagattctcaagaaaagtttcctgcaggggaacaagcggtaaagaagaagaaaaagaagaagccacgtgttcctggaaatgctgaagagcaatggaaaaattttcaagattttggaactgaaaatttttcggggatgcccttgggtccaactggagcattcaacccttactggggcggaggagtgccattgccaatggattacatgaatgcaccgtttcctggtcccatgccttacatgggttatccaccaggtccatttgacccttttggtgggggtgttctcccacaagatccatttatgcccccaggatacatgatgccaggagttcctagggatctttctgaattggcagttaacgctatgggaataaacatgggcccgccagttatgagcagagaagaattcgatcccaggaaacctgaacataggaggagacgtgaaatggatcggttcaatgatagggaaagagagcgtgaccgttctcgagagcgagagcgagaacgggagcgggagcgttccttggagagggagagggagcgggagcgggagcgtggccgttctctggagagggagcgggagcgggttcgagagctggagcgttcccgcgagggtgaccgtgaacggcagcgaggcagggacagggacagggactcacgcagagaggccagagcatcaccaggggccattaatgatagttcctcgatgaggcggaatgataggtcgaggtcccagccggacaggtcggagcgtggcccgccgcagccgtccagccccgaccggcagtcgcgtcgctcctcctccggcaagaagcgttcctcctccgaccgctacgacgacatgccgctcccacctccccctccgctgcccgcgacgcggcacgaggccgagcccgccaaggcaccggggtcgtcgtccaagtccaaggccagcgtcttctcccgcatcagcttccccggagacggcgccaacccctccgacgccaagcgcagccgcagggcctccgacaagccccccgcgcgctcctcttcctcctccaagaagagcgccgcggcagagggcggggacggccgcggccaccgccaccaccgtgagcccgcggccgccgaggaggagaagcctaggcccgctgcctccggtggcgactactacggcggcacggacggagaggagagcgaggacgaggagcagcacttcaagcggcggccgtcctcgtcctcccggcgcgagcgcgagcaggacgcgccggaagagcagccgcgccactcgcgacggtccagggaccacaggcgccggtgagcgtcgccccgtccgtccgtgatatataaatcttagaagcttgagttgggaggtcgtcgcctccgcagatcagagccgtcctgcttccctgtcgcgtcggagttgggccctgtacattgccttcccgcgattatcatgttttgtttaaatcggatcggatcaaatggggattataataagtttgatttgatggatcatcttaatcgctgtttaa

SEQ ID NO: 10245 - DNA, 3633 bp, Zea Mays
aatgtatttgcatctagttggcgtgaggccaatgacctcatccgatccctttccctttcccatccgcgcgtccctactcctccccctccctcctcaacgacgcgagaagacgcaatcctgggagctccgaaccctagctcctaatttgagccccggtgtcatcgattcctcaggagcccgccgcgattcggctcccgtagcagcatagggctccaccgctccccagctgcatcagcatcgacggcggcggcgcgccgccgcgactacgctcgaggaagcacctagtctcggcgggttctcgttcttggaggccttccataaggcggtttcgtggtgtccgagcccggatctacggcgatctgcaagcggaaggcgatagatgaggcgattcagtggtaacccccaatccggtgggtttccggctggcagaggcggaaaggttcgggccttcggcgggtgatcagatttctccgtgcggcgcgcggcttgtgtctaccgcaacggtgtaggactggagcgcaggagccgacgaggcggtggagatacaaaaaaattgcttgcttgtacacttgttcatgttcatttgttcctgctatctgttgtggtttaaagcatcaattttccgctcaatttaagggcgaagacactttttttgttccttccttgttggtttctatggaataatctctatattacagaagaggagtgtggaaaagcaacaaaaaagaggaatataaaatacaaaaaagatataaccagcagaaaaaagagattttttttgagtgggcaagcaaatggctgtgtattacaagttcaagagtgctagagactttgactcgattccgattgaggggcaattcatctctgttgccaacttgaaggagcggatttttgagtccaagcatctcggcaggggcacagattttgaccttatgatctcaaatgctcagactgatgaaggttggttctttgtcagatctattgtgtgggtgaataagcgcctagctggtatcaattgttttaatcttgcgtccttttccctgcgttctgaacctgctaagacagtcctgtcccttgttgggcttacggttgaaggattagttgtagtatatgctgggaaatttttgatacatagtcttgcattttgtttggcgaaccttagggttttggatttgatgacaaaagctgcagaagatggtgtacaagatgtcatgcccacatcgggtgcttttcttggtgattcatctatgaaatatcctgaagaatctgagtgggatgatgagtttggcaacgaattatatatttctgattcagttccttatcagcctgtttgccaggcggttgatgctattgaaaataaagttgacgaggatagtaaaataaaagcacttattgatacatctgcccttgactatagccaaatccctgatggttatggttctggaagaggctatggtagagggatgggtggaagaatgatggctggacgtggctttggacgtgggctagaacgcaggacacctcctccaggctatgtttgtcacagatgcaaagtacctggtcattttattcaacattgccccacaaatggggatgctagatatgatgtgaaaaggatgaaacccccaactggcattccaaaatcaatgctaatgcaaactccggatggttcatacgcactaccaagtggagctggtgctgttttgaagccaaatgaagctgcttttgagaaggagatagagggcctacctaccacacgtcctgttggtgatcttccaccagagctacgctgcccattgtgcaaagaagtaatgaaggatgctgttctaactagtaaatgctgctttaggagtttctgtgataaatacatggagtcagctctacctgtacaacctaagcataggtctcctgctgtttctgctgcttcaaaggaagaggctaaagcatccacacttgtagaagagtctccagatgctgagagcctcaatggaacaaaagctacaaatattgatgcgagttcttcggataagaaagctttgacagttccagatattgctgaagggaccttggattctaagaaagcgaaagaagataaaccagtagaagcaaccccagtggcaaaagattctcaagaaaagtttcctgcaggggaacaagcggtaaagaagaagaaaaagaagaagccacgtgttcctggaaatgctgaagagcaatggaaaaattttcaagattttggaactgaaaatttttcggggatgcccttgggtccaactggagcattcaacccttactggggcggaggagtgccattgccaatggattacatgaatgcaccgtttcctggtcccatgccttacatgggttatccaccaggtccatttgacccttttggtgggggtgttctcccacaagatccatttatgcccccaggatacatgatgccaggagttcctagggatctttctgaattggcagttaacgctatgggaataaacatgggcccgccagttatgagcagagaagaattcgatcccaggaaacctgaacataggaggagacgtgaaatggatcggttcaatgatagggaaagagagcgtgaccgttctcgagagcgagagcgagaacgggagcgggagcgttccttggagagggagagggagcgggagcgggagcgtggccgttctctggagagggagcgggagcgggttcgagagctggagcgttcccgcgagggtgaccgtgaacggcagcgaggcagggacagggacagggactcacgcagagaggccagagcatcaccaggggccattaatgatagttcctcgatgaggcggaatgataggtcgaggtcccagccggacaggtcggagcgtggcccgccgcagccgtccagccccgaccggcagtcgcgtcgctcctcctccggcaagaagcgttcctcctccgaccgctacgacgacatgccgctcccacctccccctccgctgcccgcgacgcggcacgaggccgagcccgccaaggcaccggggtcgtcgtccaagtccaaggccagcgtcttctcccgcatcagcttccccggagacggcgccaacccctccgacgccaagcgcagccgcagggcctccgacaagccccccgcgcgctcctcttcctcctccaagaagagcgccgcggcagagggcggggacggccgcggccaccgccaccaccgtgagcccgcggccgccgaggaggagaagcctaggcccgctgcctccggtggcgactactacggcggcacggacggagaggagagcgaggacgaggagcagcacttcaagcggcggccgtcctcgtcctcccggcgcgagcgcgagcaggacgcgccggaagagcagccgcgccactcgcgacggtccagggaccacaggcgccggtgagcgtcgccccgtccgtccgtgatatataaatcttagaagcttgagttgggaggtcgtcgcctccgcagatcagagccgtcctgcttccctgtcgcgtcggagttgggccctgtacattgccttcccgcgattatcatgttttgtttaaatcggatcggatcaaatggggattataataagtttgatttgatggatcatcttaatcgctgtttaa

SEQ ID NO: 10246 - DNA, 3807 bp, Zea Mays
aatgtatttgcatctagttggcgtgaggccaatgacctcatccgatccctttccctttcccatccgcgcgtccctactcctccccctccctcctcaacgacgcgagaagacgcaatcctgggagctccgaaccctagctcctaatttgagccccggtgtcatcgattcctcaggagcccgccgcgattcggctcccgtagcagcatagggctccaccgctccccagctgcatcagcatcgacggcggcggcgcgccgccgcgactacgctcgaggaagcacctagtctcggcgggttctcgttcttggaggccttccataaggcggtttcgtggtgtccgagcccggatctacggcgatctgcaagcggaaggcgatagatgaggcgattcagtggtaacccccaatccggtgggtttccggctggcagaggcggaaaggttcgggccttcggcgggtgatcagatttctccgtgcggcgcgcggcttgtgtctaccgcaacggtgtaggactggagcgcaggagccgacgaggcggtggagatacaaaaaaattgcttgcttgtacacttgttcatgttcatttgttcctgctatctgttgtggtttaaagcatcaattttccgctcaatttaagggcgaagacactttttttgttccttccttgttggtttctatggaataatctctatattacagaagaggagtgtggaaaagcaacaaaaaagaggaatataaaatacaaaaaagatataaccagcagaaaaaagagattttttttgagtgggcaagcaaatggctgtgtattacaagttcaagagtgctagagactttgactcgattccgattgaggggcaattcatctctgttgccaacttgaaggagcggatttttgagtccaagcatctcggcaggggcacagattttgaccttatgatctcaaatgctcagactgatgaaggttggttctttgtcagatctattgtgtgggtgaataagcgcctagctggtatcaattgttttaatcttgcgtccttttccctgcgttctgaacctgctaagacagtcctgtcccttgttgggcttacggttgaaggattagttgtagtatatgctgggaaatttttgatacatagtcttgcattttgtttggcgaaccttagggttttggatttgatgacaaaagctgcagaagatggtgtacaagatgtcatgcccacatcgggtgcttttcttggtgattcatctatgaaatatcctgaagaatctgagtgggatgatgagtttggcaacgaattatatatttctgattcagttccttatcagcctgtttgccaggcggttgatgctattgaaaataaagttgacgaggatagtaaaataaaagcacttattgatacatctgcccttgactatagccaaatccctgatggttatggttctggaagaggctatggtagagggatgggtggaagaatgatggctggacgtggctttggacgtgggctagaacgcaggacacctcctccaggctatgtttgtcacagatgcaaagtacctggtcattttattcaacattgccccacaaatggggatgctagatatgatgtgaaaaggatgaaacccccaactggcattccaaaatcaatgctaatgcaaactccggatggttcatacgcactaccaagtggagctggtgctgttttgaagccaaatgaagctgcttttgagaaggagatagagggcctacctaccacacgtcctgttggtgatcttccaccagagctacgctgcccattgtgcaaagaagtaatgaaggatgctgttctaactagtaaatgctgctttaggagtttctgtgataaatgcatcagggactacataattaacaagtcaatgtgtgtctgtggtgccacaagcatattagctgatgatcttctccctaataaaactctaagagaaaccatcagtcgcatattagaggcaccaccaactagcagtacagaaaatgtgggaagcatggtgcaagtacaggacatggagtcagctctacctgtacaacctaagcataggtctcctgctgtttctgctgcttcaaaggaagaggctaaagcatccacacttgtagaagagtctccagatgctgagagcctcaatggaacaaaagctacaaatattgatgcgagttcttcggataagaaagctttgacagttccagatattgctgaagggaccttggattctaagaaagcgaaagaagataaaccagtagaagcaaccccagtggcaaaagattctcaagaaaagtttcctgcaggggaacaagcttcagcggtaaagaagaagaaaaagaagaagccacgtgttcctggaaatgctgaagagcaatggaaaaattttcaagattttggaactgaaaatttttcggggatgcccttgggtccaactggagcattcaacccttactggggcggaggagtgccattgccaatggattacatgaatgcaccgtttcctggtcccatgccttacatgggttatccaccaggtccatttgacccttttggtgggggtgttctcccacaagatccatttatgcccccaggatacatgatgccaggagttcctagggatctttctgaattggcagttaacgctatgggaataaacatgggcccgccagttatgagcagagaagaattcgatcccaggaaacctgaacataggaggagacgtgaaatggatcggttcaatgatagggaaagagagcgtgaccgttctcgagagcgagagcgagaacgggagcgggagcgttccttggagagggagagggagcgggagcgggagcgtggccgttctctggagagggagcgggagcgggttcgagagctggagcgttcccgcgagggtgaccgtgaacggcagcgaggcagggacagggacagggactcacgcagagaggccagagcatcaccaggggccattaatgatagttcctcgatgaggcggaatgataggtcgaggtcccagccggacaggtcggagcgtggcccgccgcagccgtccagccccgaccggcagtcgcgtcgctcctcctccggcaagaagcgttcctcctccgaccgctacgacgacatgccgctcccacctccccctccgctgcccgcgacgcggcacgaggccgagcccgccaaggcaccggggtcgtcgtccaagtccaaggccagcgtcttctcccgcatcagcttccccggagacggcgccaacccctccgacgccaagcgcagccgcagggcctccgacaagccccccgcgcgctcctcttcctcctccaagaagagcgccgcggcagagggcggggacggccgcggccaccgccaccaccgtgagcccgcggccgccgaggaggagaagcctaggcccgctgcctccggtggcgactactacggcggcacggacggagaggagagcgaggacgaggagcagcacttcaagcggcggccgtcctcgtcctcccggcgcgagcgcgagcaggacgcgccggaagagcagccgcgccactcgcgacggtccagggaccacaggcgccggtgagcgtcgccccgtccgtccgtgatatataaatcttagaagcttgagttgggaggtcgtcgcctccgcagatcagagccgtcctgcttccctgtcgcgtcggagttgggccctgtacattgccttcccgcgattatcatgttttgtttaaatcggatcggatcaaatggggattataataagtttgatttgatggatcatcttaatcgctgtttaa

SEQ ID NO: 10247 - DNA, 3924 bp, Zea Mays
aatgtatttgcatctagttggcgtgaggccaatgacctcatccgatccctttccctttcccatccgcgcgtccctactcctccccctccctcctcaacgacgcgagaagacgcaatcctgggagctccgaaccctagctcctaatttgagccccggtgtcatcgattcctcaggagcccgccgcgattcggctcccgtagcagcatagggctccaccgctccccagctgcatcagcatcgacggcggcggcgcgccgccgcgactacgctcgaggaagcacctagtctcggcgggttctcgttcttggaggccttccataaggcggtttcgtggtgtccgagcccggatctacggcgatctgcaagcggaaggcgatagatgaggcgattcagtggtaacccccaatccggtgggtttccggctggcagaggcggaaaggttcgggccttcggcgggtgatcagatttctccgtgcggcgcgcggcttgtgtctaccgcaacggtgtaggactggagcgcaggagccgacgaggcggtggagatacaaaaaaattgcttgcttgtacacttgttcatgttcatttgttcctgctatctgttgtggtttaaagcatcaattttccgctcaatttaagggcgaagacactttttttgttccttccttgttggtttctatggaataatctctatattacagaagaggagtgtggaaaagcaacaaaaaagaggaatataaaatacaaaaaagatataaccagcagaaaaaagagattttttttgagtgggcaagcaaatggctgtgtattacaagttcaagagtgctagagactttgactcgattccgattgaggggcaattcatctctgttgccaacttgaaggagcggatttttgagtccaagcatctcggcaggggcacagattttgaccttatgatctcaaatgctcagactgatgaagagtatgctgatgaggccactatgataccgaaaaatacgtcagtattgattcggcggataccaggacgaccaaggaagcctattgtcacagaacctgaagagacaaaagctgcagaagatggtgtacaagatgtcatgcccacatcgggtgcttttcttggtgattcatctatgaaatatcctgaagaatctgagtgggatgatgagtttggcaacgaattatatatttctgattcagttccttatcagcctgtttgccaggcggttgatgctattgaaaataaagttgacgaggatagtaaaataaaagcacttattgatacatctgcccttgactatagccaaatccctgatggttatggttctggaagaggctatggtagagggatgggtggaagaatgatggctggacgtggctttggacgtgggctagaacgcaggacacctcctccaggctatgtttgtcacagatgcaaagtacctggtcattttattcaacattgccccacaaatggggatgctagatatgatgtgaaaaggatgaaacccccaactggcattccaaaatcaatgctaatgcaaactccggatggttcatacgcactaccaagtggagctggtgctgttttgaagccaaatgaagctgcttttgagaaggagatagagggcctacctaccacacgtcctgttggtgatcttccaccagagctacgctgcccattgtgcaaagaagtaatgaaggatgctgttctaactagtaaatgctgctttaggagtttctgtgataaatgcatcagggactacataattaacaagtcaatgtgtgtctgtggtgccacaagcatattagctgatgatcttctccctaataaaactctaagagaaaccatcagtcgcatattagaggcaccaccaactagcagtacagaaaatgtgggaagcatggtgcaagtacaggacatggagtcagctctacctgtacaacctaagcataggtctcctgctgtttctgctgcttcaaaggaagaggctaaagcatccacacttgtagaagagtctccagatgctgagagcctcaatggaacaaaagctacaaatattgatgcgagttcttcggataagaaagctttgacagttccagatattgctgaagggaccttggattctaagaaagcgaaagaagataaaccagtagaagcaaccccagtggcaaaagattctcaagaaaagtttcctgcaggggaacaagcggtaaagaagaagaaaaagaagaagccacgtgttcctggaaatgctgaagagcaatggaaaaattttcaagattttggaactgaaaatttttcggggatgcccttgggtccaactggagcattcaacccttactggggcggaggagtgccattgccaatggattacatgaatgcaccgtttcctggtcccatgccttacatgggttatccaccaggtccatttgacccttttggtgggggtgttctcccacaagatccatttatgcccccaggatacatgatgccaggagttcctagggatctttctgaattggcagttaacgctatgggaataaacatgggcccgccagttatgagcagagaagaattcgatcccaggaaacctgaacataggaggagacgtgaaatggatcggttcaatgatagggaaagagagcgtgaccgttctcgagagcgagagcgagaacgggagcgggagcgttccttggagagggagagggagcgggagcgggagcgtggccgttctctggagagggagcgggagcgggttcgagagctggagcgttcccgcgagggtgaccgtgaacggcagcgaggcagggacagggacagggactcacgcagagaggccagagcatcaccaggggccattaatgatagttcctcgatgaggcggaatgatgtatgtcttttcctgtcaatctgttatcatgccaagttttgtactattatcggttccatgtggatcatcttcgccgccgtctccgccacagtagacagcttgatccagcggtttgctttgggttacaagcagcagtcaccagcggtagcatttgcccttgtgattgtgctttcctgggttttacaggatgccatcgctacggcggaaagatctttaggggatagtattagaatttttaagaggtcgaggtcccagccggacaggtcggagcgtggcccgccgcagccgtccagccccgaccggcagtcgcgtcgctcctcctccggcaagaagcgttcctcctccgaccgctacgacgacatgccgctcccacctccccctccgctgcccgcgacgcggcacgaggccgagcccgccaaggcaccggggtcgtcgtccaagtccaaggccagcgtcttctcccgcatcagcttccccggagacggcgccaacccctccgacgccaagcgcagccgcagggcctccgacaagccccccgcgcgctcctcttcctcctccaagaagagcgccgcggcagagggcggggacggccgcggccaccgccaccaccgtgagcccgcggccgccgaggaggagaagcctaggcccgctgcctccggtggcgactactacggcggcacggacggagaggagagcgaggacgaggagcagcacttcaagcggcggccgtcctcgtcctcccggcgcgagcgcgagcaggacgcgccggaagagcagccgcgccactcgcgacggtccagggaccacaggcgccggtgagcgtcgccccgtccgtccgtgatatataaatcttagaagcttgagttgggaggtcgtcgcctccgcagatcagagccgtcctgcttccctgtcgcgtcggagttgggccctgtacattgccttcccgcgattatcatgttttgtttaaatcggatcggatcaaatggggattataataagtttgatttgatggatcatcttaatcgctgtttaa

SEQ ID NO: 10248 - DNA, 1304 bp, Zea Mays
cgctgacactgtgcgcgaggaataaatggcgagaacgcgcgcgcagacgcgggacggagggagagcaggcagccttaaggccgaggcatccacgtttctggaggaccatgtcattctctggagtatccttcgttggaaacagctatctgccgccatcatctgcccctcccacacacgtctattccggcggctaccatctgctcgtggtcaatggctactcgcgcacaaagcaggacacccccaacggcagctgcctacggtcaaacccgttcaagatcggaggccatcgttggaccatcgagtgctaccctaacggctacgaacaggagaacagcgactacatatccttttatctcgttcttgacgatttcaacgtcgtcgagcctgtcgtggcgcagtatgcgtttagcttctttggccaggttcagccgtcagagtcatcgttgttgctcgccgccggtgcaaggggaccgtaccgtttctctagcacggacgcattcagcttcccctatttgatgaatagacagcagttcgagaaatcgaagcatctcagggacgacagtttcactatcaggtgtgacgtggccatcgtcaagaatgtcaacatcggggaagcggccgccgccaggcggttcgttaccgtgcctcctccttccattctgcaccacctcggcaatctcctcctgtcgcaggtgggcgccgacgtgacatttcaggtcggcggcgagaagttcatggcgcaccggtgcgtgtttgccgcccgctccgctgtcttcagggccgagctctttggctccatgaaggagggggcggcagacaccgtggtgcacatccatgacatggacgccaaggtattcaggctgttgctcggtttcatgtacaccgatcatgtgccggacattgaagaggaggaggaagaagaagaagagtatatgtggcaggacctgcttgtggctgcagatagatatgacatcccgaggcttcgactgatctgtgagtacatgatgtgctcatacatcgacacggatacggtggcagatatgcttgagcttgctgacaagcaccggtgcaatggactgaaggatgcatgcttggatttcctcaactctccgccaaatctgcagcaagtaatggcggctggcgacctagatgatctcgctatcagctgtcctgctgtccttatagaacttatcgccaagcttacgtcgtctcttaagcttgataaatgataatatggttgtaggttttagtttatgaaaaaaaatcattttttattttacattgagagatcattggattacgaa

SEQ ID NO: 10249 - DNA, 324 bp, Zea Mays
ctggccttccccgcgcgagccctctgatgtcaccctctcccgtcgaccatgatcggcgtcacacccgcgcgacctctcgagctcctacaagcccctctacgaagcatgagcgcgccaccgtcatgtgttgatgagtgaggactagggcgagggcaccagtggccaagtcctcaatgatggcagtgaccatggcgaggagtgtgaagcctagcaaatgtttgacaaatgcttctatgctctacctactttaggtcctcagttgaccatatcaaggttagtgtaatacccaaaaagtgtaaaaaagaatattagttgttttacatg

SEQ ID NO: 10250 - DNA, 1150 bp, Zea Mays
caaatagcatgagccccacaataactaccacttttccccactgccatggctacaaactctgtccgaacaccgccaatccatgccccatgccgatgagcccaagccccaagtcatcagtcccaaactggcacctctcaggtgagcaacgccagtccatgcccgcttcatgcgagcgcagcccaaagctgccggttcctgtgcctacaagcccagccctgagttgttgtccctaagcctccacggctccacctcccacctaactccgatgatctgtgtttgtgctgaaccaaggacgagttagatggacccgcaacagggatagataagaaagagatggccatcgtcaatccaactttagccatgtgaccacaaccaaaagcaatggtggccaagacatcctgagctaccgaatcaaacaccgggccagggctcgccaaccacggggacgctattcatgtttggtagcacaaatgacaatgatcctattagatttggaggtggtcctccttcagttggagatggccctaatgatttttgtttcaagcccttagatctgaaatcctcacactacactgctgaagcaatgaaggtttgttcttgtggaggctacacattgatcatcaatcttatcctgaggcaggttgtgcttggaacagttctggcagcattggtaccagttgttggttttaatgcagtaatgacatcagagcactttgcatcatttctggttgaggtgaagcggatgcttgcccgtgcgcaagacaagctgatgacccagctcacattggcgaggcacagtgcagacaagaagcgtgtcgtagcacaactgaaaaagaattgtgtagccgcaaggaccactaagcaggcagagcatcaggagatttggccaggtgccaccttcgtttagctgatggaactggtgctcatagggagatgagaataaacatggcatgcgagacccctctctgatgccttgtgttgtttcaatagaatttgatatgtccatttctaggggaaattgtttaaattctgtaaattctgtaataagacttaccgtagtcatgtcgtatttttaacagcgagagaaggtgacattaacgtttggattctgcagattttgtaataagactgacaacaaccatgtcttttt

SEQ ID NO: 10251 - DNA, 727 bp, Zea Mays
ctaccacttttccccactgccatggctacaaactctgtccgaacaccgccaatccatgccccatgccgatgagcccaagccccaagtcatcagtcccaaactggcacctctcaggtgagcaacgccagtccatgcccgcttcatgcgagcgcagcccaaagctgccggttcctgtgcctacaagcccagccctgagttgttgtccctaagcctccacggctccacctcccacctaactccgatgatctgtgtttgtgctgaaccaaggacgagttagatggacccgcaacagggatagataagaaagagatggccatcgtcaatccaactttagccatgtgaccacaaccaaaagcaatggtggccaagacatcctgagctaccgaatcaaacaccgaaagaagtgggaaatgggaattcaaggataccttatgcatagtgtaccgaaatgcatcaggtgagacaataaattcaaaatcatcatttctccctaatcgaacttcctgcagcagtcccaccacaaatataataactaatcaatgtaacatccagaaatataacatcaaaagcttatacttcatagtagagagtaacagaaggtagaagtagtctatccaaagaggaatgcaacaaacaagtgaaggctatgtgacctccattggaggcatttcattttccttctagactcatatttctaaaactatttttccactaaaaacattaagaa

SEQ ID NO: 10252 - DNA, 1379 bp, Zea Mays
cgtcacgggatgggcgcaggggcgaggctacgcacgatggcacgagcgagggtgatgttgagcgtgatggcaggagcgagttgcgcgcgagagcgaattggcggagcaggcgaggacgcaagggcgaggacgcgcctacgacctacgcaagagcgagctgtggacagtgctcgtgggctgtccagcgggcggtgcgcgggtgttgtgcagcgagcggtgcacagtggttgtgcgacgacgatagcgaagtctggttggggcactcgagcactcgcggtgccttatttctatttgattttgcgcaggttaccagtttatatgctccagaaccaggaggctcatgctgcagagggtcccactgaaataacaaatggatactcagatctgcaactttcctatgcggccttcactcgataatgtgatcatcaggcagtggcgctgagaggctccgggatctaccaccgccccgggatctaccaccgccctgagcagtcatcacattcttgtcaagatctggcttggcctttctctttgcttctgcaattacgccatccttgggaacaacagacaaaagcgttgggtttattaccttcgagcaatcatggaggacttgaaaggtaacataagctaagaatggttggacttgagacattcaagaaatgcaaggaggaacaacatactgcgtagaaaaattagtccagaattcctttctcaagtcgtctggatgcaacactaagaaacaagtgcaagctgccactaagtgcaaaagccattctggagctcacagccataaaaatgaataaccagtatgtatggcagcagccttgatgagcaactcaaaaggcgagatgattggtggaggcaacaagtatcgtcagtataattcaacgagattgaagcacacagcattatccacagcaccgccattgtttgtttgaatgaaatagctagcaaaatcgtatagaccaacatcacaaatgtgaacgacggggatcaatttttccttctctactattcattacaatagatgagctctttcttatctccaagaacatttttttgtaacacaatggcaggagctctggagcccagcatccgcgactttgtggggtagctcggtgccgccgccgctggggagcctactgctcccgagtcgcccgtggagctgccaccctcccccgccccagatcaggggctaccgccgtcgcgagagcgcaagctccgagggccggccctaccaccatcgcgggagatccaaccgagaaggtgcgaggagagcccactgtcgcgtcttgttggtgggccgccgttgcccggtatctcggtgccgctgccgctagggagcctgctgctctcaaggaatctgcccgtggagccgt

SEQ ID NO: 10253 - DNA, 1777 bp, Zea Mays
cgacaaacgagcgtgtggtggggaaaatgaatagagagtgagatagagagggtcggaggggtgggcagtgcgtcacgggatgggcgcaggggcgaggctacgcacgatggcacgagcgagggtgatgttgagcgtgatggcaggagcgagttgcgcgcgagagcgaattggcggagcaggcgaggacgcaagggcgaggacgcgcctacgacctacgcaagagcgagctgtggacagtgctcgtgggctgtccagcgggcggtgcgcgggtgttgtgcagcgagcggtgcacagtggttgtgcgacgacgatagcgaagtctggttggggcactcgagcactcgcggtgccttatttctatttgattttgcgcaggttaccaggtcttcctctatgatcagcgtcttgagaatgtcagcacttccatatcttggacatccctcttagtgtttgttgaaatgtctcttagaaaatgcttctccgaatattgcattacattggcatcattcaaatttcaaaggctttgaaaataaagaagtattggtctgtagactttgatttagtgtaatttcattcgtgggattctcttcgaacaaatatataggaaaatacatctctcaaacattctacaattgttttgtttgtatgtttagagtggaatgctaggataaaaatgtagatcatctgctactgatatgtgcattcgtttgctgaaatgaatgaatgaaaaaacttgttgtgattctccctctcataaataatttttttgtctctactctccgcatgcagtttatatgctccagaaccaggaggctcatgctgcagaggcagtggcgctgagaggctccgggatctaccaccgccccgggatctaccaccgccctgagcagtcatcacattcttgtcaagatctggcttggcctttctctttgcttctgcaattacgccatccttgggaacaacagacaaaagcgttgggtttattaccttcgagcaatcatggaggacttgaaaggtaacataagctaagaatggttggacttgagacattcaagaaatgcaaggaggaacaacatactgcgtagaaaaattagtccagaattcctttctcaagtcgtctggatgcaacactaagaaacaagtgcaagctgccactaagtgcaaaagccattctggagctcacagccataaaaatgaataaccagtatgtatggcagcagccttgatgagcaactcaaaaggcgagatgattggtggaggcaacaagtatcgtcagtataattcaacgagattgaagcacacagcattatccacagcaccgccattgtttgtttgaatgaaatagctagcaaaatcgtatagaccaacatcacaaatgtgaacgacggggatcaatttttccttctctactattcattacaatagatgagctctttcttatctccaagaacatttttttgtaacacaatggcaggagctctggagcccagcatccgcgactttgtggggtagctcggtgccgccgccgctggggagcctactgctcccgagtcgcccgtggagctgccaccctcccccgccccagatcaggggctaccgccgtcgcgagagcgcaagctccgagggccggccctaccaccatcgcgggagatccaaccgagaaggtgcgaggagagcccactgtcgcgtcttgttggtgggccgccgttgcccggtatctcggtgccgctgccgctagggagcctgctgctctcaaggaatctgcccgtggagccgt

SEQ ID NO: 10254 - DNA, 1461 bp, Zea Mays
cgacaaacgagcgtgtggtggggaaaatgaatagagagtgagatagagagggtcggaggggtgggcagtgcgtcacgggatgggcgcaggggcgaggctacgcacgatggcacgagcgagggtgatgttgagcgtgatggcaggagcgagttgcgcgcgagagcgaattggcggagcaggcgaggacgcaagggcgaggacgcgcctacgacctacgcaagagcgagctgtggacagtgctcgtgggctgtccagcgggcggtgcgcgggtgttgtgcagcgagcggtgcacagtggttgtgcgacgacgatagcgaagtctggttggggcactcgagcactcgcggtgccttatttctatttgattttgcgcagtttatatgctccagaaccaggaggctcatgctgcagagggtcccactgaaataacaaatggatactcagatctgcaactttcctatgcggccttcactcgataatgtgatcatttcatgccaatgcaatgcagcaggcagtggcgctgagaggctccgggatctaccaccgccccgggatctaccaccgccctgagcagtcatcacattcttgtcaagatctggcttggcctttctctttgcttctgcaattacgccatccttgggaacaacagacaaaagcgttgggtttattaccttcgagcaatcatggaggacttgaaaggtaacataagctaagaatggttggacttgagacattcaagaaatgcaaggaggaacaacatactgcgtagaaaaattagtccagaattcctttctcaagtcgtctggatgcaacactaagaaacaagtgcaagctgccactaagtgcaaaagccattctggagctcacagccataaaaatgaataaccagtatgtatggcagcagccttgatgagcaactcaaaaggcgagatgattggtggaggcaacaagtatcgtcagtataattcaacgagattgaagcacacagcattatccacagcaccgccattgtttgtttgaatgaaatagctagcaaaatcgtatagaccaacatcacaaatgtgaacgacggggatcaatttttccttctctactattcattacaatagatgagctctttcttatctccaagaacatttttttgtaacacaatggcaggagctctggagcccagcatccgcgactttgtggggtagctcggtgccgccgccgctggggagcctactgctcccgagtcgcccgtggagctgccaccctcccccgccccagatcaggggctaccgccgtcgcgagagcgcaagctccgagggccggccctaccaccatcgcgggagatccaaccgagaaggtgcgaggagagcccactgtcgcgtcttgttggtgggccgccgttgcccggtatctcggtgccgctgccgctagggagcctgctgctctcaaggaatctgcccgtggagccgt

SEQ ID NO: 10255 - DNA, 1855 bp, Zea Mays
cgacaaacgagcgtgtggtggggaaaatgaatagagagtgagatagagagggtcggaggggtgggcagtgcgtcacgggatgggcgcaggggcgaggctacgcacgatggcacgagcgagggtgatgttgagcgtgatggcaggagcgagttgcgcgcgagagcgaattggcggagcaggcgaggacgcaagggcgaggacgcgcctacgacctacgcaagagcgagctgtggacagtgctcgtgggctgtccagcgggcggtgcgcgggtgttgtgcagcgagcggtgcacagtggttgtgcgacgacgatagcgaagtctggttggggcactcgagcactcgcggtgccttatttctatttgattttgcgcaggttaccaggtcttcctctatgatcagcgtcttgagaatgtcagcacttccatatcttggacatccctcttagtgtttgttgaaatgtctcttagaaaatgcttctccgaatattgcattacattggcatcattcaaatttcaaaggctttgaaaataaagaagtattggtctgtagactttgatttagtgtaatttcattcgtgggattctcttcgaacaaatatataggaaaatacatctctcaaacattctacaattgttttgtttgtatgtttagagtggaatgctaggataaaaatgtagatcatctgctactgatatgtgcattcgtttgctgaaatgaatgaatgaaaaaacttgttgtgattctccctctcataaataatttttttgtctctactctccgcatgcagtttatatgctccagaaccaggaggctcatgctgcagagggtcccactgaaataacaaatggatactcagatctgcaactttcctatgcggccttcactcgataatgtgatcatcaggcagtggcgctgagaggctccgggatctaccaccgccccgggatctaccaccgccctgagcagtcatcacattcttgtcaagatctggcttggcctttctctttgcttctgcaattacgccatccttgggaacaacagacaaaagcgttgggtttattaccttcgagcaatcatggaggacttgaaaggtaacataagctaagaatggttggacttgagacattcaagaaatgcaaggaggaacaacatactgcgtagaaaaattagtccagaattcctttctcaagtcgtctggatgcaacactaagaaacaagtgcaagctgccactaagtgcaaaagccattctggagctcacagccataaaaatgaataaccagtatgtatggcagcagccttgatgagcaactcaaaaggcgagatgattggtggaggcaacaagtatcgtcagtataattcaacgagattgaagcacacagcattatccacagcaccgccattgtttgtttgaatgaaatagctagcaaaatcgtatagaccaacatcacaaatgtgaacgacggggatcaatttttccttctctactattcattacaatagatgagctctttcttatctccaagaacatttttttgtaacacaatggcaggagctctggagcccagcatccgcgactttgtggggtagctcggtgccgccgccgctggggagcctactgctcccgagtcgcccgtggagctgccaccctcccccgccccagatcaggggctaccgccgtcgcgagagcgcaagctccgagggccggccctaccaccatcgcgggagatccaaccgagaaggtgcgaggagagcccactgtcgcgtcttgttggtgggccgccgttgcccggtatctcggtgccgctgccgctagggagcctgctgctctcaaggaatctgcccgtggagccgt

SEQ ID NO: 10256 - DNA, 1800 bp, Zea Mays
cgacaaacgagcgtgtggtggggaaaatgaatagagagtgagatagagagggtcggaggggtgggcagtgcgtcacgggatgggcgcaggggcgaggctacgcacgatggcacgagcgagggtgatgttgagcgtgatggcaggagcgagttgcgcgcgagagcgaattggcggagcaggcgaggacgcaagggcgaggacgcgcctacgacctacgcaagagcgagctgtggacagtgctcgtgggctgtccagcgggcggtgcgcgggtgttgtgcagcgagcggtgcacagtggttgtgcgacgacgatagcgaagtctggttggggcactcgagcactcgcggtgccttatttctatttgattttgcgcaggttaccaggtcttcctctatgatcagcgtcttgagaatgtcagcacttccatatcttggacatccctcttagtgtttgttgaaatgtctcttagaaaatgcttctccgaatattgcattacattggcatcattcaaatttcaaaggctttgaaaataaagaagtattggtctgtagactttgatttagtgtaatttcattcgtgggattctcttcgaacaaatatataggaaaatacatctctcaaacattctacaattgttttgtttgtatgtttagagtggaatgctaggataaaaatgtagatcatctgctactgatatgtgcattcgtttgctgaaatgaatgaatgaaaaaacttgttgtgattctccctctcataaataatttttttgtctctactctccgcatgcagtttatatgctccagaaccaggaggctcatgctgcagagttcatgccaatgcaatgcagcaggcagtggcgctgagaggctccgggatctaccaccgccccgggatctaccaccgccctgagcagtcatcacattcttgtcaagatctggcttggcctttctctttgcttctgcaattacgccatccttgggaacaacagacaaaagcgttgggtttattaccttcgagcaatcatggaggacttgaaaggtaacataagctaagaatggttggacttgagacattcaagaaatgcaaggaggaacaacatactgcgtagaaaaattagtccagaattcctttctcaagtcgtctggatgcaacactaagaaacaagtgcaagctgccactaagtgcaaaagccattctggagctcacagccataaaaatgaataaccagtatgtatggcagcagccttgatgagcaactcaaaaggcgagatgattggtggaggcaacaagtatcgtcagtataattcaacgagattgaagcacacagcattatccacagcaccgccattgtttgtttgaatgaaatagctagcaaaatcgtatagaccaacatcacaaatgtgaacgacggggatcaatttttccttctctactattcattacaatagatgagctctttcttatctccaagaacatttttttgtaacacaatggcaggagctctggagcccagcatccgcgactttgtggggtagctcggtgccgccgccgctggggagcctactgctcccgagtcgcccgtggagctgccaccctcccccgccccagatcaggggctaccgccgtcgcgagagcgcaagctccgagggccggccctaccaccatcgcgggagatccaaccgagaaggtgcgaggagagcccactgtcgcgtcttgttggtgggccgccgttgcccggtatctcggtgccgctgccgctagggagcctgctgctctcaaggaatctgcccgtggagccgt

SEQ ID NO: 10257 - DNA, 1872 bp, Zea Mays
cgacaaacgagcgtgtggtggggaaaatgaatagagagtgagatagagagggtcggaggggtgggcagtgcgtcacgggatgggcgcaggggcgaggctacgcacgatggcacgagcgagggtgatgttgagcgtgatggcaggagcgagttgcgcgcgagagcgaattggcggagcaggcgaggacgcaagggcgaggacgcgcctacgacctacgcaagagcgagctgtggacagtgctcgtgggctgtccagcgggcggtgcgcgggtgttgtgcagcgagcggtgcacagtggttgtgcgacgacgatagcgaagtctggttggggcactcgagcactcgcggtgccttatttctatttgattttgcgcaggttaccaggtcttcctctatgatcagcgtcttgagaatgtcagcacttccatatcttggacatccctcttagtgtttgttgaaatgtctcttagaaaatgcttctccgaatattgcattacattggcatcattcaaatttcaaaggctttgaaaataaagaagtattggtctgtagactttgatttagtgtaatttcattcgtgggattctcttcgaacaaatatataggaaaatacatctctcaaacattctacaattgttttgtttgtatgtttagagtggaatgctaggataaaaatgtagatcatctgctactgatatgtgcattcgtttgctgaaatgaatgaatgaaaaaacttgttgtgattctccctctcataaataatttttttgtctctactctccgcatgcagtttatatgctccagaaccaggaggctcatgctgcagagggtcccactgaaataacaaatggatactcagatctgcaactttcctatgcggccttcactcgataatgtgatcatttcatgccaatgcaatgcagcaggcagtggcgctgagaggctccgggatctaccaccgccccgggatctaccaccgccctgagtcatcacattcttgtcaagatctggcttggcctttctctttgcttctgcaattacgccatccttgggaacaacagacaaaagcgttgggtttattaccttcgagcaatcatggaggacttgaaaggtaacataagctaagaatggttggacttgagacattcaagaaatgcaaggaggaacaacatactgcgtagaaaaattagtccagaattcctttctcaagtcgtctggatgcaacactaagaaacaagtgcaagctgccactaagtgcaaaagccattctggagctcacagccataaaaatgaataaccagtatgtatggcagcagccttgatgagcaactcaaaaggcgagatgattggtggaggcaacaagtatcgtcagtataattcaacgagattgaagcacacagcattatccacagcaccgccattgtttgtttgaatgaaatagctagcaaaatcgtatagaccaacatcacaaatgtgaacgacggggatcaatttttccttctctactattcattacaatagatgagctctttcttatctccaagaacatttttttgtaacacaatggcaggagctctggagcccagcatccgcgactttgtggggtagctcggtgccgccgccgctggggagcctactgctcccgagtcgcccgtggagctgccaccctcccccgccccagatcaggggctaccgccgtcgcgagagcgcaagctccgagggccggccctaccaccatcgcgggagatccaaccgagaaggtgcgaggagagcccactgtcgcgtcttgttggtgggccgccgttgcccggtatctcggtgccgctgccgctagggagcctgctgctctcaaggaatctgcccgtggagccgt

SEQ ID NO: 10258 - DNA, 1889 bp, Zea Mays
gcgagagttctatacgacaaacgagcgtgtggtggggaaaatgaatagagagtgagatagagagggtcggaggggtgggcagtgcgtcacgggatgggcgcaggggcgaggctacgcacgatggcacgagcgagggtgatgttgagcgtgatggcaggagcgagttgcgcgcgagagcgaattggcggagcaggcgaggacgcaagggcgaggacgcgcctacgacctacgcaagagcgagctgtggacagtgctcgtgggctgtccagcgggcggtgcgcgggtgttgtgcagcgagcggtgcacagtggttgtgcgacgacgatagcgaagtctggttggggcactcgagcactcgcggtgccttatttctatttgattttgcgcaggttaccaggtcttcctctatgatcagcgtcttgagaatgtcagcacttccatatcttggacatccctcttagtgtttgttgaaatgtctcttagaaaatgcttctccgaatattgcattacattggcatcattcaaatttcaaaggctttgaaaataaagaagtattggtctgtagactttgatttagtgtaatttcattcgtgggattctcttcgaacaaatatataggaaaatacatctctcaaacattctacaattgttttgtttgtatgtttagagtggaatgctaggataaaaatgtagatcatctgctactgatatgtgcattcgtttgctgaaatgaatgaatgaaaaaacttgttgtgattctccctctcataaataatttttttgtctctactctccgcatgcagtttatatgctccagaaccaggaggctcatgctgcagagggtcccactgaaataacaaatggatactcagatctgcaactttcctatgcggccttcactcgataatgtgatcatttcatgccaatgcaatgcagcaggcagtggcgctgagaggctccgggatctaccaccgccccgggatctaccaccgccctgagcagtcatcacattcttgtcaagatctggcttggcctttctctttgcttctgcaattacgccatccttgggaacaacagacaaaagcgttgggtttattaccttcgagcaatcatggaggacttgaaaggtaacataagctaagaatggttggacttgagacattcaagaaatgcaaggaggaacaacatactgcgtagaaaaattagtccagaattcctttctcaagtcgtctggatgcaacactaagaaacaagtgcaagctgccactaagtgcaaaagccattctggagctcacagccataaaaatgaataaccagtatgtatggcagcagccttgatgagcaactcaaaaggcgagatgattggtggaggcaacaagtatcgtcagtataattcaacgagattgaagcacacagcattatccacagcaccgccattgtttgtttgaatgaaatagctagcaaaatcgtatagaccaacatcacaaatgtgaacgacggggatcaatttttccttctctactattcattacaatagatgagctctttcttatctccaagaacatttttttgtaacacaatggcaggagctctggagcccagcatccgcgactttgtggggtagctcggtgccgccgccgctggggagcctactgctcccgagtcgcccgtggagctgccaccctcccccgccccagatcaggggctaccgccgtcgcgagagcgcaagctccgagggccggccctaccaccatcgcgggagatccaaccgagaaggtgcgaggagagcccactgtcgcgtcttgttggtgggccgccgttgcccggtatctcggtgccgctgccgctagggagcctgctgctctcaaggaatctgcccgtggagccgt

SEQ ID NO: 10259 - DNA, 1518 bp, Zea Mays
gcttagcccggcggccggccagaactgcaagagagaagaccaagaaacagagagagacaagcgcaggggacagcagcgggtagctagctagctagcgatcgacgacagacgatgcagatgatgatgctctctgatctctcgtctgacgaccacgaggccactggatccagctcctatggcggggacatggccagctacgccctcagccctctcttcctcgcaccggcggcctcggccaccgcgccgctgccgccacctccgcagccgccggccgaggagctcaccaacaagcaggccgcgggcggcggcaagaggaagagaagccagccggggaacccagaccccggcgcggaggtgatcgcgctgtcgccgcgcacgctggtggcgacgaaccggttcgtgtgcgagatctgcaacaaggggttccagcgggaccagaacctgcagctgcaccgccggggccacaacctcccctggaagctccgccagcgcagcagcctcgtcgtcccgtcgtcgtcggcggcggcaggctccggcggcaggcagcagcagcagcagggcgaggccgcgccgacgccgccgcgtaagcgcgtctacgtctgccccgagcccacgtgcgtgcaccacgacccggcgaggaaggacagcctgctcacgcacagggccttctgcgatgccctagcagaggagagcgcgaggcttcttgcagcagcagcaaacaacggcagcactatcaccacgaccagcagcagcaacaacaatgatcttctcaacgccagcaataatatcacgccattattcctcccgttcgccagctctcctcctcctgtcgtcgtagcggcggcacaaaaccctaataacaccctcttcttcctgcaccaagagctgtcccccttcctgcaaccgagggtgacgatgcaacaacaaccctcgccctatcttgacctccatatgcacgtcgacgccagcatcgtcaccaccaccggtggtctcgcggacggcacgccggtcagctttggcctcgctctggacggctcggtggccaccgtcggccaccggcgcctcactagggacttcctcggtgtcgatggtggcggtcgtcaggtcgaggagctgcagcttccactgtgcgccacagcagccgcagcaggtgccagccgcaccgccagctgcgccaccgacctgacaaggcagtgcctcggcggccggctgccgccggtcaacgagacctggagccacaacttctaggcccgctatatacttcaagctgcattgagactttgagagacgaatgaacggaacacccaaactgcatgcactctagcttgaagagcaaccaaaactggagtagcaagtatggtgcactactgttgttaatttaccttaatttattgatctctgttagttctattttcatttagggcaatgcgggctagctaattaattcgatgtgcacaacttttgatgaatggaccagaaagtttatcttgttgctttttttgtttgattatgtttcgc

SEQ ID NO: 10260 - DNA, 1973 bp, Zea Mays
gtttaatttatactctaataaacctcaacacacgtggattgcggtgaatactagagtatccaaataaggcctaaggggtattaaccccctcccccccaaaaaaaagtcctgggaatctatttactgatttcacttatataggtgtagtgttaggaaacattttagcgtcggaaaacaagattttgaagcaattaagtgattttgtattttgtgctctttgaggttgtggaaaacaagactcgaagtggttgaagtgattctgaccagacctactgcattatgttttgagcatatctggtcgtgtagtgggtttatggcagtagggattcagtgctatcgttttcactcattagcgcatttgattgtaaacaaatacatccttgaaagtgtttatgatacattctccggtgaacctcatcttcaggtgaggcaaagagaggggagattaactctcccagcaaatttataatcctgacatggtttcttgaacttttttattgtagctagatggaacaagatactggatgaagtaccaagaatcagattgttttgttctagaagactctactgaccaccttcacatgctataggcttcagaaaggttgatcctgacaggtgggagtttgcaaatgaaggtttcctcagaggtcaaaggcacctgctgaagatgataaagagaaggaagccaccatcagctgtggcaccattgcgacagcaacgtgcccctgcttcttgcctggaggttggtgagtttggatttgaggaggagattgataggctgaagcgtgacaagaacattttaatcacagaagtagtaaaactaaggcaggagcagcaaagtactaaagatcatgtgagagccatggaggaaaggctacgagtggctgaacagaagcaggtacagatgatggggttcttggcaagagcaatgcggaacccagagttcttccagcagttggcccagcagcaagacaagaggaaggagctcgaggataccatctcaaagaaaagaaggcggcccattgacaacacaccattctacagtgatggggaaagcgaacagcttgattcacagttgaaaatgttcgagtcaggtgttctcaatgggctcaatgaacctgagctggagaatttagcagtgaacattcaggagcttgggaagggaagcatagatgatgggaacttgactcaagttagtgaccagtcagagctgaacgacgacttctgggcagagcttttggtcgaagattttggagacaaggcaggacagccagagttggagggaagaactgaagacgtgaatgaccttgctcaacaactggggtatctgagttcttctagcccaaaatagagccagttcctaatggttgcccccacaatcactggtgctttccctaccctactgttgcagaccatcctgatcaaaccggaatgatgatggatctggcagacaagttgactggtggtggagaggtgttcatactgaaggcgtgctgtggagaggtcactgccttgacgttgaaggcttagcgctgtactctgctgtgggagttacgtgtggggtgttggctaaatgtctcttccggcgtcttctggcaaaatgatctcgtggacggtgactggcaaagatgcctaggggccaacgtatacgtacacagctgttatcagatcttgttcaaagtcattgcgcggttttgacggtgctatgtatcgatcagggttctggccttctggggttgggttgtagaattgactggctgatctagtgttctccatgtatgactggtgtaaccttaaaacaccctcagcttgttgttgaactgtgacaagcatctcgtttttttgttgtactccattttcatcatcattgtacatcaaattgctgaattatgaacagatccctaataatttggtggactgcgtcttggcatttggctacggcccagcttgcagtgtagttgatacatgctttt

SEQ ID NO: 10261 - DNA, 1947 bp, Zea Mays
gtttaatttatactctaataaacctcaacacacgtggattgcggtgaatactagagtatccaaataaggcctaaggggtattaaccccctcccccccaaaaaaaagtcctgggaatctatttactgatttcacttatataggtgtagtgttaggaaacattttagcgtcggaaaacaagattttgaagcaattaagtgattttgtattttgtgctctttgaggttgtggaaaacaagactcgaagtggttgaagtgattctgaccagacctactgcattatgttttgagcatatctggtcgtgtagtgggtttatggcagtagggattcagtgctatcgttttcactcattagcgcatttgattgtaaacaaatacatccttgaaagtgtttatgatacattctccggtgaacctcatcttcaggtgaggcaaagagaggggagattaactctcccagcaaatttataatcctgacatggtttcttgaacttttttattgtagctagatggaacaagatactggatgaagtaccaagaatcagattgttttgttctagaagactctactgaccaccttcacatgctataggcttcagaaaggttgatcctgacaggtgggagtttgcaaatgaaggtttcctcagaggtcaaaggcacctgctgaagatgataaagagaaggaagccaccatcagctgtggcaccattgcgacagcaacgtgcccctgcttcttgcctggaggttggtgagtttggatttgaggaggagattgataggctgaagcgtgacaagaacattttaatcacagaagtagtaaaactaaggcaggagcagcaaagtactaaagatcatgtgagagccatggaggaaaggctacgagtggctgaacagaagcaggtacagatgatggggttcttggcaagagcaatgcggaacccagagttcttccagcagttggcccagcagcaagacaagaggaaggagctcgaggataccatctcaaagaaaagaaggcggcccattgacaacacaccattctacagtgatggggaaagcgaacagcttgattcacagttgaaaatgttcgagtcaggtgttctcaatgggctcaatgaacctgagctggagaatttagcagtgaacattcaggagcttgggaagggaagcatagatgatgggaacttgactcaagttagtgaccagtcagagctgaacgacgacttctgggcagagcttttggtcgaagattttggagacaaggcaggacagccagagttggagggaagaactgaagacgtgaatgaccttgctcaacaactggggtatctgagttcttctagcccaaaatagagccagttcctaatggttgcccccacaatcactggtgctttccctaccctactgttgcagaccatcctgatcaaaccgttgactggtggtggagaggtgttcatactgaaggcgtgctgtggagaggtcactgccttgacgttgaaggcttagcgctgtactctgctgtgggagttacgtgtggggtgttggctaaatgtctcttccggcgtcttctggcaaaatgatctcgtggacggtgactggcaaagatgcctaggggccaacgtatacgtacacagctgttatcagatcttgttcaaagtcattgcgcggttttgacggtgctatgtatcgatcagggttctggccttctggggttgggttgtagaattgactggctgatctagtgttctccatgtatgactggtgtaaccttaaaacaccctcagcttgttgttgaactgtgacaagcatctcgtttttttgttgtactccattttcatcatcattgtacatcaaattgctgaattatgaacagatccctaataatttggtggactgcgtcttggcatttggctacggcccagcttgcagtgtagttgatacatgctttt

SEQ ID NO: 10262 - DNA, 1903 bp, Zea Mays
gtttaatttatactctaataaacctcaacacacgtggattgcggtgaatactagagtatccaaataaggcctaaggggtattaaccccctcccccccaaaaaaaagtcctgggaatctatttactgatttcacttatataggtgtagtgttaggaaacattttagcgtcggaaaacaagattttgaagcaattaagtgattttgtattttgtgctctttgaggttgtggaaaacaagactcgaagtggttgaagtgattctgaccagacctactgcattatgttttgagcatatctggtcgtgtagtgggtttatggcagtagggattcagtgctatcgttttcactcattagcgcatttgattgtaaacaaatacatccttgaaagtgtttatgatacattctccggtgaacctcatcttcaggtgaggcaaagagaggggagattaactctcccagcaaatttataatcctgacatggtttcttgaacttttttattgtagctagatggaacaagatactggatgaagtaccaagaatcagattgttttgttctagaagactctactgaccaccttcacatgctataggcttcagaaaggttgatcctgacaggtgggagtttgcaaatgaaggtttcctcagaggtcaaaggcacctgctgaagatgataaagagaaggaagccaccatcagctgtggcaccattgcgacagcaacgtgcccctgcttcttgcctggaggttggtgagtttggatttgaggaggagattgataggctgaagcgtgacaagaacattttaatcacagaagtagtaaaactaaggcaggagcagcaaagtactaaagatcatgtgagagccatggaggaaaggctacgagtggctgaacagaagcaggtacagatgatggggttcttggcaagagcaatgcggaacccagagttcttccagcagttggcccagcagcaagacaagaggaaggagctcgaggataccatctcaaagaaaagaaggcggcccattgacaacacaccattctacagtgatggggaaagcgaacagcttgattcacagttgaaaatgttcgagtcaggtgttctcaatgggctcaatgaacctgagctggagaatttagcagtgaacattcaggagcttgggaagggaagcatagatgatgggaacttgactcaagttagtgaccagtcagagctgaacgacgacttctgggcagagcttttggtcgaagattttggagacaaggcaggacagccagagttggagggaagaactgaagacgtgaatgaccttgctcaacaactggggtatctgagttcttctagcccaaaatagagccagttcctaatggttgcccccacaatcactgttgactggtggtggagaggtgttcatactgaaggcgtgctgtggagaggtcactgccttgacgttgaaggcttagcgctgtactctgctgtgggagttacgtgtggggtgttggctaaatgtctcttccggcgtcttctggcaaaatgatctcgtggacggtgactggcaaagatgcctaggggccaacgtatacgtacacagctgttatcagatcttgttcaaagtcattgcgcggttttgacggtgctatgtatcgatcagggttctggccttctggggttgggttgtagaattgactggctgatctagtgttctccatgtatgactggtgtaaccttaaaacaccctcagcttgttgttgaactgtgacaagcatctcgtttttttgttgtactccattttcatcatcattgtacatcaaattgctgaattatgaacagatccctaataatttggtggactgcgtcttggcatttggctacggcccagcttgcagtgtagttgatacatgctttt

SEQ ID NO: 10263 - DNA, 2177 bp, Zea Mays
gatcgtgctcttctcgcccgcccggtcttgtctctcctctccagaaccttccaacggcagagtgctcgccgcgtggtctagaaccttccacaagcctcgcgacgtgtctcgacgcgccggtacggcggtgggggtatttaggggtccggccaccggccaccgcccgcccttctcccgatttcaccgaccatttttccccatttcacagcgggcgaatatctctcatctcccccatcctctttcctgcaacaactcctacccacccgacagaaatatcctaagcgctgacccgaatacccgattcgctcctcgtccggtcgattcctgctcctaatcgctcgaatcgagtccttgccccgtgttccgtgccacaatctgggcgcttggctcccgcgagccggggttcttgggcctgggcggaggccatggacaagccggtggcgccgggcattatcaaggaggagctcctggagcagcagccgccgacgcaggacggtgtgggtggcggcggggatgcgccgcgcccgatggaggggctgcacgaggtgggtcccccgcctttcctcaccaagacgttcgaccttgtggaggacccggccaccgacgccgtcctctcctggagccgcgccggcaacagcttcatcgtctgggacccgcacgtcttcgccgacgggctgctcccgcgcctcttcaagcacagtaacttctccagcttcgtgcgccagctcaacacctatatggaacaagatactggatgaagtaccaagaatcagattgttttgttctagaagactctactgaccaccttcacatgctataggcttcagaaaggttgatcctgacaggtgggagtttgcaaatgaaggtttcctcagaggtcaaaggcacctgctgaagatgataaagagaaggaagccaccatcagctgtggcaccattgcgacagcaacgtgcccctgcttcttgcctggaggttggtgagtttggatttgaggaggagattgataggctgaagcgtgacaagaacattttaatcacagaagtagtaaaactaaggcaggagcagcaaagtactaaagatcatgtgagagccatggaggaaaggctacgagtggctgaacagaagcaggtacagatgatggggttcttggcaagagcaatgcggaacccagagttcttccagcagttggcccagcagcaagacaagaggaaggagctcgaggataccatctcaaagaaaagaaggcggcccattgacaacacaccattctacagtgatggggaaagcgaacagcttgattcacagttgaaaatgttcgagtcaggtgttctcaatgggctcaatgaacctgagctggagaatttagcagtgaacattcaggagcttgggaagggaagcatagatgatgggaacttgactcaagttagtgaccagtcagagctgaacgacgacttctgggcagagcttttggtcgaagattttggagacaaggcaggacagccagagttggagggaagaactgaagacgtgaatgaccttgctcaacaactggggtatctgagttcttctagcccaaaatagagccagttcctaatggttgcccccacaatcactggtgctttccctaccctactgttgcagaccatcctgatcaaaccgttgactggtggtggagaggtgttcatactgaaggcgtgctgtggagaggtcactgccttgacgttgaaggcttagcgctgtactctgctgtgggagttacgtgtggggtgttggctaaatgtctcttccggcgtcttctggcaaaatgatctcgtggacggtgactggcaaagatgcctaggggccaacgtatacgtacacagctgttatcagatcttgttcaaagtcattgcgcggttttgacggtgctatgtatcgatcagggttctggccttctggggttgggttgtagaattgactggctgatctagtgttctccatgtatgactggtgtaaccttaaaacaccctcagcttgttgttgaactgtgacaagcatctcgtttttttgttgtactccattttcatcatcattgtacatcaaattgctgaattatgaacagatccctaataatttggtggactgcgtcttggcatttggctacggcccagcttgcagtgtagttgatacatgctttt

SEQ ID NO: 10264 - DNA, 3088 bp, Zea Mays
gtcgtgggcctccgctctcgcctagtagtccaccacgcggccacttgcaccgccgtgaatcgtgatcgtgctcttctcgcccgcccggtcttgtctctcctctccagaaccttccaacggcagagtgctcgccgcgtggtctagaaccttccacaagcctcgcgacgtgtctcgacgcgccggtacggcggtgggggtatttaggggtccggccaccggccaccgcccgcccttctcccgatttcaccgaccatttttccccatttcacagcgggcgaatatctctcatctcccccatcctctttcctgcaacaactcctacccacccgacagaaatatcctaagcgctgacccgaatacccgattcgctcctcgtccggtcgattcctgctcctaatcgctcgaatcgagtccttgccccgtgttccgtgccacaatctgggcgcttggctcccgcgagccggggttcttgggcctgggcggaggccatggacaagccggtggcgccgggcattatcaaggaggagctcctggagcagcagccgccgacgcaggacggtgtgggtggcggcggggatgcgccgcgcccgatggaggggctgcacgaggtgggtcccccgcctttcctcaccaagacgttcgaccttgtggaggacccggccaccgacgccgtcctctcctggagccgcgccggcaacagcttcatcgtctgggacccgcacgtcttcgccgacgggctgctcccgcgcctcttcaagcacagtaacttctccagcttcgtgcgccagctcaacacctatgtgagtcggcaaaacccaaaccccccttcttcctttcctttgaaataatccttctcttggtcagggcttgctaatggtaatttgcgtttggttgcaattgcaagctgctttattcggcggagagcatccgaatcctctgcaatattacttgtatattaaactagtttgcaatgttaggacaggaaaatctgttgtgcacttgttcttcactaaagttttaggtgatgtaacactgttgtgaggcattgttgtgatttggtgcattttttattgttgattttaggcagctggttccccaatgagatcgaggatgcctggctaagatatgaagagacatagggctggtttggtgacaaaggaattgaaggggatctataggaagaaaatcccttgctttactttgtcaccaaatcagccctttgccttgtttggatactctagtattccccctaattcacatgtgttgagatatattggggtgtaaattagtttaatttatactctaataaacctcaacacacgtggattgcggtgaatactagagtatccaaataaggcctaaggggtattaaccccctcccccccaaaaaaaagtcctgggaatctatttactgatttcacttatataggtgtagtgttaggaaacattttagcgtcggaaaacaagattttgaagcaattaagtgattttgtattttgtgctctttgaggttgtggaaaacaagactcgaagtggttgaagtgattctgaccagacctactgcattatgttttgagcatatctggtcgtgtagtgggtttatggcagtagggattcagtgctatcgttttcactcattagcgcatttgattgtaaacaaatacatccttgaaagtgtttatgatacattctccggtgaacctcatcttcaggtgaggcaaagagaggggagattaactctcccagcaaatttataatcctgacatggtttcttgaacttttttattgtagctagatggaacaagatactggatgaagtaccaagaatcagattgttttgttctagaagactctactgaccaccttcacatgctataggcttcagaaaggttgatcctgacaggtgggagtttgcaaatgaaggtttcctcagaggtcaaaggcacctgctgaagatgataaagagaaggaagccaccatcagctgtggcaccattgcgacagcaacgtgcccctgcttcttgcctggagaagtagtaaaactaaggcaggagcagcaaagtactaaagatcatgtgagagccatggaggaaaggctacgagtggctgaacagaagcaggtacagatgatggggttcttggcaagagcaatgcggaacccagagttcttccagcagttggcccagcagcaagacaagaggaaggagctcgaggataccatctcaaagaaaagaaggcggcccattgacaacacaccattctacagtgatggggaaagcgaacagcttgattcacagttgaaaatgttcgagtcaggtgttctcaatgggctcaatgaacctgagctggagaatttagcagtgaacattcaggagcttgggaagggaagcatagatgatgggaacttgactcaagttagtgaccagtcagagctgaacgacgacttctgggcagagcttttggtcgaagattttggagacaaggcaggacagccagagttggagggaagaactgaagacgtgaatgaccttgctcaacaactggggaatgatgatggatctggcagacaagttgactggtggtggagaggtgttcatactgaaggcgtgctgtggagaggtcactgccttgacgttgaaggcttagcgctgtactctgctgtgggagttacgtgtggggtgttggctaaatgtctcttccggcgtcttctggcaaaatgatctcgtggacggtgactggcaaagatgcctaggggccaacgtatacgtacacagctgttatcagatcttgttcaaagtcattgcgcggttttgacggtgctatgtatcgatcagggttctggccttctggggttgggttgtagaattgactggctgatctagtgttctccatgtatgactggtgtaaccttaaaacaccctcagcttgttgttgaactgtgacaagcatctcgtttttttgttgtactccattttcatcatcattgtacatcaaattgctgaattatgaacagatccctaataatttggtggactgcgtcttggcatttggctacggcccagcttgcagtgtagttgatacatgctttt

SEQ ID NO: 10265 - DNA, 1181 bp, Zea Mays
aaagggaaaatacgccttgccagctccgagacctcgcctagcaacggtccggccgcttccgttccatccgaggctagcgatggacggcgaacatttgacatgtcccagccgtgtcctcgcctccttgggacgagcccacagcccagcgacgtgcgcgcgtgcgtcacggtaggccggagaagggggagaaccataaggtagaagatgagtgagctagcgagatgctcggccgcgcggctgctgctgctgcttcccgtagtcttcctagtcctagctctgctcggcggcgcccgccacgcagggggcgcctcggtctgcgacacggccaactgcggcaagggaaactgcagcgagacgccggctccggcccttcttcctcccggctacgagtgcaactgcgaccctggctggtcccatgttttggagctcattcccttctcaccctgcatcgtccccaactgttccttcgacagcgcctgcttgaagttaaacctcagccagacgccagcgccacccacggatgtctgcgccgtcgtgagctgcggagctggcggcgcgtgcaaggcgggcgccgccccgttcagctacagctgcgagtgccggccgggctacgccaacctgctcaacctcaccgcgctcccctgcgtcaactgtttcctcggcagcgagtgctacgacctgggactcggccccccgccgcccgcgccggcgccgcttccggctccagctccatccggtgaccatggcccggcggggccatcacctcctccctccggcacaaaaggctctgtttcgacgccgagtcctgtgcagctgctactgctactgctggtctccgttgctacggttcaggtcgtgtgatcacgctacgtcccccgaaggtgcggcggccggtgcagggcaagcctgcatttccccacgaattttgctgccaaacagaagatcaaccaactgtgcgtcgtcacccttttctccgtcattaacagaagcaacagaaaattgtaataccagaatttatgtaaagttgcggtgctagctatttttatatatacagtacaaataaattctaaagtacttcctccgtgttgtcgaggttaaaaacattcatacgtaggatgatgaatatagacatatatacaaactacattcataagttcattaatgaatgtatatttaatttt

SEQ ID NO: 10266 - DNA, 2596 bp, Zea Mays
tactgcacgcatcaaatcggcaaatctcatttaccaggcaccggcgcccaagtggaaaaccctcaagaaccggaggctacaaaactggggaggagtggtgcatgagaaggggctcctgccgcaggcctgtgagtgtgctcataaaagcttgcaaattttagcttggttttgtgaatcaaactgaagatcaggcatagcgttgcataactgaagtttggcccgtaatctaattttggttccaatgtgcttggtttcaaatgtcttatcttgtgaaaattcaagttcaaattcaaagagtagtaggtatgcttgaagaataaaattttcctacaatgtgattgccagtagaactgtgggaagctcaccaagtagttggcacttttactggataggataactaacactattgagttgctgcttcaacagcagatgccacttggttattaggaagatgtgttgtaatttttgtacaaatcacaagtcccacatgatgatcatcataaaccagttattaatatcatgatggcagcttcatggattggtggttatgagccatcagccaagttagtggtgtagctaagcaggggctgaattccctaattatccttggagcctggactctatggaagcactaaaataactgtatttttgataggcaggctccaaacctgaatgtgactcaaaaaagctaatcaagagaaggatgtttgggggctagtaggggctatggagctatccttcgaactacccctattctcggtctttagttgagtttagatggttgatctgttttttatctagattcatggatccttttgtgtattggtgtttttggccaccagaaggtggctgtgttagttagtaatctttggtttgtctagcttagactcttccttttctcttaatataatgatgtatagttctcctacgtgttcgagaaaaaatagcttgtctagcttacttgttagcttaagctttcatagcaagtaacactctcaagggcttcatcttgtgaaccatcatagctgtcttccgcttgttttagaaaaattgaggcacttcgaggttgagattattagttatcaccttgcttgtcttgtatccagctttaagtgcctcagaacatgaagcttacccaaaggtcttcataatgattaggaagtcagtcaaggctggatgtttgttcgaatattggatagggattcagagaggtttactcccttcaagttagaaaaacaaagaatggtatgtttttgtggtatttttgggtcagtctaggataaagtatttatgatccttctttaattgtttcagttagcagattgtaacattgagaacactattacttgtttttctaccttctgaaaatactgaatctagcacaacagagagattgattttttgagtgcctgctatgccatgatcttattgtaattgatgtctgtaccgaacgcaacagtgatacatttcttgtttggtggctaacatgcctactagttgcatttcagtatgcgtgcttttatacactatactcaagtacatatcaaatttagcatcaaattgagcttcacagcatgtactgctgcagtgccttcatggctaacaaggataaccgacagaatctgccagtggactggtttatttccttctgcaatcaatcacgtgctgataaatgagtatcatcctaaccaagggatcatgccacaccaagatggtcctgcctactaccctgtcgttgctatcatatctcttgcttcacctgtcgtgattaatttcacaccccatcaaaagcttaaagagcagcaggacactgatccacaggacttactggcccatgagttgccttcgccagctgagacagagaacaacggctctggatcacaagaacgtggagccacaaatgaatctgatccttcatcttcatcacttatgctgatgccgtgcagcctgttgatatttaaggatcaggcttatacagactacttgcatggcatacaagatagtgagctacataatctggacaaggtggagaatgtgtctcagtgccaagaactgaagcatctacattcggactctatcctagggggcatgagcatggaagagcatgacacgttccgcaggtccgccacaagagtctcgcttacgtgtcggttggtgctgaaagtccacaaaaagctattcaaaatctagaaattctgattatagcttgtgatttagaatagggctgccattattctttgtaagatatatataggtgttgtgggagttgtttggccagcatggtgtccacaaaacaaaaaaacattttctggtcaaggatcccaaagagctgttgagcccagtttcttagaaatcgaccaggaagcatgggaaaggaacaataaaccattggttatgatgttcgagtaggagatgatgctgttttccgtgcaattcgggttttttcattcgtattcggactgtgtgcagctgcctttcggactctgaaacgggcggctggcaaaccgagtggaagggtctgtatggttttatatctaagggtcagtttgagaaccccattattctagggaacctcgaatccttttcgagattggag

SEQ ID NO: 10267 - DNA, 2438 bp, Zea Mays
ccctcaagtaacctcgaactgcatccgccagcaccagcaacagcaatggagcacacgacgacccaacacacggcagccgccggggagcaggagagcccccccacggcgttggccttgagaagcctcgccgactacaccgtcggggccatccccaccctattctatgtccccgacttcatctcccactccgagcaatcacagctcctccaccatatttaccaggcaccggcgcccaagtggaaaaccctcaagaaccggaggctacaaaactggggaggagtggtgcatgagaaggggctcctgccgcaggcctgtgagtgtgctcataaaagcttgcaaattttagcttggttttgtgaatcaaactgaagatcaggcatagcgttgcataactgaagtttggcccgtaatctaattttggttccaatgtgcttggtttcaaatgtcttatcttgtgaaaattcaagttcaaattcaaagagtagtaggtatgcttgaagaataaaattttcctacaatgtgattgccagtagaactgtgggaagctcaccaagtagttggcacttttactggataggataactaacactattgagttgctgcttcaacagcagatgccacttggttattaggaagatgtgttgtaatttttgtacaaatcacaagtcccacatgatgatcatcataaaccagttattaatatcatgatggcagcttcatggattggtggttatgagccatcagccaagttagtggtgtagctaagcaggggctgaattccctaattatccttggagcctggactctatggaagcactaaaataactgtatttttgataggcaggctccaaacctgaatgtgactcaaaaaagctaatcaagagaaggatgtttgggggctagtaggggctatggagctatccttcgaactacccctattctcggtctttagttgagtttagatggttgatctgttttttatctagattcatggatccttttgtgtattggtgtttttggccaccagaaggtggctgtgttagttagtaatctttggtttgtctagcttagactcttccttttctcttaatataatgatgtatagttctcctacgtgttcgagaaaaaatagcttgtctagcttacttgttagcttaagctttcatagcaagtaacactctcaagggcttcatcttgtgaaccatcatagctgtcttccgcttgttttagaaaaattgaggcacttcgaggttgagattattagttatcaccttgcttgtcttgtatccagctttaagtgcctcagaacatgaagcttacccaaaggtcttcataatgattaggaagtcagtcaaggctggatgtttgttcgaatattggatagggattcagagaggtttactcccttcaagttagaaaaacaaagaatgtgccttcatggctaacaaggataaccgacagaatctgccagtggactggtttatttccttctgcaatcaatcacgtgctgataaatgagtatcatcctaaccaagggatcatgccacaccaagatggtcctgcctactaccctgtcgttgctatcatatctcttgcttcacctgtcgtgattaatttcacaccccatcaaaagcttaaagagcagcaggacactgatccacaggacttactggcccatgagttgccttcgccagctgagacagagaacaacggctctggatcacaagaacgtggagccacaaatgaatctgatccttcatcttcatcacttatgctgatgccgtgcagcctgttgatatttaaggatcaggcttatacagactacttgcatggcatacaagatagtgagctacataatctggacaaggtggagaatgtgtctcagtgccaagaactgaagcatctacattcggactctatcctagggggcatgagcatggaagagcatgacacgttccgcaggtccgccacaagagtctcgcttacgtgtcggttggtgctgaaagtccacaaaaagctattcaaaatctagaaattctgattatagcttgtgatttagaatagggctgccattattctttgtaagatatatataggtgttgtgggagttgtttggccagcatggtgtccacaaaacaaaaaaacattttctggtcaaggatcccaaagagctgttgagcccagtttcttagaaatcgaccaggaagcatgggaaaggaacaataaaccattggttatgatgttcgagtaggagatgatgctgttttccgtgcaattcgggttttttcattcgtattcggactgtgtgcagctgcctttcggactctgaaacgggcggctggcaaaccgagtggaagggtctgtatggttttatatctaagggtcagtttgagaaccccattattctagggaacctcgaatccttttcgagattggag

SEQ ID NO: 10268 - DNA, 2015 bp, Zea Mays
ccctcaagtaacctcgaactgcatccgccagcaccagcaacagcaatggagcacacgacgacccaacacacggcagccgccggggagcaggagagcccccccacggcgttggccttgagaagcctcgccgactacaccgtcggggccatccccaccctattctatgtccccgacttcatctcccactccgagcaatcacagctcctccaccatatttaccaggcaccggcgcccaagtggaaaaccctcaagaaccggaggctacaaaactggggtactctttgtcttcttcgcacttggtggttttggcttggagattgctttagcttcctcctttccttgacacggtgtcggattgagcaggaggagtggtgcatgagaaggggctcctgccgcaggcctgtgagtgtgctcataaaagcttgcaaattttagcttggttttgtgaatcaaactgaagatcaggcatagcgttgcataactgaagtttggcccgtaatctaattttggttccaatgtgcttggtttcaaatgtcttatcttgtgaaaattcaagttcaaattcaaagagtagtaggaagtcagtcaaggctggatgtttgttcgaatattggatagggattcagagaggtttactcccttcaagttagaaaaacaaagaatggtatgtttttgtggtatttttgggtcagtctaggataaagtatttatgatccttctttaattgtttcagttagcagattgtaacattgagaacactattacttgtttttctaccttctgaaaatactgaatctagcacaacagagagattgattttttgagtgcctgctatgccatgatcttattgtaattgatgtctgtaccgaacgcaacagtgatacatttcttgtttggtggctaacatgcctactagttgcatttcagtatgcgtgcttttatacactatactcaagtacatatcaaatttagcatcaaattgagcttcacagcatgtactgctgcagtgccttcatggctaacaaggataaccgacagaatctgccagtggactggtttatttccttctgcaatcaatcacgtgctgataaatgagtatcatcctaaccaagggatcatgccacaccaagatggtcctgcctactaccctgtcgttgctatcatatctcttgcttcacctgtcgtgattaatttcacaccccatcaaaagcttaaagagcagcaggacactgatccacaggacttactggcccatgagttgccttcgccagctgagacagagaacaacggctctggatcacaagaacgtggagccacaaatgaatctgatccttcatcttcatcacttatgctgatgccgtgcagcctgttgatatttaaggatcaggcttatacagactacttgcatggcatacaagatagtgagctacataatctggacaaggtggagaatgtgtctcagtgccaagaactgaagcatctacattcggactctatcctagggggcatgagcatggaagagcatgacacgttccgcaggtccgccacaagagtctcgcttacgtgtcggttggtgctgaaagtccacaaaaagctattcaaaatctagaaattctgattatagcttgtgatttagaatagggctgccattattctttgtaagatatatataggtgttgtgggagttgtttggccagcatggtgtccacaaaacaaaaaaacattttctggtcaaggatcccaaagagctgttgagcccagtttcttagaaatcgaccaggaagcatgggaaaggaacaataaaccattggttatgatgttcgagtaggagatgatgctgttttccgtgcaattcgggttttttcattcgtattcggactgtgtgcagctgcctttcggactctgaaacgggcggctggcaaaccgagtggaagggtctgtatggttttatatctaagggtcagtttgagaaccccattattctagggaacctcgaatccttttcgagattggag

SEQ ID NO: 10269 - DNA, 1803 bp, Zea Mays
ccctcaagtaacctcgaactgcatccgccagcaccagcaacagcaatggagcacacgacgacccaacacacggcagccgccggggagcaggagagcccccccacggcgttggccttgagaagcctcgccgactacaccgtcggggccatccccaccctattctatgtccccgacttcatctcccactccgagcaatcacagctcctccaccatatttaccaggcaccggcgcccaagtggaaaaccctcaagaaccggaggctacaaaactggggaggagtggtgcatgagaaggggctcctgccgcaggcctctttaagtgcctcagaacatgaagcttacccaaaggtcttcataatgattaggaagtcagtcaaggctggatgtttgttcgaatattggatagggattcagagaggtttactcccttcaagttagaaaaacaaagaatggtatgtttttgtggtatttttgggtcagtctaggataaagtatttatgatccttctttaattgtttcagttagcagattgtaacattgagaacactattacttgtttttctaccttctgaaaatactgaatctagcacaacagagagattgattttttgagtgcctgctatgccatgatcttattgtaattgatgtctgtaccgaacgcaacagtgatacatttcttgtttggtggctaacatgcctactagttgcatttcagtatgcgtgcttttatacactatactcaagtacatatcaaatttagcatcaaattgagcttcacagcatgtactgctgcagtgccttcatggctaacaaggataaccgacagaatctgccagtggactggtttatttccttctgcaatcaatcacgtgctgataaatgagtatcatcctaaccaagggatcatgccacaccaagatggtcctgcctactaccctgtcgttgctatcatatctcttgcttcacctgtcgtgattaatttcacaccccatcaaaagcttaaagagcagcaggacactgatccacaggacttactggcccatgagttgccttcgccagctgagacagagaacaacggctctggatcacaagaacgtggagccacaaatgaatctgatccttcatcttcatcacttatgctgatgccgtgcagcctgttgatatttaaggatcaggcttatacagactacttgcatggcatacaagatagtgagctacataatctggacaaggtggagaatgtgtctcagtgccaagaactgaagcatctacattcggactctatcctagggggcatgagcatggaagagcatgacacgttccgcaggtccgccacaagagtctcgcttacgtgtcggttggtgctgaaagtccacaaaaagctattcaaaatctagaaattctgattatagcttgtgatttagaatagggctgccattattctttgtaagatatatataggtgttgtgggagttgtttggccagcatggtgtccacaaaacaaaaaaacattttctggtcaaggatcccaaagagctgttgagcccagtttcttagaaatcgaccaggaagcatgggaaaggaacaataaaccattggttatgatgttcgagtaggagatgatgctgttttccgtgcaattcgggttttttcattcgtattcggactgtgtgcagctgcctttcggactctgaaacgggcggctggcaaaccgagtggaagggtctgtatggttttatatctaagggtcagtttgagaaccccattattctagggaacctcgaatccttttcgagattggag

SEQ ID NO: 10270 - DNA, 1422 bp, Zea Mays
ccctcaagtaacctcgaactgcatccgccagcaccagcaacagcaatggagcacacgacgacccaacacacggcagccgccggggagcaggagagcccccccacggcgttggccttgagaagcctcgccgactacaccgtcggggccatccccaccctattctatgtccccgacttcatctcccactccgagcaatcacagctcctccaccatatttaccaggcaccggcgcccaagtggaaaaccctcaagaaccggaggctacaaaactggggaggagtggtgcatgagaaggggctcctgccgcaggcctcatgtactgctgcagtgccttcatggctaacaaggataaccgacagaatctgccagtggactggtttatttccttctgcaatcaatcacgtgctgataaatgagtatcatcctaaccaagggatcatggtttgcaatcgacagacctctattgtttgttcctctgtttacatattaagcatcacccttacaaacaatgactttgtgccttccagccacaccaagatggtcctgcctactaccctgtcgttgctatcatatctcttgcttcacctgtcgtgattaatttcacaccccatcaaaagcttaaagagcagcaggacactgatccacaggacttactggcccatgagttgccttcgccagctgagacagagaacaacggctctggatcacaagaacgtggagccacaaatgaatctgatccttcatcttcatcacttatgctgatgccgtgcagcctgttgatatttaaggatcaggcttatacagactacttgcatggcatacaagatagtgagctacataatctggacaaggtggagaatgtgtctcagtgccaagaactgaagcatctacattcggactctatcctagggggcatgagcatggaagagcatgacacgttccgcaggtccgccacaagagtctcgcttacgtgtcggttggtgctgaaagtccacaaaaagctattcaaaatctagaaattctgattatagcttgtgatttagaatagggctgccattattctttgtaagatatatataggtgttgtgggagttgtttggccagcatggtgtccacaaaacaaaaaaacattttctggtcaaggatcccaaagagctgttgagcccagtttcttagaaatcgaccaggaagcatgggaaaggaacaataaaccattggttatgatgttcgagtaggagatgatgctgttttccgtgcaattcgggttttttcattcgtattcggactgtgtgcagctgcctttcggactctgaaacgggcggctggcaaaccgagtggaagggtctgtatggttttatatctaagggtcagtttgagaaccccattattctagggaacctcgaatccttttcgagattggag

SEQ ID NO: 10271 - DNA, 1762 bp, Zea Mays
cacacgacgacccctcaagtaacctcgaactgcatccgccagcaccagcaacagcaatggagcacacgacgacccaacacacggcagccgccggggagcaggagagcccccccacggcgttggccttgagaagcctcgccgactacaccgtcggggccatccccaccctattctatgtccccgacttcatctcccactccgagcaatcacagctcctccaccatatttaccaggcaccggcgcccaagtggaaaaccctcaagaaccggaggctacaaaactggggaggagtggtgcatgagaaggggctcctgccgcaggcctgaagtcagtcaaggctggatgtttgttcgaatattggatagggattcagagaggtttactcccttcaagttagaaaaacaaagaatggtatgtttttgtggtatttttgggtcagtctaggataaagtatttatgatccttctttaattgtttcagttagcagattgtaacattgagaacactattacttgtttttctaccttctgaaaatactgaatctagcacaacagagagattgattttttgagtgcctgctatgccatgatcttattgtaattgatgtctgtaccgaacgcaacagtgatacatttcttgtttggtggctaacatgcctactagttgcatttcagtatgcgtgcttttatacactatactcaagtacatatcaaatttagcatcaaattgagcttcacagcatgtactgctgcagtgccttcatggctaacaaggataaccgacagaatctgccagtggactggtttatttccttctgcaatcaatcacgtgctgataaatgagtatcatcctaaccaagggatcatgccacaccaagatggtcctgcctactaccctgtcgttgctatcatatctcttgcttcacctgtcgtgattaatttcacaccccatcaaaagcttaaagagcagcaggacactgatccacaggacttactggcccatgagttgccttcgccagctgagacagagaacaacggctctggatcacaagaacgtggagccacaaatgaatctgatccttcatcttcatcacttatgctgatgccgtgcagcctgttgatatttaaggatcaggcttatacagactacttgcatggcatacaagatagtgagctacataatctggacaaggtggagaatgtgtctcagtgccaagaactgaagcatctacattcggactctatcctagggggcatgagcatggaagagcatgacacgttccgcaggtccgccacaagagtctcgcttacgtgtcggttggtgctgaaagtccacaaaaagctattcaaaatctagaaattctgattatagcttgtgatttagaatagggctgccattattctttgtaagatatatataggtgttgtgggagttgtttggccagcatggtgtccacaaaacaaaaaaacattttctggtcaaggatcccaaagagctgttgagcccagtttcttagaaatcgaccaggaagcatgggaaaggaacaataaaccattggttatgatgttcgagtaggagatgatgctgttttccgtgcaattcgggttttttcattcgtattcggactgtgtgcagctgcctttcggactctgaaacgggcggctggcaaaccgagtggaagggtctgtatggttttatatctaagggtcagtttgagaaccccattattctagggaacctcgaatccttttcgagattggag

SEQ ID NO: 10272 - DNA, 3075 bp, Zea Mays
  misc_feature (1)..(2): n is a, c, g, or t
nnaggattcgaagaatgaacttcaaagtgaaatacaaagccttaaaagcatcatttcacagctaaacactgagaagaatgcagctgtgcttcaacaccagcagtctgtggagctggtttcggtactcgaatctcagctgtcaaagctacagtcagagctagatgagactgagcagagagtacagttgctaacacaagatcttgaaaagaagaaagaagaagcagataatgtccatctcaagctgcaagatgaatgccataggcgtatgcaaattgaagcagctcttctcatgacagagggtctgcattcccagttgcaagaaaaaatgcaaatgttgacacaagattttgatggatcaacaaagaagctcagtgagttggaaaataataagttagacctggagagcacactgaaagaactgaataacaccattttaggtttgaactcggagaaggatgcagcactccttcaacaacagcagtctttacagaaagtatctaatttggagttagaactctcaatgatgcagttggaaatggacaagtctgaacaaaaaattctcttactggaacaagaaattgcacggaagaatggaagtgtcgacagcctggagataagtttgaaagatgaatgtgagaagaggctacaagcccaaaaaatgtattcccagtcacaggaagacgttagtaggttgtacatagagatagagaagcagaatggcaagttgaatgagttggagaacttgatatccgaacttaacaacaccatcctacttataaacactgagaaagatgccaccctccatgagaaccagcagtcctcagtgagaatatcagatcttgaatctgaactcatggccttgaaaaccgaactggaaaatgttgaagggaaagttcatgcggtagagcaagaactcatatataagaaagaagaagcagataacctccaaattagcctacaagatgaaattcaaaaacgagttgaaggtgaagaatctcttcttatgatgacaaatcttcactctgggtcacaaaatgaagtgagagggttggcattggaacttgagaagctgaatggtaatttaagacaggtggagaacagtaaggttgatcttgagaacattgtaaccaagcataccgaggaaattcatatccttcgtgaacggaatctttctactgaccttatgataaaggaccttcatcttgaattggacgcactgaaggatttgaacgtgaaacttcagacagaaatggggttacacataggtgaaaaagaagcacttcagagagaatttacttctcaaagggaagagaagaaaaatctagaggggatacaccacactctggttgatgagatgagtaccctaaaaaccactgcaacaatgaaccagaagctgattgaggaactgcaaattacaaactcaaaactgaaggagttgctaatgaaggagatctcttctcgagatgctaatattgaggagttgcagaaaaggctggctggtattcaggatgaacatgcagaactaaaagctgagttgaacacacatctagctctcatagcatcattggttgatcatgtcagtgtgctggaagaagatgttcgttctctgtcaaaaccatgtagtacagaaggcaaagaggaaactgcaagggtacatcatgtgcaagagggcgacgatgggctggaatctcattgcttagtcaatggaactccaaagttacaagggttgattgcaagaatagaagcacttcaagtggttgtattaaatgctaaagatcgtcaagatcgtaaatcagccgagtctgcagctaaactggcggcagcaagtgcagaaattcaagagcttaaaacaagaggcggctcacgcatggaggcaaaagaaatatgttctgacaatgagaaacaagatgttgaggtctccaaagggaagcaagtccagatcatgaaggatattgagctggaccaaatatctacttgccctccatatggcgctggagctgccctctacccccatggaactggtgcaaatgctgaactagatgacgatatgcttcagctgtgggaggctgcggagaggagctgcaagaaccaaacggccaagtcctcgtcatctgagcacgacatacaggcggtcgaggatctggagagcgagtgcccttcgtctgagctagcgaggggaagagaccttggaaccaataagctagaagtgccaaagggagctgtagagcctcacgaggcgtggagcaagaacgtgcttgagaggctcacttctgatgcccagaggctgttgagcatccaagcgagcatcgaggaactgaagaagaaaatggaggggtcctcgaagggtacgaattctgagtacggcagtgtgagcgctcaggtgcatgagacggagggtcttgtcttggaacagatcaattccaacaacaagttgagcaggaaggctgagaactaccccgcattgtcagataatacgagcaccgagcgaggagggtattccagcaggaggaagatctcggagcaggtgcagagagggtcggaaaacgtggcaaggttggaactggagctccagaagatccagtacgtcttgctgaagcttgaggaggagcacgagtacacaaggctcaaagtctctgataagcgcactcgtgtgcttttgagggactacctgtatggaaggaaggaccgtggaggcgggcagaagggaaagaagaagcgggtcccgttctgtggttgtgttcgttcgaaatcaagaacagagccgtagcctttttgttctcgcacccctgcgcgttggaagaggtggtggtgtcctttaggatgaatcccctttgtaactgagtttagtatcctgatgaagaagcctatgtactagatttttggtttcctgtctagatgaggccgttcttctagccagtttaatctcaggtattactgtgatgtatcaaggactgctctttctatatatataataatagcttcatgtttgtatagcctatgcagtgcattccattttgcttccaggttcagactgcagaagcaatgcatttggtaaccgaaacgctgaggattttc

SEQ ID NO: 10273 - DNA, 2112 bp, Zea Mays
ctacgctacgcccgcagtccccgcacccagcagcagagtacaatgtccacaggcaaatgcgataaggtgaggaagagagagcacgggatgggttgagaaacaagatggagggagaaagtgggcagcctgctggatcttggcatctcgccgccgctcatttccgctccacctgtgtgggctagttatctactagtagtatcttcgggccagttcaagacttagccgctgttatgattttgaggataagatattgcatctctgcacagttctaagcgctgaggaagtaaaatatcatttatcggctagagtagtctctgttgctatccggcaccaatggcgactttggtccgtcatgattcaaggcagtactcgtggtggattagccatatcagccccaagaactcgaaatggctccaggaaaatgtcagcgacatggactcaaaggttaaagcaatgatcaaacttatcaatgaagatgctgattcttttgcaaagagagcagagatgtactacaagaaacgtccagagctaatgaatttggtggaggaattctatcgagcgtaccgtgcactggcagaaagatacgatcagtccactggggcacttcgccaggctcacagaacaatttctgaagcatttccaaatcagatgccatcaatgtcagacgagtcaccctctgctttcagccaagagatggagcctcatactccagatacgtctactctcacacgtgtggcatttgattacgatgatcttcagaaggatggagttggtgtgtcaccacaaagtttcacctccaagaggaatggtacacaccctgaggaaaccagtgcgctgtcatcgagtgttgaaaatgctcctcgtgctggttttgatggaaaggtatggaaaggactaacttttgaaggcccaaatgtcaaagggaaagatgatattagcaacgagatggcaaatttgcaacaagaagttgcaagactattagctgagagccaggatctgaaacagcagatgttttcagaatccgagcgggcaaacaaagctgaaaatgagatgcaaatgctcaaggcaacagtattgcaattaaatgctgaaaaagacacatcacttatgcaatataataattcctctgagcgaatatctacattggagtctgagctatcgaaggctcagtctgaccttgagaagttaactgatgaaatggctgcagatgtccagaagctaattaatgctgaaacactcaatattgctatacagtctgaggctgagggtttggatcagaagatgaagatgcagcaacaagcactagaacaaaagcttaaggaattggagagtttccgctcaagcttccaggaggagcatgaaaagcgcatgcaggctgaaagtgctctactttcccagaggaaggaacttgctcaatctcatgaagaagtgcagaggttggctatagaaataaagacagcgaatgaaaagttgaatgagttcaagcagaccaaggaggtccttgagtacactgtttgtgagctgaagaaggatgttgagcgccttacagaacaaaaccagtcctctgaggtgcttgtacagaaacttggtgaccagattaatacactcaaggattcaaataatgaacttcaaagtgaaatacaaagccttaagagcatcatttcacagctaaacactgagaagaatgcagctgtgcttcaacaccagcagtttgtggaactggtttcggtacttgaatctcagttgtcgaagctacagtcagagctagatgagactgagcagaaagtacagatgctgacacatgatcttgaaaagaagaaagaagaagcggacaatgtccatctcaagctgcaagatgaatgccataggcgtatgcaaattgaggcaactcttctcatgacagagggtctgcattcccagttgcaagaagaaatgcaaatgttgacacaagattttgacgggtcaacaaagaagctcagtgagttggaaaaaaataagttagacctggagagcatactgaaagaactgaataacaccattttaggtttgaactcggagaaggatgcttcactccttcagcaacagcagtctttacagaaagtatctgatttg

SEQ ID NO: 10274 - DNA, 2182 bp, Zea Mays
cagcctttccctgtcttctctgcactacgctacgcccgcagtccccgcacccagcagcagagtacaatgtccacaggcaaatgcgataaggtgaggaagagagagcacgggatgggttgagaaacaagatggagggagaaagtgggcagcctgctggatcttggcatctcgccgccgctcatttccgctccacctgttactgagggaagtgctatctttttcttggctcctgtttggtgcagtgtgggctagttatctactagtagtatcttcgggccagttcaagacttagccgctgttatgattttgaggataagatattgcatctctgcacagttctaagcgctgaggaagtaaaatatcatttatcggctagagtagtctctgttgctatccggcaccaatggcgactttggtccgtcatgattcaaggcagtactcgtggtggattagccatatcagccccaagaactcgaaatggctccaggaaaatgtcagcgacatggactcaaaggttaaagcaatgatcaaacttatcaatgaagatgctgattcttttgcaaagagagcagagatgtactacaagaaacgtccagagctaatgaatttggtggaggaattctatcgagcgtaccgtgcactggcagaaagatacgatcagtccactggggcacttcgccaggctcacagaacaatttctgaagcatttccaaatcagatgccatcaatgtcagacgagtcaccctctgctttcagccaagagatggagcctcatactccagatacgtctactctcacacgtgtggcatttgattacgatgatcttcagaaggatggagttggtgtgtcaccacaaagtttcacctccaagaggaatggtacacaccctgaggaaaccagtgcgctgtcatcgagtgttgaaaatgctcctcgtgctggttttgatggaaaggtatggaaaggactaacttttgaaggcccaaatgtcaaagggaaagatgatattagcaacgagatggcaaatttgcaacaagaagttgcaagactattagctgagagccaggatctgaaacagcagatgttttcagaatccgagcgggcaaacaaagctgaaaatgagatgcaaatgctcaaggcaacagtattgcaattaaatgctgaaaaagacacatcacttatgcaatataataattcctctgagcgaatatctacattggagtctgagctatcgaaggctcagtctgaccttgagaagttaactgatgaaatggctgcagatgtccagaagctaattaatgctgaaacactcaatattgctatacagtctgaggctgagggtttggatcagaagatgaagatgcagcaacaagcactagaacaaaagcttaaggaattggagagtttccgctcaagcttccaggaggagcatgaaaagcgcatgcaggctgaaagtgctctactttcccagaggaaggaacttgctcaatctcatgaagaagtgcagaggttggctatagaaataaagacagcgaatgaaaagttgaatgagttcaagcagaccaaggaggtccttgagtacactgtttgtgagctgaagaaggatgttgagcgccttacagaacaaaaccagtcctctgaggtgcttgtacagaaacttggtgaccagattaatacactcaaggattcaaataatgaacttcaaagtgaaatacaaagccttaagagcatcatttcacagctaaacactgagaagaatgcagctgtgcttcaacaccagcagtttgtggaactggtttcggtacttgaatctcagttgtcgaagctacagtcagagctagatgagactgagcagaaagtacagatgctgacacatgatcttgaaaagaagaaagaagaagcggacaatgtccatctcaagctgcaagatgaatgccataggcgtatgcaaattgaggcaactcttctcatgacagagggtctgcattcccagttgcaagaagaaatgcaaatgttgacacaagattttgacgggtcaacaaagaagctcagtgagttggaaaaaaataagttagacctggagagcatactgaaagaactgaataacaccattttaggtttgaactcggagaaggatgcttcactccttcagcaacagcagtctttacagaaagtatctgatttg

SEQ ID NO: 10275 - DNA, 2116 bp, Zea Mays
ttcctcctgtgttgaagcagcctttccctgtcttctctgcactacgctacgcccgcagtccccgcacccagcagcagagtacaatgtccacaggcaaatgcgataaggtgaggaagagagagcacgggatgggttgagaaacaagatggagggagaaagtgggcagcctgctggatcttggcatctcgccgccgctcatttccgctccacctgtgtgggctagttatctactagtagtatcttcgggccagttcaagacttagccgctggttctaagcgctgaggaagtaaaatatcatttatcggctagagtagtctctgttgctatccggcaccaatggcgactttggtccgtcatgattcaaggcagtactcgtggtggattagccatatcagccccaagaactcgaaatggctccaggaaaatgtcagcgacatggactcaaaggttaaagcaatgatcaaacttatcaatgaagatgctgattcttttgcaaagagagcagagatgtactacaagaaacgtccagagctaatgaatttggtggaggaattctatcgagcgtaccgtgcactggcagaaagatacgatcagtccactggggcacttcgccaggctcacagaacaatttctgaagcatttccaaatcagatgccatcaatgtcagacgagtcaccctctgctttcagccaagagatggagcctcatactccagatacgtctactctcacacgtgtggcatttgattacgatgatcttcagaaggatggagttggtgtgtcaccacaaagtttcacctccaagaggaatggtacacaccctgaggaaaccagtgcgctgtcatcgagtgttgaaaatgctcctcgtgctggttttgatggaaaggtatggaaaggactaacttttgaaggcccaaatgtcaaagggaaagatgatattagcaacgagatggcaaatttgcaacaagaagttgcaagactattagctgagagccaggatctgaaacagcagatgttttcagaatccgagcgggcaaacaaagctgaaaatgagatgcaaatgctcaaggcaacagtattgcaattaaatgctgaaaaagacacatcacttatgcaatataataattcctctgagcgaatatctacattggagtctgagctatcgaaggctcagtctgaccttgagaagttaactgatgaaatggctgcagatgtccagaagctaattaatgctgaaacactcaatattgctatacagtctgaggctgagggtttggatcagaagatgaagatgcagcaacaagcactagaacaaaagcttaaggaattggagagtttccgctcaagcttccaggaggagcatgaaaagcgcatgcaggctgaaagtgctctactttcccagaggaaggaacttgctcaatctcatgaagaagtgcagaggttggctatagaaataaagacagcgaatgaaaagttgaatgagttcaagcagaccaaggaggtccttgagtacactgtttgtgagctgaagaaggatgttgagcgccttacagaacaaaaccagtcctctgaggtgcttgtacagaaacttggtgaccagattaatacactcaaggattcaaataatgaacttcaaagtgaaatacaaagccttaagagcatcatttcacagctaaacactgagaagaatgcagctgtgcttcaacaccagcagtttgtggaactggtttcggtacttgaatctcagttgtcgaagctacagtcagagctagatgagactgagcagaaagtacagatgctgacacatgatcttgaaaagaagaaagaagaagcggacaatgtccatctcaagctgcaagatgaatgccataggcgtatgcaaattgaggcaactcttctcatgacagagggtctgcattcccagttgcaagaagaaatgcaaatgttgacacaagattttgacgggtcaacaaagaagctcagtgagttggaaaaaaataagttagacctggagagcatactgaaagaactgaataacaccattttaggtttgaactcggagaaggatgcttcactccttcagcaacagcagtctttacagaaagtatctgatttg

SEQ ID NO: 10276 - DNA, 2196 bp, Zea Mays
ctttccttcggcagtgtttgggggtggggtaccgcttcctcctgtgttgaagcagcctttccctgtcttctctgcactacgctacgcccgcagtccccgcacccagcagcagagtacaatgtccacaggcaaatgcgataaggtgaggaagagagagcacgggatgggttgagaaacaagatggagggagaaagtgggcagcctgctggatcttggcatctcgccgccgctcatttccgctccacctgttactgagggaagtgctatctttttcttggctcctgtttggtgcagtgtgggctagttatctactagtagtatcttcgggccagttcaagacttagccgctgttctaagcgctgaggaagtaaaatatcatttatcggctagagtagtctctgttgctatccggcaccaatggcgactttggtccgtcatgattcaaggcagtactcgtggtggattagccatatcagccccaagaactcgaaatggctccaggaaaatgtcagcgacatggactcaaaggttaaagcaatgatcaaacttatcaatgaagatgctgattcttttgcaaagagagcagagatgtactacaagaaacgtccagagctaatgaatttggtggaggaattctatcgagcgtaccgtgcactggcagaaagatacgatcagtccactggggcacttcgccaggctcacagaacaatttctgaagcatttccaaatcagatgccatcaatgtcagacgagtcaccctctgctttcagccaagagatggagcctcatactccagatacgtctactctcacacgtgtggcatttgattacgatgatcttcagaaggatggagttggtgtgtcaccacaaagtttcacctccaagaggaatggtacacaccctgaggaaaccagtgcgctgtcatcgagtgttgaaaatgctcctcgtgctggttttgatggaaaggtatggaaaggactaacttttgaaggcccaaatgtcaaagggaaagatgatattagcaacgagatggcaaatttgcaacaagaagttgcaagactattagctgagagccaggatctgaaacagcagatgttttcagaatccgagcgggcaaacaaagctgaaaatgagatgcaaatgctcaaggcaacagtattgcaattaaatgctgaaaaagacacatcacttatgcaatataataattcctctgagcgaatatctacattggagtctgagctatcgaaggctcagtctgaccttgagaagttaactgatgaaatggctgcagatgtccagaagctaattaatgctgaaacactcaatattgctatacagtctgaggctgagggtttggatcagaagatgaagatgcagcaacaagcactagaacaaaagcttaaggaattggagagtttccgctcaagcttccaggaggagcatgaaaagcgcatgcaggctgaaagtgctctactttcccagaggaaggaacttgctcaatctcatgaagaagtgcagaggttggctatagaaataaagacagcgaatgaaaagttgaatgagttcaagcagaccaaggaggtccttgagtacactgtttgtgagctgaagaaggatgttgagcgccttacagaacaaaaccagtcctctgaggtgcttgtacagaaacttggtgaccagattaatacactcaaggattcaaataatgaacttcaaagtgaaatacaaagccttaagagcatcatttcacagctaaacactgagaagaatgcagctgtgcttcaacaccagcagtttgtggaactggtttcggtacttgaatctcagttgtcgaagctacagtcagagctagatgagactgagcagaaagtacagatgctgacacatgatcttgaaaagaagaaagaagaagcggacaatgtccatctcaagctgcaagatgaatgccataggcgtatgcaaattgaggcaactcttctcatgacagagggtctgcattcccagttgcaagaagaaatgcaaatgttgacacaagattttgacgggtcaacaaagaagctcagtgagttggaaaaaaataagttagacctggagagcatactgaaagaactgaataacaccattttaggtttgaactcggagaaggatgcttcactccttcagcaacagcagtctttacagaaagtatctgatttg

SEQ ID NO: 10277 - DNA, 2150 bp, Zea Mays
ctttccttcggcagtgtttgggggtggggtaccgcttcctcctgtgttgaagcagcctttccctgtcttctctgcactacgctacgcccgcagtccccgcacccagcagcagagtacaatgtccacaggcaaatgcgataaggtgaggaagagagagcacgggatgggttgagaaacaagatggagggagaaagtgggcagcctgctggatcttggcatctcgccgccgctcatttccgctccacctgtgtgggctagttatctactagtagtatcttcgggccagttcaagacttagccgctgttctaagcgctgaggaagtaaaatatcatttatcggctagagtagtctctgttgctatccggcaccaatggcgactttggtccgtcatgattcaaggcagtactcgtggtggattagccatatcagccccaagaactcgaaatggctccaggaaaatgtcagcgacatggactcaaaggttaaagcaatgatcaaacttatcaatgaagatgctgattcttttgcaaagagagcagagatgtactacaagaaacgtccagagctaatgaatttggtggaggaattctatcgagcgtaccgtgcactggcagaaagatacgatcagtccactggggcacttcgccaggctcacagaacaatttctgaagcatttccaaatcagatgccatcaatgtcagacgagtcaccctctgctttcagccaagagatggagcctcatactccagatacgtctactctcacacgtgtggcatttgattacgatgatcttcagaaggatggagttggtgtgtcaccacaaagtttcacctccaagaggaatggtacacaccctgaggaaaccagtgcgctgtcatcgagtgttgaaaatgctcctcgtgctggttttgatggaaaggtatggaaaggactaacttttgaaggcccaaatgtcaaagggaaagatgatattagcaacgagatggcaaatttgcaacaagaagttgcaagactattagctgagagccaggatctgaaacagcagatgttttcagaatccgagcgggcaaacaaagctgaaaatgagatgcaaatgctcaaggcaacagtattgcaattaaatgctgaaaaagacacatcacttatgcaatataataattcctctgagcgaatatctacattggagtctgagctatcgaaggctcagtctgaccttgagaagttaactgatgaaatggctgcagatgtccagaagctaattaatgctgaaacactcaatattgctatacagtctgaggctgagggtttggatcagaagatgaagatgcagcaacaagcactagaacaaaagcttaaggaattggagagtttccgctcaagcttccaggaggagcatgaaaagcgcatgcaggctgaaagtgctctactttcccagaggaaggaacttgctcaatctcatgaagaagtgcagaggttggctatagaaataaagacagcgaatgaaaagttgaatgagttcaagcagaccaaggaggtccttgagtacactgtttgtgagctgaagaaggatgttgagcgccttacagaacaaaaccagtcctctgaggtgcttgtacagaaacttggtgaccagattaatacactcaaggattcaaataatgaacttcaaagtgaaatacaaagccttaagagcatcatttcacagctaaacactgagaagaatgcagctgtgcttcaacaccagcagtttgtggaactggtttcggtacttgaatctcagttgtcgaagctacagtcagagctagatgagactgagcagaaagtacagatgctgacacatgatcttgaaaagaagaaagaagaagcggacaatgtccatctcaagctgcaagatgaatgccataggcgtatgcaaattgaggcaactcttctcatgacagagggtctgcattcccagttgcaagaagaaatgcaaatgttgacacaagattttgacgggtcaacaaagaagctcagtgagttggaaaaaaataagttagacctggagagcatactgaaagaactgaataacaccattttaggtttgaactcggagaaggatgcttcactccttcagcaacagcagtctttacagaaagtatctgatttg

SEQ ID NO: 10278 - DNA, 389 bp, Zea Mays
gccaaatccactcacctctaaaaaaatacagcaagcaaccggatggtggtacaacacttgcccagttttgattgtctttccaacacccggctattccatgcaacagattctcttctcttctcttctcttcttcattcatccgactatggtgcgcttcctaccccgttgcctcactgtaaacaaaaaagatcgattgcaaagagtggataaaaaaaaggtcatccttcacacgtcagcacagctacgttgtcagacctcgccggagaagcaacctccagttgccggcgagctcaccctgctggtcacagaaaagactcacgcacacacacacgaacacaagtaggcacactctgatttggtgctgtgaacaaccaacagcttttctgact

SEQ ID NO: 10279 - DNA, 1157 bp, Zea Mays
tttgctgcattgcaattgcgtctgctcaatacaatgcctagcacgcagtgaccacggtagctatcgccgaaagcgggaactgaagaagatgttggggaggatggctgggccagggggcggcggagtctcggagcagcggcagcgcgaggccgcgtttgatttcggccgacacacgggcactgccgccgctgtgccgtcgtcgtcgccgcatactcccatggtgcctcccaagctgttcttggctgcagggagcggcggcgtcgtctccggagaggaggcgttctcgccaccggaggagctagcggggggcgtcgtcgtgatggtcagccccacctcgacgctgcagacaccgaccggcagcgctagccctacgtctgcagcgacgtccacggccgttccgttctcccgtcgcggggcgacctcgccatcatcaccaggcggggacgatcgtcgtcggtgcaagagcaggagccggatccggagccagcgcccctgggaggcgtggcctgtcggggtcggactcgccggcgccctgagcggtgacgctgacgcactcccacccgtggcgacggtactgacaggacagaggatccggccgtggccgtgcaggagctccgcgtcgtccgtgctgggcctgggctcccccgaaagcaggagccggtgccggggcgtcttgtcgccgaggaagatgatggaagcgtcggaggaggactacacccgcgtcatcgcgcgcgggcccaacccgaggacgacgcacatattcgacgaccgcgtcgtcgtcgtggaggacgagttcctgaggtggtgccatggctgcagcaaggacctgggccagggcaacgacatcttcatgtacaggggggagatggccttctgcagccatgagtgccgctaccgcgtgatgctgctcttggacgaagaaggagaatcctgctgacgcaccagccaaggtgccattttaacttgagaaggagaactggagaagacctgtatgccaaccggccgccggcggagcagaccccgatcgatactgcatgctgcactattctctgcttcattcgttctatgctcttttgctactactagtactataggttttaattatccgcattagctgttgatcatattccaagtgattggtttgcatgctccattgg

SEQ ID NO: 10280 - DNA, 902 bp, Zea Mays
acagtcgtaaccgtaaatctgcatatgtagcttttttcacagaatctatcatatttgcgcatctgaaaaggtgggccctggtatgttgcaagttcttcatttgcttgatataaacaatagatgttggacagttgaccgcctagctaagatagatctgagacacccggcagcctgtcccccctttgtgatcaaaaggatgagacaattaagcacatcctcgtctcatgtagtttttcaaggcaggtttgggcagtcatcttccagaggctgggtctatttgatcaggcacatcaaccttctgtatctcttttctctagttgatggtgcaatgctatcaagggactgcctaaagttctgagaaaaggacttaatacattgatcattctagtagcatgggaagtttggaagcatagaaactcctgtgtttttaaggagctagccctgtgttcagatggtactgcacaaagcgggggaggaatgtgtcctttggtgctctgctggtgcttcagctctcacaaaactctctacattgctcttgttatggggcatcagttagggagccataagaccaattagaaggactggattagatttgggtcgataagactggatatgatttcttaagatttgactgcgccttccttaggagtcatggaatactctatataaagggagctgaggtatgaaaaaacaaagaagaagaagaacaaacaatccaattcccccaaatactctagtctcccgccaagccaactttacccagctaccttcctgactatggttgtccccaaattaactaaggttcataacatctggtatcatgagtcagggctcctttctcatgacttgtgctgccagtgatccatcaccatcattgaaccacacaattgctgccatctttg

SEQ ID NO: 10281 - DNA, 212 bp, Zea Mays
gaaattcagtttttggcccgaaattcacatcagaggccgaaattcaaaataaatttaataaaacaaataaaagataagacaaataaatttgaccaaaagcaaacttaatatttgtattagagcctgaaatttaaaacaaatttaataaaacaaataaaagataagacaaataaatttgaccaaaagcaaacttaatatttgtattaggttac

SEQ ID NO: 10282 - DNA, 692 bp, Zea Mays
aaaagagaatgtgcaggcaatgctgcaaagaattgttagagtttttaaaagtcgccattgtttttatgtctctttcactgggttttgggtagtcgttgcaataacctccctgtattcttttagctagggcctttcgttgttataattgtctctaacacttctattcacaattctagcaatggaacagctaatggaactttattcttgcttcatcggtatagttgaaagctttcttatttacaataatgtgtttgtttgttgttgagtatccttttaattgagtccacatatttataataacattacatatttattcatcaatataatattagtgtcacaatgatattttactaccgattttgtatatcataatgacatttgtcgttatgtattgatgttttatactcaagttgtttggttgctggactagcgttcagctgctgctgctacatcatgttatataaaaagtaaatattgtagcatttgcagctgctacaacccttaaaccatcaccaaataagtggattaatttttacttacgtagcgaaggcacatacctagtcatcattcaagcggcggagcacatcacacattagtattcatcataaccttcatgttattcatcatatccttcatgttctgtcctctcatcgccatcaaatgccttcgttataggtgtaggtgtacattct

SEQ ID NO: 10283 - DNA, 171 bp, Zea Mays
aaagcaaatgtcaagtcagcgtgaacagtacaggagcactgttcatctatttataggcacaggacgcagcccatgtaaaattacactcatgccctttacatttgctaatgactctacagtaatccatcgaggtctaaatagtcttttcccttttaagtcggtttccttttc

SEQ ID NO: 10284 - DNA, 1187 bp, Zea Mays
cacacacagggagcttttacagccatgtgccggtgcaggtgcactcggacacgtacgcgctggtggtgagcacggagaacatcactctcaacgcctacatgggcaacaaccgccccatgctggtcaccaacacgctcttccgcgtcggcggcgcggccatcctgctgtccaaccgccgcgccgaccgccgccgcgccaagtaccagctcatccacacggtgcgcacgcaccgcggcgcgcacgaccagagcttcggctgcgtcacgcaggaggaggacgacgcggggtgcgtcggcgtctccctggccaaggagctcatggtggtcgccggcgaggccctgcgcaccaacatcaccacgctgggcccgctcgtcctgcccatgtccgagcagctccgcttcctggccaccgtcgtcctcaaccgcgtcttccgcgccagagtgcgcgcctacctgccggacttcaagctcgccttcgaccacttctgcatccacgccggcggccgcggcgtgctggacgagctggagcgcagcctcaacctcagcgcctggcacatggagccctccaggatgacgctctgccgcttcggcaacacctccagcagctcgctctggtacgagctcgcctactgcgaggccaagggacggatccgcaagggggaccgggtatggcagatcgctttcggctccggcttcaagtgcaacagcgccgtctggaaggcgctccgcacggtggacggcggcgaggagggaaacccgtggacgccggagatagacgtgctccccatccacgtgcccaaggtttcgcccatcgatgagaccacctacaagttcgctgacggcgccacgtacaagatctctcttggttaaaatatattactactattgttattattattattattattacatgattgatttctcatcatcagcatgtaacctaatcaagataatttaagaagcagcagcgcgccgttattaattattattgccaggcttgacgatggtgacggggccttactattgccatgatttgcatcatgcatctgtacgtgaagctctatgaactcacgcgccaagaattatacacttcgattgatctactatcttgtcctttggtgatcattgattgcgagatgcaatgcgcacatgcacttgaacgacatgtggtcctatgtagtgtgtaag

SEQ ID NO: 10285 - DNA, 2528 bp, Zea Mays
atggagcccaaccttcagtccgcactggaggaacaaacggagatccttcgcgcgctcagtgcccgccttgctgcccaggaagcacggtggcacgatcgggagtcgatagcattcggcgtcgatccacgacctggagatagtagtggccactgtgccttccttggcgttgagggcggagcgagatgctcaggtgtaaccaaaaaaatttccctgctcgagcatcaccccaacaggatgttcgacgcgtgcgacaggttctggcactgtgtcttcgcgctctgtgactttggcttcatgcagggcctgcagaggaagttggagcgactctgcctggcggggagcgcgcccaacctagaagtcctcgccgtgctttcgggactgcgcgcgcgaagccttccgacaagcgcgccaccaaccatacccgcacgtccacgcaaagcatctccacgacggccacccggttcgtacttcgtactatgcacggagcggctacgtcgcgagcgggtctccgacgggcacgacttccagcaccaagtcacggagctggatctcctccgagttcgagcactcctccataccgacccccaaccagaaggtcttcaacctctcatccgatgtcctcaataagagagatgcgtgggccggtaccttcgaccacatcttcaccgagctcggccaaccatgatgcctgcaagctgtccggcttccctgccacctgcgtcatcagctaccagactgctcccagctggagttcacagacgaggtgtttgctgcataggaggtgttcgaggaattgtctcttagttcccctgctgcttgggtcattattgggaagctcttggcctctctgtgctggaaaattccttggccccaaccacatatacaagttgggttggggtgtggcactgaggctttacgttcaattccatggttgtctcccaccatagatagtaccaatgaggagagaatattcatcatatctgaggatggcaaggttgatgatgtggttgatcgaccgatggatgaacagatcgtaactgcagtctttgtgccagcttgtatagaagctttacttaatgatgggatgaatgcaggcaaaaccagggaggccgttgctgatcatcagtattctgagtatgacaatggattgaaagataaggatcagaaaatattatttgaagatgacattgatttatcattgttcaactgcaagttcgattcccacataacagatagtcctatcattgatgctgtttatactgcactcaaagaagcagagcttcgttctacagatctttggccatactggaaggttgattgcttgtgcaagataattccaagacagctactagcagagaaggcagtgatgcttataaggaacactgttgacaagctgattatgaagcgtaaagaaatacaagttgaaattgaacagattgcgggcgaggattatgtaaatgaaggggattctagcattctacgcttcctacttgcaaatatgtcaccaaaaatagaagagccaaaaattcagtacaccctgaaggccattgcaggaagcgtaactgcagtttatggactttttgtgcaactgatgaccaatagtcagtttgcttgttttgcacaatatcagtaaatattcaagcaactagctcattgtggtggatctgcacgtgtagggttgaccctgtgttcagagctgaaatttacaacatcagcatgccattttgtgacttggtttgtcttgcggccaaaatgaaagttaaggagcacaatttgagaagctttgggacattcctagagattaatacatgaaaggcaacaaagaccaaaggactggagctgcttgaatatatgggaatggagagactggagtttattgtagaacaacctgacatggcatgtgattcatgggaacatttatggaactgcctattggtctttctttgtgatcctggaagttctccatcggcttggggcaagccaaaactcaagaaggggaaatgccagggattacagttgggccatggtgggccttgggccttagcctggtcgaacagtacatgggcatcttttacaagagaacagaacagatacaatatcgtcttcctccttcatagctgttggttcccatctctagcttcttctagggttagagttctccttgcttagtcctctacctctccctgcttagcgtgctcctgatctcctaacccaagatcgtgtatctctgtttttccttcctgttatcagtagtgatgctctgtatttccggcacccacgagctacttctaccggcggcctggcccctggagccctagcgccgcttcttgcccgcacgcctatccccagatcctgtgtgcctcttcgtcctgacgtccccttccacgactccgtccaaggccactggtcgcctaggtccgcagagtattgtcatgctcgtgcattgcagagaaggcatacggctggagtgctgtatgtatgtgacgcctgatgtctgaagtgtctcaagactgaagtggtagtgtgtc

SEQ ID NO: 10286 - DNA, 416 bp, Zea Mays
gggtcgcacctccgggttgctgcaaccaccggctcgcttcggccggggagtagggatggacctccctcaacctagggggttaaatctagggcctttgcgaccttccccttctacttcccacgcgctaaaccaccacgtcagtcgccgccgtcgggagagagagagaggccgaagcgaagggaggccgggccaccactgttcacacggggtcacgtcgccgttccaaccttagggtggttcccacgagcttcgcagggcttcggcggacgtgcttgtggcggtgccgggtggattcaaggtcggagacccaggaattgcacttcgacgtgcgtccgacctcatcgaggctagccccagccaccgcttgaacgccgacgagcaagtgatcgaggagcccggagcaccacatgttgaag

SEQ ID NO: 10287 - DNA, 736 bp, Zea Mays
gaagagctcaatggcatagacaattaggctccagacacatttgttgcagcagctgctcgaaacccagtatgtaacttatcattgatggtgggtacctctgacatccctgattggtgctttgtcgagatttatggaaaagaagggaaaaagtacttctcagagtctccttcagtagacgatctttgtcaattccaccagaagtcaccaatttcacatattgcaaaggtcaagacaccaacactctttcttcttggagcgcaagatctcagagttcctgtttctaatggcctgcagtacgcaagggctttgaaggagaggggaatcgaaacgaaaactattgtcttcccagaagatatccatggaattgacaagcctcagtctgatttcgaaagcttcctcaacataggggtttggttcaagaagcacatgggcaaataaacattagtgcttcccattacattcatgatttactttttcattgttactaaatgcctgtaaccgggtcaaagtatacatgatttgcctgtccaatctggtgtttgccaagatggaataattcttgaagacatatagaagcccgtgtttattctagtgtggattctggaataccaactgtagctagtttatataataatcttctaataaatgatgcttatgtgttaatgtgaaacggtgcgtgcttttgaattgtattcagaaaaaaaatggcccagctgaccagctcactgttgtttag

SEQ ID NO: 10288 - DNA, 2646 bp, Zea Mays
gtcagctcttgaaaaaaaagttccacttcttcttgttcttcctcttgttttctcgtctctcggatgacatctcagagttgggactagcaaggtttcattgcgctcaattgctatgtctaccacacaagcctcagaagcagctgctgacaaaggattgcctctggcagtggacgctaccatgattgatgagtatgcctcccagtcaaagttgctgcaagaatttgttaaaatcccaactattggcaaggcttggatcttcaattccaaggatgacgacatgtccaaagcagtggtttcgattggcaaatcagatcttttggccaataagaggagacaattccttttgaatactcacatttcaaagagtccctcaaagtctgtcgattttcagtggtcccccttccctactgaaataagtggagtgtcagcaatagttccatctccatctggagaaaaacttcttctagtacgcaattctgaagatgattcccctacaaaactagagatttggggcccatgtcagttagagaatgagatacatattgcaaaatctgttcatggatcactctatactgatgaatggtttgaagggatatcatggaaccaggaagagactttcatagcttatgttgccgaggagcctcctcaaccaaagccagtgtttaatgattatggattcaagaaggaaggtttatcagaaaaggactgcaagagctggaagggacaaggggattgggaggagacctggggagaaacctattccaagaaaaggattcctgcactgttcgtcatcaacatctccagtggtgaagttcgacctgtcaagcaaatacctagatcattaagtgttggccaagtgatttgggctccatcatcttcatatagcttggtttttgttgcatggtcatctgacaatgggttccaagggacaccaaggaagcttggtattaaatactgctacaacagaccatgtgctctgtatgctgctcctgatcctttcggacaagaagctgagaaatcattaactgagggcaataagggtgaaactacaactatgatcaaattaacagcaaacctgagcagtgcctttttcccacggttcagtccggatgggaagtatcttgtcttcatctcagcgaagagtgctgtagatagtggggcacacaatgctacaaattcattgcatagaatcgaatggtgtacagatggaaaactggatgggagccttggagttgctgacgtggtgcccattgtgctgtgccccaaagataactgttttcctgggctatactgctttggcttgcttagggatccatggcttaccgatggacaaactatgattatatcttctgtctggggaagtagggaagtaatactttctgtaaatgttgtgagctgtgaactttcaagagtgagtccccaggactcagattattcatggaatgttcttgcagttgataagaacaacattcttgcagtttccagcagccttattacactccctcagatgtactatgggattaaggtttctcagactgaaagcaattgggagtggcagggagtttcaactcctttcccaaagccatctgataagatcagctccgtactagcagagcataagttcagcatactcaaaatcccaattagcaacccttctgacgaacttgccaatggggctaagcttccttttgaggctatttttgtgtcgcataaggattctgcaaggatataatcttcttgttgtgaactacaggggttcattaggctttggggaagaagcactgcaatcccttcctggcaatattggttctcaggatgtcaatgatgtattgacggcattggaccttgttataaagagaggactaatagatccatccagagttgccgtagttggaggttcacatggaggtttcctgacaacacatttgattggccaggctccagacacatttgttgcagcagctgctcgaaacccagtatgtaacttatcattgatggtgggtacctctgacatccctgattggtgctttgtcgagatttatggaaaagaagggaaaaagtacttctcagagtctccttcagtagacgatctttgtcaattccaccagaagtcaccaatttcacatattgcaaaggtcaagacaccaacactctttcttcttggagcgcaagatctcagagttcctgtttctaatggcctgcagtacgcaagggctttgaaggagaggggaatcgaaacgaaaactattgtcttcccagaagatatccatggaattgacaagcctcagtctgatttcgaaagcttcctcaacataggggtttggttcaagaagcacatgggcaaataaacattagtgcttcccattacattcatgatttactttttcattgttactaaatgcctgtaaccgggtcaaagtatacatgatttgcctgtccaatctggtgtttgccaagatggaataattcttgaagacatatagaagcccgtgtttattctagtgtggattctggaataccaactgtagctagtttatataataatcttctaataaatgatgcttatgtgttaatgtgaaacggtgcgtgcttttgaattgtattcagaaaaaaaatggcccagctgaccagctcactgttgtttag

SEQ ID NO: 10289 - DNA, 2443 bp, Zea Mays
ccatctaaccagtggtaatggtggttttggtcagagtgttggtcgcctgtgccaaattccgctgcccggcggcgaatttactcctctcagcctctacttctcgggttcgagctcaacccggcgggccactgctgcgacaaaggactagcaaggtttcattgcgctcaattgctatgtctaccacacaagcctcagaagcagctgctgacaaaggattgcctctggcagtggacgctaccatgattgatgagtatgcctcccagtcaaagttgctgcaagaatttgttaaaatcccaactattggcaaggcttggatcttcaattccaaggatgacgacatgtccaaagcagtggtttcgattggcaaatcagatcttttggccaataagaggagacaattccttttgaatactcacatttcaaagagtccctcaaagtctgtcgattttcagtggtcccccttccctactgaaataagtggagtgtcagcaatagttccatctccatctggagaaaaacttcttctagtacgcaattctgaagatgattcccctacaaaactagagatttggggcccatgtcagttagagaatgagatacatattgcaaaatctgttcatggatcactctatactgatgaatggtttgaagggatatcatggaaccaggaagagactttcatagcttatgttgccgaggagcctcctcaaccaaagccagtgtttaatgattatggattcaagaaggaaggtttatcagaaaaggactgcaagagctggaagggacaaggggattgggaggagacctggggagaaacctattccaagaaaaggattcctgcactgttcgtcatcaacatctccagtggtgaagttcgacctgtcaagcaaatacctagatcattaagtgttggccaagtgatttgggctccatcatcttcatatagcttggtttttgttgcatggtcatctgacaatgggttccaagggacaccaaggaagcttggtattaaatactgctacaacagaccatgtgctctgtatgctgctcctgatcctttcggacaagaagctgagaaatcattaactgagggcaataagggtgaaactacaactatgatcaaattaacagcaaacctgagcagtgcctttttcccacggttcagtccggatgggaagtatcttgtcttcatctcagcgaagagtgctgtagatagtggggcacacaatgctacaaattcattgcatagaatcgaatggtgtacagatggaaaactggatgggagccttggagttgctgacgtggtgcccattgtgctgtgccccaaagataactgttttcctgggctatactgctttggcttgcttagggatccatggcttaccgatggacaaactatgattatatcttctgtctggggaagtagggaagtaatactttctgtaaatgttgtgagctgtgaactttcaagagtgagtccccaggactcagattattcatggaatgttcttgcagttgataagaacaacattcttgcagtttccagcagccttattacactccctcagatgtactatgggattaaggtttctcagactgaaagcaattgggagtggcagggagtttcaactcctttcccaaagccatctgataagatcagctccgtactagcagagcataagttcagcatactcaaaatcccaattagcaacccttctgacgaacttgccaatggctccagacacatttgttgcagcagctgctcgaaacccagtatgtaacttatcattgatggtgggtacctctgacatccctgattggtgctttgtcgagatttatggaaaagaagggaaaaagtacttctcagagtctccttcagtagacgatctttgtcaattccaccagaagtcaccaatttcacatattgcaaaggtcaagacaccaacactctttcttcttggagcgcaagatctcagagttcctgtttctaatggcctgcagtacgcaagggctttgaaggagaggggaatcgaaacgaaaactattgtcttcccagaagatatccatggaattgacaagcctcagtctgatttcgaaagcttcctcaacataggggtttggttcaagaagcacatgggcaaataaacattagtgcttcccattacattcatgatttactttttcattgttactaaatgcctgtaaccgggtcaaagtatacatgatttgcctgtccaatctggtgtttgccaagatggaataattcttgaagacatatagaagcccgtgtttattctagtgtggattctggaataccaactgtagctagtttatataataatcttctaataaatgatgcttatgtgttaatgtgaaacggtgcgtgcttttgaattgtattcagaaaaaaaatggcccagctgaccagctcactgttgtttag

SEQ ID NO: 10290 - DNA, 2417 bp, Zea Mays
ccatctaaccagtggtaatggtggttttggtcagagtgttggtcgcctgtgccaaattccgctgcccggcggcgaatttactcctctcagcctctacttctcgggttcgagctcaacccggcgggccactgctgcgacaaaggactagcaaggtttcattgcgctcaattgctatgtctaccacacaagcctcagaagcagctgctgacaaaggattgcctctggcagtggacgctaccatgattgatgagtatgcctcccagtcaaagttgctgcaagaatttgttaaaatcccaactattggcaaggcttggatcttcaattccaaggatggtttgaagggatatcatggaaccaggaagagactttcatagcttatgttgccgaggagcctcctcaaccaaagccagtgtttaatgattatggattcaagaaggaaggtttatcagaaaaggactgcaagagctggaagggacaaggggattgggaggagacctggggagaaacctattccaagaaaaggattcctgcactgttcgtcatcaacatctccagtggtgaagttcgacctgtcaagcaaatacctagatcattaagtgttggccaagtgatttgggctccatcatcttcatatagcttggtttttgttgcatggtcatctgacaatgggttccaagggacaccaaggaagcttggtattaaatactgctacaacagaccatgtgctctgtatgctgctcctgatcctttcggacaagaagctgagaaatcattaactgagggcaataagggtgaaactacaactatgatcaaattaacagcaaacctgagcagtgcctttttcccacggttcagtccggatgggaagtatcttgtcttcatctcagcgaagagtgctgtagatagtggggcacacaatgctacaaattcattgcatagaatcgaatggtgtacagatggaaaactggatgggagccttggagttgctgacgtggtgcccattgtgctgtgccccaaagataactgttttcctgggctatactgctttggcttgcttagggatccatggcttaccgatggacaaactatgattatatcttctgtctggggaagtagggaagtaatactttctgtaaatgttgtgagctgtgaactttcaagagtgagtccccaggactcagattattcatggaatgttcttgcagttgataagaacaacattcttgcagtttccagcagccttattacactccctcagatgtactatgggattaaggtttctcagactgaaagcaattgggagtggcagggagtttcaactcctttcccaaagccatctgataagatcagctccgtactagcagagcataagttcagcatactcaaaatcccaattagcaacccttctgacgaacttgccaatggggctaagcttccttttgaggctatttttgtgtcgcataaggattctgcaagtaatccaacaatcgttgttcttcatggtggaccacactcagtttatccatcaagttattccaaatccttggcttttcttttttcgcagggatataatcttcttgttgtgaactacaggggttcattaggctttggggaagaagcactgcaatcccttcctggcaatattggttctcaggatgtcaatgatgtattgacggcattggaccttgttataaagagaggactaatagatccatccagagttgccgtagttggaggttcacatggaggtttcctgacaacacatttgattggccaggctccagacacatttgttgcagcagctgctcgaaacccagtatgtaacttatcattgatggtgggtacctctgacatccctgattggtgctttgtcgagatttatggaaaagaagggaaaaagtacttctcagagtctccttcagtagacgatctttgtcaattccaccagaagtcaccaatttcacatattgcaaagtacgcaagggctttgaaggagaggggaatcgaaacgaaaactattgtcttcccagaagatatccatggaattgacaagcctcagtctgatttcgaaagcttcctcaacataggggtttggttcaagaagcacatgggcaaataaacattagtgcttcccattacattcatgatttactttttcattgttactaaatgcctgtaaccgggtcaaagtatacatgatttgcctgtccaatctggtgtttgccaagatggaataattcttgaagacatatagaagcccgtgtttattctagtgtggattctggaataccaactgtagctagtttatataataatcttctaataaatgatgcttatgtgttaatgtgaaacggtgcgtgcttttgaattgtattcagaaaaaaaatggcccagctgaccagctcactgttgtttag

SEQ ID NO: 10291 - DNA, 2518 bp, Zea Mays
agccgagccagacggagccgatatccaaccctccatctaaccagtggtaatggtggttttggtcagagtgttggtcgcctgtgccaaattccgctgcccggcggcgaatttactcctctcagcctctacttctcgggttcgagctcaacccggcgggccactgctgcgacaaaggactagcaaggtttcattgcgctcaattgctatgtctaccacacaagcctcagaagcagctgctgacaaaggattgcctctggcagtggacgctaccatgattgatgagtatgcctcccagtcaaagttgctgcaagaatttgttaaaatcccaactattggcaaggcttggatcttcaattccaaggatggtttgaagggatatcatggaaccaggaagagactttcatagcttatgttgccgaggagcctcctcaaccaaagccagtgtttaatgattatggattcaagaaggaaggtttatcagaaaaggactgcaagagctggaagggacaaggggattgggaggagacctggggagaaacctattccaagaaaaggattcctgcactgttcgtcatcaacatctccagtggtgaagttcgacctgtcaagcaaatacctagatcattaagtgttggccaagtgatttgggctccatcatcttcatatagcttggtttttgttgcatggtcatctgacaatgggttccaagggacaccaaggaagcttggtattaaatactgctacaacagaccatgtgctctgtatgctgctcctgatcctttcggacaagaagctgagaaatcattaactgagggcaataagggtgaaactacaactatgatcaaattaacagcaaacctgagcagtgcctttttcccacggttcagtccggatgggaagtatcttgtcttcatctcagcgaagagtgctgtagatagtggggcacacaatgctacaaattcattgcatagaatcgaatggtgtacagatggaaaactggatgggagccttggagttgctgacgtggtgcccattgtgctgtgccccaaagataactgttttcctgggctatactgctttggcttgcttagggatccatggcttaccgatggacaaactatgattatatcttctgtctggggaagtagggaagtaatactttctgtaaatgttgtgagctgtgaactttcaagagtgagtccccaggactcagattattcatggaatgttcttgcagttgataagaacaacattcttgcagtttccagcagccttattacactccctcagatgtactatgggattaaggtttctcagactgaaagcaattgggagtggcagggagtttcaactcctttcccaaagccatctgataagatcagctccgtactagcagagcataagttcagcatactcaaaatcccaattagcaacccttctgacgaacttgccaatggggctaagcttccttttgaggctatttttgtgtcgcataaggattctgcaagtaatccaacaatcgttgttcttcatggtggaccacactcagtttatccatcaagttattccaaatccttggcttttcttttttcgcagggatataatcttcttgttgtgaactacaggggttcattaggctttggggaagaagcactgcaatcccttcctggcaatattggttctcaggatgtcaatgatgtattgacggcattggaccttgttataaagagaggactaatagatccatccagagttgccgtagttggaggttcacatggaggtttcctgacaacacatttgattggccaggctccagacacatttgttgcagcagctgctcgaaacccagtatgtaacttatcattgatggtgggtacctctgacatccctgattggtgctttgtcgagatttatggaaaagaagggaaaaagtacttctcagagtctccttcagtagacgatctttgtcaattccaccagaagtcaccaatttcacatattgcaaaggtcaagacaccaacactctttcttcttggagcgcaagatctcagagttcctgtttctaatggcctgcagtacgcaagggctttgaaggagaggggaatcgaaacgaaaactattgtcttcccagaagatatccatggaattgacaagcctcagtctgatttcgaaagcttcctcaacataggggtttggttcaagaagcacatgggcaaataaacattagtgcttcccattacattcatgatttactttttcattgttactaaatgcctgtaaccgggtcaaagtatacatgatttgcctgtccaatctggtgtttgccaagatggaataattcttgaagacatatagaagcccgtgtttattctagtgtggattctggaataccaactgtagctagtttatataataatcttctaataaatgatgcttatgtgttaatgtgaaacggtgcgtgcttttgaattgtattcagaaaaaaaatggcccagctgaccagctcactgttgtttag

SEQ ID NO: 10292 - DNA, 2869 bp, Zea Mays
ccgagtgttaagccgaaatagccgaacaacgagccagacggagccgagccagacggagccgatatccaaccctccatctaaccagtggtaatggtggttttggtcagagtgttggtcgcctgtgccaaattccgctgcccggcggcgaatttactcctctcagcctctacttctcgggttcgagctcaacccggcgggccactgctgcgacaaaggactagcaaggtttcattgcgctcaattgctatgtctaccacacaagcctcagaagcagctgctgacaaaggattgcctctggcagtggacgctaccatgattgatgagtatgcctcccagtcaaagttgctgcaagaatttgttaaaatcccaactattggcaaggcttggatcttcaattccaaggatgacgacatgtccaaagcagtggtttcgattggcaaatcagatcttttggccaataagaggagacaattccttttgaatactcacatttcaaagagtccctcaaagtctgtcgattttcagtggtcccccttccctactgaaataagtggagtgtcagcaatagttccatctccatctggagaaaaacttcttctagtacgcaattctgaagatgattcccctacaaaactagagatttggggcccatgtcagttagagaatgagatacatattgcaaaatctgttcatggatcactctatactgatgaatggtttgaagggatatcatggaaccaggaagagactttcatagcttatgttgccgaggagcctcctcaaccaaagccagtgtttaatgattatggattcaagaaggaaggtttatcagaaaaggactgcaagagctggaagggacaaggggattgggaggagacctggggagaaacctattccaagaaaaggattcctgcactgttcgtcatcaacatctccagtggtgaagttcgacctgtcaagcaaatacctagatcattaagtgttggccaagtgatttgggctccatcatcttcatatagcttggtttttgttgcatggtcatctgacaatgggttccaagggacaccaaggaagcttggtattaaatactgctacaacagaccatgtgctctgtatgctgctcctgatcctttcggacaagaagctgagaaatcattaactgagggcaataagggtgaaactacaactatgatcaaattaacagcaaacctgagcagtgcctttttcccacggttcagtccggatgggaagtatcttgtcttcatctcagcgaagagtgctgtagatagtggggcacacaatgctacaaattcattgcatagaatcgaatggtgtacagatggaaaactggatgggagccttggagttgctgacgtggtgcccattgtgctgtgccccaaagataactgttttcctgggctatactgctttggcttgcttagggatccatggcttaccgatggacaaactatgattatatcttctgtctggggaagtagggaagtaatactttctgtaaatgttgtgagctgtgaactttcaagagtgagtccccaggactcagattattcatggaatgttcttgcagttgataagaacaacattcttgcagtttccagcagccttattacactccctcagatgtactatgggattaaggtttctcagactgaaagcaattgggagtggcagggagtttcaactcctttcccaaagccatctgataagatcagctccgtactagcagagcataagttcagcatactcaaaatcccaattagcaacccttctgacgaacttgccaatggggctaagcttccttttgaggctatttttgtgtcgcataaggattctgcaagtaatccaacaatcgttgttcttcatggtggaccacactcagtttatccatcaagttattccaaatccttggcttttcttttttcgcagggatataatcttcttgttgtgaactacaggggttcattaggctttggggaagaagcactgcaatcccttcctggcaatattggttctcaggatgtcaatgatgtattgacggcattggaccttgttataaagagaggactaatagatccatccagagttgccgtagttggaggttcacatggaggtttcctgacaacacatttgattggccaggctccagacacatttgttgcagcagctgctcgaaacccagtatgtaacttatcattgatggtgggtacctctgacatccctgattggtgctttgtcgagatttatggaaaagaagggaaaaagtacttctcagagtctccttcagtagacgatctttgtcaattccaccagaagtcaccaatttcacatattgcaaaggtcaagacaccaacactctttcttcttggagcgcaagatctcagagttcctgtttctaatggcctgcagtacgcaagggctttgaaggagaggggaatcgaaacgaaaactattgtcttcccagaagatatccatggaattgacaagcctcagtctgatttcgaaagcttcctcaacataggggtttggttcaagaagcacatgggcaaataaacattagtgcttcccattacattcatgatttactttttcattgttactaaatgcctgtaaccgggtcaaagtatacatgatttgcctgtccaatctggtgtttgccaagatggaataattcttgaagacatatagaagcccgtgtttattctagtgtggattctggaataccaactgtagctagtttatataataatcttctaataaatgatgcttatgtgttaatgtgaaacggtgcgtgcttttgaattgtattcagaaaaaaaatggcccagctgaccagctcactgttgtttag

SEQ ID NO: 10293 - DNA, 2254 bp, Zea Mays
ccatctaaccagtggtaatggtggttttggtcagagtgttggtcgcctgtgccaaattccgctgcccggcggcgaatttactcctctcagcctctacttctcgggttcgagctcaacccggcgggccactgctgcgacaaaggactagcaaggtttcattgcgctcaattgctatgtctaccacacaagcctcagaagcagctgctgacaaaggattgcctctggcagtggacgctaccatgattgatgagtatgcctcccagtcaaagttgctgcaagaatttgttaaaatcccaactattggcaaggcttggatcttcaattccaaggatgacgacatgtccaaagcagtggtttcgattggcaaatcagatcttttggccaataagaggagacaattccttttgaatactcacatttcaaagagtccctcaaagtctgtcgattttcagtggtcccccttccctactgaaataagtggagtgtcagcaatagttccatctccatctggagaaaaacttcttctagtacgcaattctgaagatgattcccctacaaaactagagatttggggcccatgtcagttagagaatgagatacatattgcaaaatctgttcatggatcactctatactgatgaatggtttgaagggatatcatggaaccaggaagagactttcatagcttatgttgccgaggagcctcctcaaccaaagccagtgtttaatgattatggattcaagaaggaaggtttatcagaaaaggactgcaagagctggaagggacaaggggattgggaggagacctggggagaaacctattccaagaaaaggattcctgcactgttcgtcatcaacatctccagtggtgaagttcgacctgtcaagcaaatacctagatcattaagtgttggccaagtgatttgggctccatcatcttcatatagcttggtttttgttgcatggtcatctgacaatgggttccaagggacaccaaggaagcttggtattaaatactgctacaacagaccatgtgctctgtatgctgctcctgatcctttcggacaagaagctgagaaatcattaactgagggcaataagggtgaaactacaactatgatcaaattaacagcaaacctgagcagtgcctttttcccacggttcagtccggatgggaagtatcttgtcttcatctcagcgaagagtgctgtagatagtggggcacacaatgctacaaattcattgcatagaatcgaatggtgtacagatggaaaactggatgggagccttggagttgctgacgtggtgcccattgtgctgtgccccaaagataactgttttcctgggctatactgctttggcttgcttagggatccatggcttaccgatggacaaactatgattatatcttctgtctggggaagtagggaagtaatactttctgtaaatgttgtgagctgtgaactttcaagagtgagtccccaggactcagattattcatggaatgttcttgcagttgataagaacaacattcttgcagtttccagcagccttattacactccctcagatgtactatgggattaaggtttctcagactgaaagcaattgggagtggcagggagtttcaactcctttcccaaagccatctgataagatcagctccgtactagcagagcataagttcagcatactcaaaatcccaattagcaacccttctgacgaacttgccaatggggctaagcttccttttgaggctatttttgtgtcgcataaggattctgcaagtaatccaacaatcgttgttcttcatggtggaccacactcagtttatccatcaagttattccaaatccttggcttttcttttttcgcagggatataatcttcttgttgtgaactacaggggttcattaggctttggggaagaagcactgcaatcccttcctggcaatattggttctcaggatgtcaatgatgtattgacggcattggaccttgttataaagagaggactaatagatccatccagagttgccgtagttggaggttcacatggaggtttcctgacaacacatttgattggccaggctccagacacatttgttgcagcagctgctcgaaacccagtatgtaacttatcattgatggtcaagacaccaacactctttcttcttggagcgcaagatctcagagttcctgtttctaatggcctgcaggcctgatgcagtgatgagagctgtctcagttgagtcac

SEQ ID NO: 10294 - DNA, 2399 bp, Zea Mays
caaccctccatctaaccagtggtaatggtggttttggtcagagtgttggtcgcctgtgccaaattccgctgcccggcggcgaatttactcctctcagcctctacttctcgggttcgagctcaacccggcgggccactgctgcgacaaaggactagcaaggtttcattgcgctcaattgctatgtctaccacacaagcctcagaagcagctgctgacaaaggattgcctctggcagtggacgctaccatgattgatgagtatgcctcccagtcaaagttgctgcaagaatttgttaaaatcccaactattggcaaggcttggatcttcaattccaaggatgacgacatgtccaaagcagtggtttcgattggcaaatcagatcttttggccaataagaggagacaattccttttgaatactcacatttcaaagagtccctcaaagtctgtcgattttcagtggtcccccttccctactgaaataagtggagtgtcagcaatagttccatctccatctggagaaaaacttcttctagtacgcaattctgaagatgattcccctacaaaactagagatttggggcccatgtcagttagagaatgagatacatattgcaaaatctgttcatggatcactctatactgatgaatggtttgaagggatatcatggaaccaggaagagactttcatagcttatgttgccgaggagcctcctcaaccaaagccagtgtttaatgattatggattcaagaaggaaggtttatcagaaaaggactgcaagagctggaagggacaaggggattgggaggagacctggggagaaacctattccaagaaaaggattcctgcactgttcgtcatcaacatctccagtggtgaagttcgacctgtcaagcaaatacctagatcattaagtgttggccaagtgatttgggctccatcatcttcatatagcttggtttttgttgcatggtcatctgacaatgggttccaagggacaccaaggaagcttggtattaaatactgctacaacagaccatgtgctctgtatgctgctcctgatcctttcggacaagaagctgagaaatcattaactgagggcaataagggtgaaactacaactatgatcaaattaacagcaaacctgagcagtgcctttttcccacggttcagtccggatgggaagtatcttgtcttcatctcagcgaagagtgctgtagatagtggggcacacaatgctacaaattcattgcatagaatcgaatggtgtacagatggaaaactggatgggagccttggagttgctgacgtggtgcccattgtgctgtgccccaaagataactgttttcctgggctatactgctttggcttgcttagggatccatggcttaccgatggacaaactatgattatatcttctgtctggggaagtagggaagtaatactttctgtaaatgttgtgagctgtgaactttcaagagtgagtccccaggactcagattattcatggaatgttcttgcagttgataagaacaacattcttgcagtttccagcagccttattacactccctcagatgtactatgggattaaggtttctcagactgaaagcaattgggagtggcagggagtttcaactcctttcccaaagccatctgataagatcagctccgtactagcagagcataagttcagcatactcaaaatcccaattagcaacccttctgacgaacttgccaatggggctaagcttccttttgaggctatttttgtgtcgcataaggattctgcaagtaatccaacaatcgttgttcttcatggtggaccacactcagtttatccatcaagttattccaaatccttggcttttcttttttcgcagggatataatcttcttgttgtgaactacaggggttcattaggctttggggaagaagcactgcaatcccttcctggcaatattggttctcaggatgtcaatgatgtattgacggcattggaccttgttataaagagaggactaatagatccatccagagttgccgtagttggaggttcacatggaggtttcctgacaacacatttgattggccaggctccagacacatttgttgcagcagctgctcgaaacccagtatgtaacttatcattgatggtgggtacctctgacatccctgattggtgctttgtcgagatttatggaaaagaagggaaaaagtacttctcagagtctccttcagtagacgatctttgtcaattccaccagaagtcaccaatttcacatattgcaaaggtcaagacaccaacactctttcttcttggagcgcaagatctcagagttcctgtttctaatggcctgcaggcctgatgcagtgatgagagctgtctcagttgagtcac

SEQ ID NO: 10295 - DNA, 1715 bp, Zea Mays
cagctcttgaaaaaaaagttccacttcttcttgttcttcctcttgttttctcgtctctcggatgacatctcagagttgggactagcaaggtttcattgcgctcaattgctatgtctaccacacaagcctcagaagcagctgctgacaaaggattgcctctggcagtggacgctaccatgattgatgagtatgcctcccagtcaaagttgctgcaagaatttgttaaaatcccaactattggcaaggcttggatcttcaattccaaggatgacgacatgtccaaagcagtggtttcgattggcaaatcagatcttttggccaataagaggagacaattccttttgaatactcacatttcaaagagtccctcaaagtctgtcgattttcagtggtcccccttccctactgaaataagtggagtgtcagcaatagttccatctccatctggagaaaaacttcttctagtacgcaattctgaagatgattcccctacaaaactagagatttggggcccatgtcagttagagaatgagatacatattgcaaaatctgttcatggatcactctatactgatgaatggtttgaagggatatcatggaaccaggaagagactttcatagcttatgttgccgaggagcctcctcaaccaaagccagtgtttaatgattatggattcaagaaggaaggtttatcagaaaaggactgcaagagctggaagggacaaggggattgggaggagacctggggagaaacctattccaagaaaaggattcctgcactgttcgtcatcaacatctccagtggtgaagttcgacctgtcaagcaaatacctagatcattaagtgttggccaagtgatttgggctccatcatcttcatatagcttggtttttgttgcatggtcatctgacaatgggttccaagggacaccaaggaagcttggtattaaatactgctacaacagaccatgtgctctgtatgctgctcctgatcctttcggacaagaagctgagaaatcattaactgagggcaataagggtgaaactacaactatgatcaaattaacagcaaacctgagcagtgcctttttcccacggttcagtccggatgggaagtatcttgtcttcatctcagcgaagagtgctgtagatagtggggcacacaatgctacaaattcattgcatagaatcgaatggtgtacagatggaaaactggatgggagccttggagttgctgacgtggtgcccattgtgctgtgccccaaagataactgttttcctgggctatactgctttggcttgcttagggatccatggcttaccgatggacaaactatgattatatcttctgtctggggaagtagggaagtaatactttctgtaaatgttgtgagctgtgaactttcaagagtgagtccccaggactcagattattcatggaatgttcttgcagttgataagaacaacattcttgcagtttccagcagccttattacactccctcagatgtactatgggattaaggtttctcagactgaaagcaattgggagtggcagggagtttcaactcctttcccaaagccatctgataagatcagctccgtactagcagagcataagttcagcatactcaaaatcccaattagcaacccttctgacgaacttgccaatggctatgtaacttttcttgaagctagtacattgccaacattgtaa

SEQ ID NO: 10296 - DNA, 2100 bp, Zea Mays
ccatctaaccagtggtaatggtggttttggtcagagtgttggtcgcctgtgccaaattccgctgcccggcggcgaatttactcctctcagcctctacttctcgggttcgagctcaacccggcgggccactgctgcgacaaaggactagcaaggtttcattgcgctcaattgctatgtctaccacacaagcctcagaagcagctgctgacaaaggattgcctctggcagtggacgctaccatgattgatgagtatgcctcccagtcaaagttgctgcaagaatttgttaaaatcccaactattggcaaggcttggatcttcaattccaaggatgacgacatgtccaaagcagtggtttcgattggcaaatcagatcttttggccaataagaggagacaattccttttgaatactcacatttcaaagagtccctcaaagtctgtcgattttcagtggtcccccttccctactgaaataagtggagtgtcagcaatagttccatctccatctggagaaaaacttcttctagtacgcaattctgaagatgattcccctacaaaactagagatttggggcccatgtcagttagagaatgagatacatattgcaaaatctgttcatggatcactctatactgatgaatggtttgaagggatatcatggaaccaggaagagactttcatagcttatgttgccgaggagcctcctcaaccaaagccagtgtttaatgattatggattcaagaaggaaggtttatcagaaaaggactgcaagagctggaagggacaaggggattgggaggagacctggggagaaacctattccaagaaaaggattcctgcactgttcgtcatcaacatctccagtggtgaagttcgacctgtcaagcaaatacctagatcattaagtgttggccaagtgatttgggctccatcatcttcatatagcttggtttttgttgcatggtcatctgacaatgggttccaagggacaccaaggaagcttggtattaaatactgctacaacagaccatgtgctctgtatgctgctcctgatcctttcggacaagaagctgagaaatcattaactgagggcaataagggtgaaactacaactatgatcaaattaacagcaaacctgagcagtgcctttttcccacggttcagtccggatgggaagtatcttgtcttcatctcagcgaagagtgctgtagatagtggggcacacaatgctacaaattcattgcatagaatcgaatggtgtacagatggaaaactggatgggagccttggagttgctgacgtggtgcccattgtgctgtgccccaaagataactgttttcctgggctatactgctttggcttgcttagggatccatggcttaccgatggacaaactatgattatatcttctgtctggggaagtagggaagtaatactttctgtaaatgttgtgaggtgatttgaaacatttgttttgtcctttgatagactgatatatacgggagcatatcctgcgcaatcaatcatgctggtggaatcaagtgatccggtgcatccaatcaaaatctaacaattactgctattttaggtggaagaggttaaatgtaaaatagacattaagtttctggtgcagtcaccgttggattttgattggatgcacactgcaccaaatcgcttgattgcatgattgcaccaacatgattgattgcacaagatatgttcatgatatatacatagtgtcacttgttatttgaatttaaaattattcttttatcagctgtgaactttcaagagtgagtccccaggactcagattattcatggaatgttcttgcagttgataagaacaacattcttgcagtttccagcagccttattacactccctcagatgtactatgggattaaggtttctcagactgaaagcaattgggagtggcagggagtttcaactcctttcccaaagccatctgataagatcagctccgtactagcagagcataagttcagcatactcaaaatcccaattagcaacccttctgacgaacttgccaatggctatgtaacttttcttgaagctagtacattgccaacattgtaa

SEQ ID NO: 10297 - DNA, 742 bp, Zea Mays
ggcccattcgttgttcacccagccacccaggaggccaggaatattcggtcttccgtcggccaggaatctcaggtcacgtcttcggtcttccgtcggccgcctgctaccgccggccgccccacatcccaccgcgccaccgcggcatcgccccacaccacatcccacagagcaaatgagaaggtttttccaaccactttcaagaggctctgacactagtgctaataataatgtgaataacacaccaactgttggagggacgttcaatccggatgagatagttgcagatcccactttaaggaggcaaatttatgaatatgataaagatgtccaagaccaagtgagaagggcatatgttctgaatggtccatgccaaccaaagggtttagatttccctcgtagacagtatggacaaagttcaaggccttttaaagaggaatggtatgacaagtatgattggttggagtatagtgaatcaaaagatgtagtgtattgcttttattgctttctttttgagcaagcagtgaagggtgataaatatgaagctttcactaaaattgggtataataattggaaagatgcagttgaaaggttgaaatcacatgttggtggtgttaacaatatccacaacaatgctaggttacatcttttctaactgtagattggatttttgttggtgattttggtgccgcactgcagattaagagagaaattttggtatgcatgttattatgaaacatttcta

SEQ ID NO: 10298 - DNA, 241 bp, Zea Mays
ggcacgtacgcacgcgcgcgagacggcaaggacgagacgttcgcgcgaggccaaaacgccgccgctaatctagggcaaaacagaacagaagagagcaaaacaagacgcgcgcgctggctattaataggcggagcaagtatggctgctactaatcatttccttcttcgacgcgtgcgttgttggtgggaaggagagagagacgacgatactatgtgtgtgagcagctatagcgtagcgtgtg

SEQ ID NO: 10299 - DNA, 1458 bp, Zea Mays
gcctccacatgttctcgtgcaggaacgagagccccgcctcgcacctcgcgggctccagcgaccacttggtcagcgcgacgacgcaggcgagggtgttgatcatgcggtcgtaggcggagaacagggccgagtcgccccaggagccgtcgggcagctggtggtccacgatccagcgcacggtggccgggaactggggctgggcgccgccgtcgccgcccaccttcggcaccatcgccacccacgccgtgtcgtacgccgaggcgctggtatccccgtcgttcatcgaccgtagcatcgccctcacctggtcgataagtggctgcagctctgcctcctcagcctacagacgaagatttattaatttcagcaacaagcatctgtgaactgaaaacaacctaagacggaccacctggtgctcatcctcaaggtcttgtggtttccctggccatttcgcaatttcggactcggtttccacacggctggtctggaacactgcaggaaaacccagctccaacaaaacatttctcaaaggaggaaaactgaagaaaattatgtgactggtcagattgagctactgttggtttatttttcggcacccaattgcatctctagcaagtgttcagcatgcaacaaaggaccatgaacctgctggcctgagcagagcagcgtaacgtcaactagagcgtcagattcagcactgcattacccattttgacttcatttctcccaacagaagatagatggccagttctttaaaatctcccttacacacacaatcagattccctgctgtgcgcgcgagttacatggcaaaaaaaaactgaagatacctctgcggtccagtctaatcatctatctaccttggagtgccatatctactatattcctgatcggatatttgatctctgtatccatcaaaatcaccaagttgatccaatggcaatttgcattagctaaaaagaacagtggggtacaaggaggacaggatccctctgaccacacacatacagagatacctttgtgattgatgagtaaagttcgccaaggatttggggtcaagaaacaaagaggacaatgtggacagttacctcataatcaatcacacatcaagaatcttaatttcgcagtcaactactgtttgcagcagtacggttgatagcgatccaccttccgtcaccgataaggcatcgatcgatgatcgtgaaggagctaaaacctttttttcatatattttgtcaaaataaataaatagatctcctactactttaaaggctagtttggcaatcccattctttgaagaaatttccattttccaatgaaaccagtttattttcccttgcgggccgtttgaatcccttcattttaaaggaattgaaattcattcaataaagtaacatatttagctcgaaatttgatattccaccattttctaaagtccagatataaggttacctcgaat

SEQ ID NO: 10300 - DNA, 2650 bp, Zea Mays
cctctcttcgttcccgcgcggagagggagagggagaaacaggggagcggcggccccctcctcttccctgccacggtttcttgcggattatttctaccctattttattcaggatttccggttggatcctcctatggggaaattttaacttctgctgcaaccggtggtgcaattaatcagccattcacgcattgtgctgttcattgaggcattatcggtgtggttcattgagaaagcgcctgtatgcgaattttcatgtaaaaagagctgatcagacatggctgcgaaggacggctcagggtcacaggaccaggggcacaggttgtggcccatgctgtcctacgcttgcggcgagctatgtgtgatcatgctgctctacgtggctgcctttgcatcccatgcagccacaaggctggcgcgcatctgcgggctcaggccaccatgcatcctgtgcacgaggctggaccgcgccctccatggaaacttgccatggttctccgcggacctggtctgttccgtgcatcggtccgaggtctcgtctctggctcactgcaagagccatggccggcttgcacggtccggcgatctctgcaaatcatgcctcctttcatgcacggcggtaggtgcccgtgaggaggtggtgaactctcggcctacgacatccagcagcaggttgtgttcttgctgttctgatccgttcaagaataatactggcgacacgcagaggcattctggagcagccaatgctgtggtgtcttgggatagtgtacctgcagaccatccaaatgagaagacttctgtggtgggcattgaggaagtccaagaatctgacggtcctacaaaggacagcgccgccccttctgcgaatggtggggcagcgaagagcaaccacagatcggccgcgccgacacgcattgctgtggacagcaacggcagtgtaaaaaatgcctccgtcgttgcaagggccaacttgacgtcgcctcggccgtcagaaattatctctgccagggacagcagttcaacgacgcagcaagaggtgaaggcgctcctttctcagatgtcctatgcgcggggcggcctcgacagttcttcgattgaaggatctcctgacgctccgaacgaagaaagcaacgctacgagcaacaagagcccgtatctcgagaggaactattgtgtgctggaaccttcagacgggagcctcgctgacgatgtcgaagggggaagctctctcgagaacgtaaagagacagcttgagctcaacaggaaggccatggctgctctacacaaagagcttgaggaagaacggagcgcgtcggcagttgcggctagccagacgatggccatgatcaataggttgcaggaggagaaggccgcgatgcagatggaagcactgcagcacctgaggatgatggaacagcaggctgaccacgaccacctagcgatacaggatctgcatgatttgctcacagagagggagaaagaattgctcgacttggacgctgaacttgcacactgcaggaggctcctgcagaacgacgatccgttcaatggcgacagatttgatggcactgattatacaacgaacaacaacacggattttgtggggagcgccatgtcccattttgaagacgacaaggcatacattttggaatccttgagcagactggaggaaaatcttggcatttccacaatcagacttgcttctggtgacgccagaaattgtcaagaagacatactgtttgaagatcaggcaagagctgatgcatcgccttccagctgtgacgagtcgagtggtgtagcaagccttaaaattcagatttctctgttgaatataagactgagggcacttgaagaggatcaggagttcctcaatcaggtattgagttcgctccaatgtggtagtgatgggctgcagtgtatacaggagataagcaggcacttagcagagttgcgaagagttgtggctcactaaaatgaaaatggttttgccccgagttcacactttttggccgtcatgaggttctcctttgtaacggcaaacctatttgcagtcatctagatagcaggctgctttcagacgaagaagaacaggagctgcagatccttcctgtgccttctgacatacacgtctgcatacatggatatgatcaccgtcatcttcgtagcaatgctcttctctggggacttcgtatcagtctgctgtgcagttgggttcttcaccctatggactttgtgctgcctgcaatggcacttatcaagacaaacgatgactgataacctagggttgcagtgtgctgtgaagatgctccgctctgctgtcgcaatcttcttcttggtcatagcaccaagttaccttgtgcgacatagcaacaaagtgtaccgatgcaacctcttgcaactgcaggttctcatcagacaatgcgcccttaagctcatcagcgtcaactaggacacaccacgaagctcatcaacaccaaggatgaaatcctcatgtctagtttgaaaacataaggggttgctcggccaccccattaaccaccgcctaagtccaggatgactccaattcaagtgggggatgatgaggacatcactcgcatacaaacaatgcatgaaccgataacacgagcacgtgcttaaaagctgaatctccag

SEQ ID NO: 10301 - DNA, 1252 bp, Zea Mays
agcaaatccggtctctgtccaacaaatccggtctctccctcgagcagtcgatctcctccggtctctgccaagaacagcaaatgagcagagctcccaagccgttcaatcttcaaatcatgccgtgcttcttcctttttttgccatgctcgtccggccaccaaaacagcaaatggcctattttctccccctctctgtctgtctgccaagaacagcaaataagcagagctccaagccgttcaatctccagaccatgacgtgcttcttccttccttttttttgccacgctcgtccggccaccaaaacagcaaatgggctattttctctccctctctgtccgtgtcttgttgtagcatctcatgattcttttttctacttgtacaggattaggagtgcacctattttgattctgcgaactgagtaactgattctaaaggatagggcaagaaggctcctttctaagcctatcaagtttttcaatgaaatgcaagagttgtttattaacagcagtgctgatggctctctagccatggaagctacaacttgtatgaatgaaactcatcctggagatgacagtgacttcaatgatgatgtgtgcagtgacttctccaactatcctcagcctgtgcatgatctaggtgatgattctgacactttacaatctcccaatcatcatccatctcaaagtgttgatcatagctcgtcaagttctggactgaagcgcccacaaggagagggagtaccagcgaagaggaacgtggaaccaaagagtcgcacaacaaaggaatgtatctagcacacaaagatcaaaagggtatgcgtggtttcttatctgctgcatcagacataacatttgagtcatgggtactaaagcatctgagtgatttggacctatgaatcgactagcaggatgatccatgtaggagatgaatggtgtgatagttggggtttttgcatttcttctaggttgatggatgtcaattgatggagatatttggtggttgtgactagtgttacattgctctttttgttgatttttaactttgagggtaccaatgagcatagtgcatagcaccagtaccttttacaattatggaatctctgcaaagcaaggaaggcattggactgtaataaattttgctccaatttcgcattgcaaatgttctagtagtgtcagatttttctctaatgcttctagtgaaaaatgagaccttttggagacagtttctaaattttgtgtgctgctagcctaaat

SEQ ID NO: 10302 - DNA, 1013 bp, Zea Mays
gctgtggcatgctggaccggcggctaggcgggcgcgtcctgctccaatccggctaggcgggcgcgtcagccgcgagctaatgagcagatggaattataaagctcccaagaacagcaaatccggtctctgtccaacaaatccggattaggagtgcacctattttgattctgcgaactgagtaactgattctaaaggatagggcaagaaggctcctttctaagcctatcaagtttttcaatgaaatgcaagagttgtttattaacagcagtgctgatggctctctagccatggaagctacaacttgtatgaatgaaactcatcctggagatgacagtgacttcaatgatgatgtgtgcagtgacttctccaactatcctcagcctgtgcatgatctaggtgatgattctgacactttacaatctcccaatcatcatccatctcaaagtgttgatcatagctcgtcaagttctggactgaagcgcccacaaggagagggagtaccagcgaagaggaacgtggaaccaaagagtcgcacaacaaaggaatgtatctagcacacaaagatcaaaagggtatgcgtggtttcttatctgctgcatcagacataacatttgagtcatgggtactaaagcatctgagtgatttggacctatgaatcgactagcaggatgatccatgtaggagatgaatggtgtgatagttggggtttttgcatttcttctaggttgatggatgtcaattgatggagatatttggtggttgtgactagtgttacattgctctttttgttgatttttaactttgagggtaccaatgagcatagtgcatagcaccagtaccttttacaattatggaatctctgcaaagcaaggaaggcattggactgtaataaattttgctccaatttcgcattgcaaatgttctagtagtgtcagatttttctctaatgcttctagtgaaaaatgagaccttttggagacagtttctaaattttgtgtgctgctagcctaaat

SEQ ID NO: 10303 - DNA, 1024 bp, Zea Mays
gccgcacgccccactcctcctctcacctcacttgctcgtcgccgcacctggatctggctctcgtctcctccaagcacggagtgcacctattttgattctgcgaactgagtaactgattctaaaggatagggcaagaaggctcctttctaagcctatcaagtttttcaatgaaatgcaagagttgtttattaacagcagtgctgatggctctctagccatggaagctacaacttgtatgaatgaaactcatcctggagatgacagtgacttcaatgatgatgtgtgcagtgacttctccaactatcctcagcctgtgcatgatctaggtgatgattctgacactttacaatctcccaatcatcatccatctcaaagtgttgatcatagctcgtcaagttctggactgaagcgcccacaaggagagggagtaccagcgaagaggaacgtggaaccaaagagtcgcacaacaaaggaatgtatctagcacacaaagatcaaaagggtatgcgtggtttcttatctgctgcatcagacataacatttgagtcatgggtactaaagcatctgagtgatttggacctatgaatcgactaggtaattttttgttgtattttctatcattatagctctattgtttatgcttataataatttgagatattttttgcaattgtagcaggatgatccatgtaggagatgaatggtgtgatagttggggtttttgcatttcttctaggttgatggatgtcaattgatggagatatttggtggttgtgactagtgttacattgctctttttgttgatttttaactttgagggtaccaatgagcatagtgcatagcaccagtaccttttacaattatggaatctctgcaaagcaaggaaggcattggactgtaataaattttgctccaatttcgcattgcaaatgttctagtagtgtcagatttttctctaatgcttctagtgaaaaatgagaccttttggagacagtttctaaattttgtgtgctgctagcctaaat

SEQ ID NO: 10304 - DNA, 985 bp, Zea Mays
tttttacgccgcacctggggcgctcgttttggccgccgcacgccgcacgccccactcctcctctcacctcacttgctcgtcgccgcacctggatctggctctcgtctcctccaagcacggattaggagtgcacctattttgattctgcgaactgagtaactgattctaaagggcaagaaggctcctttctaagcctatcaagtttttcaatgaaatgcaagagttgtttattaacagcagtgctgatggctctctagccatggaagctacaacttgtatgaatgaaactcatcctggagatgacagtgacttcaatgatgatgtgtgcagtgacttctccaactatcctcagcctgtgcatgatctaggtgatgattctgacactttacaatctcccaatcatcatccatctcaaagtgttgatcatagctcgtcaagttctggactgaagcgcccacaaggagagggagtaccagcgaagaggaacgtggaaccaaagagtcgcacaacaaaggaatgtatctagcacacaaagatcaaaagggtatgcgtggtttcttatctgctgcatcagacataacatttgagtcatgggtactaaagcatctgagtgatttggacctatgaatcgactagcaggatgatccatgtaggagatgaatggtgtgatagttggggtttttgcatttcttctaggttgatggatgtcaattgatggagatatttggtggttgtgactagtgttacattgctctttttgttgatttttaactttgagggtaccaatgagcatagtgcatagcaccagtaccttttacaattatggaatctctgcaaagcaaggaaggcattggactgtaataaattttgctccaatttcgcattgcaaatgttctagtagtgtcagatttttctctaatgcttctagtgaaaaatgagaccttttggagacagtttctaaattttgtgtgctgctagcctaaat

SEQ ID NO: 10305 - DNA, 868 bp, Zea Mays
tttttacgccgcacctggggcgctcgttttggccgccgcacgccgcacgccccactcctcctctcacctcacttgctcgtcgccgcacctggatctggctctcgtctcctccaagcacggattaggagtgcacctattttgattctgcgaactgagtaactgattctaaaggatagggcaagaaggctcctttctaagcctatcaagtttttcaatgaaatgcaagagttgtttattaacagcagtgctgatggctctctagccatggaagctacaacttgtatgaatgaaactcatcctggagatgacagtgacttcaatgatgatgtgtgcagtgacttctccaactatcctcagcctgtgcatgatctaggtgatgattctgacactttacaatctcccaatcatcatccatctcaaagtgttgatcatagctcgtcaagttctggactgaagcgcccacaaggagagggagtaccagcgaagaggaacgtggaaccaaagagtcgcacaacaaagcaggatgatccatgtaggagatgaatggtgtgatagttggggtttttgcatttcttctaggttgatggatgtcaattgatggagatatttggtggttgtgactagtgttacattgctctttttgttgatttttaactttgagggtaccaatgagcatagtgcatagcaccagtaccttttacaattatggaatctctgcaaagcaaggaaggcattggactgtaataaattttgctccaatttcgcattgcaaatgttctagtagtgtcagatttttctctaatgcttctagtgaaaaatgagaccttttggagacagtttctaaattttgtgtgctgctagcctaaat

SEQ ID NO: 10306 - DNA, 1098 bp, Zea Mays
atgcctagcattgcaagcaaccaagcaggggagggtgtgtttggttcactgccccagatgccacagcctaaggttaggcatgccccatttttgtcggtaagtgtttggttcatgcctaatattaggcagccacgaaaagtgtggcgtgttacacaacccttgccgtatttttttacgccgcacctggggcgctcgttttggccgccgcacgccgcacgccccactcctcctctcacctcacttgctcgtcgccgcacctggatctggctctcgtctcctccaagcacggattaggagtgcacctattttgattctgcgaactgagtaactgattctaaaggatagggcaagaaggctcctttctaagcctatcaagtttttcaatgaaatgcaagagttgtttattaacagcagtgctgatggctctctagccatggaagctacaacttgtatgaatgaaactcatcctggagatgacagtgacttcaatgatgatgtgtgcagtgacttctccaactatcctcagcctgtgcatgatctagctcgtcaagttctggactgaagcgcccacaaggagagggagtaccagcgaagaggaacgtggaaccaaagagtcgcacaacaaaggaatgtatctagcacacaaagatcaaaagggtatgcgtggtttcttatctgctgcatcagacataacatttgagtcatgggtactaaagcatctgagtgatttggacctatgaatcgactagcaggatgatccatgtaggagatgaatggtgtgatagttggggtttttgcatttcttctaggttgatggatgtcaattgatggagatatttggtggttgtgactagtgttacattgctctttttgttgatttttaactttgagggtaccaatgagcatagtgcatagcaccagtaccttttacaattatggaatctctgcaaagcaaggaaggcattggactgtaataaattttgctccaatttcgcattgcaaatgttctagtagtgtcagatttttctctaatgcttctagtgaaaaatgagaccttttggagacagtttctaaattttgtgtgctgctagcctaaat

SEQ ID NO: 10307 - DNA, 1086 bp, Zea Mays
atgcctagcattgcaagcaaccaagcaggggagggtgtgtttggttcactgccccagatgccacagcctaaggttaggcatgccccatttttgtcggtaagtgtttggttcatgcctaatattaggcagccacgaaaagtgtggcgtgttacacaacccttgccgtatttttttacgccgcacctggggcgctcgttttggccgccgcacgccgcacgccccactcctcctctcacctcacttgctcgtcgccgcacctggatctggctctcgtctcctccaagcacggattaggagtgcacctattttgattctgcgaactgagtaactgattctaaaggatagggcaagaaggctcctttctaagcctatcaagtttttcaatgaaatgcaagagttgtttattaacagcagtgctgatggctctctagccatggaagctacaacttgtatgaatgaaactcatcctggagatgacagtgacttcaatgatgatgtgtgcagtgacttctccaactatcctcagcctgtgcatgatctagctcgtcaagttctggactgaagcgcccacaaggagagggagtaccagcgaagaggaacgtggaaccaaagagtcgcacaacaaagcacacaaagatcaaaagggtatgcgtggtttcttatctgctgcatcagacataacatttgagtcatgggtactaaagcatctgagtgatttggacctatgaatcgactagcaggatgatccatgtaggagatgaatggtgtgatagttggggtttttgcatttcttctaggttgatggatgtcaattgatggagatatttggtggttgtgactagtgttacattgctctttttgttgatttttaactttgagggtaccaatgagcatagtgcatagcaccagtaccttttacaattatggaatctctgcaaagcaaggaaggcattggactgtaataaattttgctccaatttcgcattgcaaatgttctagtagtgtcagatttttctctaatgcttctagtgaaaaatgagaccttttggagacagtttctaaattttgtgtgctgctagcctaaat

SEQ ID NO: 10308 - DNA, 3772 bp, Zea Mays
atttgttttcggtgtgttcactgaaggactccagttctcacaaacttctgatggccttctggcaggtggggcggaggggccactaatggcggatgcttctagggaggaagatgatgatgaccaaggggatgttgggctgggaaaaaaaaggcttttcctcagcccaagtttttggtcattcctggaggcctgctagcaccacatggatgtgggtgtccaagtgcagaacagatggtggaaagaaaatacctgctacgcctgacgaaatacggcggctatggcaccttgtcaggatcgtctccagtgcagagatctcccctctgttgaaaagatcttacgctcaggtggtgagggagggcttcagaatttggtccaagacaaatgggacttcgaggtgagtttgattaaagatggcccagtgagagtcaaagtagaatgtcgtaacccttctagtgttaaaggctttgtggaggtcttctttaacaatgtagggtatgagctgaagttcactgctgaagggccccaacagcaagggtcagttttagcaggctcatcagctgctggaaactctgatgataaggactcttcaagggacagaggaaattctagaagaaaggaagaaaggaagggaggaggaagatttgacaggaaagggaaggaggctgaaatgaaacatgactcaagtcatggtgagtctcaagaggacatggaaaacatcgagagtttgggtttggacttggaaggttctataccaaatctccctattgctagatttcacccaaaggtaggactattttctattgatcacaagatttcaatgcttcagaaagtggtcgaagagcctcggcaggatcaggttcgcgtggatggggtgaatgaataaattatctcacaggataagttcgctaatgtgcagattttgctggacagtcaactgtctgaagtggtcgacctggaggaagtgtgtaaaattccagatgatggctctatgatttttgaaaagattaaaaaaactttagagggtgagccccctgatcacaatgtgggaatggaatccagaatggtccgggaggggaaccaacagggcataaaagatgggttgatgttaagtaaacaacttaaaaacaagggagggctgaagatcgctgcaggaacagataagaatcgaggctccttggggcagcaaagtgaggttacagaggtcagttttgataagggagtggatgaagatggtctggagagtctaactgattgggatagtgatttttcgatgggagatgtggagcaaaggtggaacattgctgcaagtaagaaactgaagaagaaaaaaagcaaaaggaaataccccgtgatgagggcaagttctagaattcctagagatggcatttctattctggagaaagctactaaaagagctcaagagaaggacgctccacaaggtaccacaatcacgaacccgtttactgttctgaatcaagaaaaaaatgaaaacctagctcttgtcatgaaaaatttaggtattgtgcttgaccaatatgatcaaatagatgccttcaaagccgaggaaaaacttagggtggcaatagcagaaggagctgatgtcccatattgtgggtttttacaaaagtctgtttgggccgaatgcaactgtcacatgaagttgagtgacaacttttgggataatcgaccaagcttaataatgaggatatggatatcctgtctaaaccttttgaagaagaggagattaagcaagctattgacagtatgcttgatgattctgcacttggtctgaatggttttggatcagtatttttcaaaaaaatctggaatctgattagagaagattttatcaggatgtttaaggacgtgcacgatggggagttagatattcagaggttgaacttcgggattattacacttatccctaagactaaggatgtcagtacgataaagcaatatcgacccatatgtcttcttaatgtcgatttcaaaatcttcactaaagttctcgtaaatagattgtcctctgtggccaaggtggctatcgggggtagccaaactggtttcatcaaggatagaaacatacttgagggggtggttgtactgcatgaggttatgcatgagctgaaaacaaagaaaaaagattgattatgaaaatcaatttcgagaaaggctatgataaagttagatgggagtttctagaggaagttatgagtacaaaaaaaatcctcgaaaagtggattaatatagtgatgaagacagtaagaaatggcaaggcttgtgtgaatgtgaatggagaaagaagttcttcaaaacatatagggctttgaggcaggggggccctttatcccctttttgttcaacttggtaactgatgccttaagcaatctgttagacacaggaactgaaaaagggcacatctctggggtgttaggggacttaatacctgggggtatctcacacatccaatatgctgatgatacagtgattatgattgatgggtctgataggtccattcttaacctaaaatcaatcatgtattgctttgaatggatgttgggcctaaaaataaatttcacaaaagtgaggtgtatgtcttggggtgtgccaacaagaaaaagaaaggatggccaatatgctcaactgtactatgggatccattcctatgaaatatctgggaattcctatttctgatagtcacttatactcatcttcgtttggccacttgttggataagatggaaagacagctagacccatggaagggtaaacacatgtcgactggtgggagacttattttgaccaattcctgccttagtagcatatacatttataccatggggttgtacctcctgcctaaggaattacaccagaaaatgagttcgatcagggccaattttttcggcagggagctgatggaaatagaagataccacatggcaaaatggggcatggtgtccagaccaaaagaccaaggtggtctcggaattattgatattatgcttatgaatgaatgtttgttggtcaaatgaatttggaagataactcaagggtctgaatatatgtcgtacaaaattcttaaagccaagtatatccccgaaaaaaacttcttcctctccaaaaacaaagggggccctagttctggaaaggaccacacaatgtgaaacatctgttctaatggggagcagtgaacaaagtaattaatggggagggtacccttttttggaaggacacatggttgggagatatcccaatgagaactaaataccctagattttttatatttgctcgaacaaggatgctcgtgtctttgtttgttgggaagagggggcaagaatttggattttttagacctctcactcgtttagaagttaggccgtgggaggaacttcaactggagctgcatgagtgttctctttctcaagggggggatctagttacctgggtcttagataagtctcaccagtttaccaagaaatccttgtacagatttagaactgatgggggtataaaaaagtatattaaaaaatctggaagtacagggtgcctttaaaaatcaaagtttttatgtgccaactttgtaataggaaagttcaagcagctatggtgctggaaaaaaaggatggaagggaaatgccttatgcgctttgttagactgtgtgtgtgagtgtatgtgggccggcaccactgttgggctgccggcccattagggttagggttgagtctctctatatattgtacacatctattatcaatacatcaagccattttcat

SEQ ID NO: 10309 - DNA, 1284 bp, Zea Mays
gcgtgataattatgcttggccaggcaaagtctgctggagtcaccaagcaagcacttacattgtgcaactgcatgatgcagatattcccaagaatgtcttttcaagatttgatagaaaatgcctatagtatctaaaagaacgggcgcatcatcgtagccgtacataaacaatgttattacgaacacgtgctgttctgctctcgtgtaaggtccagctacaagcacgcgcgccgcgcgcgagccgattttggacgcaccagaaccggttagctcgcaccaagccgcacgagcaccgaccggtcaatgacacgactcgccagtcgccactaccggctcccgtttaaattgccggccgcatcaagctgagggctgaggcagagatgccaacagaagtcacgtcgacaccagccagccggccggactgcagctcgtcgtcgtcgatgacggccgggaccatgcgtgtgctaggcggggaggtcagcccgttcacggcgcgggcgcgtctggcgctggatctgcgcggcgtggcgtacgagctcctcgacgagccgctggggcccaagaaaagcgacagactcctcgctgccaaccccgtctacgggaagatccccgtgctgctcctccccgacggccgcgccatatgcgagtccgcagtcatcatccagtgcatcgaggacgtggcgcgtggaagcggcggcgccgaggctagcagcctgctgctgccggacgacccctacgagcgcgccatgcaccgcttctggaccgccttcatcgacgacaaggtgagcaccgagcagagcacggcagcaagtgtcttttcttcaaggtaacgtgcaacaaactgccgtgcctttctgcagttttggccggcgctggatgccgtctccctggcgccgaccccgggagcacgcgcgcaggccgtggaagacacccgcgccgcgctgagcctcctggaggtggcgttcaaggaccgcagcaacggcagggctttcttctccggtggcgacgccgcgccaggcctcctggacctggccctcggatgcttcctgccggcgctcagggcctgcgaacggctccacggcctctcactcatcgacgcgtccgcgacgccgctgctggacgggtggagccagcgcttcgccgcgcaccctgcagccaagcgcgtcctgccggacacggagaaggtggtgcagttcacgaggttcctccagggacagttcagggtccacgtgtccttttacttgtgatcttccccaaagttgtgcttcagattcctcgtgtcctc

SEQ ID NO: 10310 - DNA, 2685 bp, Zea Mays
tttagctcggcgctgcacatcatcttgcacggtagctgccccgtaatcgaaggccagaagtggtccgcaactaaatggatccatgtgaggtcatttgacctccctgtgaagcagccgggttcctctgacggatgcgaggacgacaatatcctctgcccccagtgggcagctgtgggtgagtgtgccaagaaccctaactacatggtggggaccaaggaagctcctggcttctgccggaagagctgcaaagtatgcgcagagtaaggtagtagcctgctgtctgatatgtgtcatggcgtgttgcgtagtagtctgctgtttggataccgactggagtatagcatgtatgaagtagaacccggaagaaggaatcgtacgagagccgagttatctgataacttgtctcttgtgggaaatgaaagcgttccttaattaagcgaggaggtgctttgtggtgtccttatacgtgttgagctgttctccagttgcgtagggcgtgattgccaaaacgtagcccagtgggtggccgagggttgtgtgaaataacttttgcctttatgttcttagctgttgggtgcagaaagatgcacgttgctgacacgaaggagaacagtccccgcccgcccccccttttcacttcaccttgtgtgaccttgcattcaattccggttggtacaataaagccattgctataatatatagtagatgtgaccaatacaaggagaaaaattacagcccattgccaagcatcatcacaatgaatatactactagtagtattaattctgcagcaaagacacatcacaataacccaattttcttttccttttttcgatcatcgaccttgttgttatattagcagccattgggtttcttggccggcgccggcggcttgggggtggccaccaccccgtcgttgcctgcgagcgccaggtacttgtccttcctggtgaggcttgtgcactcgtaggagagcgtggcggcgattagcctctggatgtagttggccacctcgtggcttgtcctgccgccggcgcaggtgagctcgggcgggagcttgttgaggaaggtgacgacgtatgccgggctggggttcatgaagaagtagaatgggtccatccccttccaccccctggccgttgtgccgtggaacatgctcatccggttctccatggccacgggcaccacctcgtgggtgagctccgcgaagagcgccgagaagcgcagcaggaagggctcccggcacgtggtcccctcggggcagatgacgaggtcgccctccgccagcaggtcccggatcatggcggcgtcggaggcgcggtcccgcgtgaggcgcaccgtccggatgggcgagaggaactcggagaggcgcgagagcgagtaggtgaccgccgccacggggcgccccagcgcggtggacaggaagatggggtccagcagcgtccggtgcgagcaggcgaagaggacgcccctccggcccgtggcgcgctcggcgcgcggcggcggcggggcgccccggacgtgcacgcgcacgcccagcgcccagaaggcgtagtacaccagcggcatgggcagcagcgcccccgccgcgatgcgcaggcaggcgagcgcgaagcccacggggaaccacagcacgaccagcagcgccgccagcggcgtcggccggcgcaccaggcggccgtcgtggaagatgaccgggcgaggcagctggtccatgggcaatggctccaccggcgcgcgcgggacgatgtacgcctcctgcagttttgcatgccatgcaggcgcccacagcatgcgtgcgtcaataatggcgaattaacatttaaaaaaagaacccgtactgctgttactactaccagcacaatgaatacaattgaagaggagcgcagctaccaccgtgtgccatcagttgttcatatagaacccaaattacttctgtacggttattgactgtacgtacaccattgcgttggacgtctagctacatggcagtggaacgaacctttgtcaaaattcttcttcttctcattgtctattggacagcaggggcactaggcatgactacgacgacctacttgatgctgcatcctgccgaggatacctaattgtttcgtctttgcacaattgaaggaggtcgatcgatcggcagggcagtcttttgattgcgatccatgccatgcacatgcatatcgaaatctcagacaagcaactgtagcagcggtacatacatcactgttcactccagtccagctagctagccagtggcagtaactgtggttagttggattcacctaaaaggttgtacgggcatcgccgcgggtttttgcgtgtcccccctctcagaataatcctgagatcttttagcttctatccgagcagtagtcggtacatatatataagtatcctttcatcttaattagcatctactttagtactagttattagaaagtattgaagattttttggtttttgagtttgctacttctatatgtacctaatcctatcatgatttatgatgtggcttaacaaaataaaaaaaatctgcccaaacatatgtctatctctaggaaattttatgatcctagttctttaatttcttggggttttatctctccacacgcggcgccatggctagctactctcgctgtctagtccaccaccaccaagcaaatggtgtcggcacgcg

SEQ ID NO: 10311 - DNA, 3821 bp, Zea Mays
gtgcgtggcggatgtggtggtgctcgcggagggcggcgtgctgatgcgggacagggcccgcgcggccggccggggccggggccggatgcggtgcggagccacccggctggaggggataccgaaggaggacgtcaccacaggcctctatggctggtgccgctgtgagtgcgacgacgacggggtgggaggtggtcggggatacagaggaggaggagcaggaggtcgagatggagacggtgcggtgggcgatggaggtgggcgtgtgggccaggtgcctcggcgttggcctcctcgcaacggccaggcgcttccggcggaagcgcaccttctggtgaccgctggcactttctctgggtcggtgtggggccgttggggcatcgcgcacgggaggcggaggcgggggcatggccgcgccaggcgcccacactccattcttaattagtagtagggatctaagttcaagtgccacaccgctcgtcgccttcccatctcgccgcgacatgaatttctgccgccacctgctcctcgccgcggtgttcgcgctcctcctcgctgtctgcgcttctgcggcgagcaggggcgctggttccttcgacccatcccgagtggtccaactctcgtggcgccccagggcgttcctgcacaagggtttcctgtcggatgcggagtgcgaccacctcatcgcgctggccaaggacaagctggagaagtctatggtggccgataacgagtccggtaagagtgtccagagtgaggtgcgcaccagctccggcatgttcctcgagaggaagcaggatgaagtagtaacgagaatagaggagaggatatctgcttggacatttcttccaccagaaaatggcgaatccattcagatattacactaccagaatggtgagaaatatgaaccccactacgactacttccatgacaaaaaaaatcaagccttgggtggccatcgcatcgccactgtgctgatgtacctctctaatgttgagaagggtggagagaccatcttccccaatgcagaggggaagctattacaaccgaaggacaacacttggtctgattgtgcaagaaatggatatgcagttaaaccggtaaagggtgatgccctgctgttcttcagcctccatcctgatgcaacgacagactctgacagcttgcacggtagctgccccgtaatcgaaggccagaagtggtccgcaactaaatggatccatgtgaggtcatttgacctccctgtgaagcagccgggttcctctgacggatgcgaggacgacaatatcctctgcccccagtgggcagctgtgggtgagtgtgccaagaaccctaactacatggtggggaccaaggaagctcctggcttctgccggaagagctgcaaagtatgcgcagagtaaggtagtagcctgctgtctgatatgtgtcatggcgtgttgcgtagtagtctgctgtttggataccgactggagtatagcatgtatgaagtagaacccggaagaaggaatcgtacgagagccgagttatctgataacttgtctcttgtgggaaatgaaagcgttccttaattaagcgaggaggtgctttgtggtgtccttatacgtgttgagctgttctccagttgcgtagggcgtgattgccaaaacgtagcccagtgggtggccgagggttgtgtgaaataacttttgcctttatgttcttagctgttgggtgcagaaagatgcacgttgctgacacgaaggagaacagtccccgcccgcccccccttttcacttcaccttgtgtgaccttgcattcaattccggttggtacaataaagccattgctataatatatagtagatgtgaccaatacaaggagaaaaattacagcccattgccaagcatcatcacaatgaatatactactagtagtattaattctgcagcaaagacacatcacaataacccaattttcttttccttttttcgatcatcgaccttgttgttatattagcagccattgggtttcttggccggcgccggcggcttgggggtggccaccaccccgtcgttgcctgcgagcgccaggtacttgtccttcctggtgaggcttgtgcactcgtaggagagcgtggcggcgattagcctctggatgtagttggccacctcgtggcttgtcctgccgccggcgcaggtgagctcgggcgggagcttgttgaggaaggtgacgacgtatgccgggctggggttcatgaagaagtagaatgggtccatccccttccaccccctggccgttgtgccgtggaacatgctcatccggttctccatggccacgggcaccacctcgtgggtgagctccgcgaagagcgccgagaagcgcagcaggaagggctcccggcacgtggtcccctcggggcagatgacgaggtcgccctccgccagcaggtcccggatcatggcggcgtcggaggcgcggtcccgcgtgaggcgcaccgtccggatgggcgagaggaactcggagaggcgcgagagcgagtaggtgaccgccgccacggggcgccccagcgcggtggacaggaagatggggtccagcagcgtccggtgcgagcaggcgaagaggacgcccctccggcccgtggcgcgctcggcgcgcggcggcggcggggcgccccggacgtgcacgcgcacgcccagcgcccagaaggcgtagtacaccagcggcatgggcagcagcgcccccgccgcgatgcgcaggcaggcgagcgcgaagcccacggggaaccacagcacgaccagcagcgccgccagcggcgtcggccggcgcaccaggcggccgtcgtggaagatgaccgggcgaggcagctggtccatgggcaatggctccaccggcgcgcgcgggacgatgtacgcctcctgcagttttgcatgccatgcaggcgcccacagcatgcgtgcgtcaataatggcgaattaacatttaaaaaaagaacccgtactgctgttactactaccagcacaatgaatacaattgaagaggagcgcagctaccaccgtgtgccatcagttgttcatatagaacccaaattacttctgtacggttattgactgtacgtacaccattgcgttggacgtctagctacatggcagtggaacgaacctttgtcaaaattcttcttcttctcattgtctattggacagcaggggcactaggcatgactacgacgacctacttgatgctgcatcctgccgaggatacctaattgtttcgtctttgcacaattgaaggaggtcgatcgatcggcagggcagtcttttgattgcgatccatgccatgcacatgcatatcgaaatctcagacaagcaactgtagcagcggtacatacatcactgttcactccagtccagctagctagccagtggcagtaactgtggttagttggattcacctaaaaggttgtacgggcatcgccgcgggtttttgcgtgtcccccctctcagaataatcctgagatcttttagcttctatccgagcagtagtcggtacatatatataagtatcctttcatcttaattagcatctactttagtactagttattagaaagtattgaagattttttggtttttgagtttgctacttctatatgtacctaatcctatcatgatttatgatgtggcttaacaaaataaaaaaaatctgcccaaacatatgtctatctctaggaaattttatgatcctagttctttaatttcttggggttttatctctccacacgcggcgccatggctagctactctcgctgtctagtccaccaccaccaagcaaatggtgtcggcacgcg

SEQ ID NO: 10312 - DNA, 2568 bp, Zea Mays
ccttccccgtatggccaccgccccatttagattctgttcctcctaaatctcctccccgttggcccctgcgctcttcacaaaatagctctctgcctcacagcaagcctgtgcgtctcatattcaaggagcctgcctctgaggtggttgcaacttgcttgggacgaggatttggattttggaggcaagattggaccgcagactgtgagatccatccaatccaacaaccgaatccaatccaatccaatcagagaaaaagaaaaaaggcgaaaggctcgtgtctgtgtggcaccacatcttgccatcagggaaaatggggctgtcaatctcgtacccaccagacgactacctgccagcagtggaggacgacatggggcggctgttcatccggtctctcagcttcgacgacatggaggccgccgccgattcgccttcgtattcgccttcggcattgccccccgcctttggctccgggaagctgatcatggagggctccctgggcttcttcgaaagaagagaagctgacagcgtccagatgcagaacgtgctgtccatcaggaatcctaaacctcctgatagagaagcctgcagcagcgtcagtcccggtgctgcgacagctacttgtggctcatcaagattcgaccgtccaccagattatgattaccccatggtcgggatgaacagccccaggcaccagagcgcggccgtcaggctgcagaaggtgtacaagagcttcaggacgaggcggcagcttgcggattgcgctgttcttgtggaacaacgatggtggaagttgcttgattttgcactgctcaagcggaactcggtgtcattttttgacatagggaagcctgagactgctgtctcaaaatggtcccgggcaaggatgagggccgccaaggttggaaagggtctctccaaggacgagaaggcccagaaacttgcgctgcagcactggctcgaggcgattgaccctcggcatcggtatggccacaacctgcacttctactaccaccgctggctccactgccagagcaagcagccattcttctattggttggatgtaggagaagggaaagatgtcaacttagaggagcattgccctagattcaagttacacaagcaatgtatcaagtaccttggccctaaagaaagggaaacctatgaggtggtagtcgaggacaagaggctgatgtacaagctgagccgtcagatagtcgacacgaccagaagcgtcaaggggaccaagtggatattcgtgctcagtacatgcaagacactttacataggccagaagcagaagggcgtgttccagcactcaagcttccttgcagggggagccacatctgctgcaggaagactggttgtggaggatggaattctcaagagatgtgttcgtttcaggctgtgtggcctcatagcgggcattaccggccgacggagcagaacttccaggagttcatgaacttcctcaaggagaggaatgtagatcttaacaacgtggtgttgagcccatcagaaggtgaagaagatggcgacttcagcctggcgagcagctactctcagctggacctgacccaactctgccagcaagaagacagccaagaacaagaggcacaatctgcgcgacgccatggccaagtcgaagccgaagccgaagctaggacctgcagcctggagcccagcctgccatctacagagacctgcagcacgccggcgacgatcaggaagagctcctcagacaaccggctgcaagggaagcggccgcccaggctgctgatcagctcaaacaacatagcgccgctgccgcccaccacgcacagcaacgccgggccatcgcccggcgggaaggacgacctggacccggactcggccatgatgggcgagtgcctcgacttctgcaagcgaaacctgttcgcggaggacgggtacgaggaccgctacctggatgacctcgcggagctgccggaggcgctgatcctgaaccgcatcaactccaagcgggccatgcactcgtaccagctcgggaagcagctgtccttccactggagcaccggcgccgggccccggatcgggtgcgtccgtgactacccgtccgagctccagttccgggcgctggaggatgtcagcctgtcgccccgtggcggcggcaggtcggtgaggttcccgtcgcccaggccgggcgcgctcacgcccaacagcatccctgcggccaagtgtggctctcttacggcggacggcgacggcgtgcacgcgtcgctcaagcccaggcagaggagtgccacttggactgcgttctgagggacataccatgcatgcatgcatgctgcttccttcagcttttttttttcacagcattgtgacgataaaccgagggaaaagtgagatagcatgctccttcacgtagacgaggatagaaggatcagcattgacagacatttggcaaacactgggtaatgccatattgtaatggtacctataggttgatgacaaagctcttgctgttttataagggcacggaaagagcgaatatggagtatcccctcacttcagtgagaccgttctcagatt

SEQ ID NO: 10313 - DNA, 2477 bp, Zea Mays
ctaccttccccgtatggccaccgccccatttagattctgttcctcctaaatctcctccccgttggcccctgcgctcttcacaaaatagctctctgcctcacagcaagcctgtgcgtctcatattcaaggagcctgcctctgaggtggttgcaacttgcttgggacgaggatttggattttggagattggaccgcagactgtgagatccatccaatccaacaaccgaatccaatccaatccaatcagagaaaaagaaaaaaggcgaaaggctcgtgtctgtgtggcaccacatcttgccatcagggaaaatggggctgtcaatctcgtacccaccagacgactacctgccagcagtggaggacgacatggggcggctgttcatccggtctctcagcttcgacgacatggaggccgccgccgattcgccttcgtattcgccttcggcattgccccccgcctttggctccgggaagctgatcatggagggctccctgggcttcttcgaaagaagagaagctgacagcgtccagatgcagaacgtgctgtccatcaggaatcctaaacctcctgatagagaagcctgcagcagcgtcagtcccggtgctgcgacagctacttgtggctcatcaagattcgaccgtccaccagattatgattaccccatggtcgggatgaacagccccaggcaccagagcgcggccgtcaggctgcagaaggtgtacaagagcttcaggacgaggcggcagcttgcggattgcgctgttcttgtggaacaacgatggtggaagttgcttgattttgcactgctcaagcggaactcggtgtcattttttgacatagggaagcctgagactgctgtctcaaaatggtcccgggcaaggatgagggccgccaaggttggaaagggtctctccaaggacgagaaggcccagaaacttgcgctgcagcactggctcgaggcgattgaccctcggcatcggttggatgtaggagaagggaaagatgtcaacttagaggagcattgccctagattcaagttacacaagcaatgtatcaagtaccttggccctaaagaaagggaaacctatgaggtggtagtcgaggacaagaggctgatgtacaagctgagccgtcagatagtcgacacgaccagaagcgtcaaggggaccaagtggatattcgtgctcagtacatgcaagacactttacataggccagaagcagaagggcgtgttccagcactcaagcttccttgcagggggagccacatctgctgcaggaagactggttgtggaggatggaattctcaaggctgtgtggcctcatagcgggcattaccggccgacggagcagaacttccaggagttcatgaacttcctcaaggagaggaatgtagatcttaacaacgtggtgttgagcccatcagaaggtgaagaagatggcgacttcagcctggcgagcagctactctcagctggacctgacccaactctgccagcaagaagacagccaagaacaagaggcacaatctgcgcgacgccatggccaagtcgaagccgaagccgaagctaggacctgcagcctggagcccagcctgccatctacagagacctgcagcacgccggcgacgatcaggaagagctcctcagacaaccggctgcaagggaagcggccgcccaggctgctgatcagctcaaacaacatagcgccgctgccgcccaccacgcacagcaacgccgggccatcgcccggcgggaaggacgacctggacccggactcggccatgatgggcgagtgcctcgacttctgcaagcgaaacctgttcgcggaggacgggtacgaggaccgctacctggatgacctcgcggagctgccggaggcgctgatcctgaaccgcatcaactccaagcgggccatgcactcgtaccagctcgggaagcagctgtccttccactggagcaccggcgccgggccccggatcgggtgcgtccgtgactacccgtccgagctccagttccgggcgctggaggatgtcagcctgtcgccccgtggcggcggcaggtcggtgaggttcccgtcgcccaggccgggcgcgctcacgcccaacagcatccctgcggccaagtgtggctctcttacggcggacggcgacggcgtgcacgcgtcgctcaagcccaggcagaggagtgccacttggactgcgttctgagggacataccatgcatgcatgcatgctgcttccttcagcttttttttttcacagcattgtgacgataaaccgagggaaaagtgagatagcatgctccttcacgtagacgaggatagaaggatcagcattgacagacatttggcaaacactgggtaatgccatattgtaatggtacctataggttgatgacaaagctcttgctgttttataagggcacggaaagagcgaatatggagtatcccctcacttcagtgagaccgttctcagatt

SEQ ID NO: 10314 - DNA, 2543 bp, Zea Mays
gccacctaccttccccgtatggccaccgccccatttagattctgttcctcctaaatctcctccccgttggcccctgcgctcttcacaaaatagctctctgcctcacagcaagcctgtgcgtctcatattcaaggagcctgcctctgaggtggttgcaacttgcttgggacgaggatttggattttggagattggaccgcagactgtgagatccatccaatccaacaaccgaatccaatccaatccaatcagagaaaaagaaaaaaggcgaaaggctcgtgtctgtgtggcaccacatcttgccatcagggaaaatggggctgtcaatctcgtacccaccagacgactacctgccagcagtggaggacgacatggggcggctgttcatccggtctctcagcttcgacgacatggaggccgccgccgattcgccttcgtattcgccttcggcattgccccccgcctttggctccgggaagctgatcatggagggctccctgggcttcttcgaaagaagagaagctgacagcgtccagatgcagaacgtgctgtccatcaggaatcctaaacctcctgatagagaagcctgcagcagcgtcagtcccggtgctgcgacagctacttgtggctcatcaagattcgaccgtccaccagattatgattaccccatggtcgggatgaacagccccaggcaccagagcgcggccgtcaggctgcagaaggtgtacaagagcttcaggacgaggcggcagcttgcggattgcgctgttcttgtggaacaacgatggtggaagttgcttgattttgcactgctcaagcggaactcggtgtcattttttgacatagggaagcctgagactgctgtctcaaaatggtcccgggcaaggatgagggccgccaaggttggaaagggtctctccaaggacgagaaggcccagaaacttgcgctgcagcactggctcgaggcgattgaccctcggcatcggtatggccacaacctgcacttctactaccaccgctggctccactgccagagcaagcagccattcttctattggagaagggaaagatgtcaacttagaggagcattgccctagattcaagttacacaagcaatgtatcaagtaccttggccctaaagaaagggaaacctatgaggtggtagtcgaggacaagaggctgatgtacaagctgagccgtcagatagtcgacacgaccagaagcgtcaaggggaccaagtggatattcgtgctcagtacatgcaagacactttacataggccagaagcagaagggcgtgttccagcactcaagcttccttgcagggggagccacatctgctgcaggaagactggttgtggaggatggaattctcaaggctgtgtggcctcatagcgggcattaccggccgacggagcagaacttccaggagttcatgaacttcctcaaggagaggaatgtagatcttaacaacgtggtgttgagcccatcagaaggtgaagaagatggcgacttcagcctggcgagcagctactctcagctggacctgacccaactctgccagcaagaagacagccaagaacaagaggcacaatctgcgcgacgccatggccaagtcgaagccgaagccgaagctaggacctgcagcctggagcccagcctgccatctacagagacctgcagcacgccggcgacgatcaggaagagctcctcagacaaccggctgcaagggaagcggccgcccaggctgctgatcagctcaaacaacatagcgccgctgccgcccaccacgcacagcaacgccgggccatcgcccggcgggaaggacgacctggacccggactcggccatgatgggcgagtgcctcgacttctgcaagcgaaacctgttcgcggaggacgggtacgaggaccgctacctggatgacctcgcggagctgccggaggcgctgatcctgaaccgcatcaactccaagcgggccatgcactcgtaccagctcgggaagcagctgtccttccactggagcaccggcgccgggccccggatcgggtgcgtccgtgactacccgtccgagctccagttccgggcgctggaggatgtcagcctgtcgccccgtggcggcggcaggtcggtgaggttcccgtcgcccaggccgggcgcgctcacgcccaacagcatccctgcggccaagtgtggctctcttacggcggacggcgacggcgtgcacgcgtcgctcaagcccaggcagaggagtgccacttggactgcgttctgagggacataccatgcatgcatgcatgctgcttccttcagcttttttttttcacagcattgtgacgataaaccgagggaaaagtgagatagcatgctccttcacgtagacgaggatagaaggatcagcattgacagacatttggcaaacactgggtaatgccatattgtaatggtacctataggttgatgacaaagctcttgctgttttataagggcacggaaagagcgaatatggagtatcccctcacttcagtgagaccgttctcagatt

SEQ ID NO: 10315 - DNA, 1677 bp, Zea Mays
cgtgagccactgacttgcaggccccacattctcccgccctcttcctcttcactacaccctttcctccgtgccgccccacttttctcctcccgcgcccctccgcgagctccctacccctcgcgctcacgccggcgacaagtttccgccagagttaggtagatcaggtgctgcgccggcagccgtggaagggatggaggacctcgcgagttcgcgtggcggcgggggatgcggtggtcttgatgcgcagatcgaacagctcatggagtgccgcccgctcccagagacggaggttaaaacactgtgtgagaaggccaaggagatattaatggaggaaagcaatgttcagttaaaagccctgtgacgatttgtggtgatattcatggccaattccatgatcttttagaacttttccggattggtgggaagtgtccagatacaaattatttgtttatgggtgattatgtggatcgtggctattactctgttgagacagtaacgcttttagttgcacttaaggtgcggtacccgcaacgcattacaattcttcgtggaaaccatgaaagtaggcaggtgtatggcttctatgatgaatgcctacgaaaatatggcagtgcaaatgtctggaagatcttcactgatctttttgattattttccgttgacagcattggtggaatcagaaattttctgcctccatggtggtttatctccatccattgagaatcttgataacgttcgcagtttagaccgtgtccaagaggtccctcatgagggacctatgtgcgaccttctgtggtctgatccagacgatagatgtggctggggcatatctccacgtggtgctggatacacttttggccaagacatatcggagcagtttaatcacaccaacaatcttaaactcgtagctcgggctcaccagttggttatggagggatacaactgggcacatgaacaaaaggtggtgaccatattcagcgcacctaactactgttaccggtgcggcaacatggcgtccatcctcgaggtcgatgactgcaggaatcacacatttattcagtttgagccagctcctaggagaggtgaaccagacgtgacgcggaggacacctgattatttcctttgagttatctgccaggccatttttggattttgcccaatgttggaatagtgatgctggccagtaacaatttttgttggatctatatggtaacttaaccgaccagcaacagtaagaaaatgtggaacttaaccgaccagcaacagtaagaaaatgtggaagctgcatttgtcattgcaagaggtgctcgctaacttaaccccaagctgtcaaaagatccgcttgtctacccaacccacccagtggtgcctcccttgggctttgggacgtcgagtttacgctttcagcgtagagttgcctcagttctgtcttgtgtgtcagctagttttgtgtttgtgtcttgtgtggttgctcgttgtagcttctgtggtctcgagtgttgcaagaattggaattctgctagctcctcctctgtttggttgtccatgcccttggtacacgagtgttggccacccttctcatgtagcaccaaccacgttacagtcaagctgttcgcatcttatttttgtcatgttaatactcctgtcaattaaatgaacaatgtttgctccccatgta

SEQ ID NO: 10316 - DNA, 1618 bp, Zea Mays
cgtgagccactgacttgcaggccccacattctcccgccctcttcctcttcactacaccctttcctccgtgccgccccacttttctcctcccgcgcccctccgcgagctccctacccctcgcgctcacgccggcgacaagtttccgccagagttaggtagatcaggtgctgcgccggcagccgtggaagggatggaggacctcgcgagttcgcgtggcggcgggggatgcggtggtcttgatgcgcagatcgaacagctcatggagtgccgcccgctcccagagacggaggttaaaacactgtgtgagaaggccaaggagatattaatggaggaaagcaatgttcagccagttaaaagccctgtgacgatttgtggtgatattcatggccaattccatgatcttttagaacttttccggattggtgggaagtgtccagatacaaattatttgtttatgggtgattatgtggatcgtggctattactctgttgagacagtaacgatcacacaggtgtatggcttctatgatgaatgcctacgaaaatatggcagtgcaaatgtctggaagatcttcactgatctttttgattattttccgttgacagcattggtggaatcagaaattttctgcctccatggtggtttatctccatccattgagaatcttgataacgttcgcagtttagaccgtgtccaagaggtccctcatgagggacctatgtgcgaccttctgtggtctgatccagacgatagatgtggctggggcatatctccacgtggtgctggatacacttttggccaagacatatcggagcagtttaatcacaccaacaatcttaaactcgtagctcgggctcaccagttggttatggagggatacaactgggcacatgaacaaaaggtggtgaccatattcagcgcacctaactactgttaccggtgcggcaacatggcgtccatcctcgaggtcgatgactgcaggaatcacacatttattcagtttgagccagctcctaggagaggtgaaccagacgtgacgcggaggacacctgattatttcctttgagttatctgccaggccatttttggattttgcccaatgttggaatagtgatgctggccagtaacaatttttgttggatctatatggtaacttaaccgaccagcaacagtaagaaaatgtggaacttaaccgaccagcaacagtaagaaaatgtggaagctgcatttgtcattgcaagaggtgctcgctaacttaaccccaagctgtcaaaagatccgcttgtctacccaacccacccagtggtgcctcccttgggctttgggacgtcgagtttacgctttcagcgtagagttgcctcagttctgtcttgtgtgtcagctagttttgtgtttgtgtcttgtgtggttgctcgttgtagcttctgtggtctcgagtgttgcaagaattggaattctgctagctcctcctctgtttggttgtccatgcccttggtacacgagtgttggccacccttctcatgtagcaccaaccacgttacagtcaagctgttcgcatcttatttttgtcatgttaatactcctgtcaattaaatgaacaatgtttgctccccatgta

SEQ ID NO: 10317 - DNA, 1704 bp, Zea Mays
cgtgagccactgacttgcaggccccacattctcccgccctcttcctcttcactacaccctttcctccgtgccgccccacttttctcctcccgcgcccctccgcgagctccctacccctcgcgctcacgccggcgacaagtttccgccagagttaggtagatcaggtgctgcgccggcagccgtggaagggatggaggacctcgcgagttcgcgtggcggcgggggatgcggtggtcttgatgcgcagatcgaacagctcatggagtgccgcccgctcccagagacggaggttaaaacactgtgtgagaaggccaaggagatattaatggaggaaagcaatgttcagccagttaaaagccctgtgacgatttgtggtgatattcatggccaattccatgatcttttagaacttttccggattggtgggaagtgtccagatacaaattatttgtttatgggtgattatgtggatcgtggctattactctgttgagacagtaacgtccccatcgtgcagcttttagttgcacttaaggtgcggtacccgcaacgcattacaattcttcgtggaaaccatgaaagtaggcagatcacacaggtgtatggcttctatgatgaatgcctacgaaaatatggcagtgcaaatgtctggaagatcttcactgatctttttgattattttccgttgacagcattggtggaatcagaaattttctgcctccatggtggtttatctccatccattgagaatcttgataacgttcgcagtttagaccgtgtccaagaggtccctcatgagggacctatgtgcgaccttctgtggtctgatccagacgatagatgtggctggggcatatctccacgtggtgctggatacacttttggccaagacatatcggagcagtttaatcacaccaacaatcttaaactcgtagctcgggctcaccagttggttatggagggatacaactgggcacatgaacaaaaggtggtgaccatattcagcgcacctaactactgttaccggtgcggcaacatggcgtccatcctcgaggtcgatgactgcaggaatcacacatttattcagtttgagccagctcctaggagaggtgaaccagacgtgacgcggaggacacctgattatttcctttgagttatctgccaggccatttttggattttgcccaatgttggaatagtgatgctggccagtaacaatttttgttggatctatatggtaacttaaccgaccagcaacagtaagaaaatgtggaacttaaccgaccagcaacagtaagaaaatgtggaagctgcatttgtcattgcaagaggtgctcgctaacttaaccccaagctgtcaaaagatccgcttgtctacccaacccacccagtggtgcctcccttgggctttgggacgtcgagtttacgctttcagcgtagagttgcctcagttctgtcttgtgtgtcagctagttttgtgtttgtgtcttgtgtggttgctcgttgtagcttctgtggtctcgagtgttgcaagaattggaattctgctagctcctcctctgtttggttgtccatgcccttggtacacgagtgttggccacccttctcatgtagcaccaaccacgttacagtcaagctgttcgcatcttatttttgtcatgttaatactcctgtcaattaaatgaacaatgtttgctccccatgta

SEQ ID NO: 10318 - DNA, 1700 bp, Zea Mays
cgtgagccactgacttgcaggccccacattctcccgccctcttcctcttcactacaccctttcctccgtgccgccccacttttctcctcccgcgcccctccgcgagctccctacccctcgcgctcacgccggcgacaagtttccgccagagttaggtagatcaggtgctgcgccggcagccgtggaagggatggaggacctcgcgagttcgcgtggcggcgggggatgcggtggtcttgatgcgcagatcgaacagctcatggagtgccgcccgctcccagagacggaggttaaaacactgtgtgagaaggccaaggagatattaatggaggaaagcaatgttcagttaaaagccctgtgacgatttgtggtgatattcatggccaattccatgatcttttagaacttttccggattggtgggaagtgtccagatacaaattatttgtttatgggtgattatgtggatcgtggctattactctgttgagacagtaacgtccccatcgtgcagcttttagttgcacttaaggtgcggtacccgcaacgcattacaattcttcgtggaaaccatgaaagtaggcagatcacacaggtgtatggcttctatgatgaatgcctacgaaaatatggcagtgcaaatgtctggaagatcttcactgatctttttgattattttccgttgacagcattggtggaatcagaaattttctgcctccatggtggtttatctccatccattgagaatcttgataacgttcgcagtttagaccgtgtccaagaggtccctcatgagggacctatgtgcgaccttctgtggtctgatccagacgatagatgtggctggggcatatctccacgtggtgctggatacacttttggccaagacatatcggagcagtttaatcacaccaacaatcttaaactcgtagctcgggctcaccagttggttatggagggatacaactgggcacatgaacaaaaggtggtgaccatattcagcgcacctaactactgttaccggtgcggcaacatggcgtccatcctcgaggtcgatgactgcaggaatcacacatttattcagtttgagccagctcctaggagaggtgaaccagacgtgacgcggaggacacctgattatttcctttgagttatctgccaggccatttttggattttgcccaatgttggaatagtgatgctggccagtaacaatttttgttggatctatatggtaacttaaccgaccagcaacagtaagaaaatgtggaacttaaccgaccagcaacagtaagaaaatgtggaagctgcatttgtcattgcaagaggtgctcgctaacttaaccccaagctgtcaaaagatccgcttgtctacccaacccacccagtggtgcctcccttgggctttgggacgtcgagtttacgctttcagcgtagagttgcctcagttctgtcttgtgtgtcagctagttttgtgtttgtgtcttgtgtggttgctcgttgtagcttctgtggtctcgagtgttgcaagaattggaattctgctagctcctcctctgtttggttgtccatgcccttggtacacgagtgttggccacccttctcatgtagcaccaaccacgttacagtcaagctgttcgcatcttatttttgtcatgttaatactcctgtcaattaaatgaacaatgtttgctccccatgta

SEQ ID NO: 10319 - DNA, 1649 bp, Zea Mays
cgtgagccactgacttgcaggccccacattctcccgccctcttcctcttcactacaccctttcctccgtgccgccccacttttctcctcccgcgcccctccgcgagctccctacccctcgcgctcacgccggcgacaagtttccgccagagttaggtagatcaggtgctgcgccggcagccgtggaagggatggaggacctcgcgagttcgcgtggcggcgggggatgcggtggtcttgatgcgcagatcgaacagctcatggagtgccgcccgctcccagagacggaggttaaaacactgtgtgagaaggccaaggagatattaatggaggaaagcaatgttcagccagttaaaagccctgtgacgatttgtggtgatattcatggccaattccatgatcttttagaacttttccggattggtgggaagtgtccagatacaaattatttgtttatgggtgattatgtggatcgtggctattactctgttgagacagtaacgcttttagttgcacttaaggtgcggtacccgcaacgcattacaattcttcgtggaaaccatgaaagtaggcagatatggcagtgcaaatgtctggaagatcttcactgatctttttgattattttccgttgacagcattggtggaatcagaaattttctgcctccatggtggtttatctccatccattgagaatcttgataacgttcgcagtttagaccgtgtccaagaggtccctcatgagggacctatgtgcgaccttctgtggtctgatccagacgatagatgtggctggggcatatctccacgtggtgctggatacacttttggccaagacatatcggagcagtttaatcacaccaacaatcttaaactcgtagctcgggctcaccagttggttatggagggatacaactgggcacatgaacaaaaggtggtgaccatattcagcgcacctaactactgttaccggtgcggcaacatggcgtccatcctcgaggtcgatgactgcaggaatcacacatttattcagtttgagccagctcctaggagaggtgaaccagacgtgacgcggaggacacctgattatttcctttgagttatctgccaggccatttttggattttgcccaatgttggaatagtgatgctggccagtaacaatttttgttggatctatatggtaacttaaccgaccagcaacagtaagaaaatgtggaacttaaccgaccagcaacagtaagaaaatgtggaagctgcatttgtcattgcaagaggtgctcgctaacttaaccccaagctgtcaaaagatccgcttgtctacccaacccacccagtggtgcctcccttgggctttgggacgtcgagtttacgctttcagcgtagagttgcctcagttctgtcttgtgtgtcagctagttttgtgtttgtgtcttgtgtggttgctcgttgtagcttctgtggtctcgagtgttgcaagaattggaattctgctagctcctcctctgtttggttgtccatgcccttggtacacgagtgttggccacccttctcatgtagcaccaaccacgttacagtcaagctgttcgcatcttatttttgtcatgttaatactcctgtcaattaaatgaacaatgtttgctccccatgta

SEQ ID NO: 10320 - DNA, 2158 bp, Zea Mays
cgtgagccactgacttgcaggccccacattctcccgccctcttcctcttcactacaccctttcctccgtgccgccccacttttctcctcccgcgcccctccgcgagctccctacccctcgcgctcacgccggcgacaagtttccgccagagttaggtagatcaggtgctgcgccggcagccgtggaagggatggaggacctcgcgagttcgcgtggcggcgggggatgcggtggtcttgatgcgcagatcgaacagctcatggagtgccgcccgctcccagagacggaggttaaaacactgtgtgagaaggccaaggagatattaatggaggaaagcaatgttcagccagttaaaagccctgtgacgatttgtggtgatattcatggccaattccatgatcttttagaacttttccggattggtgggaagtgtccagatacaaattatttgtttatgggtgattatgtggatcgtggctattactctgttgagacagtaacgcttttagttgcacttaaggtgcggtacccgcaacgcattacaattcttcgtggaaaccatgaaagtaggcagatcacacaggtgtatggcttctatgatgaatgcctacgaaaatatggcagtgcaaatgtctggaagatcttcactgatctttttgattattttccgttgacagcattggttcgttcgctcagctttaggcaaccttttcttttctttttaaacccttagtacctcgactcatgcagttgtctttcttttatgaaattgatccatcatatctattaaagtactctattaaagctactttctacatgtgcttatttgccaacttaattctgcacctgtcttttgttgatggcactatcattcatgtattagacattgaagtgctgcaagattaagcttatttcatcattcacacatgtgctatttattaacttaaggcttaattatctcaaaaggatagaagaaatgctgctaaggaggtggtgtgctgaagcacccatctgtcatattctgtttgatgtttaaatctttatgctatgatttctactctgtcagctccatggcttaatttaatggacgtttgttttttttttccgttcagagatcttttttcacgttgcatttcttctctgcttgaaggtggaatcagaaattttctgcctccatggtggtttatctccatccattgagaatcttgataacgttcgcagtttagaccgtgtccaagaggtccctcatgagggacctatgtgcgaccttctgtggtctgatccagacgatagatgtggctggggcatatctccacgtggtgctggatacacttttggccaagacatatcggagcagtttaatcacaccaacaatcttaaactcgtagctcgggctcaccagttggttatggagggatacaactgggcacatgaacaaaaggtggtgaccatattcagcgcacctaactactgttaccggtgcggcaacatggcgtccatcctcgaggtcgatgactgcaggaatcacacatttattcagtttgagccagctcctaggagaggtgaaccagacgtgacgcggaggacacctgattatttcctttgagttatctgccaggccatttttggattttgcccaatgttggaatagtgatgctggccagtaacaatttttgttggatctatatggtaacttaaccgaccagcaacagtaagaaaatgtggaacttaaccgaccagcaacagtaagaaaatgtggaagctgcatttgtcattgcaagaggtgctcgctaacttaaccccaagctgtcaaaagatccgcttgtctacccaacccacccagtggtgcctcccttgggctttgggacgtcgagtttacgctttcagcgtagagttgcctcagttctgtcttgtgtgtcagctagttttgtgtttgtgtcttgtgtggttgctcgttgtagcttctgtggtctcgagtgttgcaagaattggaattctgctagctcctcctctgtttggttgtccatgcccttggtacacgagtgttggccacccttctcatgtagcaccaaccacgttacagtcaagctgttcgcatcttatttttgtcatgttaatactcctgtcaattaaatgaacaatgtttgctccccatgta

SEQ ID NO: 10321 - DNA, 1697 bp, Zea Mays
cgtgagccactgacttgcaggccccacattctcccgccctcttcctcttcactacaccctttcctccgtgccgccccacttttctcctcccgcgcccctccgcgagctccctacccctcgcgctcacgccggcgacaagtttccgccagagttaggtagatcaggtgctgcgccggcagccgtggaagggatggaggacctcgcgagttcgcgtggcggcgggggatgcggtggtcttgatgcgcagatcgaacagctcatggagtgccgcccgctcccagagacggaggttaaaacactgtgtgagaaggccaaggagatattaatggaggaaagcaatgttcagccagttaaaagccctgtgacgatttgtggtgatattcatggccaattccatgatcttttagaacttttccggattggtgggaagatacaaattatttgtttatgggtgattatgtggatcgtggctattactctgttgagacagtaacgtccccatcgtgcagcttttagttgcacttaaggtgcggtacccgcaacgcattacaattcttcgtggaaaccatgaaagtaggcagatcacacaggtgtatggcttctatgatgaatgcctacgaaaatatggcagtgcaaatgtctggaagatcttcactgatctttttgattattttccgttgacagcattggtggaatcagaaattttctgcctccatggtggtttatctccatccattgagaatcttgataacgttcgcagtttagaccgtgtccaagaggtccctcatgagggacctatgtgcgaccttctgtggtctgatccagacgatagatgtggctggggcatatctccacgtggtgctggatacacttttggccaagacatatcggagcagtttaatcacaccaacaatcttaaactcgtagctcgggctcaccagttggttatggagggatacaactgggcacatgaacaaaaggtggtgaccatattcagcgcacctaactactgttaccggtgcggcaacatggcgtccatcctcgaggtcgatgactgcaggaatcacacatttattcagtttgagccagctcctaggagaggtgaaccagacgtgacgcggaggacacctgattatttcctttgagttatctgccaggccatttttggattttgcccaatgttggaatagtgatgctggccagtaacaatttttgttggatctatatggtaacttaaccgaccagcaacagtaagaaaatgtggaacttaaccgaccagcaacagtaagaaaatgtggaagctgcatttgtcattgcaagaggtgctcgctaacttaaccccaagctgtcaaaagatccgcttgtctacccaacccacccagtggtgcctcccttgggctttgggacgtcgagtttacgctttcagcgtagagttgcctcagttctgtcttgtgtgtcagctagttttgtgtttgtgtcttgtgtggttgctcgttgtagcttctgtggtctcgagtgttgcaagaattggaattctgctagctcctcctctgtttggttgtccatgcccttggtacacgagtgttggccacccttctcatgtagcaccaaccacgttacagtcaagctgttcgcatcttatttttgtcatgttaatactcctgtcaattaaatgaacaatgtttgctccccatgta

SEQ ID NO: 10322 - DNA, 1707 bp, Zea Mays
gtcacttggtcccgttgataccgtgagccactgacttgcaggccccacattctcccgccctcttcctcttcactacaccctttcctccgtgccgccccacttttctcctcccgcgcccctccgcgagctccctacccctcgcgctcacgccggcgacaagtttccgccagagttaggtagatcaggtgctgcgccggcagccgtggaagggatggaggacctcgcgagttcgcgtggcggcgggggatgcggtggtcttgatgcgcagatcgaacagctcatggagtgccgcccgctcccagagacggaggttaaaacactgtgtgagaaggccaaggagatattaatggaggaaagcaatgttcagttaaaagccctgtgacgatttgtggtgatattcatggccaattccatgatcttttagaacttttccggattggtgggaagtgtccagatacaaattatttgtttatgggtgattatgtggatcgtggctattactctgttgagacagtaacgcttttagttgcacttaaggtgcggtacccgcaacgcattacaattcttcgtggaaaccatgaaagtaggcagatcacacaggtgtatggcttctatgatgaatgcctacgaaaatatggcagtgcaaatgtctggaagatcttcactgatctttttgattattttccgttgacagcattggtggaatcagaaattttctgcctccatggtggtttatctccatccattgagaatcttgataacgttcgcagtttagaccgtgtccaagaggtccctcatgagggacctatgtgcgaccttctgtggtctgatccagacgatagatgtggctggggcatatctccacgtggtgctggatacacttttggccaagacatatcggagcagtttaatcacaccaacaatcttaaactcgtagctcgggctcaccagttggttatggagggatacaactgggcacatgaacaaaaggtggtgaccatattcagcgcacctaactactgttaccggtgcggcaacatggcgtccatcctcgaggtcgatgactgcaggaatcacacatttattcagtttgagccagctcctaggagaggtgaaccagacgtgacgcggaggacacctgattatttcctttgagttatctgccaggccatttttggattttgcccaatgttggaatagtgatgctggccagtaacaatttttgttggatctatatggtaacttaaccgaccagcaacagtaagaaaatgtggaacttaaccgaccagcaacagtaagaaaatgtggaagctgcatttgtcattgcaagaggtgctcgctaacttaaccccaagctgtcaaaagatccgcttgtctacccaacccacccagtggtgcctcccttgggctttgggacgtcgagtttacgctttcagcgtagagttgcctcagttctgtcttgtgtgtcagctagttttgtgtttgtgtcttgtgtggttgctcgttgtagcttctgtggtctcgagtgttgcaagaattggaattctgctagctcctcctctgtttggttgtccatgcccttggtacacgagtgttggccacccttctcatgtagcaccaaccacgttacagtcaagctgttcgcatcttatttttgtcatgttaatactcctgtcaattaaatgaacaatgtttgctccccatgta

SEQ ID NO: 10323 - DNA, 1566 bp, Zea Mays
cgtttctcactgtcacttggtcccgttgataccgtgagccactgacttgcaggccccacattctcccgccctcttcctcttcactacaccctttcctccgtgccgccccacttttctcctcccgcgcccctccgcgagctccctacccctcgcgctcacgccggcgacaagtttccgccagagttaggtagatcaggtgctgcgccggcagccgtggaagggatggaggacctcgcgagttcgcgtggcggcgggggatgcggtggtcttgatgcgcagatcgaacagctcatggagtgccgcccgctcccagagacggaggttaaaacactgtgtgagaaggccaaggagatattaatggaggaaagcaatgttcagcttttagttgcacttaaggtgcggtacccgcaacgcattacaattcttcgtggaaaccatgaaagtaggcagatcacacaggtgtatggcttctatgatgaatgcctacgaaaatatggcagtgcaaatgtctggaagatcttcactgatctttttgattattttccgttgacagcattggtggaatcagaaattttctgcctccatggtggtttatctccatccattgagaatcttgataacgttcgcagtttagaccgtgtccaagaggtccctcatgagggacctatgtgcgaccttctgtggtctgatccagacgatagatgtggctggggcatatctccacgtggtgctggatacacttttggccaagacatatcggagcagtttaatcacaccaacaatcttaaactcgtagctcgggctcaccagttggttatggagggatacaactgggcacatgaacaaaaggtggtgaccatattcagcgcacctaactactgttaccggtgcggcaacatggcgtccatcctcgaggtcgatgactgcaggaatcacacatttattcagtttgagccagctcctaggagaggtgaaccagacgtgacgcggaggacacctgattatttcctttgagttatctgccaggccatttttggattttgcccaatgttggaatagtgatgctggccagtaacaatttttgttggatctatatggtaacttaaccgaccagcaacagtaagaaaatgtggaacttaaccgaccagcaacagtaagaaaatgtggaagctgcatttgtcattgcaagaggtgctcgctaacttaaccccaagctgtcaaaagatccgcttgtctacccaacccacccagtggtgcctcccttgggctttgggacgtcgagtttacgctttcagcgtagagttgcctcagttctgtcttgtgtgtcagctagttttgtgtttgtgtcttgtgtggttgctcgttgtagcttctgtggtctcgagtgttgcaagaattggaattctgctagctcctcctctgtttggttgtccatgcccttggtacacgagtgttggccacccttctcatgtagcaccaaccacgttacagtcaagctgttcgcatcttatttttgtcatgttaatactcctgtcaattaaatgaacaatgtttgctccccatgta

SEQ ID NO: 10324 - DNA, 1198 bp, Zea Mays
caatgttcagcttttagttgcacttaaggtgcggtacccgcaacgcattacaattcttcgtggaaaccatgaaagtaggcagatcacacaggtgtatggcttctatgatgaatgcctacgaaaatatggcagtgcaaatgtctggaagatcttcactgatctttttgattattttccgttgacagcattggtggaatcagaaattttctgcctccatggtggtttatctccatccattgagaatcttgataacgttcgcagtttagaccgtgtccaagaggtccctcatgagggacctatgtgcgaccttctgtggtctgatccagacgatagatgtggctggggcatatctccacgtggtgctggatacacttttggccaagacatatcggagcagtttaatcacaccaacaatcttaaactcgtagctcgggctcaccagttggttatggagggatacaactgggcacatgaacaaaaggtggtgaccatattcagcgcacctaactactgttaccggtgcggcaacatggcgtccatcctcgaggtcgatgactgcaggaatcacacatttattcagtttgagccagctcctaggagaggtgaaccagacgtgacgcggaggacacctgattatttcctttgagttatctgccaggccatttttggattttgcccaatgttggaatagtgatgctggccagtaacaatttttgttggatctatatggtaacttaaccgaccagcaacagtaagaaaatgtggaacttaaccgaccagcaacagtaagaaaatgtggaagctgcatttgtcattgcaagaggtgctcgctaacttaaccccaagctgtcaaaagatccgcttgtctacccaacccacccagtggtgcctcccttgggctttgggacgtcgagtttacgctttcagcgtagagttgcctcagttctgtcttgtgtgtcagctagttttgtgtttgtgtcttgtgtggttgctcgttgtagcttctgtggtctcgagtgttgcaagaattggaattctgctagctcctcctctgtttggttgtccatgcccttggtacacgagtgttggccacccttctcatgtagcaccaaccacgttacagtcaagctgttcgcatcttatttttgtcatgttaatactcctgtcaattaaatgaacaatgtttgctccccatgta

SEQ ID NO: 10325 - DNA, 406 bp, Zea Mays
cgtgagccactgacttgcaggccccacattctcccgccctcttcctcttcactacaccctttcctccgtgccgccccacttttctcctcccgcgcccctccgcgagctccctacccctcgcgctcacgccggcgacaagtttccgccagagttaggtagatcaggtgctgcgccggcagccgtggaagggatggaggacctcgcgagttcgcgtggcggcgggggatgcggtggtcttgatgcgcagatcgaacagctcatggagtgccgcccgctcccagagacggaggttaaaacactgtgtgagaaggccaaggagatattaatggaggaaagcaatgttcaggtggctcccttgtgatatcttggcgttgtctcctcagatgctagcatggtgctctgttga

SEQ ID NO: 10326 - DNA, 1630 bp, Zea Mays
gtcctccctcctcttcctcgatcgcgttgcgggccgctcgctctcagccaccgccatccacaccacagaccccagctaccgctaccgctaccaccaccaccaccaccactactggaacccccctccctttcaatacaaaacaaaaaagcgcacgcaggcagagctgctgcacgcggcgcacgcactcccactcctcccgttccgtccgctccaagcaaggcacccccatccagatggcggcctgggcggttccggcgctcgcggccgctgcgtgggcgctgcgggcggcggtgtgggcgtgcctcgcggcgtcggcgatgctcgtcgccgaggccgcgtacatgggcctcgccagcctcgcctccgccgccgcgatgctgtggcgccgcccggacgcgaggtaccgctgggagcccatgcccggaggctgcgacgtcgaggcggccactggggcggacttccccatggtgctcgtgcagatcccgatgtacaacgagcgggaggaactagtggagcttgagtgccaggattgggccaccaaaaaaattaacatcaagtatgaggttagaaataatagaaagggatacaaagcagtgaactacgatgtttgcctgatgacaaggatacagaagatgtctctagactatcatttcaaagttgagcaggaatcaggatcatttgtatattcattttttggctttaatggtacagctggtgtgtggcgtgtatctgctattaaccagtctggaggatggaaagatcgcacaactgtagaagatatggacttggctgtacgggctagcctcaagggatgggaattcttgtatgttggtgatattagggttaagagtgaactaccaagtaccttcaaagcctaccgtcatcaacaacataggtggacttgtggtgccgccaatctcttcaggaaaatggcatgggaaatcattacgaacaaggaggtgtcaatatggaagaaacatcatctgttatacagctttttctttgtccgaagggttattgctccccttgtgacattcttgttttattgtgttgtcatccctttgtctgccatggttcctggtgtcagcattcctgtatgggggctggtctatattcccactgcaatcacatgtatgaacgccatcagaaatccttggtctctccatttgatgcccttctggattctcttcgagaatgttatgtccatgcaccgcatgcgtgctgctgtaaccggtttacttgagactgcacgggcaaatgattgggtagtcactgagaaggtaggagatcttgtgaaggatgacctagatgttccactccttgaaccagtgaagccaacagaatgcgttgagaggatttactttcctgagctcttgcttgcactccacctcctaatatgtgcttcatatgacttcgtacttggaagccacaaatactatctttacatatacctccaggcctttgcatatgttgtaatgggttttggtttcgttggaacgaaaactccatgttcatagctgccaatatgatgttactattccccatttcacaggagctggccatgaaggatatgtaaatgaaacaaagatggatagtaggcagtgctgcagcagcgtcaatgtaaatttag

SEQ ID NO: 10327 - DNA, 2254 bp, Zea Mays
ccatccacaccacagaccccagctaccgctaccgctaccaccaccaccaccaccactactggaacccccctccctttcaatacaaaacaaaaaagcgcacgcaggcagagctgctgcacgcggcgcacgcactcccactcctcccgttccgtccgctccaagcaaggcacccccatccagatggcggcctgggcggttccggcgctcgcggccgctgcgtgggcgctgcgggcggcggtgtgggcgtgcctcgcggcgtcggcgatgctcgtcgccgaggccgcgtacatgggcctcgccagcctcgcctccgccgccgcgatgctgtggcgccgcccggacgcgaggtaccgctgggagcccatgcccggaggctgcgacgtcgaggcggccactggggcggacttccccatggtgctcgtgcagatcccgatgtacaacgagcgggaggtgtacaagctatccattgacgctgcgtgtgccctcacatggccaccagaccgtattgtaatacaagtcttggatgactccactgatccgattattaaggaactagtggagcttgagtgccaggattgggccaccaaaaaaattaacatcaagtatgaggttagaaataatagaaagggatacaaagcaggtgcgctgaagaagggcatggaacatatatacgccaagcaatgtgaatttgttgctatctttgatgcggatttccaacctgaacctgacttccttttaaaaaccataccatttcttgtgcataacccaaagattgcacttgtacaagcacgttgggagttttgaactacgatgtttgcctgatgacaaggatacagaagatgtctctagactatcatttcaaagttgagcaggaatcaggatcatttgtatattcattttttggctttaatggtacagctggtgtgtggcgtgtatctgctattaaccagtctggaggatggaaagatcgcacaactgtagaagatatggacttggctgtacgggctagcctcaagggatgggaattcttgtatgttggtgatattagggttaagagtgaactaccaagtaccttcaaagcctaccgtcatcaacaacataggtggacttgtggtgccgccaatctcttcaggaaaatggcatgggaaatcattacgaacaaggaggtgtcaatatggaagaaacatcatctgttatacagctttttctttgtccgaagggttattgctccccttgtgacattcttgttttattgtgttgtcatccctttgtctgccatggttcctggtgtcagcattcctgtatgggggctggtctatattcccactgcaatcacatgtatgaacgccatcagaaatccttggtctctccatttgatgcccttctggattctcttcgagaatgttatgtccatgcaccgcatgcgtgctgctgtaaccggtttacttgagactgcacgggcaaatgattgggtagtcactgagaaggtaggagatcttgtgaaggatgacctagatgttccactccttgaaccagtgaagccaacagaatgcgttgagaggatttactttcctgagctcttgcttgcactccacctcctaatatgtgcttcatatgacttcgtacttggaagccacaaatactatctttacatatacctccaggcctttgcatatgttgtaatgggttttggtttcgttggaacgaaaactccatgttcatagctgccaatatgatgttactattccccatttcacagtaagttcctaggagtactgccactatgtgcaagatgaaatttgtctgatggtaaatgttattcgcattgcggggcccatgcttagtctagtgggtgtgtgggtggggggcggttgggcctttggttcttagattgctaacaagatgttcttcaacagttcaactgccattggtaaactcagttttatgatttgcctctgtaaacgcattttccttgacatacatgtgttttctcaataatcgccctgtgctagatgtattcatctgtagcagttccattgcagaactgaatataattggtatggatttcagattttggattcatggttgtaatagggcgagaggcaagtttgtatccaagttggatttgtaaattattatagcttattttttatgattgtcatgtatagattggcaccaggaaggaatgtatggcataatgagaagacaatgaaatatgaaattaattcttgtattgtgacatagcaataggcat

SEQ ID NO: 10328 - DNA, 2124 bp, Zea Mays
ccatccacaccacagaccccagctaccgctaccgctaccaccaccaccaccaccactactggaacccccctccctttcaatacaaaacaaaaaagcgcacgcaggcagagctgctgcacgcggcgcacgcactcccactcctcccgttccgtccgctccaagcaaggcacccccatccagatggcggcctgggcggttccggcgctcgcggccgctgcgtgggcgctgcgggcggcggtgtgggcgtgcctcgcggcgtcggcgatgctcgtcgccgaggccgcgtacatgggcctcgccagcctcgcctccgccgccgcgatgctgtggcgccgcccggacgcgaggtaccgctgggagcccatgcccggaggctgcgacgtcgaggcggccactggggcggacttccccatggtgctcgtgcagatcccgatgtacaacgagcgggaggtgtacaagctatccattgacgctgcgtgtgccctcacatggccaccagaccgtattgtaatacaagtcttggatgactccactgatccgattattaaggaactagtggagcttgagtgccaggattgggccaccaaaaaaattaacatcaagtatgaggttagaaataatagaaagggatacaaagcaggtgcgctgaagaagggcatggaacatatatacgccaagcaatgtgaatttgttgctatctttgatgcggatttccaacctgaacctgacttccttttaaaaaccataccatttcttgtgcataacccaaagattgcacttgtacaagcacgttgggagtttgtgaactacgatgtttgcctgatgacaaggatacagaagatgtctctagactatcatttcaaagttgagcaggaatcaggatcatttgtatattcattttttggctttaatggtacagctggtgtgtggcgtgtatctgctattaaccagtctggaggatggaaagatcgcacaactgtagaagatatggacttggctgtacgggctagcctcaagggatgggaattcttgtatgttggtgatattagggttaagagtgaactaccaagtaccttcaaagcctaccgtcatcaacaacataggtggacttgtggtgccgccaatctcttcaggaaaatggcatgggaaatcattacgaacaagcattcctgtatgggggctggtctatattcccactgcaatcacatgtatgaacgccatcagaaatccttggtctctccatttgatgcccttctggattctcttcgagaatgttatgtccatgcaccgcatgcgtgctgctgtaaccggtttacttgagactgcacgggcaaatgattgggtagtcactgagaaggtaggagatcttgtgaaggatgacctagatgttccactccttgaaccagtgaagccaacagaatgcgttgagaggatttactttcctgagctcttgcttgcactccacctcctaatatgtgcttcatatgacttcgtacttggaagccacaaatactatctttacatatacctccaggcctttgcatatgttgtaatgggttttggtttcgttggaacgaaaactccatgttcatagctgccaatatgatgttactattccccatttcacagtaagttcctaggagtactgccactatgtgcaagatgaaatttgtctgatggtaaatgttattcgcattgcggggcccatgcttagtctagtgggtgtgtgggtggggggcggttgggcctttggttcttagattgctaacaagatgttcttcaacagttcaactgccattggtaaactcagttttatgatttgcctctgtaaacgcattttccttgacatacatgtgttttctcaataatcgccctgtgctagatgtattcatctgtagcagttccattgcagaactgaatataattggtatggatttcagattttggattcatggttgtaatagggcgagaggcaagtttgtatccaagttggatttgtaaattattatagcttattttttatgattgtcatgtatagattggcaccaggaaggaatgtatggcataatgagaagacaatgaaatatgaaattaattcttgtattgtgacatagcaataggcat

SEQ ID NO: 10329 - DNA, 2162 bp, Zea Mays
ccatccacaccacagaccccagctaccgctaccgctaccaccaccaccaccaccactactggaacccccctccctttcaatacaaaacaaaaaagcgcacgcaggcagagctgctgcacgcggcgcacgcactcccactcctcccgttccgtccgctccaagcaaggcacccccatccagatggcggcctgggcggttccggcgctcgcggccgctgcgtgggcgctgcgggcggcggtgtgggcgtgcctcgcggcgtcggcgatgctcgtcgccgaggccgcgtacatgggcctcgccagcctcgcctccgccgccgcgatgctgtggcgccgcccggacgcgaggtaccgctgggagcccatgcccggaggctgcgacgtcgaggcggccactggggcggacttccccatggtgctcgtgcagatcccgatgtacaacgagcgggaggtgtacaagctatccattgacgctgcgtgtgccctcacatggccaccagaccgtattgtaatacaagtcttggatgactccactgatccgattattaaggaactagtggagcttgagtgccaggattgggccaccaaaaaaattaacatcaagtatgaggttagaaataatagaaagggatacaaagcaggtgcgctgaagaagggcatggaacatatatacgccaagcaatgtgaatttgttgctatctttgatgcggatttccaacctgaacctgacttccttttaaaaaccataccatttcttgtgcataacccaaagattgcacttgtacaagcacgttgggagtttggatgttcctgacctggcctttgccgggtgattttgcagtgaactacgatgtttgcctgatgacaaggatacagaagatgtctctagactatcatttcaaagttgagcaggaatcaggatcatttgtatattcattttttggctttaatggtacagctggtgtgtggcgtgtatctgctattaaccagtctggaggatggaaagatcgcacaactgtagaagatatggacttggctgtacgggctagcctcaagggatgggaattcttgtatgttggtgatattagggttaagagtgaactaccaagtaccttcaaagcctaccgtcatcaacaacataggtggacttgtggtgccgccaatctcttcaggaaaatggcatgggaaatcattacgaacaagcattcctgtatgggggctggtctatattcccactgcaatcacatgtatgaacgccatcagaaatccttggtctctccatttgatgcccttctggattctcttcgagaatgttatgtccatgcaccgcatgcgtgctgctgtaaccggtttacttgagactgcacgggcaaatgattgggtagtcactgagaaggtaggagatcttgtgaaggatgacctagatgttccactccttgaaccagtgaagccaacagaatgcgttgagaggatttactttcctgagctcttgcttgcactccacctcctaatatgtgcttcatatgacttcgtacttggaagccacaaatactatctttacatatacctccaggcctttgcatatgttgtaatgggttttggtttcgttggaacgaaaactccatgttcatagctgccaatatgatgttactattccccatttcacagtaagttcctaggagtactgccactatgtgcaagatgaaatttgtctgatggtaaatgttattcgcattgcggggcccatgcttagtctagtgggtgtgtgggtggggggcggttgggcctttggttcttagattgctaacaagatgttcttcaacagttcaactgccattggtaaactcagttttatgatttgcctctgtaaacgcattttccttgacatacatgtgttttctcaataatcgccctgtgctagatgtattcatctgtagcagttccattgcagaactgaatataattggtatggatttcagattttggattcatggttgtaatagggcgagaggcaagtttgtatccaagttggatttgtaaattattatagcttattttttatgattgtcatgtatagattggcaccaggaaggaatgtatggcataatgagaagacaatgaaatatgaaattaattcttgtattgtgacatagcaataggcat

SEQ ID NO: 10330 - DNA, 3378 bp, Zea Mays
tagcagcccaccggagaccagacagcgaggctctcctcgcgccttccgcgtttccgttccgctccaaaacctggtggccttgggctggccgcgcccgcgacatatgcctcctactggcgaaccccatccacacgacacgacactgctcagccgccggcctgggttgacttgactcaggcggggacacgcacacgttcgttcttacgtgcttccgccggcgcgggttggcgtggcagtcgggctcggccctcagatcctccaaagattggattttggaggagtgcgctgttgtgttggtggcggagcttcctggcgttgactccgaccttgctgttcctagcagctcccacccaagaggcatcgcggcgaccggatcggtcgatgtgtcgccggtagattggccggcgtcagcggagggtggagatggggaactgcatggacaaagcggtgccggtggacaacacctcctatcaatcgaaagcagggagcaaatcaatttcatcgtccaacccttcgacggtcaagactggttcgactcggtcgacatggactgtagcctcatacaaagatagtcgagagcttcctactcctaggacagaaggggaaatcttgtcatcaccaaatttgaaggcattctcgtttggtgatctcagaactgcgtcgaggaacttcagatcagacagtcttcttggggaaggaggatttggctatgtgttcaaaggctggattgatgagcaaactcttgccccttcaaagccaggaagcggtatggttgttgccatcaagaagctaaaaccagaaggttttcagggccacaaggagtggctgacagaggttgactaccttggccaacttcaccaccagaatcttgtcaaactcattggttattgcacagatggtgatcaccgacttctggtgtatgagtacatgcctaaaggaagtttggaaaatcatctattcagacgaggtgcggatcctttatcctggggaacaagactcaaagttgcaattggggctgctaagggtttatcatttctgcatgatgctgagaaccaagtcatatatcgtgatttcaaggcatcaaacattctccttgactcggagttcaatgcaaagctttcagactttggcttggcaaaagcaggtccaactggggacaggacccatgtttctacacaggtcatgggcacaagaggttatgcagctccagaatatgttgcaacaggtagtgtttggttccggagccagttgggatggagcggctctgagccaaggagcgtctccatccggaagattttagggagccagatggttaaacatttgagcataatattctttttagagccactctatcttacatgaaaccaattgaaacaacaacaaattggaagcggagcgactccgttccactagactctggaaccaaacactatcttatgctttccatttcttcaacattatttcgtttatatcaccttaagttcaatataagctcctaattttgtattagctaaggttatatttaccgagttagtcttatcacattcgcttattatggaagcttatttacttatgatctaggttaacatgctattgtgttatgataatgcaatcaaaattttgtttgtgtcatcttttaattttggttttaaggttctagaattggcggaattgtgctaatgctagtacaattgaactggttgacaaacataccactccaacttaggcttgttcggttgcatgtagactggatgagattgaggaggattaaattccctttctattcaattttgactagcaagagatttaatcctctccaatcctaaccgagtagacacttaaagcttgttcggttaggagtggattgagggggattggagaggattaaatcctctcccatacaaatttatataggaggggatataattccttccaattccctcaatccacctcaaaccaaacaagctcttactggatttttagggttgtgactgtcctaaaaagtgatgccaagaaactgctgagctacaaaatatgcttctaggatgtattacagtgcataagaatattattgattgtccttttagtgtagtccagtccagtccagtggcaagacattaatattctactttggtaagattgttccttgtgttgataaaaaggtcttattacacgtgtgccgtgtggtttacctcttatgagagatgttcatgttttcttcccctttcctgctattttcgctttgcgtgtaatttagcctacataaataagatgtataatatgcttaaggagttgtttggcacaattgctgcttgttggaaaaactgcatatctgagaagctggtgaaaaacagcttctgcttattgactgtttttagttcgttttgagaagcagctgaactgataagctactgcaagggataccacaggtcggctctcagtgaaggcagatgtctacagcttcggcgtggtgctactggagctgctgacgggacggcgggcgctagacaagtcgaaaccattaaccgagcagaacctggtggagtgggcgagaccctacttgagcgacaagcgccgtctgtaccgcatcatggactccaagttgggcgggcagtaccctaagaagggcgcccacgccgtcgccggaatcgccctgcagtgcatccgcaacgaagggaagatgcggcctgccatgtccgaggtcgtggagaagctagagcagctgcaggatcccaggtacaacgtggcggcgccgccacaggtgaacacggcgtcgtcgtcgtcgtcctctggctcagtagtccccaggtcgcccaggaaggcacagccttctcccagacgcctgtcgggttcggcctccccgttgccagcaccagcaacaggctccccgctgccggggtcatcgaggagtagtagtaggactgcgcaggtgcactaggcgtgcgacagaaaggatgaaagggagcggctatacgtgtgtgtgtgactgtgttgttgtcgtaggcatgtagctgttggtttcattccatgtgtactagctgtatatttttgctgtattcactaccggaatccaaggctttgccgagtgttgcaatctttgccgagtgccttttgtcgggcactcggcaaagacggctttgccgagtgccgcactcggtaaagctaggctctcggcaacgaggctctttaccgagtgccggacactcggcataggtagacactcggcacagcctggtttgccgagtgttaaacactcggcaaagtgggctctcggcaaagggccgtcaacggccgtcccaaagctgacggccgtcagtctttgccgagagccagcggctggcactcggcaaagaataaagaacaaagctttgccgagtg

SEQ ID NO: 10331 - DNA, 2250 bp, Zea Mays
tgcctactcaacgctcatggccatttctttactccaccctagtagcagcccaccggagaccagacagcgaggctctcctcgcgccttccgcgtttccgttccgctccaaaacctggtggccttgggctggccgcgcccgcgacatatgcctcctactggcgaaccccatccacacgacacgacactgctcagccgccggcctgggttgacttgactcaggcggggacacgcacacgttcgttcttacgtgcttccgccggcgcgggttggcgtggcagtcgggctcggccctcagatcctccaaagattggattttggaggagtgcgctgttgtgttggtggcggagcttcctggcgttgactccgaccttgctgttcctagcagctcccacccaagaggcatcgcggcgaccggatcggtcgatgtgtcgccggtagattggccggcgtcagcggagggtggagatggggaactgcatggacaaagcggtgccggtggacaacacctcctatcaatcgaaagcagggagcaaatcaatttcatcgtccaacccttcgacggtcaagactggttcgactcggtcgacatggactgtagcctcatacaaagatagtcgagagcttcctactcctaggacagaaggggaaatcttgtcatcaccaaatttgaaggcattctcgtttggtgatctcagaactgcgtcgaggaacttcagatcagacagtcttcttggggaaggaggatttggctatgtgttcaaaggctggattgatgagcaaactcttgccccttcaaagccaggaagcggtatggttgttgccatcaagaagctaaaaccagaaggttttcagggccacaaggagtggctgacagaggttgactaccttggccaacttcaccaccagaatcttgtcaaactcattggttattgcacagatggtgatcaccgacttctggtgtatgagtacatgcctaaaggaagtttggaaaatcatctattcagacgaggtgcggatcctttatcctggggaacaagactcaaagttgcaattggggctgctaagggtttatcatttctgcatgatgctgagaaccaagtcatatatcgtgatttcaaggcatcaaacattctccttgactcggagttcaatgcaaagctttcagactttggcttggcaaaagcaggtccaactggggacaggacccatgtttctacacaggtcatgggcacaagaggttatgcagctccagaatatgttgcaacagctgaactgataagctactgcaagggataccacaggtcggctctcagtgaaggcagatgtctacagcttcggcgtggtgctactggagctgctgacgggacggcgggcgctagacaagtcgaaaccattaaccgagcagaacctggtggagtgggcgagaccctacttgagcgacaagcgccgtctgtaccgcatcatggactccaagttgggcgggcagtaccctaagaagggcgcccacgccgtcgccggaatcgccctgcagtgcatccgcaacgaagggaagatgcggcctgccatgtccgaggtcgtggagaagctagagcagctgcaggatcccaggtacaacgtggcggcgccgccacaggtgaacacggcgtcgtcgtcgtcgtcctctggctcagtagtccccaggtcgcccaggaaggcacagccttctcccagacgcctgtcgggttcggcctccccgttgccagcaccagcaacaggctccccgctgccggggtcatcgaggagtagtagtaggactgcgcaggtgcactaggcgtgcgacagaaaggatgaaagggagcggctatacgtgtgtgtgtgactgtgttgttgtcgtaggcatgtagctgttggtttcattccatgtgtactagctgtatatttttgctgtattcactaccggaatccaaggctttgccgagtgttgcaatctttgccgagtgccttttgtcgggcactcggcaaagacggctttgccgagtgccgcactcggtaaagctaggctctcggcaacgaggctctttaccgagtgccggacactcggcataggtagacactcggcacagcctggtttgccgagtgttaaacactcggcaaagtgggctctcggcaaagggccgtcaacggccgtcccaaagctgacggccgtcagtctttgccgagagccagcggctggcactcggcaaagaataaagaacaaagctttgccgagtg

SEQ ID NO: 10332 - DNA, 1468 bp, Zea Mays
gtcgcaagtccctgattcctcaacagtcaacacaccctggttctccccatcggtggagcagcagcagctcgacgtcgacttcctcagccgctcgcctttagcctcgtgctcgagctccgctgcagctccgagacgccggcgtgtctcactgctcgacctctctcgtcgctgcatctggacgtacgccgctgctcgccgcactccttggtgtgcgcgctcaccggcacccagccgtcctctccacgtcggcatcctcgcctcgccatcacgacgtcgtcgtcgcgccgtcgtgcgtgctccagctctttagtgcagcatcgtccaccttcgcgcctttgcatccgtagaactcgctggcgtcgtcaactatcgccagatcctcccgtcctctgctgcctcaacgtgctcacttgtgagccgtgtgccgccacgactcaacttcggcgtgtcctgcgcgagctcgcttcaacccgacgcgctgcctcagctcgtcctcggctccttcccgtccgaaccatgggtcgcagcaacctcgccatcggagtagatcctagcctccgcaccgccgtcgtcaccctatttattcggcgtcgtttgcctcgcctcaccgggaaggaaactacaaccgcgatgtttacttgacgtcctacctctgacctcgtcgcagtctttgccgctcacgctccatcttcttcaggttcgacagcgttatctaagtgttccaatgaatagaatcgttgtgagtgtccagggaaagatttttcatgagtgtttgtagttgtgagtgtccaggaaagatttttccatgagggtttgtagccggcttgtgactcgcgctattggatccgaccttgtaattttgtatgtgtgtcgcaatcatgtaattaatggacaaaagggactaaatggtaaaaaaaagtttcgtcagtgtttcggtagctgttcagtgttacgtttaagtcagattagttgcagtcttcacgaatctcgacttgagtttggtattgcaggcttagagtggctctccgaaaagtttggtttatattggagtgtgtttagttgattaactaattttcacttaattaaaatagattgtgagataaattgtgttgggttcgcaataaaatagttttatggttttctagcaattgattgatttttagataataaagaagtgccctaaaaatgtttatatgaattttagcaataaaaatggagcactaaaaattataggaaaatttaagtaagcttatcttagtcatattaaccctttggttaggtttgaagctgtttgaaaatgatctgctcagcaaactaattgttgctcaaaatagaaaagagtttcaccttaggtaattaggacacctagtgccttagaggagagataaagttacttgagttttgagatttttgaacgatgtttaaggatgcttagctccttgtaggaagtgttttttacaagtttgat

SEQ ID NO: 10333 - DNA, 1917 bp, Zea Mays
atggtgctgcctaatccagaattccagattatgtcactgtcgaagctcgagatcttagtgtcatgtctgggttccaagtctgccactggctgggaggaggatcacgccgagaaggttgctgccctgaaggttaaagcttttcttagaggtgactctccaccatattcagctggcgatctagaaggaatgacatttattgcgaacatgcatgttaaagtagctaggaggcttcatagcaatagcttgcggtactggctgttggaatacttgaggcgacaaccaaaggggagaaagtacagagcactgattctgaagtttgtcaaggatcgtatgggagctctgcttttggtggaggttgggatgcaagttacaacaacaatttcacgtgggaaagtgggagatcaagtcagtgttactgtggaaatagctcatccacgtgatgatatattatcagtcggagagcaaagagtagaaaggatggaaccctatgatacacagctggggctcatggcctctggggccttctctgggaacttcgccatacaaataaaagaggagggctcttcagtcaggtcaacagctggcaaccatatgtacactgacatcgcacaagctctcgaagccaacgggattgaagcaaaccccaaggactatctcactttcttctgcttaggtaaccgcgaggtgaagcaggagggagaatatgaaccagaggagcacccagaacctgacattgattacatccgggctcaagaggctaggagatgcgccaacagagagaccctaggaaaacatgccatgcactttcttgctggttatatttccatgttttctagacagggtcctttttcagacaggtataacacggaagccagaggccttgctgctggaccaatattagtccaaaggttatctggttttggggaccatcgatctgcagacaatgtggcaagagtggcagaggaagagcttgcacatgcctctgtaggtttgtattggtttctcaaagaatgccaagtgatgggtcgtgaacccagcaatactttccaagacttgataaaggagtacgacattgtactgaagggtccattcaactacacagcgatggcctcccccgacctactcttcaatctgcggaacctcttctacctgggcgcctaccaggcagccattaacaacatcgacctggagaagaagactcgcagggctagcaagaggaggcctatggagataagcacaaaagtgcggccaccaaaattgagggaggtgatacaggttcccaagaaggttggaagggatccaagatttgagcctgtttatggatctgttgacaaagaaggtttatacgggttgagtcgggtggcccatgtcgcgccctctgctgccacccggcacgatgtcgattacctcagccttttgaagcagattgtcgagttcaaagctttgctctttattcccccgaaggctccacatgatctctatgagagatactacaacagtaacaagtcaaatctcaagttgtatgttaggagcgttttcatctctgatgaattcgatgaccttcttcccaattaccttagctttttgaagggtattgttgactcggacacactgtaccttagcaacaaggataagacaaatgaagagaaaagtgagatggaggagaagaagggccagtacgtcaagttctggaataagttttgcaaatcaatcaagctgaggcagaaagacatcttctacatcacgggaagcagcaaagagcagctaggaaagtctccattcctagagaggctaaccaagaagaactacgaggatgagccgatgatgttgttgctttgtgatcgtgacctcatttacaggacaactgttgtttccaaggctgacatgaccaagttcaactaccggggaatattctaa

SEQ ID NO: 10334 - DNA, 1287 bp, Zea Mays
gtgatctcatgtagtttgaaacacatcgacaattaattttagtggggagtttaaaacctagttttcttaattcgttattttcttgattcgctgtcatgggtcgtgcaaacaaaaaaagaaaaaaaggaaataaaaatagaaaacacaaggacacaagctacgcacgcacgccacccccgccaacaggcaagcagagccgccgagtggccgctcagcctgggcaacgcctgctggccaatcccggttgccgtccacgcgagccaatggagtgccagcgacgtttcgttaaatcctagccagccactcctctgcccacacaatcccctctctcccacacggcggcaggcagcgactccatctccctgactcctcggacatcgaagctccatggccgcccagctccttccctagccgagctatggcttctcctatggcgccaccctttccctcggcaccttcccccagcaggattcctcctcccccatggaaatcagcagcgcgccgcgactctctctgctcgtgcgtgggatttgccgagcaggaggtccccatggccggcgcgcgctcttgctgtgtctctccctacgagctcgggcttctccctctcgcccccctgcctctgctcctccatggtggagtgctggcgagggcaccatctcttggcgctaccctgctccatccaatcccagctctccattgatggccaatgcctttcctgctcgtccatggagatctcgtcggcggctgactgcctcgcttcatggtgcccctcctcgctcctgctccctatggcgcgctgtagcagtgccgagctagtccgatcctccatctcatcgatgcctcccctgctgatatccccatggtcacttgcccctgtgtttcctcccatggcgcctcccttctctgtttcttcccctaacctgcgcacggcaagcccaggaccgagcgtccctgcctcccctcggacctgtgggcactagctcaggctccttttttcccaccatctccctcagccagtagcagtcgacctcctccccctgctgttcctgcagtccaagttctccccacgccgaccttcttctccggcaagtctggccgctgccatccctcggcatcgggctggggcacacgccgagctcctcctcacgtgctccttcgctggtctgcgtcctcgctcgagcagcagcagcagcgacgcccttcgctgtgtcgcgctcgtcagaacgggcctcacgtcgtcgatctgcgcagagtctacgcgtcatcgtcgaaacccgcgcccttatc

SEQ ID NO: 10335 - DNA, 1650 bp, Zea Mays
gtgatctcatgtagtttgaaacacatcgacaattaattttagtggggagtttaaaacctagttttcttaattcgttattttcttgattcgctgtcatgggtcgtgcaaacaaaaaaagaaaaaaaggaaataaaaatagaaaacacaaggacacaagctacgcacgcacgccacccccgccaacaggcaagcagagccgccgagtggccgctcagcctgggcaacgcctgctggccaatcccggttgccgtccacgcgagccaatggagtgccagcgacgtttcgttaaatcctagccagccactcctctgcccacacaatcccctctctcccacacggcggcaggcagcgactccatctccctgactcctcggacatcgaagctccatggccgcccagctccttccctagccgagctatggcttctcctatggcgccaccctttccctcggcaccttcccccagcaggattcctcctcccccatggaaatcagcagcgcgccgcgactctctctgctcgtgcgtgggatttgccgagcaggaggtccccatggccggcgcgcgctcttgctgtgtctctccctacgagctcgggcttctccctctcgcccccctgcctctgctcctccatggtggagtgctggcgagggcaccatctcttggcgctaccctgctccatccaatcccagctctccattgatggccaatgcctttcctgctcgtccatggagatctcgtcggcggctgactgcctcgcttcatggtgcccctcctcgctcctgctccctatggcgcgctgtagcagtgccgagctagtccgatcctccatctcatcgatgcctcccctgctgatatccccatggtcacttgcccctgtgtttcctcccatggcgcctcccttctctgtttcttcccctaacctgcgcacggcaagcccaggaccgagcgtccctgcctcccctcggacctgtgggcactagctcaggctccttttttcccaccatctccctcagccagtagcagtcgacctcctccccctgctgttcctgcagtccaagttctccccacgccgaccttcttctccggcaagtctggccgctgccatccctcggcatcgggctggggcacacgccgagctcctcctcacgtgctccttcgctggtctgcgtcctcgctcgagcagcagcagcagcgacgcccttcgctgtgtcgcgctcgtcagaacgggcctcacgtcgtcgatctgcgcagagtctacgcgtcatcgtcgaaacccgcgcccttgtcgacgtcacgcctcgcgcatcgctcgtcggcaaagagcccaaactaatggcatgcatgcgcgacgcgagttcgccacgaccgagagaggatgatcgtgcaagtgatgtggtgccaaccacaaggtgcagtcggtggacgacccaaggaaggatggacttaaccagtggatgctcgccaagcgagtacctcccccagcaaacactacctaagtgttaaattaaaggcaagccccggttttatgcataaccgtttatatatgctattttactacacttaatgtttgtaggcttgtaccgtgcacttaagtgtaggagttggttgaaaccctagttgcatgaactcaggattccttttcagatggat

SEQ ID NO: 10336 - DNA, 1596 bp, Zea Mays
ctgtcagatctgtcgcagcgttcatttgtcgtgatctcatgtagtttgaaacacatcgacaattaattttagtggggagtttaaaacctagttttcttaattcgttattttcttgattcgctgtcatgggtcgtgcaaacaaaaaaagaaaaaaaggaaataaaaatagaaaacacaaggacacaagctacgcacgcacgccacccccgccaacaggcaagcagagccgccgagtggccgctcagcctgggcaacgcctgctggccaatcccggttgccgtccacgcgagccaatggagtgccagcgacgtttcgttaaatcctagccagccactcctctgcccacacaatcccctctctcccacacggcggcaggcagcgactccatctccctgactcctcggacatcgaagctccatggccgcccagctccttccctagccgagctatggcttctcctatggcgccaccctttccctcggcaccttcccccagcaggattcctcctcccccatggaaatcagcagcgcgccgcgactctctctgctcgtgcgtgggatttgccgagcaggaggtccccatggccggcgcgcgctcttgctgtgtctctccctacgagctcgggcttctccctctcgcccccctgcctctgctcctccatggtggagtgctggcgagggcaccatctcttggcgctaccctgctccatccaatcccagctctccattgatggccaatgcctttcctgctcgtccatggagatctcgtcggcggctgactgcctcgcttcatggtgcccctcctcgctcctgctccctatggcgcgctgtagcagtgccgagctagtccgatcctccatctcatcgatgcctcccctgctgatatccccatggtcacttgcccctgtgtttcctcccatggcgcctcccttctctgtttcttcccctaacctgcgcacggcaagcccaggaccgagcgtccctgcctcccctcggacctgtgggcactagctcaggctccttttttcccaccatctccctcagccagtagcagtcgacctcctccccctgctgttcctgcagtccaagttctccccacgccgaccttcttctccggcaagtctggccgctgccatccctcggcatcgggctggggcacacgccgagctcctcctcacgtgctccttcgctggtctgcgtcctcgctcgagcagcagcagcagcgacgcccttcgctgtgtcgcgctcgtcagaacgggcctcacgtcgtcgatctgcgcagagtctacgcgtcatcgtcgaaacccgcggaccgagagaggatgatcgtgcaagtgatgtggtgccaaccacaaggtgcagtcggtggacgacccaaggaaggatggacttaaccagtggatgctcgccaagcgagtacctcccccagcaaacactacctaagtgttaaattaaaggcaagccccggttttatgcataaccgtttatatatgctattttactacacttaatgtttgtaggcttgtaccgtgcacttaagtgtaggagttggttgaaaccctagttgcatgaactcaggattccttttcagatggat

SEQ ID NO: 10337 - DNA, 2561 bp, Zea Mays
gtcgacttgaatttctgtcagatctgtcgcagcgttcatttgtcgtgatctcatgtagtttgaaacacatcgacaattaattttagtggggagtttaaaacctagttttcttaattcgttattttcttgattcgctgtcatgggtcgtgcaaacaaaaaaagaaaaaaaggaaataaaaatagaaaacacaaggacacaagctacgcacgcacgccacccccgccaacaggcaagcagagccgccgagtggccgctcagcctgggcaacgcctgctggccaatcccggttgccgtccacgcgagccaatggagtgccagcgacgtttcgttaaatcctagccagccactcctctgcccacacaatcccctctctcccacacggcggcaggcagcgactccatctccctgactcctcggacatcgaagctccatggccgcccagctccttccctagccgagctatggcttctcctatggcgccaccctttccctcggcaccttcccccagcaggattcctcctcccccatggaaatcagcagcgcgccgcgactctctctgctcgtgcgtgggatttgccgagcaggaggtccccatggccggcgcgcgctcttgctgtgtctctccctacgagctcgggcttctccctctcgcccccctgcctctgctcctccatggtggagtgctggcgagggcaccatctcttggcgctaccctgctccatccaatcccagctctccattgatggccaatgcctttcctgctcgtccatggagatctcgtcggcggctgactgcctcgcttcatggtgcccctcctcgctcctgctccctatggcgcgctgtagcagtgccgagctagtccgatcctccatctcatcgatgcctcccctgctgatatccccatggtcacttgcccctgtgtttcctcccatggcgcctcccttctctgtttcttcccctaacctgcgcacggcaagcccaggaccgagcgtccctgcctcccctcggacctgtgggcactagctcaggctccttttttcccaccatctccctcagccagtagcagtcgacctcctccccctgctgttcctgcagtccaagttctccccacgccgaccttcttctccggcaagtctggccgctgccatccctcggcatcgggctggggcacacgccgagctcctcctcacgtgctccttcgctggtctgcgtcctcgctcgagcagcagcagcagcgacgcccttcgctgtgtcgcgctcgtcagaacgggcctcacgtcgtcgatctgcgcagagtctacgcgtcatcgtcgaaacccgcgcccttgtcgacgtcacgcctcgcgcatcgctcgtcggcaaagagcccaaactaatggcatgcatgcgcgacgcgagttcgccacgttgttcgccttgaatgattcgcgatttgttttatttacgtattcggtcgatgatgtgcctgcgtgtttatatgtgtgtgaaaatatatttgtatgaatggacgcgtgtagaaaagaaaatgaagtagaaaagaactcggatatttttattttgataggaaaatatgcgatgcgattgtttgatgcgaaaaactaagttacaaaatgcggattatgttttgggaaatgcattgatatgtgtttatgtgaaaagtataattgttttatgcaatgtgatgggattcgtgattatatcgggaatatatttagtaatgtgacgagtagtttagaaaatactagtttgcgtggaggatgtgttattaagacgtgagtgtcggagttcatatattagtggtcgcgccacattgatcgaagcgtctcgagtgcacgccaccatatggttgcatgcgagacgaggttatgcgcatgatgagttttgtaaaaatccactggtgttaatgttaagttgaggtttatttgcgcgtggaaagtaataatgtgttaaatacttaaaactcttagttgatagtagaaattgttttggcttatatagagatgtggtgacatgctaaagtagtcatcgcttcttctatatcttgagtcgggtcaatacgcgttatgtgttcatgatttgggaagtaaatgcgtggtgattgcgatgtggagatcagtggtttacgattcatatagattggtcgatgtgcgaaaatacttatgagtatgtgtgtttataaaaatgtggcagtgtatgttgagtctcggattgtgataataataggcaagccaacgtatatgttatttaacggtctatgtcgttgctctagttagccgactgttagatagctttggttaagctcgtaatcacgatgatttgcttattgtagtctaaatgcgtatggttatggtcgcggatgaaaagtagtaatgttcaatacaaattagtgtgtgaagggcgcaatcgatatacacatttataccgggtttgattattgtggtgaatgtgttgttgattgtgtacggaaattctagcgcacaaaataatttgtataaaattagtaagtctacttgttggtcctaattcgattgttttaactctaacagatggtaaagtgtta

SEQ ID NO: 10338 - DNA, 942 bp, Zea Mays
atcatctcaaatctatagttgaccttcctttggaaattgtgagttgagcaaaatgccgacgaagccatctgactgcatcccattttcgaattcaacaatgggaagagaactatgcatcgcaagtgttaggacaggagagatcacaaagttgattttggccacaacccacctcgagagcccatgccctgcacctcccaagtgggatcagatgtatagcaaagaacgtgtggctcaggcaaagcaatccctggaaattctgggaggcttccccaatgccatactctgtggggacatgaactgggacgacaagggagacggccctttccctctgcaggatgggtggactgatgcttgggttgagctgaaacctggagaggatggctggacctacgacaccaaggccaatggcatgctgtcaggcaaccgcaagctgcagaagcgattggaccggtttgtgtgcaagctagcagacttcaagatggacagcattgagatgatcgggaaggaggcaatacctggtgtctcctacttcaaggagaagaagattcggaaagagaaccaaaggattgaactgcctgtctttccaagtgaccactttgggcttgttttgaccatcacccagcaaaaggatgacaacgtctgaacaaccgttacactgtccacattttagtgattgcaggacatttcatgttcttttgcgatttaggaatatagagcggttccactgtccacattttagtgattgcctctggattttgtaaatttggtggaggcatcagtttgctaggacgtgcaaatggtggtattattaccagatggctacttgttgatacctgatgcttagtttcttatcaaactttgggttggctaaaaaacatgccctctcgatgtcttactattatggccacacggaaagccagtaaaaacacctctcattaagtc

SEQ ID NO: 10339 - DNA, 942 bp, Zea Mays
aaagaagttgttgaacttgatctgtttctttttatactatttgttgagcaaaatgccgacgaagccatctgactgcatcccattttcgaattcaacaatgggaagagaactatgcatcgcaagtgttaggacaggagagatcacaaagttgattttggccacaacccacctcgagagcccatgccctgcacctcccaagtgggatcagatgtatagcaaagaacgtgtggctcaggcaaagcaatccctggaaattctgggaggcttccccaatgccatactctgtggggacatgaactgggacgacaagggagacggccctttccctctgcaggatgggtggactgatgcttgggttgagctgaaacctggagaggatggctggacctacgacaccaaggccaatggcatgctgtcaggcaaccgcaagctgcagaagcgattggaccggtttgtgtgcaagctagcagacttcaagatggacagcattgagatgatcgggaaggaggcaatacctggtgtctcctacttcaaggagaagaagattcggaaagagaaccaaaggattgaactgcctgtctttccaagtgaccactttgggcttgttttgaccatcacccagcaaaaggatgacaacgtctgaacaaccgttacactgtccacattttagtgattgcaggacatttcatgttcttttgcgatttaggaatatagagcggttccactgtccacattttagtgattgcctctggattttgtaaatttggtggaggcatcagtttgctaggacgtgcaaatggtggtattattaccagatggctacttgttgatacctgatgcttagtttcttatcaaactttgggttggctaaaaaacatgccctctcgatgtcttactattatggccacacggaaagccagtaaaaacacctctcattaagtc

SEQ ID NO: 10340 - DNA, 1484 bp, Zea Mays
aattcagatcagccgtgacccgctatttcgaattcgaaaaggccaccaggtgtttccttttaactccgccgccgtcgccgccgctgccgcatcttcgccagttttccccaagccacgaccatgccctccccctcccgctcgccaacgacgcctccggtcgcctcggagtggagctgcgtgcggtgcacgttgctcaaccctgaccactccgattcctgcgtggcgtgcgaggcctcgcgcccagtggaggttgacatcgacagccccgtcgtcgtgggcgccgccctcgcgttagcctcgcccaagcggagccggaggaagaatgaacgcagtgcctctcctccaccccagcggtttgggaggaagagggagcacgatgcatcgccggaggtggtcgaactctgcgatattgcgggaaaggggcccgccaccaagaaaggaaatcttgagatttgtttggataagaagaccttcaaaatcatgacatacaatgtctggttccgggaggatttggaattgagaagtaggatggatgctctcggggatcttataaagcagcactgcccagacttcatatgcttccagttgagcaaaatgccgacgaagccatctgactgcatcccattttcgaattcaacaatgggaagagaactatgcatcgcaagtgttaggacaggagagatcacaaagttgattttggccacaacccacctcgagagcccatgccctgcacctcccaagtgggatcagatgtatagcaaagaacgtgtggctcaggcaaagcaatccctggaaattctgggaggcttccccaatgccatactctgtggggacatgaactgggacgacaagggagacggccctttccctctgcaggatgggtggactgatgcttgggttgagctgaaacctggagaggatggctggacctacgacaccaaggccaatggcatgctgtcaggcaaccgcaagctgcagaagcgattggaccggtttgtgtgcaagctagcagacttcaagatggacagcattgagatgatcgggaaggaggcaatacctggtgtctcctacttcaaggagaagaagattcggaaagagaaccaaaggattgaactgcctgtctttccaagtgaccactttgggcttgttttgaccatcacccagcaaaaggatgacaacgtctgaacaaccgttacactgtccacattttagtgattgcaggacatttcatgttcttttgcgatttaggaatatagagcggttccactgtccacattttagtgattgcctctggattttgtaaatttggtggaggcatcagtttgctaggacgtgcaaatggtggtattattaccagatggctacttgttgatacctgatgcttagtttcttatcaaactttgggttggctaaaaaacatgccctctcgatgtcttactattatggccacacggaaagccagtaaaaacacctctcattaagtc

SEQ ID NO: 10341 - DNA, 813 bp, Zea Mays
aattcagatcagccgtgacccgctatttcgaattcgaaaaggccaccaggtgtttccttttaactccgccgccgtcgccgccgctgccgcatcttcgccagttttccccaagccacgaccatgccctccccctcccgctcgccaacgacgcctccggtcgcctcggagtggagctgcgtgcggtgcacgttgctcaaccctgaccactccgattcctgcgtggcgtgcgaggcctcgcgcccagtggaggttgacatcgacagccccgtcgtcgtgggcgccgccctcgcgttagcctcgcccaagcggagccggaggaagaatgaacgcagtgcctctcctccaccccagcggtttgggaggaagagggagcacgatgcatcgccggaggtggtcgaactctgcgatattgcgggaaaggggcccgccaccaagaaaggaaatcttgagatttgtttggataagaagaccttcaaaatcatgacatacaatgtctggttccgggaggatttggaattgagaagtaggatggatgctctcggggatcttataaagcagcactgcccagacttcatatgcttccaggaggttacaccatacatatatatgcttatgcaaaaatctgactggtggcaacaatacacatgcttgttgtcacatgagaatgctattcagatgccgtattactgcatgcagtgaatttcaatggcaacaaatagcgaggcattgtctgtcggtcaaagtaatcactcctatgacccactcaaagatcagtcacgaaggccaaagtcaaatgatccaggatggaaatat

SEQ ID NO: 10342 - DNA, 1867 bp, Zea Mays
ccaagagttggattcccttcagcttggtaccacaatcatatttgcagttttctgctggtgggattgtcaaaataccgaagtttgagatgatgatgtctaaaagtgaagcaaacaacaagcctgttctagctgcagatgatgtttacattgtaacagtctatggtaggatttattgcttgcagcttgacagagttagtatgtcattgaatctatatcgcttttaccgtgatgctgttgtacaacagtgtactctgccaacatactcaagcagaattgcagttagtgccgttgacaacataattatggttcaccaaatagatgcaaaagtagtcatgctttacgatgtgtccctggattcttatgccccagtttctgcaccacttccactgctattgagaggactgcccatcaatagtagacaagtatctcagactgcggatagccagtctagtgcatacggtggaaccatctatggagaaggttggaacttcctcattccagacctcatctgtgatgctgagaatgggctcttatggaagctccatttagatctggcggctattgctgctagtagttctgatgctccttcaattttggaattccttcagagacgaaagtctgacccaagcatggttaagactctatgcctagctatagttcggacaatcatcctggaaaggaggtcagtgcccacagttgctaaggcgatggatgttgtccttgattcctacacgcgtttgatgaaaatgggaggggcttttcctggggttaggcgaatacatgagcaaaatcagcagtcaggtagtcagcctattgatggctcccatgtggtttctcaggaatccagtcctggaacaacagttagtcctgctgtgaacccagaccacggaagtgaggctgtggatatatatgtgcagtcaaatccaggagttgagcatacaatagacaggggattactaaatataaacatatcttctgattctgtggacaatacatctgatgctgtcgacaaacgacagcaagctgtaggcgaagctagccgaccattgtcttcaggcacaatgacgcaacatggacaacatgctggaaccgtggcaatttctccaattgagatgttccagtctgtctttacacttgttgaagatgaaatgatgggtgatcctgcatatcttattgctgtcatcatagagtttctacggagtgtctcaaaggctgggcttaaggctcctcacaacctttatgtgatgacggcgacactactagctcgtagcaaccgttacgctgaaatagcattgtttgtgtcaaacaagattcttgagccgtgtaaagaactggcaatgcaacttatggagctgggtctgcagcacccgccaacgaggaagctgggcatggacatgctgagggagcgaggcctgcatcacgactacgtgactgcgatgctgcaagatgggtactacttggaggccctgcgctatgccagaaaatacaaggtgatcaccgtgcagcctgccctatttctggagaaagccctggcgaagaacagcgcccacaacctggctgcagtgctgagcttcttctgcgagttcactccgagcttcaaggccacatcggactttgtcagataccggcatattctgtctgaaatggtttgaacagctttccgttgtgcaaacttgttgtcccgaaatgacttggcacgtcctctgtaacaagcaacgtcacctcggagggtacttttatttaattcttttggtccctcttgcagaaaataatattttattgttgtgaataaaaaaacgttgcaattaccgatgaaaaacaagtctggcttgaggctaagatgatcgcttcccgctcgccgaccatg

SEQ ID NO: 10343 - DNA, 1860 bp, Zea Mays
gtcacatgcttgctgatgctgtggttgtcctggctataagttttctgctggtgggattgtcaaaataccgaagtttgagatgatgatgtctaaaagtgaagcaaacaacaagcctgttctagctgcagatgatgtttacattgtaacagtctatggtaggatttattgcttgcagcttgacagagttagtatgtcattgaatctatatcgcttttaccgtgatgctgttgtacaacagtgtactctgccaacatactcaagcagaattgcagttagtgccgttgacaacataattatggttcaccaaatagatgcaaaagtagtcatgctttacgatgtgtccctggattcttatgccccagtttctgcaccacttccactgctattgagaggactgcccatcaatagtagacaagtatctcagactgcggatagccagtctagtgcatacggtggaaccatctatggagaaggttggaacttcctcattccagacctcatctgtgatgctgagaatgggctcttatggaagctccatttagatctggcggctattgctgctagtagttctgatgctccttcaattttggaattccttcagagacgaaagtctgacccaagcatggttaagactctatgcctagctatagttcggacaatcatcctggaaaggaggtcagtgcccacagttgctaaggcgatggatgttgtccttgattcctacacgcgtttgatgaaaatgggaggggcttttcctggggttaggcgaatacatgagcaaaatcagcagtcaggtagtcagcctattgatggctcccatgtggtttctcaggaatccagtcctggaacaacagttagtcctgctgtgaacccagaccacggaagtgaggctgtggatatatatgtgcagtcaaatccaggagttgagcatacaatagacaggggattactaaatataaacatatcttctgattctgtggacaatacatctgatgctgtcgacaaacgacagcaagctgtaggcgaagctagccgaccattgtcttcaggcacaatgacgcaacatggacaacatgctggaaccgtggcaatttctccaattgagatgttccagtctgtctttacacttgttgaagatgaaatgatgggtgatcctgcatatcttattgctgtcatcatagagtttctacggagtgtctcaaaggctgggcttaaggctcctcacaacctttatgtgatgacggcgacactactagctcgtagcaaccgttacgctgaaatagcattgtttgtgtcaaacaagattcttgagccgtgtaaagaactggcaatgcaacttatggagctgggtctgcagcacccgccaacgaggaagctgggcatggacatgctgagggagcgaggcctgcatcacgactacgtgactgcgatgctgcaagatgggtactacttggaggccctgcgctatgccagaaaatacaaggtgatcaccgtgcagcctgccctatttctggagaaagccctggcgaagaacagcgcccacaacctggctgcagtgctgagcttcttctgcgagttcactccgagcttcaaggccacatcggactttgtcagataccggcatattctgtctgaaatggtttgaacagctttccgttgtgcaaacttgttgtcccgaaatgacttggcacgtcctctgtaacaagcaacgtcacctcggagggtacttttatttaattcttttggtccctcttgcagaaaataatattttattgttgtgaataaaaaaacgttgcaattaccgatgaaaaacaagtctggcttgaggctaagatgatcgcttcccgctcgccgaccatg

SEQ ID NO: 10344 - DNA, 2640 bp, Zea Mays
aggcaaaagattatgggagatgcatagcagcaaaggtccctgagattgaacataatatgtgttccaaggagtttctagcactcagagcatgcatgcagactgtgaacaaggcttgaggctccatatttataggaagtttgatactaatctcttttggtaattgctgcggatttttgtcatcttaaaaagtagaacctcattttcttggctaaacaatcagtagagcctaagcacgcaagagacaaagaaaatgttgggcaatcagatacaagggggcttgggcacatctggggcactgtctcatgcttatgttcagcatcctccgctgcgatgtgacataccagacactcagggtctgttctatgatgatgcaaataagttccttatagctccaactgctgatcggatattgtactggaaaacaattctacctactccatctggacctccaaactctgatccagttaatgaaggacctgtcttgtcagttcgatattcgctggatcataaagttattgggattcaacgatccagacatgaaattgagtttagaaatagggaaacaggggagacttgtagcaaaaagtgcagagctgattcagaaactgtacttggctttttctggacagattgcccaacatgtgatgttatacttgtaaaaacaagtggtcttgatcttcttgcctacgagcctcagccccatgcttttcacttggtggaatcgaagaagttcaatgtgagctggtatctttacacacatgaaagtaggctgattctacttgcttctggaatgcaatgcacgatgtttactggctatcagttttctgctggtgggattgtcaaaataccgaagtttgagatgatgatgtctaaaagtgaagcaaacaacaagcctgttctagctgcagatgatgtttacattgtaacagtctatggtaggatttattgcttgcagcttgacagagttagtatgtcattgaatctatatcgcttttaccgtgatgctgttgtacaacagtgtactctgccaacatactcaagcagaattgcagttagtgccgttgacaacataattatggttcaccaaatagatgcaaaagtagtcatgctttacgatgtgtccctggattcttatgccccagtttctgcaccacttccactgctattgagaggactgcccatcaatagtagacaagtatctcagactgcggatagccagtctagtgcatacggtggaaccatctatggagaaggttggaacttcctcattccagacctcatctgtgatgctgagaatgggctcttatggaagctccatttagatctggcggctattgctgctagtagttctgatgctccttcaattttggaattccttcagagacgaaagtctgacccaagcatggttaagactctatgcctagctatagttcggacaatcatcctggaaaggaggtcagtgcccacagttgctaaggcgatggatgttgtccttgattcctacacgcgtttgatgaaaatgggaggggcttttcctggggttaggcgaatacatgagcaaaatcagcagtcaggtagtcagcctattgatggctcccatgtggtttctcaggaatccagtcctggaacaacagttagtcctgctgtgaacccagaccacggaagtgaggctgtggatatatatgtgcagtcaaatccaggagttgagcatacaatagacaggggattactaaatataaacatatcttctgattctgtggacaatacatctgatgctgtcgacaaacgacagcaagctgtaggcgaagctagccgaccattgtcttcaggcacaatgacgcaacatggacaacatgctggaaccgtggcaatttctccaattgagatgttccagtctgtctttacacttgttgaagatgaaatgatgggtgatcctgcatatcttattgctgtcatcatagagtttctacggagtgtctcaaaggctgggcttaaggctcctcacaacctttatgtgatgacggcgacactactagctcgtagcaaccgttacgctgaaatagcattgtttgtgtcaaacaagattcttgagccgtgtaaagaactggcaatgcaacttatggagctgggtctgcagcacccgccaacgaggaagctgggcatggacatgctgagggagcgaggcctgcatcacgactacgtgactgcgatgctgcaagatgggtactacttggaggccctgcgctatgccagaaaatacaaggtgatcaccgtgcagcctgccctatttctggagaaagccctggcgaagaacagcgcccacaacctggctgcagtgctgagcttcttctgcgagttcactccgagcttcaaggccacatcggactttgtcagataccggcatattctgtctgaaatggtttgaacagctttccgttgtgcaaacttgttgtcccgaaatgacttggcacgtcctctgtaacaagcaacgtcacctcggagggtacttttatttaattcttttggtccctcttgcagaaaataatattttattgttgtgaataaaaaaacgttgcaattaccgatgaaaaacaagtctggcttgaggctaagatgatcgcttcccgctcgccgaccatg

SEQ ID NO: 10345 - DNA, 2644 bp, Zea Mays
aggcaaaagattatgggagatgcatagcagcaaaggtccctgagattgaacataatatgtgttccaaggagtttctagcactcagagcatgcatgcagactgtggttaagaacaaggcttgaggctccatatttataggaagtttgatactaatctcttttggtaattgctgcggatttttgtcatcttaaaaagtagaacctcattttcttggctaaacaatcagtagagcctaagcacgcaagagacaaagaaaatgttgggcaatcagatacaagggggcttgggcacatctggggcactgtctcatgcttatgttcagcatcctccgctgcgatgtgacataccagacactcagggtctgttctatgatgatgcaaataagttccttatagctccaactgctgatcggatattgtactggaaaacaattctacctactccatctggacctccaaactctgatccagttaatgaaggacctgtcttgtcagttcgatattcgctggatcataaagttattgggattcaacgatccagacatgaaattgagtttagaaatagggaaacaggggagacttgtagcaaaaagtgcagagctgattcagaaactgtacttggctttttctggacagattgcccaacatgtgatgttatacttgtaaaaacaagtggtcttgatcttcttgcctacgagcctcagccccatgcttttcacttggtggaatcgaagaagttcaatgtgagctggtatctttacacacatgaaagtaggctgattctacttgcttctggaatgcaatgcacgatgtttactggctatcagttttctgctggtgggattgtcaaaataccgaagtttgagatgatgatgtctaaaagtgaagcaaacaacaagcctgttctagctgcagatgatgtttacattgtaacactatggtaggatttattgcttgcagcttgacagagttagtatgtcattgaatctatatcgcttttaccgtgatgctgttgtacaacagtgtactctgccaacatactcaagcagaattgcagttagtgccgttgacaacataattatggttcaccaaatagatgcaaaagtagtcatgctttacgatgtgtccctggattcttatgccccagtttctgcaccacttccactgctattgagaggactgcccatcaatagtagacaagtatctcagactgcggatagccagtctagtgcatacggtggaaccatctatggagaaggttggaacttcctcattccagacctcatctgtgatgctgagaatgggctcttatggaagctccatttagatctggcggctattgctgctagtagttctgatgctccttcaattttggaattccttcagagacgaaagtctgacccaagcatggttaagactctatgcctagctatagttcggacaatcatcctggaaaggaggtcagtgcccacagttgctaaggcgatggatgttgtccttgattcctacacgcgtttgatgaaaatgggaggggcttttcctggggttaggcgaatacatgagcaaaatcagcagtcaggtagtcagcctattgatggctcccatgtggtttctcaggaatccagtcctggaacaacagttagtcctgctgtgaacccagaccacggaagtgaggctgtggatatatatgtgcagtcaaatccaggagttgagcatacaatagacaggggattactaaatataaacatatcttctgattctgtggacaatacatctgatgctgtcgacaaacgacagcaagctgtaggcgaagctagccgaccattgtcttcaggcacaatgacgcaacatggacaacatgctggaaccgtggcaatttctccaattgagatgttccagtctgtctttacacttgttgaagatgaaatgatgggtgatcctgcatatcttattgctgtcatcatagagtttctacggagtgtctcaaaggctgggcttaaggctcctcacaacctttatgtgatgacggcgacactactagctcgtagcaaccgttacgctgaaatagcattgtttgtgtcaaacaagattcttgagccgtgtaaagaactggcaatgcaacttatggagctgggtctgcagcacccgccaacgaggaagctgggcatggacatgctgagggagcgaggcctgcatcacgactacgtgactgcgatgctgcaagatgggtactacttggaggccctgcgctatgccagaaaatacaaggtgatcaccgtgcagcctgccctatttctggagaaagccctggcgaagaacagcgcccacaacctggctgcagtgctgagcttcttctgcgagttcactccgagcttcaaggccacatcggactttgtcagataccggcatattctgtctgaaatggtttgaacagctttccgttgtgcaaacttgttgtcccgaaatgacttggcacgtcctctgtaacaagcaacgtcacctcggagggtacttttatttaattcttttggtccctcttgcagaaaataatattttattgttgtgaataaaaaaacgttgcaattaccgatgaaaaacaagtctggcttgaggctaagatgatcgcttcccgctcgccgaccatg

SEQ ID NO: 10346 - DNA, 2659 bp, Zea Mays
aggcaaaagattatgggagatgcatagcagcaaaggtccctgagattgaacataatatgtgttccaaggagtttctagcactcagagcatgcatgcagactgtgaacaaggcttgaggctccatatttataggaagtttgatactaatctcttttggtaattgctgcggatttttgatccttttctatttttcagtcatcttaaaaagtagaacctcattttcttggctaaacaatcagtagagcctaagcacgcaagagacaaagaaaatgttgggcaatcagatacaagggggcttgggcacatctggggcactgtctcatgcttatgttcagcatcctccgctgcgatgtgacataccagacactcagggtctgttctatgatgatgcaaataagttccttatagctccaactgctgatcggatattgtactggaaaacaattctacctactccatctggacctccaaactctgatccagttaatgaaggacctgtcttgtcagttcgatattcgctggatcataaagttattgggattcaacgatccagacatgaaattgagtttagaaatagggaaacaggggagacttgtagcaaaaagtgcagagctgattcagaaactgtacttggctttttctggacagattgcccaacatgtgatgttatacttgtaaaaacaagtggtcttgatcttcttgcctacgagcctcagccccatgcttttcacttggtggaatcgaagaagttcaatgtgagctggtatctttacacacatgaaagtaggctgattctacttgcttctggaatgcaatgcacgatgtttactggctatcagttttctgctggtgggattgtcaaaataccgaagtttgagatgatgatgtctaaaagtgaagcaaacaacaagcctgttctagctgcagatgatgtttacattgtaacagtctatggtaggatttattgcttgcagcttgacagagttagtatgtcattgaatctatatcgcttttaccgtgatgctgttgtacaacagtgtactctgccaacatactcaagcagaattgcagttagtgccgttgacaacataattatggttcaccaaatagatgcaaaagtagtcatgctttacgatgtgtccctggattcttatgccccagtttctgcaccacttccactgctattgagaggactgcccatcaatagtagacaagtatctcagactgcggatagccagtctagtgcatacggtggaaccatctatggagaaggttggaacttcctcattccagacctcatctgtgatgctgagaatgggctcttatggaagctccatttagatctggcggctattgctgctagtagttctgatgctccttcaattttggaattccttcagagacgaaagtctgacccaagcatggttaagactctatgcctagctatagttcggacaatcatcctggaaaggaggtcagtgcccacagttgctaaggcgatggatgttgtccttgattcctacacgcgtttgatgaaaatgggaggggcttttcctggggttaggcgaatacatgagcaaaatcagcagtcaggtagtcagcctattgatggctcccatgtggtttctcaggaatccagtcctggaacaacagttagtcctgctgtgaacccagaccacggaagtgaggctgtggatatatatgtgcagtcaaatccaggagttgagcatacaatagacaggggattactaaatataaacatatcttctgattctgtggacaatacatctgatgctgtcgacaaacgacagcaagctgtaggcgaagctagccgaccattgtcttcaggcacaatgacgcaacatggacaacatgctggaaccgtggcaatttctccaattgagatgttccagtctgtctttacacttgttgaagatgaaatgatgggtgatcctgcatatcttattgctgtcatcatagagtttctacggagtgtctcaaaggctgggcttaaggctcctcacaacctttatgtgatgacggcgacactactagctcgtagcaaccgttacgctgaaatagcattgtttgtgtcaaacaagattcttgagccgtgtaaagaactggcaatgcaacttatggagctgggtctgcagcacccgccaacgaggaagctgggcatggacatgctgagggagcgaggcctgcatcacgactacgtgactgcgatgctgcaagatgggtactacttggaggccctgcgctatgccagaaaatacaaggtgatcaccgtgcagcctgccctatttctggagaaagccctggcgaagaacagcgcccacaacctggctgcagtgctgagcttcttctgcgagttcactccgagcttcaaggccacatcggactttgtcagataccggcatattctgtctgaaatggtttgaacagctttccgttgtgcaaacttgttgtcccgaaatgacttggcacgtcctctgtaacaagcaacgtcacctcggagggtacttttatttaattcttttggtccctcttgcagaaaataatattttattgttgtgaataaaaaaacgttgcaattaccgatgaaaaacaagtctggcttgaggctaagatgatcgcttcccgctcgccgaccatg

SEQ ID NO: 10347 - DNA, 2969 bp, Zea Mays
caattgtattttcttaggaatacagccttatttgttatagatctgcgatgttaacctatttagtggctcaatctgaaatgtgactaactacaaaagcattctacctgacaagtgtcagttatttacatgcttttaagtattgaatcatgttacatttccctgtttgagtgatagcatacagaaaatttgctacctatggttgtgtgcttttatgaagaatacctgttttcaagaaatctagtgccaccttgcctggtccttgctctacttatggtgcacttgttcttgttttgttatgtactgtaggcaaaagattatgggagatgcatagcagcaaaggtccctgagattgaacataatatgtgttccaaggagtttctagcactcagagcatgcatgcagactgtggttaagaacaaggcttgaggctccatatttataggaagtttgatactaatctcttttggtaattgctgcggatttttgatccttttctatttttcagtcatcttaaaaagtagaacctcattttcttggctaaacaatcagtagagcctaagcacgcaagagacaaagaaaatgttgggcaatcagatacaagggggcttgggcacatctggggcactgtctcatgcttatgttcagcatcctccgctgcgatgtgacataccagacactcagggtctgttctatgatgatgcaaataagttccttatagctccaactgctgatcggatattgtactggaaaacaattctacctactccatctggacctccaaactctgatccagttaatgaaggacctgtcttgtcagttcgatattcgctggatcataaagttattgggattcaacgatccagacatgaaattgagtttagaaatagggaaacaggggagacttgtagcaaaaagtgcagagctgattcagaaactgtacttggctttttctggacagattgcccaacatgtgatgttatacttgtaaaaacaagtggtcttgatcttcttgcctacgagcctcagccccatgcttttcacttggtggaatcgaagaagttcaatgtgagctggtatctttacacacatgaaagtaggctgattctacttgcttctggaatgcaatgcacgatgtttactggctatcagttttctgctggtgggattgtcaaaataccgaagtttgagatgatgatgtctaaaagtgaagcaaacaacaagcctgttctagctgcagatgatgtttacattgtaacagtctatggtaggatttattgcttgcagcttgacagagttagtatgtcattgaatctatatcgcttttaccgtgatgctgttgtacaacagtgtactctgccaacatactcaagcagaattgcagttagtgccgttgacaacataattatggttcaccaaatagatgcaaaagtagtcatgctttacgatgtgtccctggattcttatgccccagtttctgcaccacttccactgctattgagaggactgcccatcaatagtagacaagtatctcagactgcggatagccagtctagtgcatacggtggaaccatctatggagaaggttggaacttcctcattccagacctcatctgtgatgctgagaatgggctcttatggaagctccatttagatctggcggctattgctgctagtagttctgatgctccttcaattttggaattccttcagagacgaaagtctgacccaagcatggttaagactctatgcctagctatagttcggacaatcatcctggaaaggaggtcagtgcccacagttgctaaggcgatggatgttgtccttgattcctacacgcgtttgatgaaaatgggaggggcttttcctggggttaggcgaatacatgagcaaaatcagcagtcaggtagtcagcctattgatggctcccatgtggtttctcaggaatccagtcctggaacaacagttagtcctgctgtgaacccagaccacggaagtgaggctgtggatatatatgtgcagtcaaatccaggagttgagcatacaatagacaggggattactaaatataaacatatcttctgattctgtggacaatacatctgatgctgtcgacaaacgacagcaagctgtaggcgaagctagccgaccattgtcttcaggcacaatgacgcaacatggacaacatgctggaaccgtggcaatttctccaattgagatgttccagtctgtctttacacttgttgaagatgaaatgatgggtgatcctgcatatcttattgctgtcatcatagagtttctacggagtgtctcaaaggctgggcttaaggctcctcacaacctttatgtgatgacggcgacactactagctcgtagcaaccgttacgctgaaatagcattgtttgtgtcaaacaagattcttgagccgtgtaaagaactggcaatgcaacttatggagctgggtctgcagcacccgccaacgaggaagctgggcatggacatgctgagggagcgaggcctgcatcacgactacgtgactgcgatgctgcaagatgggtactacttggaggccctgcgctatgccagaaaatacaaggtgatcaccgtgcagcctgccctatttctggagaaagccctggcgaagaacagcgcccacaacctggctgcagtgctgagcttcttctgcgagttcactccgagcttcaaggccacatcggactttgtcagataccggcatattctgtctgaaatggtttgaacagctttccgttgtgcaaacttgttgtcccgaaatgacttggcacgtcctctgtaacaagcaacgtcacctcggagggtacttttatttaattcttttggtccctcttgcagaaaataatattttattgttgtgaataaaaaaacgttgcaattaccgatgaaaaacaagtctggcttgaggctaagatgatcgcttcccgctcgccgaccatg

SEQ ID NO: 10348 - DNA, 2950 bp, Zea Mays
caattgtattttcttaggaatacagccttatttgttatagatctgcgatgttaacctatttagtggctcaatctgaaatgtgactaactacaaaagcattctacctgacaagtgtcagttatttacatgcttttaagtattgaatcatgttacatttccctgtttgagtgatagcatacagaaaatttgctacctatggttgtgtgcttttatgaagaatacctgttttcaagaaatctagtgccaccttgcctggtccttgctctacttatggtgcacttgttcttgttttgttatgtactgtaggcaaaagattatgggagatgcatagcagcaaaggtccctgagattgaacataatatgtgttccaaggagtttctagcactcagagcatgcatgcagactgtggttaagaacaaggcttgaggctccatatttataggaagtttgatactaatctcttttggtaattgctgcggatttttgtcatcttaaaaagtagaacctcattttcttggctaaacaatcagtagagcctaagcacgcaagagacaaagaaaatgttgggcaatcagatacaagggggcttgggcacatctggggcactgtctcatgcttatgttcagcatcctccgctgcgatgtgacataccagacactcagggtctgttctatgatgatgcaaataagttccttatagctccaactgctgatcggatattgtactggaaaacaattctacctactccatctggacctccaaactctgatccagttaatgaaggacctgtcttgtcagttcgatattcgctggatcataaagttattgggattcaacgatccagacatgaaattgagtttagaaatagggaaacaggggagacttgtagcaaaaagtgcagagctgattcagaaactgtacttggctttttctggacagattgcccaacatgtgatgttatacttgtaaaaacaagtggtcttgatcttcttgcctacgagcctcagccccatgcttttcacttggtggaatcgaagaagttcaatgtgagctggtatctttacacacatgaaagtaggctgattctacttgcttctggaatgcaatgcacgatgtttactggctatcagttttctgctggtgggattgtcaaaataccgaagtttgagatgatgatgtctaaaagtgaagcaaacaacaagcctgttctagctgcagatgatgtttacattgtaacagtctatggtaggatttattgcttgcagcttgacagagttagtatgtcattgaatctatatcgcttttaccgtgatgctgttgtacaacagtgtactctgccaacatactcaagcagaattgcagttagtgccgttgacaacataattatggttcaccaaatagatgcaaaagtagtcatgctttacgatgtgtccctggattcttatgccccagtttctgcaccacttccactgctattgagaggactgcccatcaatagtagacaagtatctcagactgcggatagccagtctagtgcatacggtggaaccatctatggagaaggttggaacttcctcattccagacctcatctgtgatgctgagaatgggctcttatggaagctccatttagatctggcggctattgctgctagtagttctgatgctccttcaattttggaattccttcagagacgaaagtctgacccaagcatggttaagactctatgcctagctatagttcggacaatcatcctggaaaggaggtcagtgcccacagttgctaaggcgatggatgttgtccttgattcctacacgcgtttgatgaaaatgggaggggcttttcctggggttaggcgaatacatgagcaaaatcagcagtcaggtagtcagcctattgatggctcccatgtggtttctcaggaatccagtcctggaacaacagttagtcctgctgtgaacccagaccacggaagtgaggctgtggatatatatgtgcagtcaaatccaggagttgagcatacaatagacaggggattactaaatataaacatatcttctgattctgtggacaatacatctgatgctgtcgacaaacgacagcaagctgtaggcgaagctagccgaccattgtcttcaggcacaatgacgcaacatggacaacatgctggaaccgtggcaatttctccaattgagatgttccagtctgtctttacacttgttgaagatgaaatgatgggtgatcctgcatatcttattgctgtcatcatagagtttctacggagtgtctcaaaggctgggcttaaggctcctcacaacctttatgtgatgacggcgacactactagctcgtagcaaccgttacgctgaaatagcattgtttgtgtcaaacaagattcttgagccgtgtaaagaactggcaatgcaacttatggagctgggtctgcagcacccgccaacgaggaagctgggcatggacatgctgagggagcgaggcctgcatcacgactacgtgactgcgatgctgcaagatgggtactacttggaggccctgcgctatgccagaaaatacaaggtgatcaccgtgcagcctgccctatttctggagaaagccctggcgaagaacagcgcccacaacctggctgcagtgctgagcttcttctgcgagttcactccgagcttcaaggccacatcggactttgtcagataccggcatattctgtctgaaatggtttgaacagctttccgttgtgcaaacttgttgtcccgaaatgacttggcacgtcctctgtaacaagcaacgtcacctcggagggtacttttatttaattcttttggtccctcttgcagaaaataatattttattgttgtgaataaaaaaacgttgcaattaccgatgaaaaacaagtctggcttgaggctaagatgatcgcttcccgctcgccgaccatg

SEQ ID NO: 10349 - DNA, 3186 bp, Zea Mays
gagaagtaacggcgatccgaatcgattaatacccagctggggatctccaaccacacgacatatgtagcacttaacccttgcatatgtcaactcgcccacgggtttctcaagaccaaaacaggttcacgcgacccgagagcacagtactccaccgtccagccattggcctggttggtacacgttactctcaccatggtgcccgccatgtttccgagagtacagcaccccaccttccagccgttggcctggttggtacacgttactctcgccatggtgcccgccatgtttccgagagtacagcaccccaccttccagtctcttgccacggagggtacaagctactctcgccatctctccactcccagtgcgtgcgagctgttctggtattggtccgaccgaggctaagcttacccatgatgaggcatgtggccagttaaagggtcctagatcagcaggccaacaatcggaacggtccttaatcgacacagacgggcgacctttcctgctcaacgtctggtctcattttagttaaaccgtttcccaatccttggtacctgacagaggtactttttctggacgttgaatccatcatggccatatggattcaccatcccaatttctttttcacaaaaatttcccatatcccgtgtaacacatcatctttattaaaaagaacaactttttaattatctaagcaggactaagcatctttagttctcttttataaagaggaatcaaggaatagtaataaaattctaaggaatggtaatgcatcaattgtttattcacacaactcctatcacctaatgcaacatataagtgataaaaagttttataacaacaagggggtggcaaatgcaccggggcttgcctgggataaacactaagtcagtgttgttagatgatactcgcttggcgagcacctcccattccagtacgatcagatcattcagctttgggttcattcatcaatcccactttgagattattccagttgttgttgtcctccacaatacgtgatcaatgaacgtacctatgtgatatgcaagatgcacatgaatgagcacgagtatgaatagcacgagctagataatgctactcgaagtaggttaagcacttaaagcaagacatttcaactttacttagatgcttttgactttacacaaacatgacctttaagtcaaatggacctaaaccaaacatctagtaacatgttttacttgggttctatattctactaggattaagaattcatcgaaaaactaataaccttaggttcctcactaacagacatctagaataaaatatggatagaagcaatctattgactttctaaaccaccatgtccaaatgacttgaatcatacaatagctaagacatcacaattgtgagctagtaggcaaagcatccatcacatacatattcactcaaacaactaaatcatcacagtaacctcgacaccacttccctgcaaaatattcaaaatactaacttaccactctacacataattgacatttcaacctaaactcctcattcacatctagtatcacatagatttcataatttacttggattagacttattggtgctacttgatcccagatactcgaaatggaaaacaataaccattcatgacttattaattcccgtgattacatagaagacaatacttcctaagacaaggcatcaatgtcactaattcaaatgcactcaccaaagtatttattttccttcttaaaatgctaaagtctaaggcaagcattaagaaagaaaagaacaaccctatgcaactacaagacttcattaaccaagacaagaactaaccaaatctaagtatccacacaaaagaaactccaagtaatcattataatacttgctgattttggacagcaaaacagcagctatttgtttacctcataactcacaaaatatccatccaaaaatagtaaactaggactttctggaaagattatgaagtcctctataacttttgtattaccatcacaacaagattcgacctttagaaaggtcaaacggcgctaaacataaattatgtccagatttggacagaattcgactacttacttcaaaaattcataacttgagtttcaggtatccaaatcaggtgatcctagactttttagaaagctagtagaattgtctacaattcatttataaacatcacaggtcaattcaatacataccaaagtcaaaagacaggggaaaggctctgctgtccaaatttggacagattcagagatcctaactcaaatagctgtaacttaatttatagatcactaaaaagggtgatccaaaatttgtgggaaagcttaaggaaagtactacagttctcctataattactaatgactgactctcagtttaactcagccaaacaatccaattttcgaaacctgtacagaatttggacagattctgaaactggacttggaaaaatcataactcctaaactactagtcctatggtcatgaaatttttacacaagtaagataaagaagtgatctacaactttcctatataacatttctacagaaaacatggtttactttattgaactacctgcttactaaaactggacatacagtcccaaacagcaagcattccatttcgctcctatttggtttctataattttcaggtgtttaatacttcaaatattctaacaccttattattgttcagagctaaaaccttctacttcatcacccaaacagtagcaaaggatccgacgataatcaacacaaaggatttgctaaacacaagggaatcattgacctatccacacctatgcaatacacatcttgaaccaaatgataagcacaaggaaacgactgactaacaattttatctggccccaaaacttcggaataacaacaagcatcaatttattcatttcatcaaacacctggtggtcgtcgtgatagagctttcctttcccaccaaactctagaatctttcttttcgccacacttgcacacaaatacacataacctcatatcaacatacgctaacaaaatctgctcgcactagaaaattagtgaaataaaaagaaaggagttaggaatcaccatgtctaatcacgacgacgacatcggggctgcggacagtggggaaaagcagagggtatggccggtgaggttggtgtgctgcgtcctgtggccagcct

SEQ ID NO: 10350 - DNA, 3408 bp, Zea Mays
attagataggattggaaaaaaatagtagagattttgactagatatggattgaaatccatccaatcccctccaatccacatggattggagagaaaatgagtgggcccttatgtcacacccgaatttaagggcaaatcctggtgcgaatcaaatgtgtgctacgatcaagtctcacacatattatgactcaaggtacagaaatgaatataacatctttactatataataggagttatatacaaaatagctaaataattacatcatatgaagacaacgatcctctgcaaccatagttgactgagagatgaagacctagacctctcacgaactcatcgatgcatccttcatgctcctcatcttgacggtacatgttcttgacctacgggtgtgagtacagcaagggtgaactcacatacgttcatcgctcaacaagttgtggggaataatgtgcatgagctcacttacggtgggggttcatgtgaagtgtaagggttaccaaagaaaatggttaaggctgagcattgcttttaacaagttggtcaaaattttattagcagttactaagtacaagtaaatatcattccaattaaatgattgatcacaattaataataaaacccacaatgcaatgtaaatgacagattaagtttaattccataagttactcatgtgagggtctgagccgctctcgaccatgagcacggatgatatactagttttacactctgtagaggttgcgccctttatccacaagtcgtgtaggagcagctcgcgagcctcgagccagccgagccagccttttgggctcattgccgtagcgagccaagtcgagccggctcgtcctggctcgcgagctatgctaaattacttaatatgtagaataatgatggatattgaataattttatgtataatcaatttgttccttagcgtttaatgatagatatatgacaacttataatttagattactcataatgatgaatggtatctatatatttcatatttatatactaataattcactatataatgcaattatatatatcagggtgtggctcgcgagcccgccttcgagtcgagccgagcctatctccccagctcgtgaaatgggcgagccgagccgagctcggtcagccatcgagctgcaccaagccaagccgagctcggctcggctcgtttctagccctatagccagggtttgcaaggttcttagacactggcaaggtgaatggctaaggatccactatgaggcttttacaaagttccactagcttcagaaaacccgctatgatttcgtgagaagagcggtatagaaatccctcgtccgaaaagccatcgcagcatgatcgacccgataacctccctacaccgacaactcctctatcacccttacccctttcaagtaaagttgtcctccactagctttcctaattagtcagccaagggcgtcccattccacccttgtagtagcactgttttcccgggtggttctccatgttccaattaacacaattatcttatcataaacaataattaaaccaacaatattaatggagcatgatcataattcagtataacattaatcccaaaacctggtagagcaatagcaggtctacccaatagtttatttgtttgcaaggtgtggggtacacaaaactagggtaacctattaggtcccatcaatttaatctgaacatgtcacaatgaataacaggaacattattaggtaaataagagtgatcaaggatacaactagccttatacttgcaactccaggtacttctccaaagttgatcttcagatttttcgacctcgcttctattcatagcaatacatataaatcaacaaataatggatataataatattacactgaaacatgagagcaaatagcgtgagaatactctacgagccgctatgagatcgtaggttcgagaacaattaaaatcaaagttaaaacgaagaatttatggataaaacgatattttaggcgcaataaatttaatagatggatttaacagatattgcatttaaactaagaaagttttaaattaaaaattttgagttggtattaatcattatcaattatttataaaatgagtaggttagaactataaattagattaactagattatctagataattaatattagttaaataagtaattaattaattaaaacatgtggcataattaaaacaatgttattactacatatgcaaaaattaatatgaatttaacacaacttgaacagattaaaacaaattatttgacctaaaagatatcacatttttaataaattagtagggttgcacaaaaataggtgacatgccggtggaaaaggtttgtttacaaatgcatgacctagttgttgccaacttaacatgattgtacctactgttaaatttgtgttgtatagcagtcttgcatgtagaaaggtatgtggtggtgattatttatttggtgcgaagcgtcaagcctatcatacgggaaagacccctaaactaccactaacttatcttccaatcaatctcttctcttcctcgttgttgctggtcatctcggtttttgattatgaaccggagatccgatcgacgaaccggaagcgcggtgacgaagctctcgcgagctggtcacggcgatgttctaggctgccccggaagatgaacggacggtgagaaattactcgttgaagttgacgctagagttggggaggaattcgaacttcgacgagctggtcatagcagtttatggatgcgagcttagctggcggggggctattgtggcttggatggtagcgttactactgcgaagctatacaggagataagtctatgattgatggcttgaggtgttatgatgacatgtatttatataggctggaaggtgggtagttacatgacaaatctaatctggtacttatctgttacaattctatcatatctgttagaaactctaacttatctcttttattccaataatattgttgttaatttgtactaattatattagaccttcaatttaaataaaacttagaatatatttttaaaattttaaattaaatttttggattttacacgtgagctgaaatgattattttcttaaatatcttattataatatcctaatttatatcgaccttacctaaaggacgccatgtataaacaaaccaaccaaatatacatcgatccattatattagcttatatttctaatttctactttctatttaaaatttaaaattcaagtttaatttagagctaagttaaattttctatttcaaacataaattgcaacaaacaaaaactaaacataaatacaaagcagttttattaattaatttatccgtttaagcaaatggaactcaataggaataattcatgtaagatttacaataataattattaaagaaaat

SEQ ID NO: 10351 - DNA, 985 bp, Zea Mays
cgacaactcaaaaggaatcatcagggacttcgatgtcatgccctcacatcagcggggtggcggcgctcatgaaggcggcacacccagactggagcccatccgccatcaagtctgcgctgatgaccaccgcctacaccgtggacaacacgaactcctcgctccgggacgcggcggacggctccgtcgccaacgcgttcgcgtacggcgccggccacgtggacccgcagagggcgctttcgccgggcctcgtgtacgacatctccacgcacgactacgccgccttcctctgctccctcaactacagcgccccgcacgtccaagtgatcaccaaggcgtccaacgtctcgtgcggcgccccgaacaagtcccgccccggggacctcaactacccgtccttctcggtggtgttcggccagaagcggaagacgaagccggcggcggccctgcgtttcaggagggagctgaccaacgtcggccccgcggcgtcggtctacgacgtgaaggtggtcggccccgagtccgtcgccgtcacggtgacgccggcgaggctcacgttcaggcaggccggccagaagctcaggtactatgtcacctttgcgtccagggctcggcaaggccacgcgaagccggacttcgggtggatttcctgggtcaacgatgagcacgtcgtccgcagccccgtcgcgtatacgtggaagatgtgatgtgaggttccctgcctgcctaaaatctagctcgatgacgaaggaataggataggttggtgtagtttgctcaccgcttcgcaaagagaatcggcgtgaagctctctatctctctctctcggctgcagtgcagacctgtacttgtttcctatctttcttttcggacatcaagtaaccctgaatctgaatgacgaatccgccgtttggtgtttgccatatgaatctgactggattcctctgctgccttgtcaggttgtactgatctgatttttatatttcttt

SEQ ID NO: 10352 - DNA, 1029 bp, Zea Mays
ctttcaccagcttttgtcagggttgcacatgtggtgctctccagaatacgaaccgcttgacttgaaagggacttcgatgtcatgccctcacatcagcggggtggcggcgctcatgaaggcggcacacccagactggagcccatccgccatcaagtctgcgctgatgaccaccgcctacaccgtggacaacacgaactcctcgctccgggacgcggcggacggctccgtcgccaacgcgttcgcgtacggcgccggccacgtggacccgcagagggcgctttcgccgggcctcgtgtacgacatctccacgcacgactacgccgccttcctctgctccctcaactacagcgccccgcacgtccaagtgatcaccaaggcgtccaacgtctcgtgcggcgccccgaacaagtcccgccccggggacctcaactacccgtccttctcggtggtgttcggccagaagcggaagacgaagccggcggcggccctgcgtttcaggagggagctgaccaacgtcggccccgcggcgtcggtctacgacgtgaaggtggtcggccccgagtccgtcgccgtcacggtgacgccggcgaggctcacgttcaggcaggccggccagaagctcaggtactatgtcacctttgcgtccagggctcggcaaggccacgcgaagccggacttcgggtggatttcctgggtcaacgatgagcacgtcgtccgcagccccgtcgcgtatacgtggaagatgtgatgtgaggttccctgcctgcctaaaatctagctcgatgacgaaggaataggataggttggtgtagtttgctcaccgcttcgcaaagagaatcggcgtgaagctctctatctctctctctcggctgcagtgcagacctgtacttgtttcctatctttcttttcggacatcaagtaaccctgaatctgaatgacgaatccgccgtttggtgtttgccatatgaatctgactggattcctctgctgccttgtcaggttgtactgatctgatttttatatttcttt

SEQ ID NO: 10353 - DNA, 76 bp, Zea Mays
aagggctagcacgagctagggaagagaggagcgaaggcggcaagcaaggcgagaggcgtgcagctgatgcttcctg

SEQ ID NO: 10354 - DNA, 3583 bp, Zea Mays
ccgcggccttcttcctgccgcttgtggcctccacctccctttgctacgtggtggcatgtatgttcgctgttgtggagcaaggcacgaccaaggaggtcgtggaggtcatgctcgtgggaggtgaggggaaggccaaggccaggctgttgcaggtgattggcgaggccaacaccagcgcgtttggcgatgggctcggcaacgtccaagtgggatgcttcatccgtaggtccgtgaggtgaggcatggatgaggacgacgaggaggtcgtgttcgtcggcacgctggcgccctgcacggtgggcttcgtcggcaccgatcacgaccagtgtcgcacaacgctagggagagtagctcgcggcaatgcgcgtggaccgcctggccaagggcgtctaggacaattacttcggcaggtggtccaggtggcaccacattgaccagcatgcagccccctgcatccgagcactgtttgaaacaaagcatctaggttacctgtgaagcaatagctagtgcggccccctactgcgctcccccgattgttcggcttcaagcgcgatggatagctggaggttgtggatctgcgatggagcggtccagttcagcgtgggaacaggaccggacgaggaggcgtggagaggacaccacaatcatgaagcgatcacggtcatggtcaatgatcaggagaatgaagaagatgtgaccatatgggatgttgtgggagcaggcagaaatgatgctgaaatcctcaacacaagaaacagtttcttcgacatcgaggatgacggcatagcgagcacctcccctagctggtgtcgatggggggtgggggctagctctccgccgggatgtgcgaggacggaagcacaacgagcacctcccccagcgggcattttactagtcaaggtaaggttgtaggccatgtgtctctagaacactattgaccctagcaacatcaagttccacgtcgaccgcatggcgcttgaaggcatctgtagcgttgttcctctagagatggtctcctcgttcaccaccaagttgtccatgagagtggcgtgggagagcatcaagatgatgaaattgggcgatgattgcataataaaaggcgaccaagtagatgttgatacgtgagtacgagttacttgcactcaaggatggagaagttgttgaggatttcgccatgcgcctaaatggcattgtcagctagctcgaggcgttgagtgatcctgaacctgaaccatgagttgtggggaaatacttgtgcattgtaaggcccaggtataaacaactcgttctatcaattgaaaccttgcttgatgtggaggaactcataatcgaggaggtaactagatgtctaaaagttgcggaagatgatttggttgagccactaacgtcaggaggcaagctctatctaatagaggaagagtggctagcacgtagcaagaagaacgaagaagaggtgtcgaggcatggtaatagaggtggttgaggcagttgtggaggccgtggcagccaaagaggtcatgggcaaggtggacgtggtgatggcagacgcggtgatagcgttgaaccttcagtgggttgtggtaactgccatcactgcgaaaatgctagccactgggcgaggaaatgcagaagtaagccaaagagggatgaacatgtaatggtggcgcaggaggaagaacaggcttatgttcgcacaaattggagatgaacccaaagaggtcgtacatcacctgatggcatggtgcatcctgtagaggagagggtgtttgcggccttggatggcaaaaagaatgactcatatcgatgggtggtggatactggggcctcatatcatatgacgagatctcgggctgcattctccagcattgatggtggaacttttagaaccatcaaatttgttgatgcttcagtggtaaagattgaaggtcgtggcttagttcttcatgagtgtaagaatggggagcatcttacacttgccaatgcgtactatattcctgacttacaaccaatactattagtattggtcaacttaatgaaaagggcttcgatgtgcggatctaggatggcaccatgacgataagagatgagaatgagaagcttctaaccagaaatccccatggtctgagaaggttgtacaagctagagcgtcaaatcgcgtgaccggtgtgcttggcgacatgcgtcgaggaagatgtatggcgttggcatgctcacaggcacagatccagtgggtggggctctagcccccctaccgctctcaagtctatggagccccactaaagcccttcctaaaatttaaaacatatataatacaatctcattatgtattttatagtttttatcgttcattcgatgttttaaatataatactagctcaatgttttaatataatattcctgcaaactgttatatgtctattgtgagtgatgtattatcaatgtagagatttaatttagactctcctgattttttttctggctctgtccctgcatgctcgctttgggcatgtcaattttactgctctgaagaagatgagttcgggggcttcgtgtgtgggctacctgcactgacataggaacaagtctatgaggcttgtttggcgagaaagcacaagtgcgcatagtttcctcaaaaggatgcccgatatgatgtgcgacatgatcattggagctgctacatggtgatctctatggactgatcagtctagctacaccaagtggaaatcagtatcttctgcttcttcttgataattatagcagctatatgtggatagctcttttgtctaccatggattctatagccattgctattaagagaattcaagctacaactgcaagaaagagtgaaatctccttgtagctcttcggatagacggggaggtgagttcaccataggagattttaatgaatactaacatgatcttaggatcagaagggagctgacaacaccatatacacctcagtaaatagtgttattaagcgacgaaatcaaacagtggtggccacagctaggtgcatgttgaaggcaaagaagcttgttggcattttctagggggcgttgagaatagtcccacattgtcagttatgggtaggcaaacatgttttatatggttgagggtgcaacccttaatgggctagctttttgggaagagtgttcgtccaacagacctaaaactcgttgctatgcgtttgggtgagtgtgtcgcggctcgatggcctatgtgtgtgcgggtgtgctgtatgtgcgggcgactcaacgagcgagccgtgtgtcgacaagctggttccaaccactggtattaaagctcaggtcagctcagtgcattctcagacaaatctcatctcacaatgtgtgagggggagattgttggtaatagtcccacattgtgagttgtgggtaggcaaacacggtttatatggttgagggtaaaactcctaatgggctagctttttggaggagtgttgctccaacagacctaaaactcgttgctatgcgtttgggcgcgtgtgtcacagcccgatgacttatgtgtgtgcgggtgcgccgtgtatgcgggcgacccggtgggcgcccgtgtgtcggc

SEQ ID NO: 10355 - DNA, 959 bp, Zea Mays
gtctgtgttcgaagaacttaatataatgcttgggttgtcttaccccacgggttgagtttgaacaatactagatagagtcaaaatcgccagaaaatgtatcgaaaaacttgttaacgatcaaaataaagatgagctccatgatatgttcatctgtcgtttgttgtaatgttgttacagtaccgcttcaaatcatatacaaatcattcttttcgaatttgttgtcggtaacacgtgaaaggaagatacctaatttacatgagagctcagcatattcatttgttctccatctcattctacaacttgcacggttcctgatgcccacagctcttaataaggctagagtcaatgtttgaatgctgatacaaataagcaccactaaaactttggtctaccatggcaaataaagcgcctttgggcttttgatctatgtttgcatctggtttcagacaaacggtaacctacataaaaaaattaaagattttgttagtatggtgactaaaactgatcttgtttatggaaatattctacattaagcacttaaaaagtgccttaggaaaatccaagacaaaatatcataatatttttcctataaagaaaaatgcatgtactcgaggaaattgttgctagtacttggacatttaattctgtggataataatggttcaactctctaagtgttactttttacgggatactagaataatcttgaatttttgttgaaataactacatatcatagcatacatgcttaagacatatgtagtgacctgcaacctgtaaaatttgtatgcagcacaatttgattcaaacatgtataacttataagtgaaggaaacgtactaaccatagtgaaaaaaccttccttctgattatatctctctctctgtagcatgttgcgtacagtattcccactcaaattgtctgaaacgatgattctcaggacaattaatgttttctatta

SEQ ID NO: 10356 - DNA, 1100 bp, Zea Mays
ctgcatcttccccccactgcccattcgcctcgctcttgcataagatatcttctgtccagctagaacatcctagagctagctgttgcatgcgttgatcgagccaccaccagctagcattgtgatcgagggaacaagaagagatgaagtttggcaagaggctcaagaagcaggtggaggagagcctcccggactggagagacaagttcctagcgtacaagcgcctcaagaggctcgtccgcctcgtcccggcctcctcgcccagcaggaggggcggccgcgcagccgatgccgccttcctgcgcctcctccacgccgaggtcgaccggttcaacgccttcttcctggagcgggaggaggacttcgtcatacggcacagggcacgtgcacgtcctgacgtccctcctatcatacgagctgaaggagacggccgaggacgcgcgcaaggcgatcgtcgacctgcacggggagatggtgctgctgctcaactatagcgccatcaactacacagggctggccaagatcctcaagaagtacgacaaacgcaccgggcggctgctgcggctgcccttcatcggaaaggtgctccggcagcccttcttcgccacggagctcatctccaggctcgtccgcgactgcgaggccaccatggaggccgtgttcgaggccagcacaggccacgcccgctcgtcggcggggacggcccccgtggcctcagccaggcagggcatcttccggaacaccgtggccgcgctggtgaccatgggcgagctccgcagcgggagttccacgtacggtcacttctcgctgccaccgatggccccgccggagtccgatctcctgcggcgcgtgtgcgtccaggtcgccggtcaagtgtccatctgactatccgagagattttccgctgtgctcttcgacggccagttactactcatgctagattgtcatactataagagacatgtatactttcgcttcctactacaaattcacctatttgtataagcctagaaattctgtcgaattcttctttttttacttttccagcatctacgcagttgaatcgccaaaaaagaagcatgacaggcgtaataccatatacag

SEQ ID NO: 10357 - DNA, 1410 bp, Zea Mays
cgtacgtcctggcaagcatgtatggaatatgccttgcacatattcttggatgttttcggagatatagctcatagccgtctctgacgctttacttttactccttgtctgaagaatgattctcccctgtgtcaccgggccacggttggttcagacttcaggctggagactaacaaaccttgttcagtcacgttgacgttgcgcgccgtaccatcaatccgctcaccttcccttccccctcaccgacccgacctccatgcatggcatatgccgtgagatattccattccggcgtactaaacccaccttgcagttgcactcattaattctccattcattcagtctcgactgcatcttccccccactgcccattcgcctcgctcttgcataagatatcttctgtccagctagaacatcctagagctagctgttgcatgcgttgatcgagccaccaccagctagcattgtgatcgagggaacaagaagagatgaagtttggcaagaggctcaagaagcaggtggaggagagcctcccggactggagagacaagttcctagcgtacaagcgcctcaagaggctcgtccgcctcgtcccggcctcctcgcccagcaggaggggcggccgcgcagccgatgccgccttcctgcgcctcctccacgccgaggtcgaccggttcaacgccttcttcctggagcgggaggaggacttcgtcatacggcacagggagctgaaggagacggccgaggacgcgcgcaaggcgatcgtcgacctgcacggggagatggtgctgctgctcaactatagcgccatcaactacacagggctggccaagatcctcaagaagtacgacaaacgcaccgggcggctgctgcggctgcccttcatcggaaaggtgctccggcagcccttcttcgccacggagctcatctccaggctcgtccgcgactgcgaggccaccatggaggccgtgttcgaggccagcacaggccacgcccgctcgtcggcggggacggcccccgtggcctcagccaggcagggcatcttccggaacaccgtggccgcgctggtgaccatgggcgagctccgcagcgggagttccacgtacggtcacttctcgctgccaccgatggccccgccggagtccgatctcctgcggcgcgtgtgcgtccaggtcgccggtcaagtgtccatctgactatccgagagattttccgctgtgctcttcgacggccagttactactcatgctagattgtcatactataagagacatgtatactttcgcttcctactacaaattcacctatttgtataagcctagaaattctgtcgaattcttctttttttacttttccagcatctacgcagttgaatcgccaaaaaagaagcatgacaggcgtaataccatatacag

SEQ ID NO: 10358 - DNA, 829 bp, Zea Mays
ataagacattcatcattatgtcatctttattattttggtattttgtgatggggagaaaaagcttctccatggaagctgacgaagcttgatggctcgtcgtggtcatgagatcaccggaggaggacgccaatgttggatacttgatttcaatcctctagaggcattgagaatcaagacaacacaagttaggaacatggaccttcgtcctgagcttaacacttctttagagtgttaatgaggaggacgaaggtcttcaggtggaaatgtaaactgaaatgatgtgtatagcacaatacaatgatgtatgggaactcatcttccttgccttagcattttcattccatctcccataatactagataaatttacaagcataccttcgactccttgacagaagagggtacgaaggttcttcgaaagctaaccaacacgaagctatggctctcgaaaaggttttgaccttcattgtctggtagcttcccctctggctagctcgtgtccgaagttatagacttcggctgccatcttcgctacttgcgcacagacgaagcttctttgtactctgctttggtcgaaggttagcttcatccgctagtgaaactgttcctgaaatacacttgtttgtgccgaagcaacatgttaaatgagtgatcttcgacataggaggcccccaacagtcgtagtaccctcttttggcgagacaggtggctcatgggttagaggttggaggatatggctctccatgttcatgtgcttgttccacataggatctctaataagagaacggtgcagagtcctttgatgacatggcttggatcagagatttgag

SEQ ID NO: 10359 - DNA, 7298 bp, Zea Mays
cgacgaggtcatccatccgcaccttcctgttctgctccatcatgaacttgcgcaagcgagcgcacgtaagggagaatctgttgttcccggaggcggccatctcctctcctcaccgtcctcgtttggtatgtatggcactggtggtgctggtgcttcggtctctctctctctcgctctcgcgtgggcgggcgcctgctattatagccgcgaggcccgggtagccttcgtttgtttgtgcgtcgcctcggggcgcgcgagggagcacgtgaaatgcgaggccatgctagtggagggccgacgagagcgtgggaggaccctggctagagccacagccactggtgtgcaacaacgtacacactgctctatttctgtagtcccttcttttgctccgtgggttattttgcatgcatttacttccctcacctctctatcctctaattttgtaccggttaatctaatgtgttgtgtcatttttagggccaagagttgacgactgagatgatcggctttcatgtgggggcaatcactaactctctcaatcccctacattactcttgctccgatcctaaacaagtccttaggggtgacaataggctttaaatttatttaaggaccaaatcagattagaatcaggttttatttctattcattttttaactaaaatttatttagattcctaacatttgtgaagaagcatttggatcgtgatccattaccaccctaacggtgagaacaatttgcaccaacagtttggtataacaaatattggtgataatatttacactgttgttatctgtctcaaaggcaagcctggaagtatatggatgacaataagttgggcaaggtgtgcatgggtagactaaatacacacccgcaacaaatttcctcttatgtaaaatttaatactcgcacttacacccacgagaatgttatacttgagggctactttgggaacctcatatccccttcgggattggagggggttaaggtggaaataaactaatttcctctccaatccccttcaatccccaaggggatttgagtttccaaactagcactaaagatgtactcgtgggggatcgtactcgcaccaatgagctacaatataaggttagggcatttgggctgattaaggccttgagaaatcttttctaaaaccattaccacctctggtattggcaaatcaacttaagcattaagtccccgataattttgagctttttgtgaaaacccaaactcaagttcgtaattcctgatctatctaagggttgatcttttgaagttcaaattttggaattgtcttcaatcctctcgttgttgttgtctacaaaggttcctctaattttaggaagttttggtcgagtgacactaccacacagcgtgagcgacactactagtcagataacgagcaacactgtcaggccatggcaatgacagcgaggagagcgacactactgggctatttagagaaagtctttgatttgcctcttctcagtctttccggtgcttgtttcggtagattgatattcttgctggaaaacttattcaaggcatccaaccatcacttggttgaattgtttttttatctcggacctttgtgcagttttggtgtcttagaggtttggtctgaactttacggaaataagctaagattgcttaagtgtaaatatttttttattagcttccattcaccccctctctggtcgtctattccatttttcattcttggctcaaggatagcctaagtatagtgatggcgatatgttaagtaaggtgcgagtggactaaatacacacccacaacaaattatctattctgtaaaaatttatacatgcacttccattcactacctgcgaggggtaagatgttatgctcatagatgcccttgtcgggatcgtatgcacatcaggtcgttataatactcgtcggtactcgcgcctatgagttacaatatcactctaatagatagaaatatatgtatttttgcgctaatgggtggtgtgacaaatccgcattcatgtggtgaaattttgaacccatgcactcacttgttagaaaaaaatacaagcgggtaggaccaccatctctagtagaatatataataggaaactctagccttccctttcaacctcatcttggtcacattcctttattatcataagttttgcatgcacctttcttctttatatctctctctatatttactctctcgcttcccctctgcctcctcccacctaaccctcatcctaatagtagcgagagcggtgtggcccctttggcaatgactcaaggatacaccctctataacagtggcagataagttaagttagtgggctcggtcaatgctttttcttatttttctgatggtcacaaccgtcgtaaaagggttcaatagtgatgactatttttcactacaatttgaactagtgataatatctcacctcattacatgcccactttcactaaagaggggtgaaattgataccgatgaagatctataataattgtaatatgcaggtttgtgatctatatgtttcaaaataggaaactaattatgttatggttagtgtttgtgcatgcccttggagagtgacatattgtgtatggatgcatattgtgtactcatttatcacattgagcatgtttatatagtcattttgtgatactccaaattaatcttactatgtgaaaaaataatggagactatattgttttagtttattgttatagtgttgtcatagtagtatatatacatgcaccatcaatgatctagtattgtcacatagtccttatgtatacatttcatctggttacatgcaacctaaaatttgagatatagacaaaggagtagctacactctaaatgttgaaaggaatttccaaatttacattcaaggttaattatgaacaatattgcttactagaaggaatacaatgttggcaaatttatggtatcctttattttcattatgaacaaagcaatatatttgtttggtggcttattattagcattcttttgctagtcaaggaaagaaaaacaccctattttgtagatataatgcttgtgtcatcacataccacatacaatattggtttgttggtgtcgtctaatataagagatctctttttctacaacttccacacacacacacacacctaggagtaaaacatactcaatatgtgtgtcctagagcctcccttacacataacactactactggaattgtacatatgcttgtacaacatcttacacagttgtctaagtatatcatattatgtatcgaggcttggcgtagaccagaattaaaagtactaaatcagtaaatagttaacttagtgtaaataggttatactcgagtccacataagcaacattgtcactcgaattcttattgcgttgacgattaatggacatcgtgctcatgtgctatcaagagtatttaataacttatttttgggttattcttgatgaatgaaataccccaatttgtatacttatagtggattggaggaactatatcaacataatccccacctctttccacaaacttatgagcgaatattgtcctcattagggtgccttggtgtaacatattatttactaatgcttccttgaacttgataaaagcaagagcaacaaggagtgtgttatgattatgttgcacaattaataatgtgctttcaaagtaatcaaaaatatgtcattaataaaacacaaaaatgttccatttttaaaattatgtattgtcattccctcattgtatttggaggatcttctttgttgtctagaaggtagaacccattagaataaagaaaacatagccctattaagtaaataaactgctaaattatcaatggatattatgggtatcttctcaaagaatggtataggcaagctacatctgaagtaggttgatatgttaacaccttccattaaattgttaatgccaagaacatgtgatgtaaagtgaaataaaagtattaacatttaaaatggcaagagaaaaaacaaatagttcatcttgatactacaagcagacatgtacatggagcaaagttttctgaatcgccatcgaacgatgcatcaaagtaggcttcaatgattctagcttattggtcaaaatttgattccacacactttatatggacgaaaataaaattttctttcagaatcgatggcaggagctcatctaaagtaataagtgatagattgaaattcaacaaaatgtaaattagatctattaatgcaactatttcaaattcttgattgatatcacctttgaccataagtttatagacatgatctcttttccatttttttatatataggaagcattagtaatctaaaattcatgagattattcctattccacccctccttccgtcctaattttgagtacaacaattcatactccaccaaatccagttccgcgtcattttaaatctaatttcatttactaatattatttctccctatttcgcaaatgttttctacttaactatctagcggctgggttaatagttaggttttgtgcataagtctatgtttggtcaacatagtaaattaatcgagatcactaaatatatacaaagtggccataatattttatggtttcttatcccatgatgggagccttgttaagtatatcataattttgttggtctcatgttgtggtaagtgtccaatgataaaagtgggcttcatgcaccctcacaaactaggcccatgagaatgtcgtgatgtgtatcttgttgacacatccccacgacaaggccaagcataaattaagatggttaaatgctcacgtgttttataaggcaagacatatatacataacaacaaaggataacatttacttccataagaagcactcgataaagaagttcgacatgtgtggttctcttgcaagcccatcattttctaacttctgcctcatacctcttgcaaagatatgtacaccaatgcttattttcttctaacttctacaaacactactacataaatagtatttctttaatagcattttcaccgttgttttataaaaacattttaataatatatgatcacttgtttggaatacaatcagtcatcaaaatctagttcatgaaaagagtttacaatgaaaagatgtgctcaaagaagcatgtgtatgtatctcccctcaatgtctgtgttctctttaggtggctaatagggggtgaaacatgtgcaagcgcttgcgtgtcacattgaaaatgtatgtgtgtgaagcatgtagatccttggtcataccaccttctctctatcctctgtgttccccacatttctctctcatatgaaggacgaactctccctatcatggcgtctctcttcctccctatgacattggcccaatagaatgcctgacacgatgacccctatgcatgatgaccgccttgcatgatggaatctagcagaagtgcattggacggacatgcaacatcatgtgtggtggatcaggtggaggtccacccattcctctcctagtgtcgattttagctttagttactagtgacgtaggcacaaccgatataaggcataggtgacgattatagttgttggagatggctttattttccacttttcaattgatttccacctccggtttccatctggaggttctaaatatgatcatcaccacccactttcatccttggctgcagtgggagccaatggtgataatgtttgtgtaccagcgaacaaccaagacaacaagttcaaacacacataggtggaggcagggcttgccctatctaggcatgtgcctaagattggctccattggtgcctgttaaatatgtgtgtatccaggaactacaagttcgtcatcctcgccttcgtcttcaagtttagcaagggccagacaccagacttgaaccttgtagatcactacaatctctcgtcgtgcggctagaagtgtctaaacaagggcatccgctcgtgcatcaccttgataccaaggtcctactctcgattgacaacagcgagggaagctatgatttgcatcagaaatggccacgcaagaagtggttgtgtacctctagaacaattaccttggtggcatgttgttgtctcacccccttggacttgtggtcgtcgtgagtggggagggtaccgatgataggctcccgagtgctagggacggtggcgatgggtgaaaggcacctgtctacgaacttgagcatggtcgatggagaggggatgtgagccagctatggtcgcctgcatcatctggcctaggcttcgatttggtctggctctgccactgcaaacatagtgcaacccctttgccatcacatgtatatataaggcaactccatcttgaatatgaagctagaacttaccaaacaaccatagcatgtatccacttgcaaaatatggaaatccttccataaacctcaaaagcctgagtaggttgtgcctaattttcggtatatgaaaaactaaactactgagttaaaagtttggaattgcatgtgtgtgtatggtaagttgacgcatacttcctatgtttacgaatccgtttaagaatagtaattgtattagactagagaaaagtcctacaaaatagattttaagcattaatttctcttataatataaaatcggcggcttaaatttcaatatcatcttatatagatacttttaacataaatcaactcatacaagttccatgctctaagctttcgtgcaattcgactagttgtttatccagaattatataaaaagtgacttttcttctgataaaatacgattactatttgtgagagagtatatttgtaaaaaaaagttgttgtagagttaaagaaacaggaaggtgcatttggggagtgggagatggacgacgatggggtgcgcgaagcaaagatggagtactcctgttggacacatgttacaaactgtggtcccggtgttaactaacttttcaatgataaatactcggtgcagtacaaggcagagaaacagacccgcgtagatgatacgcgcaaagttgtctctttttagaagaaaaaaagccataaaacactgcttactttggtgtgaatggatgagttaagcggcgttgcccttcgtcttatatactcaactaacagagtatatatatgctaacgtctcccaaaagctagtccatagagcatatacaaccctaagactctggttcagttttcaaaatacaagagataaataagagactacatgatataattttgatacaacatgtatagaaagtctgaacactaccggaaaacgagtctttcctgagtgcaagagacgggctcttc

SEQ ID NO: 10360 - DNA, 817 bp, Zea Mays
tccgtctctgcgccacccgctccctgggcggaagccctcaggaagccacgcgcacaccgcaactggtcgacgacgacttcctcgtctctctcctccggcctcgagtcgcctccgatccgtccgagaaaacaaaacaaaccgaaagaagaaaggcgacgaggaagagaaggctctccgcgagatctgggggagctcccattctcaagatgcacgacttctgcttcaccatcccctacgggttcgccgtgctggccggcggcgtgctgggctacctccgccgcggcagcaccgcctccctggcggggggcgccggcgccggcgcgctgctcctcctcgcgggcttcgtcagcctgaaggccttcgagaagagacgcaactcctacgtcgccctcgcgctcgagactttgtgcattagccttaactttcgttatggggcaaagattcctcgagacttcgaagattatgccagctggtgtcgttgctggcctcagtgctgtgatgtccgcgttttatctgttcaaaattgcaagcggcggcaaccacatcccaccaaagaaagagtaaactggactctaacttgtaaagtatgttcgattgaactcggaagactacgagccactgcgttatctagttgcatggtaacttcaggtactagcatcttgttctccatttgtggtgtggctagagtgtaccatggtttgtgaacattgtaaaagaaataagtatgcggttcacggaaatgaatatgaacttccctgtggcggcaggcgcgaaagaattaagaggtctaaacgtggaatatgtctaaaagtgtgtg

SEQ ID NO: 10361 - DNA, 902 bp, Zea Mays
gataaaccgaggcaagcatttctctgcaaatgtggagaggctgcttcgaatccgagacatagtaacttagctgatcttgccaaggttgatagaaagaggacaccctggctcattgtgttgttgcacgtaccatggtacaatagcaattgggctcatcagggtgaaggcgacagtatgatggcttcaatggagcctttgctgtacgctgctcatgtggatatggtaatagcaggtcatgtccatgcttatgaacgtgcggagcgagtctacaattccagacctgatccttgtggcgctgtccacataactatcggcgacggtgggaaccgtgaaggcttggcccgcaggtaccgtaacccgaagccagcgtggtcggtcttcagggaagcgagctttgggcacggcgagctaaagatcgtgaactccacccatgcccactggacctggcacagaaacgacgacgaagagccggtgagaaccgatgacgtgtggataaactctcttgctggttcagggtgcatccaggagggcagccgtgaccgtgagtcgaggaagatcctgatgtctccttgatgcttagcagtatagcttgggcctgcgatgtactgtgtatataatgcgtgctacttgataatctaacacctagtaaaagttaatgcgtcgtgctgcttgcctgcgtgtatactggagactggtttgatctggcgcgtttgctgctcttgttgtgttgtaccactatggatgtttgtagcaaagtgacatacgacggtgttgtaatggactgaagatgaatagatgatgttccagtaaggagtgttttgccgtgtctaggaagatacatcaaaatataaatcactccctccttatcaaaatacagttttttcttgctttcttttttttct

SEQ ID NO: 10362 - DNA, 1616 bp, Zea Mays
gccaaacagaaaagataaaagtacatttcagtaacaatacccgacccaaacactctaagagcttcagttatccctaagctgctaagatagcgggcaccagccaagatccagcaggtgcacatttctctagctggagaaaagcacatgagaataacatgggttaccaatgataactctgtcccatctgtggtggactatggaactaaagaaagtacatacacaatgaaatctcaaggagaaagcacatcctacagctacttattgtatagttcaggaaaaattcatcatgttgtcatcggacctcttgaagataacactatttattactaccgatgtggagggcagggtccagaattccaatttaagaccccgccctcccaatttcctttgtcattggctgttgttggtgatcttggtcagactagttggacaacatcaaccctgaatcacattaagcagtgtgagcatgatatgcttttactccctggtgatctatcttatgctgattatatgcaacacttgtgggattccttcggcacattggtggagccacttgctagcaaccggccttggatggtgacagaaggcaaccatgagaaggagcacattccattttttgagtcaggatttcaatcttataatgcacgatggaaaatgccttatgaagagagcggatctagatcaaatttgtactactcttttgaagttgctggtgcacacatcataatgctaggttcatacacagattatgatgatagctcagatcagtatgcttggctaaaggctgatcttgccaaggttgatagaaagaggacaccctggctcattgtgttgttgcacgtaccatggtacaatagcaattgggctcatcagggtgaaggcgacagtatgatggcttcaatggagcctttgctgtacgctgctcatgtggatatggtaatagcaggtcatgtccatgcttatgaacgtgcggagcgagtctacaattccagacctgatccttgtggcgctgtccacataactatcggcgacggtgggaaccgtgaaggcttggcccgcaggtaccgtaacccgaagccagcgtggtcggtcttcagggaagcgagctttgggcacggcgagctaaagatcgtgaactccacccatgcccactggacctggcacagaaacgacgacgaagagccggtgagaaccgatgacgtgtggataaactctcttgctggttcagggtgcatccaggagggcagccgtgaccgtgagtcgaggaagatcctgatgtctccttgatgcttagcagtatagcttgggcctgcgatgtactgtgtatataatgcgtgctacttgataatctaacacctagtaaaagttaatgcgtcgtgctgcttgcctgcgtgtatactggagactggtttgatctggcgcgtttgctgctcttgttgtgttgtaccactatggatgtttgtagcaaagtgacatacgacggtgttgtaatggactgaagatgaatagatgatgttccagtaaggagtgttttgccgtgtctaggaagatacatcaaaatataaatcactccctccttatcaaaatacagttttttcttgctttcttttttttct

SEQ ID NO: 10363 - DNA, 1575 bp, Zea Mays
cccttttcttgttttggcagtaatcgaccttattcgggtacttcttcatctggcgaagctcggctggatcgaggtgcacatttctctagctggagaaaagcacatgagaataacatgggttaccaatgataactctgtcccatctgtggtggactatggaactaaagaaagtacatacacaatgaaatctcaaggagaaagcacatcctacagctacttattgtatagttcaggaaaaattcatcatgttgtcatcggacctcttgaagataacactatttattactaccgatgtggagggcagggtccagaattccaatttaagaccccgccctcccaatttcctttgtcattggctgttgttggtgatcttggtcagactagttggacaacatcaaccctgaatcacattaagcagtgtgagcatgatatgcttttactccctggtgatctatcttatgctgattatatgcaacacttgtgggattccttcggcacattggtggagccacttgctagcaaccggccttggatggtgacagaaggcaaccatgagaaggagcacattccattttttgagtcaggatttcaatcttataatgcacgatggaaaatgccttatgaagagagcggatctagatcaaatttgtactactcttttgaagttgctggtgcacacatcataatgctaggttcatacacagattatgatgatagctcagatcagtatgcttggctaaaggctgatcttgccaaggttgatagaaagaggacaccctggctcattgtgttgttgcacgtaccatggtacaatagcaattgggctcatcagggtgaaggcgacagtatgatggcttcaatggagcctttgctgtacgctgctcatgtggatatggtaatagcaggtcatgtccatgcttatgaacgtgcggagcgagtctacaattccagacctgatccttgtggcgctgtccacataactatcggcgacggtgggaaccgtgaaggcttggcccgcaggtaccgtaacccgaagccagcgtggtcggtcttcagggaagcgagctttgggcacggcgagctaaagatcgtgaactccacccatgcccactggacctggcacagaaacgacgacgaagagccggtgagaaccgatgacgtgtggataaactctcttgctggttcagggtgcatccaggagggcagccgtgaccgtgagtcgaggaagatcctgatgtctccttgatgcttagcagtatagcttgggcctgcgatgtactgtgtatataatgcgtgctacttgataatctaacacctagtaaaagttaatgcgtcgtgctgcttgcctgcgtgtatactggagactggtttgatctggcgcgtttgctgctcttgttgtgttgtaccactatggatgtttgtagcaaagtgacatacgacggtgttgtaatggactgaagatgaatagatgatgttccagtaaggagtgttttgccgtgtctaggaagatacatcaaaatataaatcactccctccttatcaaaatacagttttttcttgctttcttttttttct

SEQ ID NO: 10364 - DNA, 1854 bp, Zea Mays
aaaaagagcctcgcggaggccggactgtccgcggtggctgcgcggacggtccacgcgtgcgcagagacaagctagtccgccgtacaagtacaaggatacagccgcaggcccgcagaggaagaggagagcctactctcctgccatggccgcgccgagtccgctcccccgcttcctgatactcctgctcgccgtaacctcctccgcgtttgccgccgccgcggcaaccggggctccggtggtgggggaggactacgtccgtccgccgccggcgcggtgccaccgcaaggcactccttagcctcttcccttggagcaagaaggaggagtccgccgcctcctccgatccgcagcaggtgcacatttctctagctggagaaaagcacatgagaataacatgggttaccaatgataactctgtcccatctgtggtggactatggaactaaagaaagtacatacacaatgaaatctcaaggagaaagcacatcctacagctacttattgtatagttcaggaaaaattcatcatgttgtcatcggacctcttgaagataacactatttattactaccgatgtggagggcagggtccagaattccaatttaagaccccgccctcccaatttcctttgtcattggctgttgttggtgatcttggtcagactagttggacaacatcaaccctgaatcacattaagcagtgtgagcatgatatgcttttactccctggtgatctatcttatgctgattatatgcaacacttgtgggattccttcggcacattggtggagccacttgctagcaaccggccttggatggtgacagaaggcaaccatgagaaggagcacattccattttttgagtcaggatttcaatcttataatgcacgatggaaaatgccttatgaagagagcggatctagatcaaatttgtactactcttttgaagttgctggtgcacacatcataatgctaggttcatacacagattatgatgatagctcagatcagtatgcttggctaaaggctgatcttgccaaggttgatagaaagaggacaccctggctcattgtgttgttgcacgtaccatggtacaatagcaattgggctcatcagggtgaaggcgacagtatgatggcttcaatggagcctttgctgtacgctgctcatgtggatatggtaatagcaggtcatgtccatgcttatgaacgtgcggagcgagtctacaattccagacctgatccttgtggcgctgtccacataactatcggcgacggtgggaaccgtgaaggcttggcccgcaggtaccgtaacccgaagccagcgtggtcggtcttcagggaagcgagctttgggcacggcgagctaaagatcgtgaactccacccatgcccactggacctggcacagaaacgacgacgaagagccggtgagaaccgatgacgtgtggataaactctcttgctggttcagggtgcatccaggagggcagccgtgaccgtgagtcgaggaagatcctgatgtctccttgatgcttagcagtatagcttgggcctgcgatgtactgtgtatataatgcgtgctacttgataatctaacacctagtaaaagttaatgcgtcgtgctgcttgcctgcgtgtatactggagactggtttgatctggcgcgtttgctgctcttgttgtgttgtaccactatggatgtttgtagcaaagtgacatacgacggtgttgtaatggactgaagatgaatagatgatgttccagtaaggagtgttttgccgtgtctaggaagatacatcaaaatataaatcactccctccttatcaaaatacagttttttcttgctttcttttttttct

SEQ ID NO: 10365 - DNA, 4546 bp, Zea Mays
accgggcgaactccacacatccacaccggctgtggggacgacaagggagtatgaactaaagtggtccttggccttattaagggacaggttgcaagattcaaccaattattctgtatgagtattgttgctaggaagcatgtgagaaggtaataaggattcaaaccaccttctcagttcatctgtgatatttgagctggcatgtcagtgtcctcttcattcaagtgcggctggataacaaatggattcaaaaaggctatcgttgtcatcagtacatggagattttttgggacaaacatcacaaagtcattcatgctccgagaagtatgagtggagaaacttaatctttcatcaaagtgataaagcaacaagggatcaatgtgatcatgttgcaacccggcacttacctctgcatatgcctcgcaggttattctctttatcaatacatggattaaatttcagactccatgctatgctgatattgctgttagttttatagattcaaatttatcttctattgatggaattacgtgatattgtgatgtggaaacaggatagaatagtctatgactgagcctagaggttgttatgatttgcacagaactcgagatttttgtgagcgataaatattgtaaatttgcccctttgtgatcaagaggatgaaacggtgcatcatcttttaatctcttgtgtcttctctagggaagtgtggtttaggattttctccctggttaatctgcggcagttctcccccgcaagggatgatttggtcttccaagattggtgggctaatttggaggccaaggtcccttatgcgctgcgcaaagggattaactcccttgtgatgttggtggcatggtggctttggaagcagcggaataaatgtgtgtttgagggggatgctcctagtggcaaccagattattcagaatatcaaagacgacgttcagaggtggtgtctcgcgggtgccaaggatctgggcaccatctggccttagtttaggggcagctttggctgtcttctagatgaatgtttatttttatttttattttattttatttttttgttatttttttgttgtttctctgtactctggtcttctttagaccattggtatttcttctatcttaatatatctaatgcgcagttctcctgcgcgttttagaaaaaaaaatattgtaactttgctacatatggtgtaacgatgtatgccgtgtgcacctatttccaagcttggatgctcattattacttgtaccaaatatttcagttttgtggaactttgatgctttggcatgcaggttggggccatcacctggtcatggacattcctctgagatttatggccctggagatggagtaggtggatgccatctatcttgctgttcttatggtggacaccgtggtaaatatcatgcttgccacaaccattcatcggaatgggccaggcacaacatttcacctgaacctggtcctatcagatcttactggataacgaaaaggacttcctccgatcatgtttctcattgtgcaaaaggatctgacagacagatacgcccagcaggaggttataggaagaattattctgctaaccaggggagtggcagtcagaacagaccgtatcatgatgatagatatctaccaactaaattcctggatgaccgttttcctgagatagatgctgcaaaacatcagtcttacttatgcgattttcaatcttcaagtaagcatattcctgttcacccctcacatggtcaatcatgtcaaagggatgaagtagcaaaagctcaccccaagagaccagttaatcgatttcgtcccatccaccataagcaacttgagcgctgtcccaatgaagattttcatgattgctttgatagcagtcagaaattcagaaatgcttataatgacaaggtagtaaaaaggaaatttataaaacaagatttccttggaaacacttacaatggtgcttgtgttggtaaatatgatagaaacagttgcaggaaaaggaatgcagatcattttggtggagagaaaaccaggaagaatgacgcaaataaggacaggtctaaaaggcttcgctgcccccttgagcaggaccaacggcaacaggttgagtgcaacgagatgagaaatgatagtcgggagggaaatgttgaaatgaccaggttagtgtgtcaagatggagcaaaacggaacttcaaccaaaagaagaatgctacagctcctgcttctagtgactcaacaaagtgtgatgggaaaaatatattaagtcccaagtgcagcaaaactattgcttcatcacacacaccaaatttgagcgaaggaagtaatgacatggatccaaaatctgacaactacgttgatggttgcactgaaagaggtatactgcagcatattccagtcacccatacagagaggaatatacaactgaaaatatcagataattttactcagtctgaggcgtttcgccgagattgtttaatcctgtggagagaaagacaattaagaaaggatagtgctgctaaggctgataacattgtgaaaactgaccaacaacagactgcacaaagaagcaagatgtcaactggaagaagagtggggagtggaggatctgctgcgtcttcttgctcaaaaagcgataataaagacgactctgctccagagtgttctgaccaatttagtggtgcaacatcatctgataaactacaaaagtttggtgaaggaagagctaacaaaaagttagagcagaccatcaaattccccagtaacagtaaatgcaacaaaaggcctcaagacgcaacagctgagaaagtactgaagtgtagtctcaagcttctgtcagaagcagatcctcttgaaattgcacaacctaaaggaaaggaaaaacttgttgacaggaggcaggtatcaaccgaacatcaagatgccaagacacatagtagtttgaatggttgttctgacacttgtaaggtggatcaagcagctatttcacactgtcataatagtgcacatcagaatatttttcaacaggagaaaaatagtgctgtttcggatgcaagaagggaagagaaaccaggtgtaaaatgtgaaaagaaagcagcaggccatggtgccaaactggctgaacaatctactggtctgtatagtgacccaatatcactggacaaagagactgttgttagttgttcaaagcatggcacttcgaaggtaaatgcactaaaggttccagatcatgagattgagagtacttcactcgatgggtcaatgctgcctcgaggaactgtagtagacatgtgcctaaggaagtccatcaaccggtctagtgaaagttactgcatagatttcaaagattgtttagatggaaatgattgtagagacagccaacaagaaaccacgcatgacaatgttttaaggaagaagcaagaatgttccctgttgccagagactaaagatgagttgaacgggaaagctagaaaggaggattgtgaaccccaagcccgtagggttgagatcgaatcaaatcaacggataacaacagaggattgtgcctctgatacaatactttctggctctgctaaacaagatgaccggatccgatgttcttcaataccagacttaaattgcttgcctagtatgagcagcgatgaggattttatggcaccacctgaggaaccggtttgccaggtaagtgtagacagtttcaaacctcagagcatttctaagagtctttcagcttcattaactggacacactccaaagagagaactgttcaagcaagtagaggggaaacagtgcgatcgagctgaggaaaccaaccaaatcgccagggaagtttgcaaagacggtacctctgaagcagcaactcagttgcagatctcggaatcaaatactggtcctccgcaactaagaacagccgaagaaagtagcaccccaatgaacgcactcaagagcgccttgtacgaattcgtcaaaggctgtgtaagacctctgtgggaagacgggctgctgtcccgcgaggtccacaaatttgtcgtgaagaaggccgtggataaagtgctagacgtctgggctcactcgacggagataaacgtcccaagaatcttgtccgatgaagctgaaggtataaggacccttgttaaggactacctaaagatatacgtgggaagtgaagcccttaggaaaagcatccccacaagttcttgagcaaggtgaaacacgatgtagatgtttccccattttctgtaccttcgtagtctctttcgtagtttgtgtaggtagctctgcacaggtagtcaggtaggatgtgaagtttacaaggtgatggatattgacagattgaacgctgacaaagtttaaccatcttggaaccctgtcctagtagttggttgggaaaaaaatgcttttttgctctgtgagtgcgcatctgtttactcggctttcggccggtgatgcgtcactttttcttcctctgtcatcaaatggtgtgcaaatggtgcgcagccgaaaaaggccaaccggttggtgtgctgtggctgctggcatgtgat

SEQ ID NO: 10366 - DNA, 5036 bp, Zea Mays
ctttggttaaggtctaatacaaaactaatgcaagcattctttatcacgcctctgctctcgccgccccctacgttgctccattgtttcctttccttcacctgcatcgcacagcgctcccacccttcggccgctctcgcgtcgggcagggctcgggagtcgggactcctcgcacgcattggagacttggaggccgtcgggactccatatcggcattgacgtcctccgccacgattgtcctgttcacgattgtgtccctttatcccaccggtgcaatcgcgggtggttttgtgtttagggtttaacagtaacactccagtgcggattgcctccaaggtgggatcttggcttttcatcccgttcgctctagttctttgcactttttttgtttgcatcttcttttaaagattctgatagcggtaatgcttatacttaatgaagattcgaatcatttgcattatatataacttttatctgttgcgctttgaaattaggttttttcgcttccctttttactcccaataaaacttgcattatttctaccttttatttattgcactcttaaattgagttttttcgcttccctttttactccccgtaaaatcgtcgttcttgcattctactactacttcattttctctctattaatgtgcatttatttgcaccatcgatgatcgattattactttgggttttagtcctccctcctgtttggctctctgagttctttccggaggttgattggtgtcacgagtcacgtgaacagcatcgcctatctgatcatcgtgtgaattgtgatattctatggatctcagattgatctgtgacgccgatgacctgagtaccgggcgaactccacacatccacaccggctgtggggacgacaagggagtatgaactaaagtggtccttggccttattaagggacaggttgcaagattcaaccaattattctgtatgagtattgttgctaggaagcatgtgagaaggtaataaggattcaaaccaccttctcagttcatctgtgatatttgagctggcatgtcagtgtcctcttcattcaagtgcggctggataacaaatggattcaaaaaggctatcgttgtcatcagtacatggagattttttgggacaaacatcacaaagtcattcatgctccgagaagtatgagtggagaaacttaatctttcatcaaagtgataaagcaacaagggatcaatgtgatcatgttgcaacccggcacttacctctgcatatgcctcgcaggttattctctttatcaatacatggattaaatttcagactccatgctatgctgatattgctgttagttttatagattcaaatttatcttctattgatggaattacgtgatattgtgatgtggaaacaggatagaatagtctatgactgagcctagaggttgttatgatttgcacagaactcgagatttttgtgagcgataaatattgtaaatttgcccctttgtgatcaagaggatgaaacggtgcatcatcttttaatctcttgtgtcttctctagggaagtgtggtttaggattttctccctggttaatctgcggcagttctcccccgcaagggatgatttggtcttccaagattggtgggctaatttggaggccaaggtcccttatgcgctgcgcaaagggattaactcccttgtgatgttggtggcatggtggctttggaagcagcggaataaatgtgtgtttgagggggatgctcctagtggcaaccagattattcagaatatcaaagacgacgttcagaggttggggccatcacctggtcatggacattcctctgagatttatggccctggagatggagtaggtggatgccatctatcttgctgttcttatggtggacaccgtggtaaatatcatgcttgccacaaccattcatcggaatgggccaggcacaacatttcacctgaacctggtcctatcagatcttactggataacgaaaaggacttcctccgatcatgtttctcattgtgcaaaaggatctgacagacagatacgcccagcaggaggttataggaagaattattctgctaaccaggggagtggcagtcagaacagaccgtatcatgatgatagatatctaccaactaaattcctggatgaccgttttcctgagatagatgctgcaaaacatcagtcttacttatgcgattttcaatcttcaagtaagcatattcctgttcacccctcacatggtcaatcatgtcaaagggatgaagtagcaaaagctcaccccaagagaccagttaatcgatttcgtcccatccaccataagcaacttgagcgctgtcccaatgaagattttcatgattgctttgatagcagtcagaaattcagaaatgcttataatgacaaggtagtaaaaaggaaatttataaaacaagatttccttggaaacacttacaatggtgcttgtgttggtaaatatgatagaaacagttgcaggaaaaggaatgcagatcattttggtggagagaaaaccaggaagaatgacgcaaataaggacaggtctaaaaggcttcgctgcccccttgagcaggaccaacggcaacaggttgagtgcaacgagatgagaaatgatagtcgggagggaaatgttgaaatgaccaggttagtgtgtcaagatggagcaaaacggaacttcaaccaaaagaagaatgctacagctcctgcttctagtgactcaacaaagtgtgatgggaaaaatatattaagtcccaagtgcagcaaaactattgcttcatcacacacaccaaatttgagcgaaggaagtaatgacatggatccaaaatctgacaactacgttgatggttgcactgaaagaggtatactgcagcatattccagtcacccatacagagaggaatatacaactgaaaatatcagataattttactcagtctgaggcgtttcgccgagattgtttaatcctgtggagagaaagacaattaagaaaggatagtgctgctaaggctgataacattgtgaaaactgaccaacaacagactgcacaaagaagcaagatgtcaactggaagaagagtggggagtggaggatctgctgcgtcttcttgctcaaaaagcgataataaagacgactctgctccagagtgttctgaccaatttagtggtgcaacatcatctgataaactacaaaagtttggtgaaggaagagctaacaaaaagttagagcagaccatcaaattccccagtaacagtaaatgcaacaaaaggcctcaagacgcaacagctgagaaagtactgaagtgtagtctcaagcttctgtcagaagcagatcctcttgaaattgcacaacctaaaggaaaggaaaaacttgttgacaggaggcaggtatcaaccgaacatcaagatgccaagacacatagtagtttgaatggttgttctgacacttgtaaggtggatcaagcagctatttcacactgtcataatagtgcacatcagaatatttttcaacaggagaaaaatagtgctgtttcggatgcaagaagggaagagaaaccaggtgtaaaatgtgaaaagaaagcagcaggccatggtgccaaactggctgaacaatctactggtctgtatagtgacccaatatcactggacaaagagactgttgttagttgttcaaagcatggcacttcgaaggtaaatgcactaaaggttccagatcatgagattgagagtacttcactcgatgggtcaatgctgcctcgaggaactgtagtagacatgtgcctaaggaagtccatcaaccggtctagtgaaagttactgcatagatttcaaagattgtttagatggaaatgattgtagagacagccaacaagaaaccacgcatgacaatgttttaaggaagaagcaagaatgttccctgttgccagagactaaagatgagttgaacgggaaagctagaaaggaggattgtgaaccccaagcccgtagggttgagatcgaatcaaatcaacggataacaacagaggattgtgcctctgatacaatactttctggctctgctaaacaagatgaccggatccgatgttcttcaataccagacttaaattgcttgcctagtatgagcagcgatgaggattttatggcaccacctgaggaaccggtttgccaggtaagtgtagacagtttcaaacctcagagcatttctaagagtctttcagcttcattaactggacacactccaaagagagaactgttcaagcaagtagaggggaaacagtgcgatcgagctgaggaaaccaaccaaatcgccagggaagtttgcaaagacggtacctctgaagcagcaactcagttgcagatctcggaatcaaatactggtcctccgcaactaagaacagccgaagaaagtagcaccccaatgaacgcactcaagagcgccttgtacgaattcgtcaaaggctgtgtaagacctctgtgggaagacgggctgctgtcccgcgaggtccacaaatttgtcgtgaagaaggccgtggataaagtgctagacgtctgggctcactcgacggagataaacgtcccaagaatcttgtccgatgaagctgaaggtataaggacccttgttaaggactacctaaagatatacgtgggaagtgaagcccttaggaaaagcatccccacaagttcttgagcaaggtgaaacacgatgtagatgtttccccattttctgtaccttcgtagtctctttcgtagtttgtgtaggtagctctgcacaggtagtcaggtaggatgtgaagtttacaaggtgatggatattgacagattgaacgctgacaaagtttaaccatcttggaaccctgtcctagtagttggttgggaaaaaaatgcttttttgctctgtgagtgcgcatctgtttactcggctttcggccggtgatgcgtcactttttcttcctctgtcatcaaatggtgtgcaaatggtgcgcagccgaaaaaggccaaccggttggtgtgctgtggctgctggcatgtgat

SEQ ID NO: 10367 - DNA, 890 bp, Zea Mays
cggcaattgaatcacagtagccgaaaccaccaggattgccaaagatatcaacatctccaaccttccttcaggactgctcaacttcgaataaaaattaggacgaagagagaaagtaagatactagaatcaacaattgaaaagcagtagtcagatcagatcacagtgcttcaaaagttctttttacggaaacaggggtgggggctactgattactaaattaaaggtggtaaatgctttaaaagtagggatacttgcaagttgacatccaataattattcctgagtattgcataaacagtaacgtttggatatgctgcatgtaagcaaagactaattttaccataatccagatcttgctaccatgtgaggtccatggtattattgcagaaggtaatatatagtaagaaaattcacaattatatcacaaaataaacagtatattatgcaaatatgatttcaaactacttagttacaggctcacccagaggcagggacatcccttccattccccttttctttatctcgtccatagtattacttccgttctcgaatatttgtcgaccctagttcatttttgaactaaaccgcgacaaatgaaaaagaacggagggagtatttctcaaaagttgttttcccatacaggaaaaaactccatagtccatacagaaattctgtgtactacattcatcaggtactaaatcttctagtgtcttagtattctagattcttcataaactaccgaacaaaaggcgctgccgctaattaggaatatgaaagtgtctttcagcctgactttgtgtgtccatctatcaaaacctgtatttaaacagtgtgatacatcatagatcatacctgaccaccttgggttggatagaggagcaaaataatgtgg

SEQ ID NO: 10368 - DNA, 279 bp, Zea Mays
atgaaattttgtttaactgatagaacgagcatgtttttcactacaacagcaaacaaagctgcatttttcaaaattcatgtgtcagtatcatggctattcccaagacatggtactatggtaggagcatcatgtctattcccatgtaggcactacggatgttcctttttaaagaccggcattacagataaaatgaagtgtatctacaaaaattgccctgaagtccaaagtgtacgacattatttcagtacaactgtaaagcttgcagcatggtatgcataa

SEQ ID NO: 10369 - DNA, 2811 bp, Zea Mays
atcccaaggcataatttagctactacccctacccccgcgcattggttccgttccatcccaagctaacacaggcatcgtatatatggcgggcgacgacggggcggacgcgtcggagcggctggagagcatcctgacggcggaggcggcggcgtcgccgtgggccgcggccgccatcgagctgcggctgctgacgcggctggcggcgcccgcggtggtgatgtacatgatcaactacctcatgtccatgtccacgcagatcttctcgggccacctcggcaacctggagctcgccgccgcgtcgctcggcaacgccggcgtccagatgttcgcctacggcctaatggtcggcactgtccttaaaatacagcaagccaggcccaggcgagatacttcggcgagcgtactctcacgtgcatgcagcggcacaaattctttttacgttgtttttattatatcttctaattaaaaaaatttaattattaaaccgattctatgtttgtgtttatataccattaatgctatataatatttgaaaaattatttatgtacattctctattacacgtctttgtgcaaacaaccaaataaagtatatgtcacgtttgcacgagtatgtacaagtaacctaaataaatttactctagttctatcaatacttagtagactcgtgcgggtctagctcaaccaaacacatccgcatgtgattcctaccgagcaatctaggggatgctggtgggtcgtgacgtcgggagggggggggaacgaaattgaaggtgaccagacaagaaaatggacaaaaatcgtccaatagtatggcattttaatttttcagccggagagatacggtgacaagatcctagagttttctaaaatttaaatcaacgaaatattttttcacaaataaagtttcttttttcaaaaaatacggaaacaaaaaaatctgggccgttccagtgcatagatgggcctgcagaattgtttttttattacaacaggcctgcatcactgttgactctagtcttggtcaggtaagccgttcgcacatatgggccttattcacagtatcataaatcggcccaggtctatttgaattcgcttcttgttgtcattcacggtttccgccaaaacgaagagcaaggtgttcatatatttttggttgcttccgcagctgggcatgggcagcgcggtggagacactgtgcgggcaggcctacggcgcccacaagtacgagatgctgggcatctacctgcagcgctcggccgtgcttctgtgcgtcacgggcgttccgctggccgtcatctacgccttctcggagccaatcctggtgttcctgggtcagtcgccggagatcgcccgcgccgcgtccgtcttcgtgtacggcctcatcccgcagatcttcgcgtacgccatcaacttccccatccagaagttcatgcaggcgcagagcatcgtgctcccgagcgcctacatctccaccgtcacgctggtgctgcacgtggtactcagctgggtcgtcgtctacaaggtcggcctgggcctgctgggggcctccctgctgctcagcctcagctggtgggttatcgtcgccgcccagttcgcgtacatcgtgatgagccccaggtgccgccacacctggaccgggttcacctggcaggcattctcgggcctgtggggcttcttcaagctctccgccgcgtccgcggtcatgctttgccttgagacctggtactaccaggtcctggtgctcattgccgggttgctccccaaccctgagcttgcattggatgccttgtccgtatgcatgactgtcaatgcgtgggtgttcatgatcgcagtgggattcaatgctgccgctagtgtgagagtgagcaatgagcttggtgccggccacccaaaatctgcctacttctcagtgtgggtagtgaccggggtctctacgctgatatctctggtgcttgccattgtgatcctctgcctgcgcaactacatcagctacatcttcacggagggtgaggtggtgtcaaacgcggtggcagatctctgcccactgcttgccatcacgctcgtcctcaacggcatccaacctgttctctcaggtgtcgccgttgggtgtgggtggcaagaattcgtagcctacgtgaacgttggctgctactacatagttggtgttcccctcggcgccatcctcggttttgtcttcaagctcggtgtaaagggcatttggagtggtatgattggaggaactttcatgcagacggctattctagtgtgggccaccttgagaactgattggaacaaagaggtagaggaagcacagaaaaggttaaataaatgggcggattcgaagacgacagagccccttcttgttggtttcggcgatggcaactaatttactgcaagggtggatggatggatccacatcatcctctggcttcaccatcgtcaccatcaggaatctacgaaggatcagaagagacgacggagccccttcttgccggcgttggcgatggcaattaatttactggatggatgaatggatccacattattctctggatggcttcaccattgtcaccatcaggattgctaataaatcatgcggagggttattttagccagtaccaaacgtatttcgaggactctatatttcaatttaataaatatgtaccatttataatgaataagatgagattcttcgtcattatctcttgtatttatgtgtttgtgctgttgcggtgaaggaacagaaaacgagccttccacatcttcctcacacctgacaggaggtttagttatctagatctagatttccg

SEQ ID NO: 10370 - DNA, 2088 bp, Zea Mays
gcagtagctaggctgtggtgcagaacgtttcggcggggggcgcagcgcagtggctcgagcacgaggccgataaattagcagccctcggccttggaaatggaatcccaaggcataatttagctactacccctacccccgcgcattggttccgttccatcccaagctaacacaggcatcgtatatatggcgggcgacgacggggcggacgcgtcggagcggctggagagcatcctgacggcggaggcggcggcgtcgccgtgggccgcggccgccatcgagctgcggctgctgacgcggctggcggcgcccgcggtggtgatgtacatgatcaactacctcatgtccatgtccacgcagatcttctcgggccacctcggcaacctggagctcgccgccgcgtcgctcggcaacgccggcgtccagatgttcgcctacggcctaatgctgggcatgggcagcgcggtggagacactgtgcgggcaggcctacggcgcccacaagtacgagatgctgggcatctacctgcagcgctcggccgtgcttctgtgcgtcacgggcgttccgctggccgtcatctacgccttctcggagccaatcctggtgttcctgggtcagtcgccggagatcgcccgcgccgcgtccgtcttcgtgtacggcctcatcccgcagatcttcgcgtacgccatcaacttccccatccagaagttcatgcaggcgcagagcatcgtgctcccgagcgcctacatctccaccgtcacgctggtgctgcacgtggtactcagctgggtcgtcgtctacaaggtcggcctgggcctgctgggggcctccctgctgctcagcctcagctggtgggttatcgtcgccgcccagttcgcgtacatcgtgatgagccccaggtgccgccacacctggaccgggttcacctggcaggcattctcgggcctgtggggcttcttcaagctctccgccgcgtccgcggtcatgctttgccttgagacctggtactaccaggtcctggtgctcattgccgggttgctccccaaccctgagcttgcattggatgccttgtccgtatgcatgactgtcaatgcgtgggtgttcatgatcgcagtgggattcaatgctgccgctagtgtgagagtgagcaatgagcttggtgccggccacccaaaatctgcctacttctcagtgtgggtagtgaccggggtctctacgctgatatctctggtgcttgccattgtgatcctctgcctgcgcaactacatcagctacatcttcacggagggtgaggtggtgtcaaacgcggtggcagatctctgcccactgcttgccatcacgctcgtcctcaacggcatccaacctgttctctcaggtgtcgccgttgggtgtgggtggcaagaattcgtagcctacgtgaacgttggctgctactacatagttggtgttcccctcggcgccatcctcggttttgtcttcaagctcggtgtaaagggcatttggagtggtatgattggaggaactttcatgcagacggctattctagtgtgggccaccttgagaactgattggaacaaagaggtagaggaagcacagaaaaggttaaataaatgggcggattcgaagacgacagagccccttcttgttggtttcggcgatggcaactaatttactgcaagggtggatggatggatccacatcatcctctggcttcaccatcgtcaccatcaggaatctacgaaggatcagaagagacgacggagccccttcttgccggcgttggcgatggcaattaatttactggatggatgaatggatccacattattctctggatggcttcaccattgtcaccatcaggattgctaataaatcatgcggagggttattttagccagtaccaaacgtatttcgaggactctatatttcaatttaataaatatgtaccatttataatgaataagatgagattcttcgtcattatctcttgtatttatgtgtttgtgctgttgcggtgaaggaacagaaaacgagccttccacatcttcctcacacctgacaggaggtttagttatctagatctagatttccg

SEQ ID NO: 10371 - DNA, 2143 bp, Zea Mays
cgcacgtccgtccgtccgtcgctatgggttattatatatagagagagatgggcaagcgccacaaaccgatcgagcctcgacgagcgagtcgaggactcatcctagctagctaagctgtccgacagcgcagcagaccgatacgagtacgacgatgatgagtagcaccggcggcgagagcaagctggagagcccgctgctgggcctgcccgcgccgggctcgtcggccggcagcgggcacagccacggcgaggcggtgagcgggcagctggagagcatcctcagcgacgcctccctgccgtggaggcggcggatgctgtcggcgtccatggtggagatgcggctgctcgtgcgcctggccgcgcccgccgtgctcgtctacatgatcaactacctcatgtccatgtccacgcagatcttctcgggacacctcggcacgctcgagctggccgccgcgtcgctcggcaacaccggcatccaggtcttcgcctatggcctcatgctgggcatggggagcgcggtggagacgctgtgcgggcaggcctacggcgcccacaagtacgagatgctgggcatctacctgcagcgctcggccgtgcttctgtgcgtcacgggcgttccgctggccgtcatctacgccttctcggagccaatcctggtgttcctgggtcagtcgccggagatcgcccgcgccgcgtccgtcttcgtgtacggcctcatcccgcagatcttcgcgtacgccatcaacttccccatccagaagttcatgcaggcgcagagcatcgtgctcccgagcgcctacatctccaccgtcacgctggtgctgcacgtggtactcagctgggtcgtcgtctacaaggtcggcctgggcctgctgggggcctccctgctgctcagcctcagctggtgggttatcgtcgccgcccagttcgcgtacatcgtgatgagccccaggtgccgccacacctggaccgggttcacctggcaggcattctcgggcctgtggggcttcttcaagctctccgccgcgtccgcggtcatgctttgccttgagacctggtactaccaggtcctggtgctcattgccgggttgctccccaaccctgagcttgcattggatgccttgtccgtatgcatgactgtcaatgcgtgggtgttcatgatcgcagtgggattcaatgctgccgctagtgtgagagtgagcaatgagcttggtgccggccacccaaaatctgcctacttctcagtgtgggtagtgaccggggtctctacgctgatatctctggtgcttgccattgtgatcctctgcctgcgcaactacatcagctacatcttcacggagggtgaggtggtgtcaaacgcggtggcagatctctgcccactgcttgccatcacgctcgtcctcaacggcatccaacctgttctctcaggtgtcgccgttgggtgtgggtggcaagaattcgtagcctacgtgaacgttggctgctactacatagttggtgttcccctcggcgccatcctcggttttgtcttcaagctcggtgtaaagggcatttggagtggtatgattggaggaactttcatgcagacggctattctagtgtgggccaccttgagaactgattggaacaaagaggtagaggaagcacagaaaaggttaaataaatgggcggattcgaagacgacagagccccttcttgttggtttcggcgatggcaactaatttactgcaagggtggatggatggatccacatcatcctctggcttcaccatcgtcaccatcaggaatctacgaaggatcagaagagacgacggagccccttcttgccggcgttggcgatggcaattaatttactggatggatgaatggatccacattattctctggatggcttcaccattgtcaccatcaggattgctaataaatcatgcggagggttattttagccagtaccaaacgtatttcgaggactctatatttcaatttaataaatatgtaccatttataatgaataagatgagattcttcgtcattatctcttgtatttatgtgtttgtgctgttgcggtgaaggaacagaaaacgagccttccacatcttcctcacacctgacaggaggtttagttatctagatctagatttccg

SEQ ID NO: 10372 - DNA, 1468 bp, Zea Mays
ctcagctatcccgccgtcgtcgcccgcacgtccgtccgtccgtcgctatgggttattatatatagagagagatgggcaagcgccacaaaccgatcgagcctcgacgagcgagtcgaggactcatcctagctagctaagctgtccgacagcgcagcagaccgatacgagtacgacgatgatgagtagcaccggcggcgagagcaagctggagagcccgctgctgggcctgcccgcgccgggctcgtcggccggcagcgggcacagccacggcgaggcggtgagcgggcagctggagagcatcctcagcgacgcctccctgccgtggaggcggcggatgctgtcggcgtccatggtggagatgcggctgctcgtgcgcctggccgcgcccgccgtgctcgtctacatgatcaactacctcatgtccatgtccacgcagatcttctcgggacacctcggcacgctcgagctggccgccgcgtcgctcggcaacaccggcatccaggtcttcgcctatggcctcatgcatgtcaattacagggtgggtgttcatgatatcagttgggttcaatgcagcagccagcgtaagagtgagcaacgagcttggcgccggcaacccaaagtccgcggcgttctctgtggtggtagtgacgctgctctccttcgtcctgtcggtcataatctccatcgtcatcctgctgtgccgggactacatcagctacatcttcaccgagggcgacgacgtgtcgcgggcggtcgcccagctcagcccgctgctggcggtcaccctcatcctcaacggcatccagcccgtcctctctggggtagctgtggggtgtggatggcaagcgttagtcgcatacgtcaatgtcggctgctactacatcgtcggcatcccccttgggtgcctcctgggattctacttcgacctgggagcagcgggtatctggagcggtatgatcgggggcaccctgatgcagaccatgatcctggtgtgggttacattcaggaccaactggaacaaggaggttgaagaagcgcagaaaagactgaacaaatgggaagacagtaaagcgcctgtccagtgagcccaagaacgaaataaggcttctctgttgccaaaccaagaacgagagacgtgggaaattgatgcaattcaccctgatgcagattcggcaattgatgcaaggttgcaattcagtgtcctgaaatgtctacgaggagaggagaggagatgagatggctggaattttaaatactactcttgcatcacgcaattcaattctgtgttccgttattatatatcgttcactgatgcgacagcatagcagactagtagtcaataataatttttgttggaattgccacgaacccgccaccataaggcattgttcgtttctactgaattggtggatcggaacgatttctaaccagattgtttctctaatttatataaactttgattaggtgg

SEQ ID NO: 10373 - DNA, 3031 bp, Zea Mays
cgacgtacttgtagctgcttggcgcgtacaagctagtgctgcagtgctggctatacatactgctagttcatgcccttgtgtttgcgtacgtacgtaaacaccaggcgcgcggccggtctcaggcccgcaggacagcgcacagtactcctccgatcctcgtgtgtgattaattccacagagcagtacgtcgtagatagatatcttgatactgtgagtgtggggtacgtacggtatggcgccagcccagcatcaagcagcagctgacagaggcagcagggaagagatcgtcatcgtggacctcgagagcgaggccggcgccgacgacgcggcggcggcggcggcgacgatgcagcggcaggactcgctgtacgcggccgcaacaagagccgccggcgccaaccaccacggacaggacagctgggccaggacgctgcggctggcgttccagtgcgtggggatcctgtacggcgacattggcacgtcgccgctgttcgtgtactcgagcacgttccgggacggcgtcggccacccggacgacctgctcggcgcgctctccctcatcatctacagcttcctgctcttcaccgtcatcaagtacgtctacatcgccctgcgagccaacgacgacggtgacggtgagcaaacaaaatatactatatagttagtatacactggctgatgtcgcatgcagtcgtactcgtacatactagtcgtacgtacgtacaaaagaaaaaaaaataacaaactccaagctaagctagcaaattaactgatcgatcgatatgatgatccatccatccattctccggccgatccaccaggtggcactttcgccctctacactctcatctcgcgccacgccaaggtgagcctgatcccgaaccagcaggtggaggaggacgacctcgtcgccaagtacaaccgcgacaagccgccggcgacgctccggcgagcggaatggatgaaggagctgctcgagacgaacaaggccgtcaaggtctcgctcttcctcatcaccatgctcgccaccgccatggtcatcagcgacgctatcctcacccctgcaatctcagtcctctccgccgttggcggtctcaaagagaaggcgacttttctcaccacagacgagatagtctggatcaccgtggggattctggtggcgctgttcgcgatccagaggttcgggacggacaaggtcggctacctgttcgcgccgatcatcctgctctggctgctcctgatcgcggccgtcggcttctacaacctggtgaagtacgacaccggcgctctcagggcgttcaacatgaagtacatcatcgactacttcagacggaacaagaagaaagggtgggcctcccttggaggcatactcctttgcttcacaggcacagaagccctttttgctgatctaggctacttcagcatcaggtcgatccagctgagctttggcttcggtttagtcccctcagtgctgctcgcttacatcgggcaagcagcgtacttgagagtgcacccggaggatgtggccaacactttctacagatccactccaatctccttgttctggccaacgttcattctcgcgctagcagcatcgatcattgggagccaagccatgatctcctgcgccttcgcgacaatctcgcattcccagacactcggttgctttccgagggtaaagatactgcacacctcgaggcaatactcgggccaactatacatccctgaagtaaactacctgctgtgcttgggtgcttgcctcgtcacagttggcttcaggacaactgtcatcattggggaagctcatggtatatgcgttgttcttgtgatgatcgtcacaaccctgttgctgacgatcgtgatgctcctagtatggaagatcagcgtctggtggatcgtcgcgttcttccttgttttcatgtcgtccgagtcgatctatctatctgccatcctgtcccgattcgcgcacggcgcgtacgtgcccgtggcaatgtcggcggtcctgatggtggtgatggtcgtgtggcactacgtgcacgtgaacaagtacaggtttgagctcgagcactctatcccccgcgacaaagtgaaagagctccttgagcgcagcgacatacagagggtgccagggatcggcctcttctacaccgagctggttcagggcatacccccggtgttccgtcatctcatcgagaagatcccttccatccactcggtgctcattttcgtctccatgaagcacctgcccatcccatctgtcgacatgtcggagcgctttctctttagacaggtagacagagaagattacaaggtgttccagtgcgtggcacggtatgggtacagggaccccttcgaggaggccaaggacttcgttgacaaacttgtagagcatctccagtactacatccgggatgtcaacctctatggcctgggctgcgagccgatgatgaagcagtccttcagctactgcagttctcgcgctgagagctttggcagccatgaaaaaaccaaagtaaaggcagtctacgctgaggagatgctcacaccagcagagtcattctcggagcacgcgaggcaagctagtggaaagaacaagctttttacacaatttcagacaagatgaatatagtagagatgatgaagattcagcaggagcaacaggctgtccttgaagagatgagtaaaggtgtggtgtacatatttggagagagcgaggtggtggcaagaccccactcctcactcattaagaagatagctatcaactacatatactcttttcttagaaagaactccaggaatggtgagaagatgctgtcgatcccccgtcgacagatcctaaaggtcggagtctcatatgaaatctaaaaagtgtggatgaagaacaggatatctgattgcacacacaacttaatttgatgccaaagaaggactctgtattcatttgtttcatggaaaatcaatgtgcttgatttacttactacagcaatgatggatacagaaccttagttttatgcataagtgcttcattgat

SEQ ID NO: 10374 - DNA, 3121 bp, Zea Mays
gcgcactgctgctgcagtgctgcacagagtacgtaattctgcgggagtgaggagcaggggaggctcttgtttcgcgcagcagaggatcggaagcgaagacgacgccggcggcgcgcggccagggagatggcggcacatcagcatggtacggccggccggggtggtggtggtggtagcatggagatcttcccctacagctacagcagcggccgcgacctggagctggtggacctgccggcggaaccggtggacgtgaagcgccaggactcgctctaccgcgacgccaccatgccggcgcaccacggccacaacggacaggagagctgggtccggacgctacggctggcgttccagtgcgtgggcatcctgtacgccgacctcggcacctcgccgctctacgtgtacgccaacaccttcaagtacggcgtccaccacgaggacgacgtcctcggcgtcctgtccatcatcatctacagcttcgtcctcttcaccatgatcaagatcgtcttcatcgccctctacgccaacgacgacggcgacggtggcacgttcgcgctctactcgctcatctcgcgctacgccaaggtgtgcctcatcccgaaccagcaggcggaagacgagctcgtgtcgaggtacaagcatcgcagcaagccgtcggcgacgcttcggagagcccagtggatgaaggacctgctggagaccagcaagactgcaaaggtctcgctcttcttcctcaccatcctcgccacggcgctcgccatcagcgactgcatgctaacccctccgatatcagctgtcaacggactcaagctgagagcaccgcatctgactacagatgagactgtgtggatcacagtgggcattctggtggttttcttcgcggtccagcgcttgggcaccgacaagatcggctacacgttcgcgccggtggtcttcgtgtggctcctcctcatctccggcatcgggctctacaacacggtcaagtacgacgtcagcacgctgaaggctttcaacgccaagtacatcgtcgactacttccgaaggaacaagaagaaagggtgggtttcgctgggtgaaatcctcctctgcttcacaggcactgaagctctcttcgctgacctgggatacttcagcatcagatctatacagctaagcttcaccttcggcttgttaccttcagtgatgctgacgtacattgggcaagcggcatacatgaggaaacacatagacacgcttgacatatccaacgttttcttccaatccattccaagatctttgttttggccaactttcgtcctggctctcatcacgtcggtcatcggaagccaagccatggtctcgtgtgccttcgcaaccatgtctcatctacaggcgctcaactgtttcccgagggttaagattctgcacacgtcaaggcgttactcaggccagctctacagccccgaagtgaacgtcttcctctgcattgccgcctgcgtcgtcaccgtaagcttcaggacgacaggtttcatagccaaagcacacgagatctgcgtggtcctcgtgatggtgatcacgacgctcctgatgacaatagtgatgctgctggtgtggaaggtgaacatctggtggatcgccgtgttcttcgccgtgttcatgtcgacggagtgcgtgtacacggccgcggtcctgtacaagttcacccacgggccgtacgtgccgctggccatgtcggccgtcctcatgttcgtcatggccgtgtggcactacgtgcacgtcaagcggtacaggcacgagctggagcgcaccgtgtcgcgggacgcggccagggacctgctggagcgcggggacctcaagagggtcccggggctgggcctcttctacaccgagctggtgcaggggatcccgcccatcttccctcacctcgtcggcaagatccccaccatccactccgtcgtcgtcttcatcaccgtgaagagcctgccggtgccccacgtccacgtcacggaccgcttcctcttccgccaggtcgagcccaaggagttcatggtgttccgttgcgtggcgaggtacgggtaccgcgacgcgctcgagacggccgctgatttcgtcagcgtcctcgtcgagtacctccagtactacgtcagggacctcaacctctacggggttgtcggtgatgagccgttcaagatcgtcttccacagtgctcgggtggacagcttttcttgggagaagcactcgtcgggacatgctgtctatgccgaggagatgctcacaccagcccagtccttctccgagctcacaatgcatccggtctccatgagcagtagactggcacatttccagacagggaaaatgaacctggaggagatgttgaagatcgaggaagatcaaaagatcatccaacgcgaggtggacaacggtgttgtttacataattggggagagtgaagtagtagccaagcctcattccaacttgttcaagaagattattgtcaactacgtctacagcttcctaaggaagaactcaaggaatggagagaagatgctatcaattccaagaggccaactgcttaaggttggaataacatatgagatctaaggtcgcacatagactatatatatatttgactagaacgatgtcttttccttccatgtggatatgtgattgtaattaatcttcgcaacgtgcatatatgaaaatcaatatatatttcaatgctggaaggattaagatcattaagagagggatgaattaggctagtacgtctaaaattgcttgcaattattaagttctactatttagtccatccccccctcccagatgctgagatgttttaggcctagtttgggtattctacaaatgtgggggggttgagattgagacagacataaaatgtctaagtaaaggaaaacgaggaaaggaagaaataaaacaaaaaaggaagtcttctagccgctgggcttggcgaggggcacacttgcgtgagtgacccagcagcagagagggcgcatcggcccggtgcagctggcccactggtggaggcgcccggccgtgggcgcagcgcaccttcaaccaggcctagtttatgtaagattagtgtggtactctcttgttgctctcgttcaataattgtatgcct

SEQ ID NO: 10375 - DNA, 3310 bp, Zea Mays
agttcccaagcctagataggttgttggttggacgtacggttataaaaggaacctcgtagtgacatccgcagctggccgggaagcaacaagcagccaaacgctgtacgcgcactgctgctgcagtgctgcacagagtacgtaattctgcgggagtgaggagcaggggaggctcttgtttcgcgcagcagaggatcggaagcgaagacgacgccggcggcgcgcggccagggagatggcggcacatcagcatggtacggccggccggggtggtggtggtggtagcatggagatcttcccctacagctacagcagcggccgcgacctggagctggtggacctgccggcggaaccggtggacgtgaagcgccaggactcgctctaccgcgacgccaccatgccggcgcaccacggccacaacggacaggagagctgggtccggacgctacggctggcgttccagtgcgtgggcatcctgtacgccgacctcggcacctcgccgctctacgtgtacgccaacaccttcaagtacggcgtccaccacgaggacgacgtcctcggcgtcctgtccatcatcatctacagcttcgtcctcttcaccatgatcaagatcgtcttcatcgccctctacgccaacgacgacggcgacggtggcacgttcgcgctctactcgctcatctcgcgctacgccaaggtgtgcctcatcccgaaccagcaggcggaagacgagctcgtgtcgaggtacaagcatcgcagcaagccgtcggcgacgcttcggagagcccagtggatgaaggacctgctggagaccagcaagactgcaaaggtctcgctcttcttcctcaccatcctcgccacggcgctcgccatcagcgactgcatgctaacccctccgatatcagatgagactgtgtggatcacagtgggcattctggtggttttcttcgcggtccagcgcttgggcaccgacaagatcggctacacgttcgcgccggtggtcttcgtgtggctcctcctcatctccggcatcgggctctacaacacggtcaagtacgacgtcagcacgctgaaggctttcaacgccaagtacatcgtcgactacttccgaaggaacaagaagaaagggtgggtttcgctgggtgaaatcctcctctgcttcacaggcactgaagctctcttcgctgacctgggatacttcagcatcagatctatacagctaagcttcaccttcggcttgttaccttcagtgatgctgacgtacattgggcaagcggcatacatgaggaaacacatagacacgcttgacatatccaacgttttcttccaatccattccaagatctttgttttggccaactttcgtcctggctctcatcacgtcggtcatcggaagccaagccatggtctcgtgtgccttcgcaaccatgtctcatctacaggcgctcaactgtttcccgagggttaagattctgcacacgtcaaggcgttactcaggccagctctacagccccgaagtgaacgtcttcctctgcattgccgcctgcgtcgtcaccgtaagcttcaggacgacaggtttcatagccaaagcacacggtaacaacaatacatctgctaaacatctctgcagcaccgtaccctacagaaatctgagtcgcttatacataaatactatacgtgtttctgctaccgcctgtgcatgcatgcatgcattcgaacagagatctgcgtggtcctcgtgatggtgatcacgacgctcctgatgacaatagtgatgctgctggtgtggaaggtgaacatctggtggatcgccgtgttcttcgccgtgttcatgtcgacggagtgcgtgtacacggccgcggtcctgtacaagttcacccacgggccgtacgtgccgctggccatgtcggccgtcctcatgttcgtcatggccgtgtggcactacgtgcacgtcaagcggtacaggcacgagctggagcgcaccgtgtcgcgggacgcggccagggacctgctggagcgcggggacctcaagagggtcccggggctgggcctcttctacaccgagctggtgcaggggatcccgcccatcttccctcacctcgtcggcaagatccccaccatccactccgtcgtcgtcttcatcaccgtgaagagcctgccggtgccccacgtccacgtcacggaccgcttcctcttccgccaggtcgagcccaaggagttcatggtgttccgttgcgtggcgaggtacgggtaccgcgacgcgctcgagacggccgctgatttcgtcagcgtcctcgtcgagtacctccagtactacgtcagggacctcaacctctacggggttgtcggtgatgagccgttcaagatcgtcttccacagtgctcgggtggacagcttttcttgggagaagcactcgtcgggacatgctgtctatgccgaggagatgctcacaccagcccagtccttctccgagctcacaatgcatccggtctccatgagcagtagactggcacatttccagacagggaaaatgaacctggaggagatgttgaagatcgaggaagatcaaaagatcatccaacgcgaggtggacaacggtgttgtttacataattggggagagtgaagtagtagccaagcctcattccaacttgttcaagaagattattgtcaactacgtctacagcttcctaaggaagaactcaaggaatggagagaagatgctatcaattccaagaggccaactgcttaaggttggaataacatatgagatctaaggtcgcacatagactatatatatatttgactagaacgatgtcttttccttccatgtggatatgtgattgtaattaatcttcgcaacgtgcatatatgaaaatcaatatatatttcaatgctggaaggattaagatcattaagagagggatgaattaggctagtacgtctaaaattgcttgcaattattaagttctactatttagtccatccccccctcccagatgctgagatgttttaggcctagtttgggtattctacaaatgtgggggggttgagattgagacagacataaaatgtctaagtaaaggaaaacgaggaaaggaagaaataaaacaaaaaaggaagtcttctagccgctgggcttggcgaggggcacacttgcgtgagtgacccagcagcagagagggcgcatcggcccggtgcagctggcccactggtggaggcgcccggccgtgggcgcagcgcaccttcaaccaggcctagtttatgtaagattagtgtggtactctcttgttgctctcgttcaataattgtatgcct

SEQ ID NO: 10376 - DNA, 3320 bp, Zea Mays
cagcaattatgtaggtaggtaggtaacaagcagaggtgaaagtcttttcgattttctagagcttctaacaaaaagctgggcagcagttcccaagcctagataggttgttggttggacgtacggttataaaaggaacctcgtagtgacatccgcagctggccgggaagcaacaagcagccaaacgctgtacgcgcactgctgctgcagtgctgcacagagtacgtaattctgcgggagtgaggagcaggggaggctcttgtttcgcgcagcagaggatcggaagcgaagacgacgccggcggcgcgcggccagggagatggcggcacatcagcatggtacggccggccggggtggtggtggtggtagcatggagatcttcccctacagctacagcagcggccgcgacctggagctggtggacctgccggcggaaccggtggacgtgaagcgccaggactcgctctaccgcgacgccaccatgccggcgcaccacggccacaacggacaggagagctgggtccggacgctacggctggcgttccagtgcgtgggcatcctgtacgccgacctcggcacctcgccgctctacgtgtacgccaacaccttcaagtacggcgtccaccacgaggacgacgtcctcggcgtcctgtccatcatcatctacagcttcgtcctcttcaccatgatcaagatcgtcttcatcgccctctacgccaacgacgacggcgacggtggcacgttcgcgctctactcgctcatctcgcgctacgccaaggtgtgcctcatcccgaaccagcaggcggaagacgagctcgtgtcgaggtacaagcatcgcagcaagccgtcggcgacgcttcggagagcccagtggatgaaggacctgctggagaccagcaagactgcaaaggtctcgctcttcttcctcaccatcctcgccacggcgctcgccatcagcgactgcatgctaacccctccgatatcagtactcgcagctgtcaacggactcaagctgagagcaccgcatctgactacagatgagactgtgtggatcacagtgggcattctggtggttttcttcgcggtccagcgcttgggcaccgacaagatcggctacacgttcgcgccggtggtcttcgtgtggctcctcctcatctccggcatcgggctctacaacacggtcaagtacgacgtcagcacgctgaaggctttcaacgccaagtacatcgtcgactacttccgaaggaacaagaagaaagggtgggtttcgctgggtgaaatcctcctctgcttcacaggcactgaagctctcttcgctgacctgggatacttcagcatcagatctatacagctaagcttcaccttcggcttgttaccttcagtgatgctgacgtacattgggcaagcggcatacatgaggaaacacatagacacgcttgacatatccaacgttttcttccaatccattccaagatctttgttttggccaactttcgtcctggctctcatcacgtcggtcatcggaagccaagccatggtctcgtgtgccttcgcaaccatgtctcatctacaggcgctcaactgtttcccgagggttaagattctgcacacgtcaaggcgttactcaggccagctctacagccccgaagtgaacgtcttcctctgcattgccgcctgcgtcgtcaccgtaagcttcaggacgacaggtttcatagccaaagcacacgagatctgcgtggtcctcgtgatggtgatcacgacgctcctgatgacaatagtgatgctgctggtgtggaaggtgaacatctggtggatcgccgtgttcttcgccgtgttcatgtcgacggagtgcgtgtacacggccgcggtcctgtacaagttcacccacgggccgtacgtgccgctggccatgtcggccgtcctcatgttcgtcatggccgtgtggcactacgtgcacgtcaagcggtacaggcacgagctggagcgcaccgtgtcgcgggacgcggccagggacctgctggagcgcggggacctcaagagggtcccggggctgggcctcttctacaccgagctggtgcaggggatcccgcccatcttccctcacctcgtcggcaagatccccaccatccactccgtcgtcgtcttcatcaccgtgaagagcctgccggtgccccacgtccacgtcacggaccgcttcctcttccgccaggtcgagcccaaggagttcatggtgttccgttgcgtggcgaggtacgggtaccgcgacgcgctcgagacggccgctgatttcgtcagcgtcctcgtcgagtacctccagtactacgtcagggacctcaacctctacggggttgtcggtgatgagccgttcaagatcgtcttccacagtgctcgggtggacagcttttcttgggagaagcactcgtcgggacatgctgtctatgccgaggagatgctcacaccagcccagtccttctccgagctcacaatgcatccggtctccatgagcagtagactggcacatttccagacagggaaaatgaacctggaggagatgttgaagatcgaggaagatcaaaagatcatccaacgcgaggtggacaacggtgttgtttacataattggggagagtgaagtagtagccaagcctcattccaacttgttcaagaagattattgtcaactacgtctacagcttcctaaggaagaactcaaggaatggagagaagatgctatcaattccaagaggccaactgcttaaggttggaataacatatgagatctaaggtcgcacatagactatatatatatttgactagaacgatgtcttttccttccatgtggatatgtgattgtaattaatcttcgcaacgtgcatatatgaaaatcaatatatatttcaatgctggaaggattaagatcattaagagagggatgaattaggctagtacgtctaaaattgcttgcaattattaagttctactatttagtccatccccccctcccagatgctgagatgttttaggcctagtttgggtattctacaaatgtgggggggttgagattgagacagacataaaatgtctaagtaaaggaaaacgaggaaaggaagaaataaaacaaaaaaggaagtcttctagccgctgggcttggcgaggggcacacttgcgtgagtgacccagcagcagagagggcgcatcggcccggtgcagctggcccactggtggaggcgcccggccgtgggcgcagcgcaccttcaaccaggcctagtttatgtaagattagtgtggtactctcttgttgctctcgttcaataattgtatgcct

SEQ ID NO: 10377 - DNA, 808 bp, Zea Mays
aacaatgttttcggtaatatttgtggatactactcgaacagtttcttttttatcatgtctgcgtttcttatagaggttagtaaatcagcaatagtgtccttgcccataagactctaattctaggttattcctaatttttctataatcaacatgttttgtcttttctttaaatttaggattttaaagcatatacgtgagacaaaatcaaggccgttccactcacctccaacaacagctcgtgtaaaccttcctcatcttttcgccgtcccgcatccagggcgattgctcccgcgaatttacgcgaggagccttcggtgagagaggcctgctcggtgccggaggaggcggcggcagcgtcgacgccaggttgtgggagatgccgtctccaacgtctggtggtccggatctacaggcgtaatctcgccgcgacaaccagagggtgcaaaccaggactccgacggtggtgtgtacctgcgaggtgcgtccctgggtcaaggagcagcccagcctccgatgttaggacgtgctggagtcgattcgaatccacttggagctgcttgttagttggatggccaaatagattggatgggcctgtaagaacatcttttctgttatgctatcaaaggcaacaaatagatgctaatagcagatgctgaatgtttgttgcacctcccttcctctgcccgtgtggtgctgtagaccctcacttttctgttttcttgtccactagctctaggttactgcatgtagctttgcttcttgctgcttctacatcgtttatagagtattaataacttgctgcttttta

SEQ ID NO: 10378 - DNA, 417 bp, Zea Mays
caggactttcaggcttggttccagaaaccattatctaaggaggtgaagctatagaagaaatacatgatgagatggataatctgcaagcggaagcaaggagcaatgctgcagcacgtctggtggctgtctggttccttgccagcctgtccgggtgtattttggttttagatgatgtactgcaactcagttttagtcccttttgcaatcggctgcgctgagctgctggttgtgggttttattttggtcgagatgttgtactgcatcttagtttcagcttcaattacgaacaactccggatatgttgcgctgctgctagcttccagccttgttgtagaatactattccaaggcaatgatggcccttattaatttaacaactgttaattgtgtgctgctatcagtctggggttcatctatg

SEQ ID NO: 10379 - DNA, 616 bp, Zea Mays
ctgggacctcgtccatccgacggaggccacgtcgcggaagctcacggccattgccttcgacggctccccgcgccattggtttcacccatggatgtgaggaagctgtgtggctagcttgcaagccaggagcgttggcgtaccattgtctactatactactgttaagagcatcttcaacaactcaccaataattcatcttcaatgactttcaggcttggttccagaaaccattatctaaggaggtgaagctatagaagaaatacatgatgagatggataatctgcaagcggaagcaaggagcaatgctgcagcacgtctggtggctgtctggttccttgccagcctgtccgggtgtattttggttttagatgatgtactgcaactcagttttagtcccttttgcaatcggctgcgctgagctgctggttgtgggttttattttggtcgagatgttgtactgcatcttagtttcagcttcaattacgaacaactccggatatgttgcgctgctgctagcttccagccttgttgtagaatactattccaaggcaatgatggcccttattaatttaacaactgttaattgtgtgctgctatcagtctggggttcatctatg

SEQ ID NO: 10380 - DNA, 670 bp, Zea Mays
aaaaaattctccatctgtgcgtgtgcgggcgggtgagcgcggggacgaaccacgtgttctgggacctcgtccatccgacggaggccacgtcgcggaagctcacggccattgccttcgacggctccccgcgccattggtttcacccatggatgtgaggaagctgtgtggctagcttgcaagccaggagcgttggcgtaccattgtctactatactactgttaagagcatcttcaacaactcaccaataattcatcttcaatgtgaggcttggttccagaaaccattatctaaggaggtgaagctatagaagaaatacatgatgagatggataatctgcaagcggaagcaaggagcaatgctgcagcacgtctggtggctgtctggttccttgccagcctgtccgggtgtattttggttttagatgatgtactgcaactcagttttagtcccttttgcaatcggctgcgctgagctgctggttgtgggttttattttggtcgagatgttgtactgcatcttagtttcagcttcaattacgaacaactccggatatgttgcgctgctgctagcttccagccttgttgtagaatactattccaaggcaatgatggcccttattaatttaacaactgttaattgtgtgctgctatcagtctggggttcatctatg

SEQ ID NO: 10381 - DNA, 705 bp, Zea Mays
ttacatctctagttttttccatccataaaaaattctccatctgtgcgtgtgcgggcgggtgagcgcggggacgaaccacgtgttctgggacctcgtccatccgacggaggccacgtcgcggaagctcacggccattgccttcgacggctccccgcgccattggtttcacccatggatgtgaggaagctgtgtggctagcttgcaagccaggagcgttggcgtaccattgtctactatactactgttaagagcatcttcaacaactcaccaataattcatcttcaatgtgaggactttcaggcttggttccagaaaccattatctaaggaggtgaagctatagaagaaatacatgatgagatggataatctgcaagcggaagcaaggagcaatgctgcagcacgtctggtggctgtctggttccttgccagcctgtccgggtgtattttggttttagatgatgtactgcaactcagttttagtcccttttgcaatcggctgcgctgagctgctggttgtgggttttattttggtcgagatgttgtactgcatcttagtttcagcttcaattacgaacaactccggatatgttgcgctgctgctagcttccagccttgttgtagaatactattccaaggcaatgatggcccttattaatttaacaactgttaattgtgtgctgctatcagtctggggttcatctatg

SEQ ID NO: 10382 - DNA, 1088 bp, Zea Mays
gcagatcatcagtactctccctcagtatgtatgacctatcgatcaaaatacaatttatttattttcttttttcccctcttcccctgtctcatcttctcccacacatcgtcctgacgactgaagctgaatattgccaaagcctttgatagtgctagatgagattatctgcttgaggtgttgcatcagttgggtttcggtgctagatggaaagcctgggtttcaattctcctcagaacagccagcttcgcagtccttaggcagttttttcaaccatggctggggtttgagacaaggagaacctctctctctctcatttgcttttcattctttccatcgaccccatgcagaaattgttcgccatggcatctcgagagagtgcccttacccctatcctctctctcattctgcaaggagagtgaatctgtacgcggatgctgctgctattttcttaaattcgaatagatcaggagaagtgcatgtcacaactctgcggtacctcgtagtgctagactcgctaatggccctcatatgcagatcatgcagcgggcacaatgcaacctctgtcacaaacttggcctcttggccaatgacggaactcctaattttgataatgctttccaggactttcaggcttggttccagaaaccattatctaaggaggtaggggcgactttggaagccctgttcaacattcatatgccggacaccgaacacgttgacaaggcactgatgggaattgcaggtgaagctatagaagaaatacatgatgagatggataatctgcaagcggaagcaaggagcaatgctgcagcacgtctggtggctgtctggttccttgccagcctgtccgggtgtattttggttttagatgatgtactgcaactcagttttagtcccttttgcaatcggctgcgctgagctgctggttgtgggttttattttggtcgagatgttgtactgcatcttagtttcagcttcaattacgaacaactccggatatgttgcgctgctgctagcttccagccttgttgtagaatactattccaaggcaatgatggcccttattaatttaacaactgttaattgtg

SEQ ID NO: 10383 - DNA, 1443 bp, Zea Mays
gaagccagagaacaacatacaaagacaagaggaccaagctaagagaggaggatcgactgctcagtccggctactctggtggcgcgttctacacgacgcaatcgcaacgccctgctcctcctagcacacgcctttcgcctcttcctcctgaacctgccgacttctacaacgacttcgctaccccagtggatatccccatggacacaaacaaggacatgaagacaagggagaaggagcttctggccaaggaggccgagctgaacaggcgtgagaaggaaataaaaaggcgagaggatgctgcggcacgagctggtatcgtgttggaagagaagaactggcccccgtttttccccatcattcataacgatatcggcaacgagatacctgtccatctgcaaagaacgctgtacgtcgcgttcgcgtcgctcttagggttggtcttgtgcctgttttggaacataatctgcattactgctgcctgggcaaaagggtcaggtcctaagatatggtttctcgcaatcatatacttcatcctcggatgccccggtgcatactacctttggtaccggccactataccgcgcaatgaggaacgagagcgctctcaagttcggatggtttttcctcttctacttgattcatatcgccttctgcgcgtacgcagctgtttctccttcaattctcttcgtgggaaaatcgttaaccgggattttgccagcaatcagcttgataggcgacagcgtcattgttgggatcttctacttcattggctttgcattgttctgcctggaggctttgctaagcgtgtgggtcattcagcgcgtctacctgtacttccgagggagcgggaaagaagcggagatgaggcgtgaagcagcacgcggtgcagcgagggcagcgttttgatgaaaaccgtatatagatgatatatataggcacgacttacatactgttcataatagtttgaagtgctttaggtcaagaggcatgtgtgtacagtagggttggcgtcttgtacatctttaaggccggtttggtgaaacatggaaatggaatgaatccataaaggagagatccgttgttattcaaaattaaataacaaggatctcttctccatgggtcccatccattttcctctccaccaaaccagccctgagttcctatcgccacggtgttttgagccctccagattgatcaatcgtggtacatatgacagtgttagtatatggagtaaatacacatggacgggtaaacctagctagactctttgttccatatgtgcatttttgtgtcaccgccttgtatcaattatttatagacgtaatgaagttgtaatgatgttctcactcgagatttttgagtggggaaattgcaaaagcatacttatgtcaagggagttgtactcatacccacactccaaattaaagagctttcgtttttctctc

SEQ ID NO: 10384 - DNA, 1948 bp, Zea Mays
ggcgacgccgtcactgtccggatggcgtggctggggcggcaaagccaaaggtccaccggtgcgccgtttccattcgctgcaacggctgatgatgcgtttgacgctttgacggacggcgaaaactaaaaggcaaaagctgacggacgggacaggtgacaaatccacgcggagtccgctgaaattttggtcgccccatgcccgttctagacgccatggacgatgcggcggcggcggcggtagataggcacggcggcttctagaccgtctccgttttctgcgcgttggccgtcgggggaagtacacaataaacaaagcaagagcagaggtccaactgggctgctgcgtcctctgcctcttctccttcctgtcgttctgcgctgccccgacccccgagtgcccctggtcttgtccaactctccctgctgacctcggagcggagcggagcggagcaagcagccgccaggagggaaggatccatggccgggagatcgcggtacgacaaccccttcgaggagggcggcgccgacgaggtcaaccctttcgcggaccaagctaagagaggaggatcgactgctcagtccggctactctggtggcgcgttctacacgacgcaatcgcaacgccctgctcctcctagcacacgcctttcgcctcttcctcctgaacctgccgacttctacaacgacttcgctaccccagtggatatccccatggacacaaacaagacaagggagaaggagcttctggccaaggaggccgagctgaacaggcgtgagaaggaaataaaaaggcgagaggatgctgcggcacgagctggtatcgtgttggaagagaagaactggcccccgtttttccccatcattcataacgatatcggcaacgagatacctgtccatctgcaaagaacgctgtacgtcgcgttcgcgtcgctcttagggttggtcttgtgcctgttttggaacataatctgcattactgctgcctgggcaaaagggtcaggtcctaagatatggtttctcgcaatcatatacttcatcctcggatgccccggtgcatactacctttggtaccggccactataccgcgcaatgaggaacgagagcgctctcaagttcggatggtttttcctcttctacttgattcatatcgccttctgcgcgtacgcagctgtttctccttcaattctcttcgtgggaaaatcgttaaccgggattttgccagcaatcagcttgataggcgacagcgtcattgttgggatcttctacttcattggctttgcattgttctgcctggaggctttgctaagcgtgtgggtcattcagcgcgtctacctgtacttccgagggagcgggaaagaagcggagatgaggcgtgaagcagcacgcggtgcagcgagggcagcgttttgatgaaaaccgtatatagatgatatatataggcacgacttacatactgttcataatagtttgaagtgctttaggtcaagaggcatgtgtgtacagtagggttggcgtcttgtacatctttaaggccggtttggtgaaacatggaaatggaatgaatccataaaggagagatccgttgttattcaaaattaaataacaaggatctcttctccatgggtcccatccattttcctctccaccaaaccagccctgagttcctatcgccacggtgttttgagccctccagattgatcaatcgtggtacatatgacagtgttagtatatggagtaaatacacatggacgggtaaacctagctagactctttgttccatatgtgcatttttgtgtcaccgccttgtatcaattatttatagacgtaatgaagttgtaatgatgttctcactcgagatttttgagtggggaaattgcaaaagcatacttatgtcaagggagttgtactcatacccacactccaaattaaagagctttcgtttttctctc

SEQ ID NO: 10385 - DNA, 2012 bp, Zea Mays
cggcagcttacaaactggcccgagcggcgggagcagggaggaataggatacggcgacgccgtcactgtccggatggcgtggctggggcggcaaagccaaaggtccaccggtgcgccgtttccattcgctgcaacggctgatgatgcgtttgacgctttgacggacggcgaaaactaaaaggcaaaagctgacggacgggacaggtgacaaatccacgcggagtccgctgaaattttggtcgccccatgcccgttctagacgccatggacgatgcggcggcggcggcggtagataggcacggcggcttctagaccgtctccgttttctgcgcgttggccgtcgggggaagtacacaataaacaaagcaagagcagaggtccaactgggctgctgcgtcctctgcctcttctccttcctgtcgttctgcgctgccccgacccccgagtgcccctggtcttgtccaactctccctgctgacctcggagcggagcggagcggagcaagcagccgccaggagggaaggatccatggccgggagatcgcggtacgacaaccccttcgaggagggcggcgccgacgaggtcaaccctttcgcggaccaagctaagagaggaggatcgactgctcagtccggctactctggtggcgcgttctacacgacgcaatcgcaacgccctgctcctcctagcacacgcctttcgcctcttcctcctgaacctgccgacttctacaacgacttcgctaccccagtggatatccccatggacacaaacaaggacatgaagacaagggagaaggagcttctggccaaggaggccgagctgaacaggcgtgagaaggaaataaaaaggcgagaggatgctgcggcacgagctggtatcgtgttggaagagaagaactggcccccgtttttccccatcattcataacgatatcggcaacgagatacctgtccatctgcaaagaacgctgtacgtcgcgttcgcgtcgctcttagggttggtcttgtgcctgttttggaacataatctgcattactgctgcctgggcaaaagggtcaggtcctaagatatggtttctcgcaatcatatacttcatcctcggatgccccggtgcatactacctttggtaccggccactataccgcgcaatgaggaacgagagcgctctcaagttcggatggtttttcctcttctacttgattcatatcgccttctgcgcgtacgcagctgtttctccttcaattctcttcgtgggaaaatcgttaaccgggattttgccagcaatcagcttgataggcgacagcgtcattgttggggtgaatcttctacttcattggctttgcattgttctgcctggaggctttgctaagcgtgtgggtcattcagcgcgtctacctgtacttccgagggagcgggaaagaagcggagatgaggcgtgaagcagcacgcggtgcagcgagggcagcgttttgatgaaaaccgtatatagatgatatatataggcacgacttacatactgttcataatagtttgaagtgctttaggtcaagaggcatgtgtgtacagtagggttggcgtcttgtacatctttaaggccggtttggtgaaacatggaaatggaatgaatccataaaggagagatccgttgttattcaaaattaaataacaaggatctcttctccatgggtcccatccattttcctctccaccaaaccagccctgagttcctatcgccacggtgttttgagccctccagattgatcaatcgtggtacatatgacagtgttagtatatggagtaaatacacatggacgggtaaacctagctagactctttgttccatatgtgcatttttgtgtcaccgccttgtatcaattatttatagacgtaatgaagttgtaatgatgttctcactcgagatttttgagtggggaaattgcaaaagcatacttatgtcaagggagttgtactcatacccacactccaaattaaagagctttcgtttttctctc

SEQ ID NO: 10386 - DNA, 1668 bp, Zea Mays
gtggagggagagaggagatagcagaaaaggagatcgtagtctttcgggaccaagctaagagaggaggatcgactgctcagtccggctactctggtggcgcgttctacacgacgcaatcgcaacgccctgctcctcctagcacacgcctttcgcctcttcctcctgaacctgccgacttctacaacgacttcgctaccccagtggatatccccatggacacaaacaaggacatgaagacaagggagaaggagcttctggccaaggaggccgagctgaacaggcgtgagaaggaaataaaaaggcgagaggatgctgcggcacgaggtggagtctcagagttcatcctggtatcgtgttggaagagaagaactggcccccgtttttccccatcattcataacgatatcggcaacgagatacctgtccatctgcaaagaacgctgtacgtcgcgttcgcgtcgctcttagggttggtcttgtgcctgttttggaacataatctgcattactgctgcctgggcaaaagggtcaggtcctaagatatggtttctcgcaatcatatacttcatcctcggatgccccggtgcatactacctttggtaccggccactataccgcgcaatgaggaacgagagcgctctcaagttcggatggtttttcctcttctacttgattcatatcgccttctgcgcgtacgcagctgtttctccttcaattctcttcgtgggaaaatcgttaaccgggattttgccagcaatcagcttgataggcgacagcgtcattgttggggtgagtgagtgagtctaccgctattattcagtctgaatccagtaaatcagaattccacaggataatagtacctatatttcctgcaaagacaaattgtacatacatcaaaagcatctcgcatggcatgttttatgtggacacgacaataactccgttcttggatgttaaaactattttgacaatctccagatcttctacttcattggctttgcattgttctgcctggaggctttgctaagcgtgtgggtcattcagcgcgtctacctgtacttccgagggagcgggaaagaagcggagatgaggcgtgaagcagcacgcggtgcagcgagggcagcgttttgatgaaaaccgtatatagatgatatatataggcacgacttacatactgttcataatagtttgaagtgctttaggtcaagaggcatgtgtgtacagtagggttggcgtcttgtacatctttaaggccggtttggtgaaacatggaaatggaatgaatccataaaggagagatccgttgttattcaaaattaaataacaaggatctcttctccatgggtcccatccattttcctctccaccaaaccagccctgagttcctatcgccacggtgttttgagccctccagattgatcaatcgtggtacatatgacagtgttagtatatggagtaaatacacatggacgggtaaacctagctagactctttgttccatatgtgcatttttgtgtcaccgccttgtatcaattatttatagacgtaatgaagttgtaatgatgttctcactcgagatttttgagtggggaaattgcaaaagcatacttatgtcaagggagttgtactcatacccacactccaaattaaagagctttcgtttttctctc

SEQ ID NO: 10387 - DNA, 2526 bp, Zea Mays
cccagctttcccgtaacgtaacgggacaccacacttctataccgtgcacgcgacgaccctgccgtcggaccggacccactgcgcacccaccgcccagcgggacccacgcggtccttgtcccctcactgcctgcgcagaatgtccccggcccccacccgctgaccccgcctccgcctccgccctccggcgaccccgatccccgccggcgaaatggcggcgtggtgctctgccgagtccaccaagccggtcttcgtcgggatctacggggccgtcctcggcggcttcgcggtctccgccctcttcttcctgctctcctccttctcctcgctctccgcgcccacgctccccctccccgccgcggccatcgctggggccaacctctccgcgcctactctcgcccaggctgaaaccatgtacaaccgccccatctggaagcccccgccccggcgggcgcggatgccctctccgcgcgcgttccgcctcacccgcgacatggtcgccgcccgcgcccgcgacggtgtgatcgtcgtcaccttcggcaactacgcctttctcgacttcatcctcacctgggttcgccacctcaccgacctcggcgtagacaacctcctcgtcggtgccatggacaccaagctgctccgggagctctacttccggggcgtgcccgtcttcgacatgggcagcaggatggtcaccgaggacgccgggtggggctccccaaccttccacaagatgggcagggagaaggtgctgctcatcaacgcgctcctgcctttcgggtacgagctgctcatgtgcgacactgacatggtatggctcaagaacccattgccctacctcgcccgataccccgacgcagatctcctcacgtccagcgatcaggtcatacccaccgtcaccgacgacagcctggagaactggagggaagttactggtgcgttcaacattggtatttttcattggcgacccactgaacctgctaaaaggctggcaaaagattggaaagatttagtcatatctgatgataagttgtgggaccagaatgcttttaatgatcttgtacgcaaaaaatttggacagccagttcaaggagatgatcttgtatattcttatgatgggaaactgaagctgggagtgctaccagcaagtatattttgtagcggccatacatattttgtgcagggcatgtataagcagcttcatttggaaccatatgctgttcatactacttttcagtatgcgggcactgaaggaaagcgccatagattgcgagaggcaatgcttttctttgatcaaccatcttattatgattctccaggaggtttcctgtcatttaaacctaacattccaaaaagtttgctattagatggtgctcatactgttgaatctcattttgagttggttaactaccagctgaagcaaataagaactgcacttgcggttgcgtccttgttaaagcggacactggtaatgcctccattatggtgcaggcttgatagaatgtggtttggacatcctggaattttagagggaacaatgaccagacaaccttttctctgcccactggatcatgtgtttgaggttcatgttatgctgaaggacttgcccaaggaagagtttggtcaacatattgatttcagagaatactcctttcttgagaatccatcattacctaaagaggtgaaagattcgttactcgaggttgaactttgtgacgagcatagctccagatgctctgcaattgatgaaatcgataagcatggaacctttcttttaccaagaaatagtactgaagaaaagctgttggatttgttgtcatcatataaggatgtcaaaatcatacaattctcatctatggttgatgccttcggtggttttgctgatgcagctgtggagaagaagttccgaaatcgtgtgaacagggtggaagccacaccctccagagactagggaacaggatcatccaccttggtcatgactactgacaagaagatgctagaaagatcgtgatgatgaagatctgagatcttctagggcaccctgctccaatcgattcttcaggccaattttgtgctgttctagttgtgttcttccatgggtcgctgctgttcgcttgtggccccttgttcgcagctcatcggtcgaagcatggggctcaatgatttagttgggacaacatttagatcacgacttagttccattttccatagtttttgcatcatgttcatagttgatacaggcatcagctccaaaggagaaaaggccattattgttaaatgttgtggaaaacttggctgccagctgctgcaataggaagctgtcgtaactgttgtgcaaaactttgcccccgctgctctgttaggaaatatttggagcagctatctttttgacacattgttctcaagtcttaaccatgaagcattgtcttaatatatataagaaggcatttggtcatatttgagcaacctcagtcgtagaatgataaatgattttcatcagcgaaaagtagatcaatatattttgacc

SEQ ID NO: 10388 - DNA, 2563 bp, Zea Mays
cccagctttcccgtaacgtaacgggacaccacacttctataccgtgcacgcgacgaccctgccgtcggaccggacccactgcgcacccaccgcccagcgggacccacgcggtccttgtcccctcactgcctgcgcagaatgtccccggcccccacccgctgaccccgcctccgcctccgccctccggcgaccccgatccccgccggcgaaatggcggcgtggtgctctgccgagtccaccaagccggtcttcgtcgggatctacggggccgtcctcggcggcttcgcggtctccgccctcttcttcctgctctcctccttctcctcgctctccgcgcccacgctccccctccccgccgcggccatcgctggggccaacctctccgcgcctactctcgcccaggctgaaaccatgtacaaccgccccatctggaagcccccgccccggcgggcgcggatgccctctccgcgcgcgttccgcctcacccgcgacatggtcgccgcccgcgcccgcgacggtgtgatcgtcgtcaccttcggcaactacgcctttctcgacttcatcctcacctgggttcgccacctcaccgacctcggcgtagacaacctcctcgtcggtgccatggacaccaagctgctccgggagctctacttccggggcgtgcccgtcttcgacatgggcagcaggatggtcaccgaggacgccgggtggggctccccaaccttccacaagatgggcagggagaaggtgctgctcatcaacgcgctcctgcctttcgggtacgagctgctcatgtgcgacactgacatggtatggctcaagaacccattgccctacctcgcccgataccccgacgcagatctcctcacgtccagcgatcaggtcatacccaccgtcaccgacgacagcctggagaactggagggaagttactggtgcgttcaacattggtatttttcattggcgacccactgaacctgctaaaaggctggcaaaagattggaaagatttagtcatatctgatgataagttgtgggaccagaatgcttttaatgatcttgtacgcaaaaaatttggacagccagttcaaggagatgatcttgtatattcttatgatgggaaactgaagctgggagtgctaccagcaagtatattttgtagcggccatacatattttgtgcagggcatgtataagcagcttcatttggaaccatatgctgttcatactacttttcagtatgcgggcactgaaggaaagcgccatagattgcgagaggaggtttcctgtcatttaaacctaacattccaaaaagtttgctattagatggtgctcatactgttgaatctcattttgagttggttaactaccagctgaagcaaataagaactgcacttgcggttgcgtccttgttaaagcggacactggtaatgcctccattatggtgcaggcttgatagaatgtggtttggacatcctggaattttagagggaacaatgaccagacaaccttttctctgcccactggatcatgtgtttgaggttcatgttatgctgaaggacttgcccaaggaagagtttggtcaacatattgatttcagagaatactcctttcttgagaatccatcattacctaaagaggtgaaagattcgttactcgaggttgaactttgtgacgagcatagctccagatgctctgcaattgatgaaatcgataagcatggaacctttcttttaccaagaaatagtactgaagaaaagctgttggatttgttgtcatcatataaggatgtcaaaatcatacaattctcatctatggttgatgccttcggtggttttgctgatgcagctgtggagaagaagttccgaaatcgtgtgaacaggtatgtgggcctatggtgctgtgtggagttccgtgaaattggtcacatatattatgacatgtactgggacgagaaaccagggtggaagccacaccctccagagactagggaacaggatcatccaccttggtcatgactactgacaagaagatgctagaaagatcgtgatgatgaagatctgagatcttctagggcaccctgctccaatcgattcttcaggccaattttgtgctgttctagttgtgttcttccatgggtcgctgctgttcgcttgtggccccttgttcgcagctcatcggtcgaagcatggggctcaatgatttagttgggacaacatttagatcacgacttagttccattttccatagtttttgcatcatgttcatagttgatacaggcatcagctccaaaggagaaaaggccattattgttaaatgttgtggaaaacttggctgccagctgctgcaataggaagctgtcgtaactgttgtgcaaaactttgcccccgctgctctgttaggaaatatttggagcagctatctttttgacacattgttctcaagtcttaaccatgaagcattgtcttaatatatataagaaggcatttggtcatatttgagcaacctcagtcgtagaatgataaatgattttcatcagcgaaaagtagatcaatatattttgacc

SEQ ID NO: 10389 - DNA, 2542 bp, Zea Mays
cccagctttcccgtaacgtaacgggacaccacacttctataccgtgcacgcgacgaccctgccgtcggaccggacccactgcgcacccaccgcccagcgggacccacgcggtccttgtcccctcactgcctgcgcagaatgtccccggcccccacccgctgaccccgcctccgcctccgccctccggcgaccccgatccccgccggcgaaatggcggcgtggtgctctgccgagtccaccaagccggtcttcgtcgggatctacggggccgtcctcggcggcttcgcggtctccgccctcttcttcctgctctcctccttctcctcgctctccgcgcccacgctccccctccccgccgcggccatcgctggggccaacctctccgcgcctactctcgcccaggctgaaaccatgtacaaccgccccatctggaagcccccgccccggcgggcgcggatgccctctccgcgcgcgttccgcctcacccgcgacatggtcgccgcccgcgcccgcgacggtgtgatcgtcgtcaccttcggcaactacgcctttctcgacttcatcctcacctgggttcgccacctcaccgacctcggcgtagacaacctcctcgtcggtgccatggacaccaagctgctccgggagctctacttccggggcgtgcccgtcttcgacatgggcagcaggatggtcaccgaggacgccgggtggggctccccaaccttccacaagatgggcagggagaaggtgctgctcatcaacgcgctcctgcctttcgggtacgagctgctcatgtgcgacactgacatggtcatacccaccgtcaccgacgacagcctggagaactggagggaagttactggtgcgttcaacattggtatttttcattggcgacccactgaacctgctaaaaggctggcaaaagattggaaagatttagtcatatctgatgataagttgtgggaccagaatgcttttaatgatcttgtacgcaaaaaatttggacagccagttcaaggagatgatcttgtatattcttatgatgggaaactgaagctgggagtgctaccagcaagtatattttgtagcggccatacatattttgtgcagggcatgtataagcagcttcatttggaaccatatgctgttcatactacttttcagtatgcgggcactgaaggaaagcgccatagattgcgagaggcaatgcttttctttgatcaaccatcttattatgattctccaggaggtttcctgtcatttaaacctaacattccaaaaagtttgctattagatggtgctcatactgttgaatctcattttgagttggttaactaccagctgaagcaaataagaactgcacttgcggttgcgtccttgttaaagcggacactggtaatgcctccattatggtgcaggcttgatagaatgtggtttggacatcctggaattttagagggaacaatgaccagacaaccttttctctgcccactggatcatgtgtttgaggtaattctgttcatgttatgctgaaggacttgcccaaggaagagtttggtcaacatattgatttcagagaatactcctttcttgagaatccatcattacctaaagaggtgaaagattcgttactcgaggttgaactttgtgacgagcatagctccagatgctctgcaattgatgaaatcgataagcatggaacctttcttttaccaagaaatagtactgaagaaaagctgttggatttgttgtcatcatataaggatgtcaaaatcatacaattctcatctatggttgatgccttcggtggttttgctgatgcagctgtggagaagaagttccgaaatcgtgtgaacaggtatgtgggcctatggtgctgtgtggagttccgtgaaattggtcacatatattatgacatgtactgggacgagaaaccagggtggaagccacaccctccagagactagggaacaggatcatccaccttggtcatgactactgacaagaagatgctagaaagatcgtgatgatgaagatctgagatcttctagggcaccctgctccaatcgattcttcaggccaattttgtgctgttctagttgtgttcttccatgggtcgctgctgttcgcttgtggccccttgttcgcagctcatcggtcgaagcatggggctcaatgatttagttgggacaacatttagatcacgacttagttccattttccatagtttttgcatcatgttcatagttgatacaggcatcagctccaaaggagaaaaggccattattgttaaatgttgtggaaaacttggctgccagctgctgcaataggaagctgtcgtaactgttgtgcaaaactttgcccccgctgctctgttaggaaatatttggagcagctatctttttgacacattgttctcaagtcttaaccatgaagcattgtcttaatatatataagaaggcatttggtcatatttgagcaacctcagtcgtagaatgataaatgattttcatcagcgaaaagtagatcaatatattttgacc

SEQ ID NO: 10390 - DNA, 2511 bp, Zea Mays
cccagctttcccgtaacgtaacgggacaccacacttctataccgtgcacgcgacgaccctgccgtcggaccggacccactgcgcacccaccgcccagcgggacccacgcggtccttgtcccctcactgcctgcgcagaatgtccccggcccccacccgctgaccccgcctccgcctccgccctccggcgaccccgatccccgccggcgaaatggcggcgtggtgctctgccgagtccaccaagccggtcttcgtcgggatctacggggccgtcctcggcggcttcgcggtctccgccctcttcttcctgctctcctccttctcctcgctctccgcgcccacgctccccctccccgccgcggccatcgctggggccaacctctccgcgcctactctcgcccaggctgaaaccatgtacaaccgccccatctggaagcccccgccccggcgggcgcggatgccctctccgcgcgcgttccgcctcacccgcgacatggtcgccgcccgcgcccgcgacggtgtgatcgtcgtcaccttcggcaactacgcctttctcgacttcatcctcacctgggttcgccacctcaccgacctcggcgtagacaacctcctcgtcggtgccatggacaccaagctgctccgggagctctacttccggggcgtgcccgtcttcgacatgggcagcaggatggtcaccgaggacgccgggtggggctccccaaccttccacaagatgggcagggagaaggtgctgctcatcaacgcgctcctgcctttcgggtacgagctgctcatgtgcgacactgacatggtcatacccaccgtcaccgacgacagcctggagaactggagggaagttactggtgcgttcaacattggtatttttcattggcgacccactgaacctgctaaaaggctggcaaaagattggaaagatttagtcatatctgatgataagttgtgggaccagaatgcttttaatgatcttgtacgcaaaaaatttggacagccagttcaaggagatgatcttgtatattcttatgatgggaaactgaagctgggagtgctaccagcaagtatattttgtagcggccatacatattttgtgcagggcatgtataagcagcttcatttggaaccatatgctgttcatactacttttcagtatgcgggcactgaaggaaagcgccatagattgcgagaggcaatgcttttctttgatcaaccatcttattatgattctccaggaggtttcctgtcatttaaacctaacattccaaaaagtttgctattagatggtgctcatactgttgaatctcattttgagttggttaactaccagctgaagcaaataagaactgcacttgcggttgcgtccttgttaaagcggacactggcttgatagaatgtggtttggacatcctggaattttagagggaacaatgaccagacaaccttttctctgcccactggatcatgtgtttgaggttcatgttatgctgaaggacttgcccaaggaagagtttggtcaacatattgatttcagagaatactcctttcttgagaatccatcattacctaaagaggtgaaagattcgttactcgaggttgaactttgtgacgagcatagctccagatgctctgcaattgatgaaatcgataagcatggaacctttcttttaccaagaaatagtactgaagaaaagctgttggatttgttgtcatcatataaggatgtcaaaatcatacaattctcatctatggttgatgccttcggtggttttgctgatgcagctgtggagaagaagttccgaaatcgtgtgaacaggtatgtgggcctatggtgctgtgtggagttccgtgaaattggtcacatatattatgacatgtactgggacgagaaaccagggtggaagccacaccctccagagactagggaacaggatcatccaccttggtcatgactactgacaagaagatgctagaaagatcgtgatgatgaagatctgagatcttctagggcaccctgctccaatcgattcttcaggccaattttgtgctgttctagttgtgttcttccatgggtcgctgctgttcgcttgtggccccttgttcgcagctcatcggtcgaagcatggggctcaatgatttagttgggacaacatttagatcacgacttagttccattttccatagtttttgcatcatgttcatagttgatacaggcatcagctccaaaggagaaaaggccattattgttaaatgttgtggaaaacttggctgccagctgctgcaataggaagctgtcgtaactgttgtgcaaaactttgcccccgctgctctgttaggaaatatttggagcagctatctttttgacacattgttctcaagtcttaaccatgaagcattgtcttaatatatataagaaggcatttggtcatatttgagcaacctcagtcgtagaatgataaatgattttcatcagcgaaaagtagatcaatatattttgacc

SEQ ID NO: 10391 - DNA, 2470 bp, Zea Mays
cccagctttcccgtaacgtaacgggacaccacacttctataccgtgcacgcgacgaccctgccgtcggaccggacccactgcgcacccaccgcccagcgggacccacgcggtccttgtcccctcactgcctgcgcagaatgtccccggcccccacccgctgaccccgcctccgcctccgccctccggcgaccccgatccccgccggcgaaatggcggcgtggtgctctgccgagtccaccaagccggtcttcgtcgggatctacggggccgtcctcggcggcttcgcggtctccgccctcttcttcctgctctcctccttctcctcgctctccgcgcccacgctccccctccccgccgcggccatcgctggggccaacctctccgcgcctactctcgcccaggctgaaaccatgtacaaccgccccatctggaagcccccgccccggcgggcgcggatgccctctccgcgcgcgttccgcctcacccgcgacatggtcgccgcccgcgcccgcgacggtgtgatcgtcgtcaccttcggcaactacgcctttctcgacttcatcctcacctgggttcgccacctcaccgacctcggcgtagacaacctcctcgtcggtgccatggacaccaagctgctccgggagctctacttccggggcgtgcccgtcttcgacatgggcagcaggatggtcaccgaggacgccgggtggggctccccaaccttccacaagatgggcagggagaaggtgctgctcatcaacgcgctcctgcctttcgggtacgagctgctcatgtgcgacactgacatggtatggctcaagaacccattgccctacctcgcccgataccccgacgcagatctcctcacgtccagcgatcaggtcatacccaccgtcaccgacgacagcctggagaactggagggaagttactggtgcgttcaacattggtatttttcattggcgacccactgaacctgctaaaaggctggcaaaagattggaaagatttagtcatatctgatgataagttgtgggaccagaatgcttttaatgatcttgtacgcaaaaaatttggacagccagttcaaggagatgatcttgtatattcttatgatgggaaactgaagctgggagtgctaccagcaagtatattttgtagcggccatacatattttgtgcaggaggtttcctgtcatttaaacctaacattccaaaaagtttgctattagatggtgctcatactgttgaatctcattttgagttggttaactaccagctgaagcaaataagaactgcacttgcggttgcgtccttgttaaagcggacactggtaatgcctccattatggtgcaggcttgatagaatgtggtttggacatcctggaattttagagggaacaatgaccagacaaccttttctctgcccactggatcatgtgtttgaggttcatgttatgctgaaggacttgcccaaggaagagtttggtcaacatattgatttcagagaatactcctttcttgagaatccatcattacctaaagaggtgaaagattcgttactcgaggttgaactttgtgacgagcatagctccagatgctctgcaattgatgaaatcgataagcatggaacctttcttttaccaagaaatagtactgaagaaaagctgttggatttgttgtcatcatataaggatgtcaaaatcatacaattctcatctatggttgatgccttcggtggttttgctgatgcagctgtggagaagaagttccgaaatcgtgtgaacaggtatgtgggcctatggtgctgtgtggagttccgtgaaattggtcacatatattatgacatgtactgggacgagaaaccagggtggaagccacaccctccagagactagggaacaggatcatccaccttggtcatgactactgacaagaagatgctagaaagatcgtgatgatgaagatctgagatcttctagggcaccctgctccaatcgattcttcaggccaattttgtgctgttctagttgtgttcttccatgggtcgctgctgttcgcttgtggccccttgttcgcagctcatcggtcgaagcatggggctcaatgatttagttgggacaacatttagatcacgacttagttccattttccatagtttttgcatcatgttcatagttgatacaggcatcagctccaaaggagaaaaggccattattgttaaatgttgtggaaaacttggctgccagctgctgcaataggaagctgtcgtaactgttgtgcaaaactttgcccccgctgctctgttaggaaatatttggagcagctatctttttgacacattgttctcaagtcttaaccatgaagcattgtcttaatatatataagaaggcatttggtcatatttgagcaacctcagtcgtagaatgataaatgattttcatcagcgaaaagtagatcaatatattttgacc

SEQ ID NO: 10392 - DNA, 2540 bp, Zea Mays
cccagctttcccgtaacgtaacgggacaccacacttctataccgtgcacgcgacgaccctgccgtcggaccggacccactgcgcacccaccgcccagcgggacccacgcggtccttgtcccctcactgcctgcgcagaatgtccccggcccccacccgctgaccccgcctccgcctccgccctccggcgaccccgatccccgccggcgaaatggcggcgtggtgctctgccgagtccaccaagccggtcttcgtcgggatctacggggccgtcctcggcggcttcgcggtctccgccctcttcttcctgctctcctccttctcctcgctctccgcgcccacgctccccctccccgccgcggccatcgctggggccaacctctccgcgcctactctcgcccaggctgaaaccatgtacaaccgccccatctggaagcccccgccccggcgggcgcggatgccctctccgcgcgcgttccgcctcacccgcgacatggtcgccgcccgcgcccgcgacggtgtgatcgtcgtcaccttcggcaactacgcctttctcgacttcatcctcacctgggttcgccacctcaccgacctcggcgtagacaacctcctcgtcggtgccatggacaccaagctgctccgggagctctacttccggggcgtgcccgtcttcgacatgggcagcaggatggtcaccgaggacgccgggtggggctccccaaccttccacaagatgggcagggagaaggtgctgctcatcaacgcgctcctgcctttcgggtacgagctgctcatgtgcgacactgacatggtatggctcaagaacccattgccctacctcgcccgataccccgacgcagatctcctcacgtccagcgatcaggtcatacccaccgtcaccgacgacagcctggagaactggagggaagttactggtgcgttcaacattggtatttttcattggcgacccactgaacctgctaaaaggctggcaaaagattggaaagatttagtcatatctgatgataagttgtgggaccagaatgcttttaatgatcttgtacgcaaaaaatttggacagccagttcaaggagatgatcttgtatattcttatgatgggaaactgaagctgggagtgctaccagcaagtatattttgtagcggccatacatattttgtgcagggcatgtataagcagcttcatttggaaccatatgctgttcatactacttttcagtatgcgggcactgaaggaaagcgccatagattgcgagaggaggtttcctgtcatttaaacctaacattccaaaaagtttgctattagatggtgctcatactgttgaatctcattttgagttggttaactaccagctgaagcaaataagaactgcacttgcggttgcgtccttgttaaagcggacactggcttgatagaatgtggtttggacatcctggaattttagagggaacaatgaccagacaaccttttctctgcccactggatcatgtgtttgaggttcatgttatgctgaaggacttgcccaaggaagagtttggtcaacatattgatttcagagaatactcctttcttgagaatccatcattacctaaagaggtgaaagattcgttactcgaggttgaactttgtgacgagcatagctccagatgctctgcaattgatgaaatcgataagcatggaacctttcttttaccaagaaatagtactgaagaaaagctgttggatttgttgtcatcatataaggatgtcaaaatcatacaattctcatctatggttgatgccttcggtggttttgctgatgcagctgtggagaagaagttccgaaatcgtgtgaacaggtatgtgggcctatggtgctgtgtggagttccgtgaaattggtcacatatattatgacatgtactgggacgagaaaccagggtggaagccacaccctccagagactagggaacaggatcatccaccttggtcatgactactgacaagaagatgctagaaagatcgtgatgatgaagatctgagatcttctagggcaccctgctccaatcgattcttcaggccaattttgtgctgttctagttgtgttcttccatgggtcgctgctgttcgcttgtggccccttgttcgcagctcatcggtcgaagcatggggctcaatgatttagttgggacaacatttagatcacgacttagttccattttccatagtttttgcatcatgttcatagttgatacaggcatcagctccaaaggagaaaaggccattattgttaaatgttgtggaaaacttggctgccagctgctgcaataggaagctgtcgtaactgttgtgcaaaactttgcccccgctgctctgttaggaaatatttggagcagctatctttttgacacattgttctcaagtcttaaccatgaagcattgtcttaatatatataagaaggcatttggtcatatttgagcaacctcagtcgtagaatgataaatgattttcatcagcgaaaagtagatcaatatattttgacc

SEQ ID NO: 10393 - DNA, 806 bp, Zea Mays
atagctttaagttaatcaaatagaaggcatgataaactattgcgatgaaggagcttagagcgcgcaagatacccttcacgatcagacggtacctacctgatggaagtgaatgaaccaagacgaaacgatgctatgctagatgttaccttgacgtctgtggttgccttggaactctggaaccgtgatggctggtggacggtggttgagttatgcttgttcgtttcagtttcagacatgctgtgcagatgattcgtaaactgactcgtctttcattcatttggaagggtttatcgtatcttgctatcttttgtaatgagttgtatgctacatccggcatgagaccatgttgctgttgcttgtttcattaaactccaacggtttccataggagaggagcaaatccagatgggtagttcacagcatagctgagcggaaagtatgcagaccagagcatggcgtatttggtgtgttccatgctactgctctgtttaagactgttttgtatcagagtttgcaaagatggataccatgtatccagatcatcttgctcattgatgcgtttttactgtggtattctggctaaatacaggtatgcttcatgtatcacatgatgacaaacttgacagacatttgtgtggatcacgtttgctgctgctgcctccctccctcggattgagatggagctccttcatcattcctcggaatcagactcgagggggcaggagccgtcgtcgacggtggccagcgggtcgaacatgtcggagctggggtccgtgcatccgctcacgatgtccagcttgcaccgat

SEQ ID NO: 10394 - DNA, 1273 bp, Zea Mays
aactacacccgcatccaaacaataacattggtattgtagatcaatttcatttctccttaaatttggtatttctagaccaattcaatttcaccacttgtaacgggaaaaaggcacttccccccgcaagccaaaaccctagcaagcaaaccaccggagcagcggcgctcgcgcgggcggagccatggcggacgacgattacaacgaaatcgacatgggctatgaggatgagcctccagaacctgagattgaggaaggggccgaagaagagcttgagaacaacgaagatgcccctgatgatgtcataggtggagagggtgaagataaggaacaggaaaagaccaagcgtgagcgcaaaacaacaaaatatatgacgaagtatgaacgtgcgcgcattcttgcatgaatgctccagtcatggttgagcttgagggagaaactgaccctcttgagattgcgatgaaggagcttagagcgcgcaagatacccttcacgatcagacggtacctacctgatggaagttatgaagactggggagtagacgagctcattgtggaggactcctggaaacgccagtgaatgaaccaagacgaaacgatgctatgctagatgttaccttgacgtctgtggttgccttggaactctggaaccgtgatggctggtggacggtggttgagttatgcttgttcgtttcagtttcagacatgctgtgcagatgattcgtaaactgactcgtctttcattcatttggaagggtttatcgtatcttgctatcttttgtaatgagttgtatgctacatccggcatgagaccatgttgctgttgcttgtttcattaaactccaacggtttccataggagaggagcaaatccagatgggtagttcacagcatagctgagcggaaagtatgcagaccagagcatggcgtatttggtgtgttccatgctactgctctgtttaagactgttttgtatcagagtttgcaaagatggataccatgtatccagatcatcttgctcattgatgcgtttttactgtggtattctggctaaatacaggtatgcttcatgtatcacatgatgacaaacttgacagacatttgtgtggatcacgtttgctgctgctgcctccctccctcggattgagatggagctccttcatcattcctcggaatcagactcgagggggcaggagccgtcgtcgacggtggccagcgggtcgaacatgtcggagctggggtccgtgcatccgctcacgatgtccagcttgcaccgat

SEQ ID NO: 10395 - DNA, 1295 bp, Zea Mays
aactacacccgcatccaaacaataacattggtattgtagatcaatttcatttctccttaaatttggtatttctagaccaattcaatttcaccacttgtaacgggaaaaaggcacttccccccgcaagccaaaaccctagcaagcaaaccaccggagcagcggcgctcgcgcgggcggagccatggcggacgacgattacaacgaaatcgacatgggctatgaggatgagcctccagaacctgagattgaggaaggggccgaagaagagcttgagaacaacgaagatgcccctgatgatgtcataggtggagagggtgaagataaggaacaggaaaagaccaagcgtgagcgcaaaacaacaaaatatatgacgaagtatgaacgtgcgcgcattcttggtacacgagccttgcagataagcatgaatgctccagtcatggttgagcttgagggagaaactgaccctcttgagattgcgatgaaggagcttagagcgcgcaagatacccttcacgatcagacggtacctacctgatggaagttatgaagactggggagtagacgagctcattgtggaggactcctggaaacgccagtgaatgaaccaagacgaaacgatgctatgctagatgttaccttgacgtctgtggttgccttggaactctggaaccgtgatggctggtggacggtggttgagttatgcttgttcgtttcagtttcagacatgctgtgcagatgattcgtaaactgactcgtctttcattcatttggaagggtttatcgtatcttgctatcttttgtaatgagttgtatgctacatccggcatgagaccatgttgctgttgcttgtttcattaaactccaacggtttccataggagaggagcaaatccagatgggtagttcacagcatagctgagcggaaagtatgcagaccagagcatggcgtatttggtgtgttccatgctactgctctgtttaagactgttttgtatcagagtttgcaaagatggataccatgtatccagatcatcttgctcattgatgcgtttttactgtggtattctggctaaatacaggtatgcttcatgtatcacatgatgacaaacttgacagacatttgtgtggatcacgtttgctgctgctgcctccctccctcggattgagatggagctccttcatcattcctcggaatcagactcgagggggcaggagccgtcgtcgacggtggccagcgggtcgaacatgtcggagctggggtccgtgcatccgctcacgatgtccagcttgcaccgat

SEQ ID NO: 10396 - DNA, 4381 bp, Zea Mays
ccgcctattggcctcgtccgcttccgcttcgacccctccccggcccgcctcggcctcgcgctccctcctcctcctcctcctcctcgcctccgcacccgggcaacccccgccctgccacggcgccgcggccagagccaggctctcccgcgtggaattcacgggacggaggccgctggtgccgcccgccgccgcctccgccaagatggacgccggggagatggaggacgtgcgggccgccgcggccgccgaggaggtcatcagcagcaggggcggctccgtgctggggaagaagaccatcctcaagagcgaccacttcccgggctgccagaacaagcgcctctccccgcagatcgacggcgcgcccaattaccgccaggctgggtcgctgcgtgttcatggtgttgcaatgcccacgatggaagggattgctaatgtgctaaatcatatcggagcacacaagaaaggaaagcaaacccggattctatggcatagtcttcgggaggaaccagttatctacatcaatggtcgaccctttgttttgcgggatgttgaaaagcccttctcgaatcttgaatacacgggaattaaccgggagagagtggaacaaatggagtttcgccttaaggaagatattcttcaggaagcttcaaggtatggtaataagatactggtcactgatgagctgccaagtggtcagatggtggatcagtgggaatcagttgtgtatgatacagttaagactccacttgaggtatatgaggagttgcaacatcaaggctacctagttgactacgaacgtgttccaattactgatgagaaagcaccaaaggaaggagattttgacaacctggtacgtcgaatctctcaagttgatatagaaacagaaattgtgtttaactgccaaatggggagggggcggacaactactggtatggttatagctacattggtttacctaaaccgaattggagcttcaggtatccctagaacgggctctattgggaaggtcttctatgctggaaatgatgtagacgattatatgcctagctcagaagaagcaatactcagaggcgaatatgctgtcattaggagtttagtccgagttctcgaaggtggtgttgaaggcaaaaggcaagtggacaaagttattgacaaatgcgactccatgcagaacctaagagaagctattgctacttaccgcaataacattcttcggcaacctgatgagatgaaacgagaggcatcactttccttctttgtggagtacttggaacgttattacttccttatatgctttgctgtctatgtgcattcggctattgagaagagatccaatgggtgctcttggttactcaagttcaaaaccccctcttacaaaaattgttgagtctgctaatgggcgtccacaagatatggacgttgttgctgccatgaggaatggagaagttcttgggcgtctaactgttttaaaaagcgaccactgcccaggcagccacagccttaatttacccgagagggtggagggtgcaccaaattttcgggaaatccctgggtttccagtctatggtgttgcaaatcctacagttgatggtattcgagctgttatccagtgcatcagtacaagcaagggagggcgacctgtgctatggcataatatgagagaagaaccagttatctacataaatggaaaaccatatgtgctacgcgaagtggaaagaccttgcaagaatatgctggagtacacagggattgatcgtgatagggtcgaacgcatggaagctcggctgaaggaggacattttacgcgaggcagaaagatatggtggagcgataatggttattcatgaaactgacgatggagagatctttgacacatgggaaaatgtagataatgaagctgttctgactccgttggaggtatacaaaaacttggtgagtgaaggccttccgatcaaatatgcacgggtgcccattactgatggtaaagctcccaaaagttcagactttgacacgatagccttcaatgttactgctgctagcaagggcactgctttcgtattcaattgccagatgggcaggggcagaacaactacaggaactgtgattgcttgcttgctgaaacttcgaattgatcatggcagacctattagaatcccagtttgtcaatatgaccatgaagatgatgctatttactcaactggaggagatgcaacagatcacaatggtcacttgaattcagaatcatggaaacctcgtactttgacgaagttaaattctggatttggaatcaatgacattcttctgctgcgaaaaattacaagattatttgataatggaattgagtgtaggcagactttggatactgttattgatagatgttcagctttgcagaatattcggcaagctgttttgaactacacaagagtaattaatcaacaacatgttgagcctagagttaggagggttgcattaaatcgtggcgctgaatatttggagagatacctcaaattaattgccttttctgcataccttggtagtgaagcatttgatggtttctgtggacaaggacaaacaaagatctcatttaaaggatggctgcaacagcggccagagatccaaaccatgaaatggagcataagactgcgacctggccgttttttcactgtgccgcatgagcagaaagcaacatatccacctccacaaggtgatgtaacaatggaaaccattgtcaaagctcgtagtggttctgttctgggaaagggatcaatactcaaaatgtacttctttcctggacagaaaaggtcaagcagtgtgaatttccggggtgcacctcatgttattaaggtggatggataccctgtgtatagcatggcaacacccactattgatggagcgagtgatgttttgtcgtatctgggctctaaagacacaaccggaagaaacattgcacagaaggtggtcgtcacagatcttagagaggaagtggttgtttacatcaagggatcgccatttgttttgagagaactagatcaacctgttgatactttgaagcatgttggcattagtggtccaatggtagagaacatagagacaaggctaaaggaggatatactctctgaagttaaacagctaggtggtcggttactgcttcatcaagaagaatttaatgcagccacaaatcaatgtagtgtggtaggttactgggaacacatagatctggaggacgtgatgacaccagctgaagtgtacagcacattgagagacaagggctattgtatcgagtacaaaagaatacctctaaccagggaaagagaagcattagctgccgatgtagatgctatacaatcatcaattgatgaatctgctaggtactatctctttatttcacacactggatatggaggtgttgcttatgcgatggccattacctgcctgggactgagtgcagatgcaaagtttgtaatggaagaaacagcagaaacacactttgtatcaacatctcttgcgaaaaatgtgtccatcaaaactaaaactgacatagcacttaagcagggtgactaccgtgacatattaaaccttactagagtgttggtacatgggcccaagagcaaagaagaggttgacacagttattgacaggtgttctggtgctggtcatctgcgcgaagatattatgcattacaggaaagcactgcaagattgttcacatgacgacgacgacgactgtgatgaggaacactcttatctcactgatatgggcacaaaagctttgaggcgttacttttttctgatcaccttcagatcctacctatacagcacgacatcatgcaaaacaacatttacatcatggatgaaggcaaggcctgaacttggccacctttgcgacaatctaaagctggacaaataggccatcttcatgtgacgtgattatgtagttgtgtcacttccttggacacattcacccagagtttcaaaaaggaaggagactaaaagaacgggtagagaggaagcagtggttatgggagttgtggacaatgaaagagcagcttaggctgtccgaaagtagggcattgtactatacttgtcggtgttaattgacaccagcaagcatgtatatattgtcaggcgtattatagatgaacatattagatatttctattgtagtattttctcaaattttaaaagaatcatttcatgcagttcattctcatgtatgtatctgatatgcttgctttttcagcagcgtttttttagacaaagctcttcggcagctttgatttttgacttctctgccttctgggcgtcaatatggccgcagccttttctaggagttgtattgagctaggatgaagcttgaaagaaatacgatgtcttgtttctaaa

SEQ ID NO: 10397 - DNA, 1885 bp, Zea Mays
ctccttacctcaatttgctgtgggttaacctaattatggatactttgggtgcccttgcattggcgacagaaccacctacaaaccatcttatggagagacccccagtagggagaagggagccattgattataaatatcatgtggagaaacttaattatcatggctttgtttcaagtttcatttctcctcactctcaacttcaagggaataagcctcctgcagttgaaaaatgatgatccagcacatgcagataaagtgaaaaataccttcatattcaacacatttgttttctgccaggttctgcgttttagcttttgcttataaaagaagtttctgccttttgtctaatgcgactccagagctttatgcaacaaatgcagtagtggcctgacatgtgtaattttgtcttcttaggtgttcaacgaattcaattcgtgtaaaccagatgagctgaatgtattcaagggcatttcagagaaccatctgtttattggcatcatagctataacagttgtactccaggtagaatctctagaatgagtttcctttcttaactaagataaattgatttaggtctaagaaactgttttagatcacctggactttgccacgaataccttttatcagaaaatggggggaacgataaaggatgctggaaaatgaaatatattattatagctaataaattggctttcctggaggaactaggatttggacccagccaagtggccaagtgtatggaagaatcgtgtcgtggcacagacgaccagctgcttgactctccctcttctgtctgatcacatttgtacgcaagatatagatagtactactatacagtggagtcttcttgcagtttgtctattttacacaactgacatagtcttcaggtatctcattgtctgttcttatttagttatattaatgatgtttactattaattttgaccatcacaacttcgacttgtccagctctgcctctatttgtcggttcagctctgcttctataatttttttggtccactgtacaatgggctcctttattacctccttgagaatccttttcagtttggtccactgtctcatcatccatcgaatcacggccgaggcacacaatctaaaaggcaaaagaattatagaggcagagctggacatagtcttcaggtatctcattgtctgttctcagatagtactacaatgatctagcctctataaaatttattttagtgattcattgcatcatattactcctatctttttgcaatatagtttggattcacattagccttgtaacaaaaaataaattctcaaaacattattatgatactcctaattagattggtacgctagacaatgtgccatacaactaattcgtttgaattttgcatgcagttgaatttaaggttcctcttcccttgtttggaagaggttatgatcattgtacgctcccggctcaatgttgaacactcttgaagtacactgtgaagttgcagaggatggtcatcagaatctcaaagatcaagaattgccataaaggtgctgatgagttctttgatgatatatgtaatttcaattacatgaactataagaaagtgcaaattgaataagtagagatgatataatattacatatttatatcatcaaaataatattaatattacgatgatattttatcacaaggattttgcatatcatggtgacgtttgtcgtttcgtatctatgttttatattaactttaaactccgtggcaacgcacgggtacatacctagtaaagtacataatttcaataatctgattagaagaatggcatttatgctattcaatgtacaatctaattctactaaatataccctaaataacggatatgcaatcgatgtataaaatttctg

SEQ ID NO: 10398 - DNA, 1891 bp, Zea Mays
tcggccctctccttacctcaatgtctacacaagatgtgaagtttatacaattccaactaacggtcaacgtcgcagctctgataatcaatgtagttgctgctgtcagttctggaaacgtgccgttgaatgatgttcagttgctgtgggttaacctaattatggatactttgggtgcccttgcattggcgacagaaccacctacaaaccatcttatggagagacccccagtagggagaagggagccattgattataaatatcatgtggagaaacttaattatcatggctttgtttcaagtttcatttctcctcactctcaacttcaagggaataagcctcctgcagttgaaaaatgatgatccagcacatgcagataaagtgaaaaataccttcatattcaacacatttgttttctgccaggtgttcaacgaattcaattcgtgtaaaccagatgagctgaatgtattcaagggcatttcagagaaccatctgtttattggcatcatagctataacagttgtactccaggtagaatctctagaatgagtttcctttcttaactaagataaattgatttaggtctaagaaactgttttagatcacctggactttgccacgaataccttttatcagaaaatggggggaacgataaaggatgctggaaaatgaaatatattattatagctaataaattggctttcctggaggaactaggatttggacccagccaagtggccaagtgtatggaagaatcgtgtcgtggcacagacgaccagctgcttgactctccctcttctgtctgatcacatttgtacgcaagatatagatagtactactatacagtggagtcttcttgcagtttgtctattttacacaactgacatagtcttcaggtatctcattgtctgttcttatttagttatattaatgatgtttactattaattttgaccatcacaacttcgacttgtccagctctgcctctatttgtcggttcagctctgcttctataatttttttggtccactgtacaatgggctcctttattacctccttgagaatccttttcagtttggtccactgtctcatcatccatcgaatcacggccgaggcacacaatctaaaaggcaaaagaattatagaggcagagctggacatagtcttcaggtatctcattgtctgttctcagatagtactacaatgatctagcctctataaaatttattttagtgattcattgcatcatattactcctatctttttgcaatatagtttggattcacattagccttgtaacaaaaaataaattctcaaaacattattatgatactcctaattagattggtacgctagacaatgtgccatacaactaattcgtttgaattttgcatgcagttgaatttaaggttcctcttcccttgtttggaagaggttatgatcattgtacgctcccggctcaatgttgaacactcttgaagtacactgtgaagttgcagaggatggtcatcagaatctcaaagatcaagaattgccataaaggtgctgatgagttctttgatgatatatgtaatttcaattacatgaactataagaaagtgcaaattgaataagtagagatgatataatattacatatttatatcatcaaaataatattaatattacgatgatattttatcacaaggattttgcatatcatggtgacgtttgtcgtttcgtatctatgttttatattaactttaaactccgtggcaacgcacgggtacatacctagtaaagtacataatttcaataatctgattagaagaatggcatttatgctattcaatgtacaatctaattctactaaatataccctaaataacggatatgcaatcgatgtataaaatttctg

SEQ ID NO: 10399 - DNA, 3006 bp, Zea Mays
atgcccgcgcgtgccctcgcctccgccgccctcgcgacgctgcgccctcccccgcgatgcccgcgccctccgtccgccgcgagatccccgcccttccctcaaaccctgtcctgcacctcgtgcctccgcctccactcgcgatgctcctgcccgccccaccgccgtgacaaccgccttcgcatccgccgccagatccccgcccttcccccaaaccctgcccccatcgtctctgcagatccggcgttcgctcgggtctccttgcctcgccggggtcccaccgcgatggtcgaggagcatggtgggcgcggggaggcgggaacgagcggcggaggagatgtcgagtacgacgacgatgactcgatgcgtcccaccgccgagcccgccaaggaggaggacatcgagggagctgtgtgcagcgccccctgtcgtcgcgccgtcaggaatactaccccctccccctcgcgcgacatggtggatgcacgggccagtaccggtggtgaggatcccacggccgtggacgtcgtcgtgacacaactagctctgcaccggctgcgtccacctctagactttcttgcatcgcctatcgccctgctggaagattgtaaatacagtgaacatcatcgatgccaaaatcagagatcggatgttaaggggaactgctgtcggggcctaggttctcggactggtggtcgtgcgcggggctgcggtccgccttcgacctgcccatcgcggcggcgtagctgcagatcaaagcaaagcaggggcgagcaaagcagggccgcccagatcgagacgtcgtcgaggccgagcagagctccacacctccacctaggccacccgcttgccagagtggaggacgagctcctcctgtgccttcgccagctatgtgctccgtgctccgccgcctgtctccctaggccacagggaggttgtgtgggggttgcatctgacaacgccaaggcaccgtcgagaccgagcagagctctgtgccttcaccaggtcgcccacccgtccaagtggaggacgagctcctcctcaacagccagtaggccgagctcctccccgcggacccaccctcagccaagatccatagcccgctccgagccagcgcgccacgagctccaccgaggcaccgatcctatctccgccccggggaggggcctgaacctgaagcacgggaaggcaaccagccctctgggtccaatcagaaattggcagggaattccaacacagatttgtaagtattcaaacaggtttgctcgctctttctcttcccttcctgcttgataattcctgaattctgttaggccttgtgctattttatttttgttcaaatatgcatggctttcatttaatagaatgtcttttgaattactgcctcaggacaagtccagttgagtttgttgtcccctgtggttgctatatggaatcactaatatgacattaccattcccttttgttccgtaatcacatcttgtgagttggatattgattactatcttcatgtgatgacagctggggatgatcttatgtctgatagatatcacttgaggcaagttttaatggttctttggttcacttaagatggtaactcatagttttagtggttatgatacaatgatttcaggcccttaacaagatgataactcacagttctgcacctggaaataatgtgtttgtgggatttggagtgcggccagcgggcgggcgggtgcagcatgcaaggagcggatgggtccaggatgcgtggagcacgattgagcatcgggtcggtgcacgttaaaacataatgcaaatgagctgcacctgcactactgtgtagtgactacaaactcgtgaatcaacaaaatctaccacttgaaggctgtgatagcgagcagggggtgagggagcgaacagagtggttgtcccctcattcgagatgtaaagtcggccctctccttacctcaatgtactgctcctctgataatcaatgtagttgctgctgtcagttctggaaacgtgccgttgaatgatgttcagttgctgtgggttaacctaattatggatactttgggtgcccttgcattggcgacagaaccacctacaaaccatcttatggagagacccccagtagggagaagggagccattgattataaatatcatgtggagaaacttaattatcatggctttgtttcaagtttcatttctcctcactctcaacttcaagggaataagcctcctgcagttgaaaaatgatgatccagcacatgcagataaagtgaaaaataccttcatattcaacacatttgttttctgccaggtgttcaacgaattcaattcgtgtaaaccagatgagctgaatgtattcaagggcatttcagagaaccatctgtttattggcatcatagctataacagttgtactccagtttggtccactgtctcatcatccatcgaatcacggccgaggcacacaatctaaaaggcaaaagaattatagaggcagagctggacatagtcttcagttgaatttaaggttcctcttcccttgtttggaagaggttatgatcattgtacgctcccggctcaatgttgaacactcttgaagtacactgtgaagttgcagaggatggtcatcagaatctcaaagatcaagaattgccataaaggtgctgatgagttctttgatgatatatgtaatttcaattacatgaactataagaaagtgcaaattgaataagtagagatgatataatattacatatttatatcatcaaaataatattaatattacgatgatattttatcacaaggattttgcatatcatggtgacgtttgtcgtttcgtatctatgttttatattaactttaaactccgtggcaacgcacgggtacatacctagtaaagtacataatttcaataatctgattagaagaatggcatttatgctattcaatgtacaatctaattctactaaatataccctaaataacggatatgcaatcgatgtataaaatttctg

SEQ ID NO: 10400 - DNA, 3142 bp, Zea Mays
atgcccgcgcgtgccctcgcctccgccgccctcgcgacgctgcgccctcccccgcgatgcccgcgccctccgtccgccgcgagatccccgcccttccctcaaaccctgtcctgcacctcgtgcctccgcctccactcgcgatgctcctgcccgccccaccgccgtgacaaccgccttcgcatccgccgccagatccccgcccttcccccaaaccctgcccccatcgtctctgcagatccggcgttcgctcgggtctccttgcctcgccggggtcccaccgcgatggtcgaggagcatggtgggcgcggggaggcgggaacgagcggcggaggagatgtcgagtacgacgacgatgactcgatgcgtcccaccgccgagcccgccaaggaggaggacatcgagggagctgtgtgcagcgccccctgtcgtcgcgccgtcaggaatactaccccctccccctcgcgcgacatggtggatgcacgggccagtaccggtggtgaggatcccacggccgtggacgtcgtcgtgacacaactagctctgcaccggctgcgtccacctctagactttcttgcatcgcctatcgccctgctggaagattgtaaatacagtgaacatcatcgatgccaaaatcagagatcggatgttaaggggaactgctgtcggggcctaggttctcggactggtggtcgtgcgcggggctgcggtccgccttcgacctgcccatcgcggcggcgtagctgcagatcaaagcaaagcaggggcgagcaaagcagggccgcccagatcgagacgtcgtcgaggccgagcagagctccacacctccacctaggccacccgcttgccagagtggaggacgagctcctcctgtgccttcgccagctatgtgctccgtgctccgccgcctgtctccctaggccacagggaggttgtgtgggggttgcatctgacaacgccaaggcaccgtcgagaccgagcagagctctgtgccttcaccaggtcgcccacccgtccaagtggaggacgagctcctcctcaacagccagtaggccgagctcctccccgcggacccaccctcagccaagatccatagcccgctccgagccagcgcgccacgagctccaccgaggcaccgatcctatctccgccccggggaggggcctgaacctgaagcacgggaaggcaaccagccctctgggtccaatcagaaattggcagggaattccaacacagatttctggggatgatcttatgtctgatagatatcacttgaggcccttaacaagatgataactcacagttctgcacctggaaataatgtgtttgtgggatttggagtgcggccagcgggcgggcgggtgcagcatgcaaggagcggatgggtccaggatgcgtggagcacgattgagcatcgggtcggtgcacgttaaaacataatgcaaatgagctgcacctgcactactgtgtagtgactacaaactcgtgaatcaacaaaatctaccacttgaaggctgtgatagcgagcagggggtgagggagcgaacagagtggttgtcccctcattcgagatgtaaagtcggccctctccttacctcaatgtactgctcctctgataatcaatgtagttgctgctgtcagttctggaaacgtgccgttgaatgatgttcagttgctgtgggttaacctaattatggatactttgggtgcccttgcattggcgacagaaccacctacaaaccatcttatggagagacccccagtagggagaagggagccattgattataaatatcatgtggagaaacttaattatcatggctttgtttcaagtttcatttctcctcactctcaacttcaagggaataagcctcctgcagttgaaaaatgatgatccagcacatgcagataaagtgaaaaataccttcatattcaacacatttgttttctgccaggtgttcaacgaattcaattcgtgtaaaccagatgagctgaatgtattcaagggcatttcagagaaccatctgtttattggcatcatagctataacagttgtactccaggtagaatctctagaatgagtttcctttcttaactaagataaattgatttaggtctaagaaactgttttagatcacctggactttgccacgaataccttttatcagaaaatggggggaacgataaaggatgctggaaaatgaaatatattattatagctaataaattggctttcctggaggaactaggatttggacccagccaagtggccaagtgtatggaagaatcgtgtcgtggcacagacgaccagctgcttgactctccctcttctgtctgatcacatttgtacgcaagatatagatagtactactatacagtggagtcttcttgcagtttgtctattttacacaactgacatagtcttcaggtatctcattgtctgttcttatttagttatattaatgatgtttactattaattttgaccatcacaacttcgacttgtccagctctgcctctatttgtcggttcagctctgcttctataatttttttggtccactgtacaatgggctcctttattacctccttgagaatccttttcagtttggtccactgtctcatcatccatcgaatcacggccgaggcacacaatctaaaaggcaaaagaattatagaggcagagctggacatagtcttcagttgaatttaaggttcctcttcccttgtttggaagaggttatgatcattaggatggtcatcagaatctcaaagatcaagaattgccataaaggtgctgatgagttctttgatgatatatgtaatttcaattacatgaactataagaaagtgcaaattgaataagtagagatgatataatattacatatttatatcatcaaaataatattaatattacgatgatattttatcacaaggattttgcatatcatggtgacgtttgtcgtttcgtatctatgttttatattaactttaaactccgtggcaacgcacgggtacatacctagtaaagtacataatttcaataatctgattagaagaatggcatttatgctattcaatgtacaatctaattctactaaatataccctaaataacggatatgcaatcgatgtataaaatttctg

SEQ ID NO: 10401 - DNA, 3410 bp, Zea Mays
cgccactccccgaccttccgctccacgcgacaacctccctctcggttctccctctgccgccgtccccctggccctgcttggcggcgcccttcttccctaggccggcgagcaggccctctttctccccctgccgaagctctcacgactccccctccatggcaggcgtcacgcccttccctgttggccgtggacgccgacgccgtcccccatccatggcactttccccatgcgccaccccctccgacggcgactgtgctaaccgtgcccgtcgtcctccatacacggtcgaccatctctcctcaagccgtcacagccatagcgagtcggggctgggctaggtcgccagagagccgtgcctctgctcccacctcaatgccggcgagctcgcccttagccgacgtgctatggccagctcccttcgacggcccagctacagctcgcctgcgccaagtccgaacgcccccttttccctcgtcatcgttctggaaagatagcgccaacttctctcgtcatcctcaccatccgcctgcgcaggtcccccgcggcgaacaccaccatttcctgcagcccatagtcagcgctcctcgctgttctccgcaatgccctcaaactgttcgacataatgtccaagagaaacgccatgtcaatgacagcgtcgccgaaccccactcttgtccaagagaaacgatatgtaaagtattgaaccatttggagcagatgattgttgttcttttcttgagtaccaagcaccataaaagagaaggtggggctgagggcattgtcacatatcatttaaatgtactgtagccaactgagtaagcaaacgaagatgcctttgatcagctttgcacagcaatggaactccaccgttcttgcgattggaaaatgttgaaggacatatacaggaagctgggaaaacttgctgatgagcagtggcttcttatcctaaaaattacgagcccgtagagtaagaaccaactgcggatctgagggctggcaatgttcaaggcttccaggatcatcaagttggccttccgatgtagtacatgtactgacagattgtaaatacagtgaacatcatcgatgccaaaatcagagatcggatgttaaggggaactgctgtcggggcctaggttctcggactggtggtcgtgcgcggggctgcggtccgccttcgacctgcccatcgcggcggcgtagctgcagatcaaagcaaagcaggggcgagcaaagcagggccgcccagatcgagacgtcgtcgaggccgagcagagctccacacctccacctaggccacccgcttgccagagtggaggacgagctcctcctgtgccttcgccagctatgtgctccgtgctccgccgcctgtctccctaggccacagggaggttgtgtgggggttgcatctgacaacgccaaggcaccgtcgagaccgagcagagctctgtgccttcaccaggtcgcccacccgtccaagtggaggacgagctcctcctcaacagccagtaggccgagctcctccccgcggacccaccctcagccaagatccatagcccgctccgagccagcgcgccacgagctccaccgaggcaccgatcctatctccgccccggggaggggcctgaacctgaagcacgggaaggcaaccagccctctgggtccaatcagaaattggcagggaattccaacacagatttctggggatgatcttatgtctgatagatatcacttgaggcaagttttaatggttctttggttcacttaagatggtctacacaagatgtgaagtttatacaattccaactaacggtcaacgtcgcagctctgataatcaatgtagttgctgctgtcagttctggaaacgtgccgttgaatgatgttcagttgctgtgggttaacctaattatggatactttgggtgcccttgcattggcgacagaaccacctacaaaccatcttatggagagacccccagtagggagaagggagccattgattataaatatcatgtggagaaacttaattatcatggctttgtttcaagtttcatttctcctcactctcaacttcaagggaataagcctcctgcagttgaaaaatgatgatccagcacatgcagataaagtgaaaaataccttcatattcaacacatttgttttctgccaggtgttcaacgaattcaattcgtgtaaaccagatgagctgaatgtattcaagggcatttcagagaaccatctgtttattggcatcatagctataacagttgtactccaggtagaatctctagaatgagtttcctttcttaactaagataaattgatttaggtctaagaaactgttttagatcacctggactttgccacgaataccttttatcagaaaatggggggaacgataaaggatgctggaaaatgaaatatattattatagctaataaattggctttcctggaggaactaggatttggacccagccaagtggccaagtgtatggaagaatcgtgtcgtggcacagacgaccagctgcttgactctccctcttctgtctgatcacatttgtacgcaagatatagatagtactactatacagtggagtcttcttgcagtttgtctattttacacaactgacatagtcttcaggtatctcattgtctgttcttatttagttatattaatgatgtttactattaattttgaccatcacaacttcgacttgtccagctctgcctctatttgtcggttcagctctgcttctataatttttttggtccactgtacaatgggctcctttattacctccttgagaatccttttcagtttggtccactgtctcatcatccatcgaatcacggccgaggcacacaatctaaaaggcaaaagaattatagaggcagagctggacatagtcttcagttgaatttaaggttcctcttcccttgtttggaagaggttatgatcattgtacgctcccggctcaatgttgaacactcttgaagtacactgtgaagttgcagaggatggtcatcagaatctcaaagatcaagaattgccataaaggtgctgatgagttctttgatgatatatgtaatttcaattacatgaactataagaaagtgcaaattgaataagtagagatgatataatattacatatttatatcatcaaaataatattaatattacgatgatattttatcacaaggattttgcatatcatggtgacgtttgtcgtttcgtatctatgttttatattaactttaaactccgtggcaacgcacgggtacatacctagtaaagtacataatttcaataatctgattagaagaatggcatttatgctattcaatgtacaatctaattctactaaatataccctaaataacggatatgcaatcgatgtataaaatttctg

SEQ ID NO: 10402 - DNA, 3368 bp, Zea Mays
cgccactccccgaccttccgctccacgcgacaacctccctctcggttctccctctgccgccgtccccctggccctgcttggcggcgcccttcttccctaggccggcgagcaggccctctttctccccctgccgaagctctcacgactccccctccatggcaggcgtcacgcccttccctgttggccgtggacgccgacgccgtcccccatccatggcactttccccatgcgccaccccctccgacggcgactgtgctaaccgtgcccgtcgtcctccatacacggtcgaccatctctcctcaagccgtcacagccatagcgagtcggggctgggctaggtcgccagagagccgtgcctctgctcccacctcaatgccggcgagctcgcccttagccgacgtgctatggccagctcccttcgacggcccagctacagctcgcctgcgccaagtccgaacgcccccttttccctcgtcatcgttctggaaagatagcgccaacttctctcgtcatcctcaccatccgcctgcgcaggtcccccgcggcgaacaccaccatttcctgcagcccatagtcagcgctcctcgctgttctccgcaatgccctcaaactgttcgacataatgtccaagagaaacgccatgtcaatgacagcgtcgccgaaccccactcttgtccaagagaaacgatatgtaaagtattgaaccatttggagcagatgattgttgttcttttcttgagtaccaagcaccataaaagagaaggtggggctgagggcattgtcacatatcatttaaatgtactgtagccaactgagtaagcaaacgaagatgcctttgatcagctttgcacagcaatggaactccaccgttcttgcgattggaaaatgttgaaggacatatacaggaagctgggaaaacttgctgatgagcagtggcttcttatcctaaaaattacgagcccgtagagtaagaaccaactgcggatctgagggctggcaatgttcaaggcttccaggatcatcaagttggccttccgatgtagtacatgtactgacagattgtaaatacagtgaacatcatcgatgccaaaatcagagatcggatgttaaggggaactgctgtcggggcctaggttctcggactggtggtcgtgcgcggggctgcggtccgccttcgacctgcccatcgcggcggcgtagctgcagatcaaagcaaagcaggggcgagcaaagcagggccgcccagatcgagacgtcgtcgaggccgagcagagctccacacctccacctaggccacccgcttgccagagtggaggacgagctcctcctgtgccttcgccagctatgtgctccgtgctccgccgcctgtctccctaggccacagggaggttgtgtgggggttgcatctgacaacgccaaggcaccgtcgagaccgagcagagctctgtgccttcaccaggtcgcccacccgtccaagtggaggacgagctcctcctcaacagccagtaggccgagctcctccccgcggacccaccctcagccaagatccatagcccgctccgagccagcgcgccacgagctccaccgaggcaccgatcctatctccgccccatgtcttcaagggggaggggcctgaacctgaagcacgggaaggcaaccagccctctgggtccaatcagaaattggcagggaattccaacacagatttctggggatgatcttatgtctgatagatatcacttgaggcaagttttaatggttctttggttcacttaagatggtctacacaagatgtgaagtttatacaattccaactaacggtcaacgtcgcagctctgataatcaatgtagttgctgctgtcagttctggaaacgtgccgttgaatgatgttcagttgctgtgggttaacctaattatggatactttgggtgcccttgcattggcgacagaaccacctacaaaccatcttatggagagacccccagtagggagaagggagccattgattataaatatcatgtggagaaacttaattatcatggctttgtttcaagtttcatttctcctcactctcaacttcaagggaataagcctcctgcagttgaaaaatgatgatccagcacatgcagataaagtgaaaaataccttcatattcaacacatttgttttctgccaggtgttcaacgaattcaattcgtgtaaaccagatgagctgaatgtattcaagggcatttcagagaaccatctgtttattggcatcatagctataacagttgtactccaggtagaatctctagaatgagtttcctttcttaactaagataaattgatttaggtctaagaaactgttttagatcacctggactttgccacgaataccttttatcagaaaatggggggaacgataaaggatgctggaaaatgaaatatattattatagctaataaattggctttcctggaggaactaggatttggacccagccaagtggccaagtgtatggaagaatcgtgtcgtggcacagacgaccagctgcttgactctccctcttctgtctgatcacatttgtacgcaagatatagatagtactactatacagtggagtcttcttgcagtttgtctattttacacaactgacatagtcttcaggtatctcattgtctgttcttatttagttatattaatgatgtttactattaattttgaccatcacaacttcgacttgtccagctctgcctctatttgtcggttcagctctgcttctataatttttttggtccactgtacaatgggctcctttattacctccttgagaatccttttcagtttggtccactgtctcatcatccatcgaatcacggccgaggcacacaatctaaaaggcaaaagaattatagaggcagagctggacatagtcttcagttgaatttaaggttcctcttcccttgtttggaagaggttatgatcattaggatggtcatcagaatctcaaagatcaagaattgccataaaggtgctgatgagttctttgatgatatatgtaatttcaattacatgaactataagaaagtgcaaattgaataagtagagatgatataatattacatatttatatcatcaaaataatattaatattacgatgatattttatcacaaggattttgcatatcatggtgacgtttgtcgtttcgtatctatgttttatattaactttaaactccgtggcaacgcacgggtacatacctagtaaagtacataatttcaataatctgattagaagaatggcatttatgctattcaatgtacaatctaattctactaaatataccctaaataacggatatgcaatcgatgtataaaatttctg

SEQ ID NO: 10403 - DNA, 4119 bp, Zea Mays
cgccactccccgaccttccgctccacgcgacaacctccctctcggttctccctctgccgccgtccccctggccctgcttggcggcgcccttcttccctaggccggcgagcaggccctctttctccccctgccgaagctctcacgactccccctccatggcaggcgtcacgcccttccctgttggccgtggacgccgacgccgtcccccatccatggcactttccccatgcgccaccccctccgacggcgactgtgctaaccgtgcccgtcgtcctccatacacggtcgaccatctctcctcaagccgtcacagccatagcgagtcggggctgggctaggtcgccagagagccgtgcctctgctcccacctcaatgccggcgagctcgcccttagccgacgtgctatggccagctcccttcgacggcccagctacagctcgcctgcgccaagtccgaacgcccccttttccctcgtcatcgttctggaaagatagcgccaacttctctcgtcatcctcaccatccgcctgcgcaggtcccccgcggcgaacaccaccatttcctgcagcccatagtcagcgctcctcgctgttctccgcaatgccctcaaactgttcgacataatgtccaagagaaacgccatgtcaatgacagcgtcgccgaaccccactcttgtccaagagaaacgatatgtaaagtattgaaccatttggagcagatgattgttgttcttttcttgagtaccaagcaccataaaagagaaggtggggctgagggcattgtcacatatcatttaaatgtactgtagccaactgagtaagcaaacgaagatgcctttgatcagctttgcacagcaatggaactccaccgttcttgcgattggaaaatgttgaaggacatatacaggaagctgggaaaacttgctgatgagcagtggcttcttatcctaaaaattacgagcccgtagagtaagaaccaactgcggatctgagggctggcaatgttcaaggcttccaggatcatcaagttggccttccgatgtagtacatgtactgacagattgtaaatacagtgaacatcatcgatgccaaaatcagagatcggatgttaaggggaactgctgtcggggcctaggttctcggactggtggtcgtgcgcggggctgcggtccgccttcgacctgcccatcgcggcggcgtagctgcagatcaaagcaaagcaggggcgagcaaagcagggccgcccagatcgagacgtcgtcgaggccgagcagagctccacacctccacctaggccacccgcttgccagagtggaggacgagctcctcctgtgccttcgccagctatgtgctccgtgctccgccgcctgtctccctaggccacagggaggttgtgtgggggttgcatctgacaacgccaaggcaccgtcgagaccgagcagagctctgtgccttcaccaggtcgcccacccgtccaagtggaggacgagctcctcctcaacagccagtaggccgagctcctccccgcggacccaccctcagccaagatccatagcccgctccgagccagcgcgccacgagctccaccgaggcaccgatcctatctccgccccggggaggggcctgaacctgaagcacgggaaggcaaccaggtacaattcaactaagtctgtcagcatgcaaacgattatttcgtgcataggtgtgtggaattctgatgacgtattttagaacatcactgcatgtcatcattgttctattatataaaatatacgagtcatactttacctcttatatttgtctttatacatgcatgtcagttttgaattgttactttgagtaggctaacttcttcacttgagtaaccggaatctgctttacctgtttgtcttctttgtgattatctcattgtaaaagccctctgggtccaatcagaaattggcagggaattccaacacagatttgtaagtattcaaacaggtttgctcgctctttctcttcccttcctgcttgataattcctgaattctgttaggccttgtgctattttatttttgttcaaatatgcatggctttcatttaatagaatgtcttttgaattactgcctcaggacaagtccagttgagtttgttgtcccctgtggttgctatatggaatcactaatatgacattaccattcccttttgttccgtaatcacatcttgtgagttggatattgattactatcttcatgtgatgacagctggggatgatcttatgtctgatagatatcacttgagttctgcacctggaaataatgtgtttgtgggatttggagtgcggccagcgggcgggcgggtgcagcatgcaaggagcggatgggtccaggatgcgtggagcacgattgagcatcgggtcggtgcacgttaaaacataatgcaaatgagctgcacctgcactactgtgtagtgactacaaactcgtgaatcaacaaaatctaccacttgaaggctgtgatagcgagcagggggtgagggagcgaacagagtggttgtcccctcattcgagatgtaaagtcggccctctccttacctcaatgtactgctcctctgataatcaatgtagttgctgctgtcagttctggaaacgtgccgttgaatgatgttcagttgctgtgggttaacctaattatggatactttgggtgcccttgcattggcgacagaaccacctacaaaccatcttatggagagacccccagtagggagaagggagccattgattataaatatcatgtggagaaacttaattatcatggctttgtttcaagtttcatttctcctcactctcaacttcaagggaataagcctcctgcagttgaaaaatgatgatccagcacatgcagataaagtgaaaaataccttcatattcaacacatttgttttctgccaggtgttcaacgaattcaattcgtgtaaaccagatgagctgaatgtattcaagggcatttcagagaaccatctgtttattggcatcatagctataacagttgtactccaggtagaatctctagaatgagtttcctttcttaactaagataaattgatttaggtctaagaaactgttttagatcacctggactttgccacgaataccttttatcagaaaatggggggaacgataaaggatgctggaaaatgaaatatattattatagctaataaattggctttcctggaggaactaggatttggacccagccaagtggccaagtgtatggaagaatcgtgtcgtggcacagacgaccagctgcttgactctccctcttctgtctgatcacatttgtacgcaagatatagatagtactactatacagtggagtcttcttgcagtttgtctattttacacaactgacatagtcttcaggtatctcattgtctgttcttatttagttatattaatgatgtttactattaattttgaccatcacaacttcgacttgtccagctctgcctctatttgtcggttcagctctgcttctataatttttttggtccactgtacaatgggctcctttattacctccttgagaatccttttcagtttggtccactgtctcatcatccatcgaatcacggccgaggcacacaatctaaaaggcaaaagaattatagaggcagagctggacatagtcttcagttgaatttaaggttcctcttcccttgtttggaagaggttatgatcattaggatggtcatcagaatctcaaagatcaagaattgccataaaggtgctgatgagttctttgatgatatatgtaatttcaattacatgaactataagaaagtgcaaattgaataagtagagatgatataatattacatatttatatcatcaaaataatattaatattacgatgatattttatcacaaggattttgcatatcatggtgacgtttgtcgtttcgtatctatgttttatattaactttaaactccgtggcaacgcacgggtacatacctagtaaagtacataatttcaataatctgattagaagaatggcatttatgctattcaatgtacaatctaattctactaaatataccctaaataacggatatgcaatcgatgtataaaatttctg

SEQ ID NO: 10404 - DNA, 5020 bp, Zea Mays
gtgactctgtccacccacgccactccccgaccttccgctccacgcgacaacctccctctcggttctccctctgccgccgtccccctggccctgcttggcggcgcccttcttccctaggccggcgagcaggccctctttctccccctgccgaagctctcacgactccccctccatggcaggcgtcacgcccttccctgttggccgtggacgccgacgccgtcccccatccatggcactttccccatgcgccaccccctccgacggcgactgtgctaaccgtgcccgtcgtcctccatacacggtcgaccatctctcctcaagccgtcacagccatagcgagtcggggctgggctaggtcgccagagagccgtgcctctgctcccacctcaatgccggcgagctcgcccttagccgacgtgctatggccagctcccttcgacggcccagctacagctcgcctgcgccaagtccgaacgcccccttttccctcgtcatcgttctggaaagatagcgccaacttctctcgtcatcctcaccatccgcctgcgcaggtcccccgcggcgaacaccaccatttcctgcagcccatagtcagcgctcctcgctgttctccgcaatgccctcaaactgttcgacataatgtccaagagaaacgccatgtcaatgacagcgtcgccgaaccccactcttgtccaagagaaacgatatgtaaagtattgaaccatttggagcagatgattgttgttcttttcttgagtaccaagcaccataaaagagaaggtggggctgagggcattgtcacatatcatttaaatgtactgtagccaactgagtaagcaaacgaagatgcctttgatcagctttgcacagcaatggaactccaccgttcttgcgattggaaaatgttgaaggacatatacaggaagctgggaaaacttgctgatgagcagtggcttcttatcctaaaaattacgagcccgtagagtaagaaccaactgcggatctgagggctggcaatgttcaaggcttccaggatcatcaagttggccttccgatgtagtacatgtactgacaggcgtccacattcgacgatggtgcacggttctgccgtcgcgctccctccgcctccccatgccccgctcccgtgatgcccgcgcgtgccctcgcctccgccgccctcgcgacgctgcgccctcccccgcgatgcccgcgccctccgtccgccgcgagatccccgcccttccctcaaaccctgtcctgcacctcgtgcctccgcctccactcgcgatgctcctgcccgccccaccgccgtgacaaccgccttcgcatccgccgccagatccccgcccttcccccaaaccctgcccccatcgtctctgcagatccggcgttcgctcgggtctccttgcctcgccggggtcccaccgcgatggtcgaggagcatggtgggcgcggggaggcgggaacgagcggcggaggaggtgaagctcgacatccgcaacatgctcatggcgctcgaatccctcaaggaggagtccctcaagaagaagaagggcgatgccgcgcagcagcaagagccaccacagaaggagatgtcgagtacgacgacgatgactcgatgcgtcccaccgccgagcccgccaaggaggaggacatcgagggagctgtgtgcagcgccccctgtcgtcgcgccgtcaggaatactaccccctccccctcgcgcgacatggtggatgcacgggccagtaccggtggtgaggatcccacggccgtggacgtcgtcgtgacacaactagctctgcaccggctgcgtccacctctagactttcttgcatcgcctatcgccctgctggaagattgtaaatacagtgaacatcatcgatgccaaaatcagagatcggatgttaaggggaactgctgtcggggcctaggttctcggactggtggtcgtgcgcggggctgcggtccgccttcgacctgcccatcgcggcggcgtagctgcagatcaaagcaaagcaggggcgagcaaagcagggccgcccagatcgagacgtcgtcgaggccgagcagagctccacacctccacctaggccacccgcttgccagagtggaggacgagctcctcctgtgccttcgccagctatgtgctccgtgctccgccgcctgtctccctaggccacagggaggttgtgtgggggttgcatctgacaacgccaaggcaccgtcgagaccgagcagagctctgtgccttcaccaggtcgcccacccgtccaagtggaggacgagctcctcctcaacagccagtaggccgagctcctccccgcggacccaccctcagccaagatccatagcccgctccgagccagcgcgccacgagctccaccgaggcaccgatcctatctccgccccatgtcttcaagggggaggggcctgaacctgaagcacgggaaggcaaccaggtacaattcaactaagtctgtcagcatgcaaacgattatttcgtgcataggtgtgtggaattctgatgacgtattttagaacatcactgcatgtcatcattgttctattatataaaatatacgagtcatactttacctcttatatttgtctttatacatgcatgtcagttttgaattgttactttgagtaggctaacttcttcacttgagtaaccggaatctgctttacctgtttgtcttctttgtgattatctcattgtaaaagccctctgggtccaatcagaaattggcagggaattccaacacagatttgtaagtattcaaacaggtttgctcgctctttctcttcccttcctgcttgataattcctgaattctgttaggccttgtgctattttatttttgttcaaatatgcatggctttcatttaatagaatgtcttttgaattactgcctcaggacaagtccagttgagtttgttgtcccctgtggttgctatatggaatcactaatatgacattaccattcccttttgttccgtaatcacatcttgtgagttggatattgattactatcttcatgtgatgacagctggggatgatcttatgtctgatagatatcacttgaggcaagttttaatggttctttggttcacttaagatggtaactcatagttttagtggttatgatacaatgatttcaggcccttaacaagatgataactcacagttctgcacctggaaataatgtgtttgtgggatttggagtgcggccagcgggcgggcgggtgcagcatgcaaggagcggatgggtccaggatgcgtggagcacgattgagcatcgggtcggtgcacgttaaaacataatgcaaatgagctgcacctgcactactgtgtagtgactacaaactcgtgaatcaacaaaatctaccacttgaaggctgtgatagcgagcagggggtgagggagcgaacagagtggttgtcccctcattcgagatgtaaagtcggccctctccttacctcaatctctgataatcaatgtagttgctgctgtcagttctggaaacgtgccgttgaatgatgttcagttgctgtgggttaacctaattatggatactttgggtgcccttgcattggcgacagaaccacctacaaaccatcttatggagagacccccagtagggagaagggagccattgattataaatatcatgtggagaaacttaattatcatggctttgtttcaagtttcatttctcctcactctcaacttcaagggaataagcctcctgcagttgaaaaatgatgatccagcacatgcagataaagtgaaaaataccttcatattcaacacatttgttttctgccaggtgttcaacgaattcaattcgtgtaaaccagatgagctgaatgtattcaagggcatttcagagaaccatctgtttattggcatcatagctataacagttgtactccaggtagaatctctagaatgagtttcctttcttaactaagataaattgatttaggtctaagaaactgttttagatcacctggactttgccacgaataccttttatcagaaaatggggggaacgataaaggatgctggaaaatgaaatatattattatagctaataaattggctttcctggaggaactaggatttggacccagccaagtggccaagtgtatggaagaatcgtgtcgtggcacagacgaccagctgcttgactctccctcttctgtctgatcacatttgtacgcaagatatagatagtactactatacagtggagtcttcttgcagtttgtctattttacacaactgacatagtcttcaggtatctcattgtctgttcttatttagttatattaatgatgtttactattaattttgaccatcacaacttcgacttgtccagctctgcctctatttgtcggttcagctctgcttctataatttttttggtccactgtacaatgggctcctttattacctccttgagaatccttttcagtttggtccactgtctcatcatccatcgaatcacggccgaggcacacaatctaaaaggcaaaagaattatagaggcagagctggacatagtcttcagttgaatttaaggttcctcttcccttgtttggaagaggttatgatcattaggatggtcatcagaatctcaaagatcaagaattgccataaaggtgctgatgagttctttgatgatatatgtaatttcaattacatgaactataagaaagtgcaaattgaataagtagagatgatataatattacatatttatatcatcaaaataatattaatattacgatgatattttatcacaaggattttgcatatcatggtgacgtttgtcgtttcgtatctatgttttatattaactttaaactccgtggcaacgcacgggtacatacctagtaaagtacataatttcaataatctgattagaagaatggcatttatgctattcaatgtacaatctaattctactaaatataccctaaataacggatatgcaatcgatgtataaaatttctg

SEQ ID NO: 10405 - DNA, 1103 bp, Zea Mays
cgccactccccgaccttccgctccacgcgacaacctccctctcggttctccctctgccgccgtccccctggccctgcttggcggcgcccttcttccctaggccggcgagcaggccctctttctccccctgccgaagctctcacgactccccctccatggcaggcgtcacgcccttccctgttggccgtggacgccgacgccgtcccccatccatggcactttccccatgcgccaccccctccgacggcgactgtgctaaccgtgcccgtcgtcctccatacacggtcgaccatctctcctcaagccgtcacagccatagcgagtcggggctgggctaggtcgccagagagccgtgcctctgctcccacctcaatgccggcgagctcgcccttagccgacgtgctatggccagctcccttcgacggcccagctacagctcgcctgcgccaagtccgaacgcccccttttccctcgtcatcgttctggaaagatagcgccaacttctctcgtcatcctcaccatccgcctgcgcaggtcccccgcggcgaacaccaccatttcctgcagcccatagtcagcgctcctcgctgttctccgcaatgccctcaaactgttcgacataatgtccaagagaaacgccatgtcaatgacagcgtcgccgaaccccactcttgtccaagagaaacgatatgtaaagtattgaaccatttggagcagatgattgttgttcttttcttgagtaccaagcaccataaaagagaaggtggggctgagggcattgtcacatatcatttaaatgtactgtagccaactgagtaagcaaacgaagatgcctttgatcagctttgcacagcaatggaactccaccgttcttgcgattggaaaatgttgaaggacatatacaggaagctgggaaaacttgctgatgagcagtggcttcttatcctaaaaattacgagcccgtagagtaagaaccaactgcggatctgagggctggcaatgttcaaggcttccaggatcatcaagttggccttccgatgtagtacatgtactgacagatggtggctgcatgcccttgcatttcagcctcgcaacgatttttt

SEQ ID NO: 10406 - DNA, 883 bp, Zea Mays
gattgactgagaggttcgagttgtttgttaacaaacatgagtgtgcaacgcatacacagagttgaacgatcctgttgtgcagaggcaacggtttgaggaacaactaaaggaccgtcaatctggtgatgacgaagctatggctttggacgaaacattctgtactgcccttgagtatggtttggcaccaacaggtggttggggcttgggaattgatcgcctcacgatgttgctaacagattctcagaacattaaggaagtacttctattcccggctatgaagcctcaagagtagtaatccacagccaaaagccacaaaaggcaaagaacgatgattgcctattaccctgtgctgggcttgaggtggatgagggaacatacaccctacactatggtgatatttcaagatatctgtatgattctagattcactgggcgtgctgtgtccattgttctactttattggaagttctgtttgagatgctgcatcttcagttgtctactgccccgctcaaagcaaacatgatgctacataggctggaggatacatcaaagttggacctgttgtgaattatacttatttttgctcttgtgcgtgcgaggtttccatttttcattatttgtatttcccagcagacagttattaactaaatactgtaacgtcacagtaagttcagtttaacttcaaacattgtagttttgaggagattgcaaatatttcgggtcaatgcaattggtgcttttgatagccatgcaaaatgcctcttctcgtcatgatcgtgtttgctttatgctgatgttcagccatcattcaggttaaactggcatgtaaatgtaaaccgtgcaatcagctgggtttgatattataaattttaattggcaataca

SEQ ID NO: 10407 - DNA, 3304 bp, Zea Mays
ccgtccagactccagaaaatcattaacagagccgtggtggactgagcccacgttgtccaaagtgaccgatcaaagcagtgttgttagttattacaggccaaaagactcggcccatgtcgatgccgtggcccgtgtggatcagatgacttggcggctacgaagggttctctctttccattcctccgcgccgccactagctgtcctaaaccctaccaccacttgagcctccaccttctccgcgtctcaccttcttctccgttctccttccgctcccctcttcacaacgaagccctagtgtcccgcgacatggcatctggtctggaggagaaactcgcggggctctcaacgggcggcgacgggcaaaatcctccgccggcgggtgagggcggagaggagccgcagctctcgaagaatgcgaagaagagagaggagaagaggaagaagctggaagaggagcggaggctcaaggaggaagagaagaagaacaaggctgcggctgccagtggaaaacctcagaaggcatctgctgctgacgatgatgacatggatcccactcaatactatgagaataggctcaaggctcttgattcactgaaggccacaggtgtaaacccctatccccataagttcccggttggcatttctgtacccgaatacattgagaagtacaggaccttgagcgagggggagaagcttacagatgtggcagagtgtttagctgggaggatcatgaacaagagaacatcgtcgtcgaagctattcttttatgatctttatggtggtggcatgaaggttcaagtgatggctgatgccaggacctcagagttggatgaagctgaattttctaagtaccactcaggtgtgaagcgaggtgatattgttggcatatgtggatatccaggaaaaagcaaccgaggggagcttagtgtatttccaaagagatttgtcgtcctctctccatgtcttcatatgatgcctcgacagaagggtgaaggaagtgcagtgcctgtaccgtggactccaggaatgggtaggaacatcgaaaattatgttttgagggaccaggaaactcggtatcgtcaaaggtatcttgatcttatggtaaaccatgaagtgaggcacatcttcaagacacgatctaaaattgtctcatttatccgaaagtttcttgatgaccgtgaatttttggaggtggagactccgatgatgaacatgattgctggtggagcagctgcaaggccttttgttacacatcacaatgaattaaacatgcggctttttatgcgcattgctcctgaattatatctgaaggaactggttgttggtggattggaccgtgtttatgaaattggaaagcaattcaggaatgaaggaattgatttaacacacaatcctgaattcacaacttgtgaattttatatggcgtatgcagattataatgatttgatggagcttactgaaaccatgttgtcaggcatggttaaggacctgacaggtggctataagataaaatatcatgcaaatggagttactaaccccccaatagaaattgatttcacgcctcccttcagaaggatagatatgattaaagatttggaggctatggccaatctcagtataccaaaagatctatcaagtgatgaagcgaatcgttatttgatagaagcatgtgtgaagtatgatgtgaaatgtccacctccccaaacgacatcgcggttgcttgacaagttggttggccatttcttggaggagacatgtgtgaatccaacatttatcatcaatcatccagagataatgagtccattagcaaagtggcataggtcccgacctggattgactgagaggttcgagttgtttgttaacaaacatgaggtgtgcaacgcatacacagagttgaacgatcctgttgtgcagaggcaacggtttgaggaacaactaaaggaccgtcaatctggtgatgacgaagctatggctttggacgaaacattctgtactgcccttgagtatggtttggcaccaacaggtggttggggcttgggaattgatcgcctcacgatgttgctaacagattctcagaacattaaggaagtacttctattcccggctatgaagcctcaagagtagtaatccacagccaaaagccacaaaagggtatgcttacgagtctgtaacttttaagactctttgtttgctcggttgaaaacattaaagcatgtaaggcattttttctatgcatttttcaagttgaaagaacatttaaataatgcacctttctgaggtatggtttagagttagggtgtctataattcaatacacatttttaggccaagtgacctcttaacgtttttctgcatttagactgtgctcaggatcgttcaactctgtgtatgtgtataggtgttctcacagactttttaaggttgtataaaattatgacttccaccacagaaattataaacaagattatattttgttataatgtatgtgatcagaaaataactgctagcaacccacaattaggtgggtccaattgagatagaacattaaaagctacattaccattttcatcgtgactaatgagtaatgacattgacatcccatattttacccccatgccttggcaccagcaaagaacgatgattgcctattaccctgtgctgggcttgaggtggatgagggaacatacaccctacactatggtgatatttcaagatatctgtatgattctagattcactgggcgtgctgtgtccattgttctactttattggaagttctgtttgagatgctgcatcttcagttgtctactgccccggtgctgattatgttgtataattcagacgtgctcattgttgattttgtacacgagtttgcactgcataggcagataggctggaggatacgctaacttggatatttgtgtcacagctcaaagcaaacatgatgctacataggctggaggatacatcaaagttggacctgttgtgaattatacttatttttgctcttgtgcgtgcgaggtttccatttttcattatttgtatttcccagcagacagttattaactaaatactgtaacgtcacagtaagttcagtttaacttcaaacattgtagttttgaggagattgcaaatatttcgggtcaatgcaattggtgcttttgatagccatgcaaaatgcctcttctcgtcatgatcgtgtttgctttatgctgatgttcagccatcattcaggttaaactggcatgtaaatgtaaaccgtgcaatcagctgggtttgatattataaattttaattggcaataca

SEQ ID NO: 10408 - DNA, 3727 bp, Zea Mays
cgcatttcatctttccaatcaagcgagaagcgtctcctcctcccttccacactcctctccactcacgattctcttcccttgattccgctagctgatcagcgtctcgccggagtaatacacagcagcagtaagaggccatggagatggtgcggcggaacctgaagcggcaggcgtcgcgctcgctttccgccttcgctggcgccgcatccccgcacgccgtcgaccaggagaacctccaccccaacctcgcctccacgccgccggcgtcgcccgccaagggcacctcctcgccgcgccccaagcacccagcggctgcggctgcggctgcggctcaaccggcggccaccgccgaggaggatcactccacagcccctacgaccgcgccagcggacgacgagcgcttcgtcaaggtggtggtgagggtgcggccgacggtgagccggccggtgaacggcaaggatctgtggttcgtccgcaagaccgccccagactcagtcgctgtcggcgaccggtccttcccagtggatggcgtcctcgacgacagggcctctcaggccgatgcgtttgatctggtgggattgcccatgatcgagaatgctatggccggattcaacacctccctcgtctgctatggccagagtggcaccgggaagacatacaccatgtggggccctctcggcgccatggttgacagtggctctgaccatgctgaccgcggcgttgttcctcgggttttccagaacctgttctctcggatccaaagaatgggagagagttctcctgagaagcagacgagctaccagtgccgttgctcgttcctcgaggtacataacgagcagatcaatgatctgttggaaccatctcagcgtgacctacagataagagagaacgctagcaatggtatccatgttgagaacttgactgatgaatacgtgtcaacagcagatgatatcagtcagatcttgatgaagggactgtcaaacagaaaagttggtaccaccagtatgaacttaaaaagttcccgctctcatgtgatattcacctgcgttattgaagcatggagcaagggttcatcaaatgggtttagcagctcaagaactagcagaatcacctttgttgacctcgctggtcctgacactgatgaacttggtgcagcaaagcattccacaaaggaagaaagacatcttaagaagtctctttcaaggcttgggaaactagttaacgttctttcagaaactccagagtcacataaagttgatttaccatatgagcaatcccgtttgacacatgtgctgaaggatacactaggtggcaactccagggttatatttttgtgttcgatttcttcagagcacagatctggaactttaagtacactaagatttggtgagcgagcaaagctaatgccaaacaaacctgtgataaatgagatatcagaagatgatgttaatggtttgagcgatcagatacgtcagttaaaggatgaactcataagaacaaagtctggagacaccacaacttgcaaggctaggtacttcagtgcacaaagtgcccgtgaaagtttgcatactttgcgagtgagcctcaaccgctctcttatctttcctcacatagaagttgattcagaggaagaaatggatgttgatgaagaagatgtgcaagaactgcgtgatcaaattagcaagattcactcttcatctgaagatacattggatgactttatggatgcagaaagtggagacgaaagcactccttgttctgtgggaagaagtgaagatgatcaagtaatcatagatgattttgaaggtccacaacaggaagagcaaaaagaagtatctaacaatacaaatgctaatgaagacctcggttctgacagaaaatctaatctatcaattattgcctccacacggttatcacctattcaggatccaacattgtgctcttctccaaagatccacaacaaggcaagaatgagcatcacttcactggggctatcaccaagcaagattagaatatcagacagcccaggtgatagaaatgttgaaatgtgtacaaatagtgcatttcgttcctctctacaatcaagcaagcttagccccactgactcactggctgcaagtcttcaacgtggcttgcacattatagagtaccatcaacagaatccagccccaagaaaatcatttattggtctttcatttgaccatttcgctcgtcagtcagtagcaaaaatcagttcagctgttcaggctctaccagaggaccaaggaaacaacctttgttcattctgcaagaagccaatgaacacaaatgataatcagacagaaaacgatggcaacataactaaggaaattgcttccaagagagaaactgagcttgaagctttatgcgaagaacaaagagcaaagatccaggagctgagcagtttgattgaccaatataagaacaggtcagaagaactaactagtgaaggcaaggtttctgtctcactcagtgtgaatgagagggaggtacttcttgctgaaatccagagtctgagggagcaactcaaaaaccagactactgtatcaactactggtagccttcttgaccagttaaggaacggcagcacagaccaggagtatgaacttgacaaagaaaggcagaaatggatggagtctgagagcaagtggatttcacttaccgaagagttgagggtcgatctagaatcaaacaggatgcacgcagagaagaccgagatggagctctgcaacgagaagaagtgcacagcagagctagatgacgctcttcaacgagcgatgtacggccacgccaggatggttgagcattatgttgagctgcaggagctgtataatgatcttctcgagaagcaccgccgagtgatggaggcgatctctgaggtgaagagggcggctgccagagcaggcaggaagggctgtgggacggccttcgctgctgccctcgccgccgagctctccacggtgagaatcgaccgagaaaaggagagggctcagctgaaagaacaaaacagaaggctccgcattcagctgcgagacactgccgaagctgttcatgctgctggagaactgctcgtcagattgagagaaaccgaggaagcatctacactagaaaaggagaggactgccgcgttgttgcaagagaacgagaagctgaagaagcagctggagaagctgaggaagaagcacgagatggagctggagacgatgaaggtgcaccttgcggagagccggctgccggagtcggctttgggtgccttctaccaccacgagaacgagaggacgccggacgacgatctgtcctggcgggccgccttcgcttctgcgtacagtgactgaagttacctgactggggattgcttgggagttgagtctcgtcaactgagacaggttgacaattggggcatgagcatttctacgaccttgtttgattttaagtacatgactcgattggggcatggggcaaagtttttatgtatactgcttgtatgggaactgaatttgaacgagttttatgtagtctttcgagtatttttttggtcgatcccccagttcctgtttaccgtactgccaaagtgcagcctctggtcccacctttaactccttttttaaaaaaaaatataccaaaaatttgattttgaatttgtcatagaacatggcagttttgggcttgtttgtttatatgttaaattgttaatccatatggattggac

SEQ ID NO: 10409 - DNA, 3779 bp, Zea Mays
aaattccaacggacggacagccacgcacatccgccccgcatttcatctttccaatcaagcgagaagcgtctcctcctcccttccacactcctctccactcacgattctcttcccttgattccgctagctgatcagcgtctcgccggagtaatacacagcagcagtaagaggccatggagatggtgcggcggaacctgaagcggcaggcgtcgcgctcgctttccgccttcgctggcgccgcatccccgcacgccgtcgaccaggagaacctccaccccaacctcgcctccacgccgccggcgtcgcccgccaagggcacctcctcgccgcgccccaagcacccagcggctgcggctgcggctgcggctcaaccggcggccaccgccgaggaggatcactccacagcccctacgaccgcgccagcggacgacgagcgcttcgtcaaggtggtggtgagggtgcggccgacggtgagccggccggtgaacggcaaggatctgtggttcgtccgcaagaccgccccagactcagtcgctgtcggcgaccggtccttcccagtggatggcgtcctcgacgacagggcctctcaggccgatgcgtttgatctggtgggattgcccatgatcgagaatgctatggccggattcaacacctccctcgtctgctatggccagagtggcaccgggaagacatacaccatgtggggccctctcggcgccatggttgacagtggctctgaccatgctgaccgcggcgttgttcctcgggttttccagaacctgttctctcggatccaaagaatgggagagagttctcctgagaagcagacgagctaccagtgccgttgctcgttcctcgaggtacataacgagcagatcaatgatctgttggaaccatctcagcgtgacctacagataagagagaacgctagcaatggtatccatgttgagaacttgactgatgaatacgtgtcaacagcagatgatatcagtcagatcttgatgaagaaaagttggtaccaccagtatgaacttaaaaagttcccgctctcatgtgatattcacctgcgttattgaagcatggagcaagggttcatcaaatgggtttagcagctcaagaactagcagaatcacctttgttgacctcgctggtcctgacactgatgaacttggtgcagcaaagcattccacaaaggaagaaagacatcttaagaagtctctttcaaggcttgggaaactagttaacgttctttcagaaactccagagtcacataaagttgatttaccatatgagcaatcccgtttgacacatgtgctgaaggatacactaggtggcaactccagggttatatttttgtgttcgatttcttcagagcacagatgcagatctggaactttaagtacactaagatttggtgagcgagcaaagctaatgccaaacaaacctgtgataaatgagatatcagaagatgatgttaatggtttgagcgatcagatacgtcagttaaaggatgaactcataagaacaaagtctggagacaccacaacttgcaaggctaggtacttcagtgcacaaagtgcccgtgaaagtttgcatactttgcgagtgagcctcaaccgctctcttatctttcctcacatagaagttgattcagaggaagaaatggatgttgatgaagaagatgtgcaagaactgcgtgatcaaattagcaagattcactcttcatctgaagatacattggatgactttatggatgcagaaagtggagacgaaagcactccttgttctgtgggaagaagtgaagatgatcaagtaatcatagatgattttgaaggtccacaacaggaagagcaaaaagaagtatctaacaatacaaatgctaatgaagacctcggttctgacagaaaatctaatctatcaattattgcctccacacggttatcacctattcaggatccaacattgtgctcttctccaaagatccacaacaaggcaagaatgagcatcacttcactggggctatcaccaagcaagattagaatatcagacagcccaggtgatagaaatgttgaaatgtgtacaaatagtgcatttcgttcctctctacaatcaagcaagcttagccccactgactcactggctgcaagtcttcaacgtggcttgcacattatagagtaccatcaacagaatccagccccaagaaaatcatttattggtctttcatttgaccatttcgctcgtcagtcagtagcaaaaatcagttcagctgttcaggctctaccagaggaccaaggaaacaacctttgttcattctgcaagaagccaatgaacacaaatgataatcagacagaaaacgtaaatttagacaaacagattaaggatggcaacataactaaggaaattgcttccaagagagaaactgagcttgaagctttatgcgaagaacaaagagcaaagatccaggagctgagcagtttgattgaccaatataagaacaggtcagaagaactaactagtgaaggcaaggtttctgtctcactcagtgtgaatgagagggaggtacttcttgctgaaatccagagtctgagggagcaactcaaaaaccagactactgtatcaactactggtagccttcttgaccagttaaggaacggcagcacagaccaggagtatgaacttgacaaagaaaggcagaaatggatggagtctgagagcaagtggatttcacttaccgaagagttgagggtcgatctagaatcaaacaggatgcacgcagagaagaccgagatggagctctgcaacgagaagaagtgcacagcagagctagatgacgctcttcaacgagcgatgtacggccacgccaggatggttgagcattatgttgagctgcaggagctgtataatgatcttctcgagaagcaccgccgagtgatggaggcgatctctgaggtgaagagggcggctgccagagcaggcaggaagggctgtgggacggccttcgctgctgccctcgccgccgagctctccacggtgagaatcgaccgagaaaaggagagggctcagctgaaagaacaaaacagaaggctccgcattcagctgcgagacactgccgaagctgttcatgctgctggagaactgctcgtcagattgagagaaaccgaggaagcatctacactagaaaaggagaggactgccgcgttgttgcaagagaacgagaagctgaagaagcagctggagaagctgaggaagaagcacgagatggagctggagacgatgaaggtgcaccttgcggagagccggctgccggagtcggctttgggtgccttctaccaccacgagaacgagaggacgccggacgacgatctgtcctggcgggccgccttcgcttctgcgtacagtgactgaagttacctgactggggattgcttgggagttgagtctcgtcaactgagacaggttgacaattggggcatgagcatttctacgaccttgtttgattttaagtacatgactcgattggggcatggggcaaagtttttatgtatactgcttgtatgggaactgaatttgaacgagttttatgtagtctttcgagtatttttttggtcgatcccccagttcctgtttaccgtactgccaaagtgcagcctctggtcccacctttaactccttttttaaaaaaaaatataccaaaaatttgattttgaatttgtcatagaacatggcagttttgggcttgtttgtttatatgttaaattgttaatccatatggattggac

SEQ ID NO: 10410 - DNA, 2371 bp, Zea Mays
gtccggtgcgccagaccagggcaaccttcggttatcccttgctctctttgttgaacccatttcttggtctttttattggctaagtgtgaacctttggcacctgtataacttatagactagagcaaactagttagtccaattatttgtgttggtcaattcaaccaccaaaatcaattaggaaataggtgtaagcctaattccctttcagtttgcctctttgatttatttacatgcaatctttacagggaaggatactcatggagatgaactatatgcttgcttatggttcaactgaagcttctttgaggttgttgtggaggtttgtccaccttgaacatttgttgccctttcaggttattgccttagacattaatttacctatgaagcaatcattccatattctccatgaacagtctttacagtgaaggatactcatggggatgaactatatgcttgcttatggttcaactgaagcttctttgaggttgttgtggaggtttgtccaccttgaacatttgttgccctttcagtatgtacaggcactcagacaacatatttctcttcgactcattttaagaggaaggataaaggaactaatatgctacttgtgggttttattttgacatttgtttactactcttatgtagattgaaaggagcttaaaatcttcaattgacatgttgtaaagatgaaatagaaacttatatatttattatattctcttcttgctctctatcccactttgcagagcagaatgtttcgtcattttcactaaaaactataatcaattaagcatttgtttttcttatagagttagtactttctctatgttattcttatgtacttcatttgcccttctggtcctgtagggttgtgtgttattttagctgatatggaaacatggctgagttgtgtgttattttatcttacttttggttatttgaaagtttatgtaaaggacaaccatctcatttattaggattatattatatttcagtgatagcaataattcttgaacactaacctgacttaactgtgttgtacttctgtagagcaaatcctatgcatgcatgatcttaggctagctccatcaagggaccctaaaggattctgtaccctaaatatagaggatcaaatggtcctctacactctccagcagcatcctctaaacggtcctctaaatttagaggacgctgctggattctctatatatagagtttctctaaacggtcctctatccatttgaatactttaaataaccggtttagcaaaactaaaatgtgtacaatacatttgagagtatgacaaatacgtatgtacaaaaaataaaaataaaaaatgtctctaatatagatatttgagtataaaggacgtgatttagaggacgtcgttggagaggaaggaaatatagaggatgaaatcttttataggagactataaaggacggatatagaggatggatatagaggacgttgctggagacaaccttaggttgaattcttgagattaatggcaagctctaccaattagaagtggagttcttttcttctcagcttgtagaccaacctgttgtagctccactttcaagatattgtgatccaaaatataaactcttgatcttttctaattttgatttgacgtgcactattattgattcatctgccaatggcatcaagttttgtttccttgtaacaaacctatttggtgtacttacatgtgtttgtactcagatgtaatgcatgataccttgtattgtaattttctgcttgtttcttttcttccttagcacaaggtggttgttgatcattgtctttcttttcttgagtggttgatgagcattgcatttccttgtaacaaagtctgaattcattatcttaaacaaattaatactacgaggggctactgttgggggccttcgtcctccaaaggtcctcaaaaacatgatttaacaatatcttccaagtgtgacatatgaacaggtaccttcggactcaggctaaaagcatgtatgatgtaaaaagcatgatcgtgatgaaggttggagtcgctccgaagctacgcgcaggggagcttcggctaaatggcggaaaaaggaactgacttaaaggggaaaaggctatctagtcctcatagaattgtctataagttaataataaatgtaaagggcatgaatgtaatttctcacaggttgtgtcttatgcctataaatagatgaacagtacccatgtactgttcacgctgacttgtactcgcttttgcgtcacgcttgtactttttgccttctatcaagccgaaggtacgtttgtaattcaatattgtttctgtctttctaggataatacaatgagaacgaattaataatgttatgtgat

SEQ ID NO: 10411 - DNA, 3165 bp, Zea Mays
aatagcttcaagtcgtggcattttcaaaagaaaatttaaaaaatatctagagtgccacaggaaaacagagtctcacatatagtatactaattaattttacgattaaatagatgtatctagaacattaccgacaattcaagataggtgataataaagactactaccttgatagtaacatcctcttctccatcagcaactataattctcactggaggaacatctttatcaaaattaatatatcggtcttgcaccagacggagtcgcagagagagttcttcaccaattcaaataacatcagtcgtaggtgtaatgtgatgtctatatttgacgaagccaaaaggttagctaatgtttcaaaaaatgtatctgtttgtttttcttatatcgaagagtaagccaattaaaaggaccaaaataacgaggctatagaaatgtgcacaaacaaattatgtgatctataagaggcatccaaattgaattctaaaaacattttatgacattaccatgacagataaaatgataccatcgctaacgatccaagtccatggaggtgatttatgagagattataggatttacagaaatgtaaaatttgaatcaccatatatgttaatatcaaaagcttatcagtattcccttaaacgatccaagtccatggaggtaatttatgagagattataggacttacaaaaatgtaaaatttgaatcgtcgtatatgttaatatcaggagctgatcagtattcccttaaatagacagaacatgcatcttgacaatcagcttgagccacctgtattggggacaatcttgtattgatgaggcatatgacaccaagctctggtttatgatcatgcaaagccacatgcttcccttaaattaatcgagtccaaacaactcaggccacaaaatggttaacagaccaaacatgagtcccactgcccacaacataatggtcacattggtaataatattcatctagctaattaacgaaatatcccttgataaaaaatacattctttgctgcgagggaggtgaagaaccccaaacacgaagaaaaacattagcatgttaggaagcagaaatttactttgacaagacaaccctgcaacagtaactagatcaaaaatgtacaatagttgataaaaaaagccataattgtaaaacaaaacaagtgtgctatgaacataaaggcaagtgacaaatttttggttgctggcgtataattcgacaatttgaaaatagtaaatacatatggagaactgctatgcagcgtaggtgatacaacatgattaggaccctgagaataatattgaggatggacgtttcacctctctcacctgcgagaacctccacttgaggggctaagtcggagagggtgctcgcggtgcctaggcctgagccagatgcgtggtgaggctgagagcaagggctctggtgctgcaggtcgttatctttttttggccaaaaagggatgttgtccttgaaggctaagaaagaggtgcaaaccttgtttgaagaaaaccagaatctaaagaaccataacttgatgctgtcagcctgtcagtcagtggagcgtgataacctgaaagcacttcatcataacttagatattgagtgttatcaactgaaggcaaccatcgaagaaaccaaagctaaaattgaatcattgaccacagaaaattatttagctgaaagaaaactccagcaattgagggtgaaaatagatggattgaagattgagaccacaaagacaatggacaatttggacaaggaacatagtattgcagcagaactatagaagaaaaagaagggctaacatcagaaaattctatgtaaacgagtgagttagagcatagtcacaaaattcctggatcgatagggtcgaggaacgtggtacactatctatgagagatttttacatggtaggtacaaaaattactctacatatccaggtcgaggatggtgtttccgggtcaagggtcgctaccactgtacccgtttcttgtgactatgagttagaggaagaggaggcacattctaatgttaaagatttggaaaaggaactggagtcaacaaaaagtgttcccaatagtcatattgtggaactatggaagtagaagaattctaccacataatagatagaatggctaaaggcttctttgatgaatattgagaatgatctatcgcaacaacttgataggatttaagatatgtagaaaactaatgaaacctgaagctggcaaatgctaacatgcacaatgagattgtagaagttcaaaagaatgaagttgttgcttctatagttaatcttaagagaatgttagaacaacaagtacaagagatttcaaatcttcaggaggacaacaaagacctcaaagcagcaaagactgatttgcataatgaggttatgttacttcaaaaatagaaaattgtagcactgactcagttacaagaatctgaggctcaaatcaagaatctttagagtgacttggaatagcagtagaaccaaatttcagttatccagcaagcaaatgaagaaacaaaggataaaaattcaaacttgcaaaagcaattggaagaaactaagactaatctgcaatagttccattgtctaagcagttcaacaatttatgatcacattgttttagagatgtctacacttcctatttttaatgattgttttttactgtgttgacacttcgcattacaccataagcagaacttggagagttgattagcacaatcaaccaccggatcaaccactaatattgaatttaatattcaacatctgtaagtgatatgaaaaggtaaactatgtaggtgtgctagaaattagagggaaattatggccaatacattgagaatttgcaagccgtagaaataactgtgtctgttctctgagtattgcccattcttgttcctttataaaaaggatccgcttgccaatgagtgatattgattatagtatgacgatagtgctgtctacagtggtggagttcgttcactgacctcggacgttgtctcggccgccagctggtccccgtcgaacacccgatggatttccttgaaagcgtcgccgaacttctccttgagcacacgctcgatgtccatattcatcgtcgtcgccgcgctagggcagttgcagcatgctccttattatattactg

SEQ ID NO: 10412 - DNA, 703 bp, Zea Mays
aacaaaccctgctgctacagcacgtgcaaaggccatagcctgctatttacgtaagactgttatgcaagtcttcatcactctaagcagttgagccctacaaaatatgaagtctgagatagaactatatattttagatgcaacaagcatatgggttactgatgtaatgaagtgctatcatcttgttaatatggtcgatgttatattattacaaaagtagcaacacttcaacaacataaaatcagcaatcaatataagtaattagagatttgaatatgtagccaagaaattatgactataacacatatatacaagaataaattgatgccgatgtcacataaatgaaatttatttttgtattggcacaactgcatccaaccatataatatgctaaataaaaacagatatatgcaatagtgcgattttgtaaaaactgaataataaattgtttattaatttggtcaatctgggatgctttctcttttacaacagctgcaacaagttcatcttttgtcgtctcttgagccgtctcaatccgttggattgtttcttcattctattaaattagttgtattaagttcaattacttaatgaaatagtatatatagaaaagagaacataaacatttatcgaatctagcacaccttcctctgcagctcatcctgcagcttttgttcagtttttttcttgcagttcttttattggc

SEQ ID NO: 10413 - DNA, 1217 bp, Zea Mays
atatttgtgctagattattaagaacaatgattctagattcaatcccaacaaagcacattgcaaagagaagccagaaattggccttcaatattgaatacaaaaacggacatgagtgccggtctaaagtattgaaagtaaaatgttaatccccttgttgttttgttgcatgtcattaagcgaagcaacaaatcgcaaggcactttcaagcagacactatgataggacttacttccgcgtatagaaacgccacttgctcgctgcccaaccacgtactttctttgcaggaaaacatgattagaatctagacaacaaaaatcaaaaaccaaaagaggtagacaacccctccttttctagattaaaaaggaaaagaggattagaatctgaacaacaaaaatcgaaaaccaaaaagaggtaagtaaccccttttttcctgatttaaaaataaaatatttggggaacgaatagtagagaaattagaaaacgaaacaaactacactcattgttgattctgctaacagaggaggagaaaagggtgaggggctagggaaagagtttctagagaaaacgcttggaggcactgacgtcgaacttgataaggttctttaatacgcagcaacaggtagaaaatataagggaaaaaagggtatttagtttcggatgaatctcacaaacgaagaatacgaaccccaaaaccacgaagccgagcaaacactgaacaaaacgatggcgccgaactggataagtagaatatgcattgaccatgagagaaagaccttgccttcaccattgattggaaatcgtacacctgaaaacatctgggcgacgtggacaccgcgagagcggctgttttgaactagatttcgtatataaggaactatggtttcagtaattaaacagaaaaatggaagcacgacatcatggcagctacgaaataattcatatgaacgaatgtacactaaaagaaattgtatatgtgtagatgcgtaacagattgagagattatgttgcagaatataaccttttgggtaactattcaattgtatcggttggacctttccatttctcattaagtactgcaaaaaaaatatacataaagaagttacttgtaaagaagtggaaagcgtgtagtgatttgttatttgtaaataaaagtattgcaggagtacatgacataggattccattgtaacagatgcatctcaaaattcaggatggctg

SEQ ID NO: 10414 - DNA, 574 bp, Zea Mays
cttataaacagcataatgaaactggcgtcatgataaaaaggatggcagcaaaccaagtgaacccgctcaggaaaaccgggaggagcaaatgtctgacgcgaacgacccacaaggaagcaagccagccaccgccagcacgcagaacgacaagttgtacaccgccgagggcatactcgaccctcgcaagaggaaagcagagaagaaacggcgcaaggcgaacaggttcagtgtgctgaacgacatggacgcggactacgatttcaaggtggattaccagatggaggacgccgcggatggtgaagacgaagacgctggggatgaagccaaggaggataatgagccgatgactggcgtcgacgattcgtgaaattttggccccttcgtcgtgtatgaggtgatggctaggctcagcgggggttgcaaaattgacccaccaaggttttgtgctcagtttgcttgtttaatgaaaagattatactatgagaaggcttgcgttttacctgttccagtacctacttttacctgcttttgcataagttgcattcattgatcttgatgcgctatcggtcgcatt

SEQ ID NO: 10415 - DNA, 2069 bp, Zea Mays
agtatcgacgcccttctaaaaccctaactccctctgtgtcctcgacgccgccaagccatcctccctctggagtaccgaccgactctccacctcaggaccgcaagctacttcctccgcctcgacaggcgtcggcgagatggtgaagagaagcaagaagagcaagagcaagcgcgtcacgctgcggcagaagcacaaggtgctgcgcaaggtgaaggagcaccaccgcaagaagcgcaaggaggccaagaaggagggcaaggccggccagcggaagaaggtcgagaaggaccccgggatccccaacgagtggcccttcaaggagcaggagctcaaggcgctcgaggcccgacgcgcgcaggcgctccaggagctcgagctcaagaaggaggcgcgcaaggagagggctcggaagaggaagctaggattgctcgaggatgaggaaattgctaatttggcatctgcagcttccgcgcagggcagtgagtttgcagcaaaggatgcagcaaaggataaagctcctttaacagtggcaaagagcaatgatcattctgagagatctttctacaaggagcttgttaaagtaatcgaagcttctgatgtgattcttgaggttcttgatgcaagagatccgctgggcacccgttgcattgacatggaaaagatggttaggaaggctgatccaagtaaacggattgtactacttctcaacaagatagatcttgttcctaaggaggcggtagagaagtggcttacatatctgagagaagaaatgccaacagttgcgtttaagtgtaatacccaagagcagcggaccaagctgggatggaaatcttcaaaactagataaaacaaacatcatcccacaaagtagtgattgccttggtgctgagaatctaattagattgctcaagaattattccagaagccacgagctcaaactggcaattacggtgggtattgttggactccctaatgttggcaagagcagtctgatcaacagcctgaagaggtcccgagtggttaatgtcggttccactccaggggttactagatcaatgcaagaagttcaattagacaagaaggtaaagttgttggattgtcctggtgttgttatgctcaaatcttccaacagcggtgtgtctgtagctcttcgaaactgcaaaagagttgagaaaatggaagatccagtcactcctggttccaagcttcagttcagttgatgatttccttcagaaagtatcaactgtacgggggaaattgaaaaagggtggtgtggtggatgttgaagctgctgcgagaattgtgcttcatgactggaatgaaggtaaaataccatattttacactgccacctaaaagagatgctgtggaggactcagatgtagtgattatatcagaagatgggaaagaatttaatattgatgaaatttacaaagctgagtcttcatatattggtggtttgaagtccattgaggagttccatcatattgagattcctcctaatgctccaccggcaattgacgaagagatgctagaggatggcagcaaaccaagtgaacccgctcaggaaaaccgggaggagcaaatgtctgacgcgaacgacccacaaggaagcaagccagccaccgccagcacgcagaacgacaagttgtacaccgccgagggcatactcgaccctcgcaagaggaaagcagagaagaaacggcgcaaggcgaacaggttcagtgtgctgaacgacatggacgcggactacgatttcaaggtggattaccagatggaggacgccgcggatggtgaagacgaagacgctggggatgaagccaaggaggataatgagccgatgactggcgtcgacgattcgtgaaattttggccccttcgtcgtgtatgaggtgatggctaggctcagcgggggttgcaaaattgacccaccaaggttttgtgctcagtttgcttgtttaatgaaaagattatactatgagaaggcttgcgttttacctgttccagtacctacttttacctgcttttgcataagttgcattcattgatcttgatgcgctatcggtcgcatt

SEQ ID NO: 10416 - DNA, 2077 bp, Zea Mays
cttttcaggcctatccagtatcgacgcccttctaaaaccctaactccctctgtgtcctcgacgccgccaagccatcctccctctggagtaccgaccgactctccacctcaggaccgcaagctacttcctccgcctcgacaggcgtcggcgagatggtgaagagaagcaagaagagcaagagcaagcgcgtcacgctgcggcagaagcacaaggtgctgcgcaaggtgaaggagcaccaccgcaagaagcgcaaggaggccaagaaggagggcaaggccggccagcggaagaaggtcgagaaggaccccgggatccccaacgagtggcccttcaaggagcaggagctcaaggcgctcgaggcccgacgcgcgcaggcgctccaggagctcgagctcaagaaggaggcgcgcaaggagaggcttccgcgcagggcagtgagtttgcagcaaaggatgcagcaaaggataaagctcctttaacagtggcaaagagcaatgatcattctgagagatctttctacaaggagcttgttaaagtaatcgaagcttctgatgtgattcttgaggttcttgatgcaagagatccgctgggcacccgttgcattgacatggaaaagatggttaggaaggctgatccaagtaaacggattgtactacttctcaacaagatagatcttgttcctaaggaggcggtagagaagtggcttacatatctgagagaagaaatgccaacagttgcgtttaagtgtaatacccaagagcagcggaccaagctgggatggaaatcttcaaaactagataaaacaaacatcatcccacaaagtagtgattgccttggtgctgagaatctaattagattgctcaagaattattccagaagccacgagctcaaactggcaattacggtgggtattgttggactccctaatgttggcaagagcagtctgatcaacagcctgaagaggtcccgagtggttaatgtcggttccactccaggggttactagatcaatgcaagaagttcaattagacaagaaggtaaagttgttggattgtcctggtgttgttatgctcaaatcttccaacagcggtgtgtctgtagctcttcgaaactgcaaaagagttgagaaaatggaagatccagtcactcctgttaaggagatccttggtatttgcccacatgagaagttgctgtctatgtataaggttccaagcttcagttcagttgatgatttccttcagaaagtatcaactgtacgggggaaattgaaaaagggtggtgtggtggatgttgaagctgctgcgagaattgtgcttcatgactggaatgaaggtaaaataccatattttacactgccacctaaaagagatgctgtggaggactcagatgtagtgattatatcagaagatgggaaagaatttaatattgatgaaatttacaaagctgagtcttcatatattggtggtttgaagtccattgaggagttccatcatattgagattcctcctaatgctccaccggcaattgacgaagagatgctagaggatggcagcaaaccaagtgaacccgctcaggaaaaccgggaggagcaaatgtctgacgcgaacgacccacaaggaagcaagccagccaccgccagcacgcagaacgacaagttgtacaccgccgagggcatactcgaccctcgcaagaggaaagcagagaagaaacggcgcaaggcgaacaggttcagtgtgctgaacgacatggacgcggactacgatttcaaggtggattaccagatggaggacgccgcggatggtgaagacgaagacgctggggatgaagccaaggaggataatgagccgatgactggcgtcgacgattcgtgaaattttggccccttcgtcgtgtatgaggtgatggctaggctcagcgggggttgcaaaattgacccaccaaggttttgtgctcagtttgcttgtttaatgaaaagattatactatgagaaggcttgcgttttacctgttccagtacctacttttacctgcttttgcataagttgcattcattgatcttgatgcgctatcggtcgcatt

SEQ ID NO: 10417 - DNA, 2078 bp, Zea Mays
agcagcggagcccttttcaggcctatccagtatcgacgcccttctaaaaccctaactccctctgtgtcctcgacgccgccaagccatcctccctctggagtaccgaccgactctccacctcaggaccgcaagctacttcctccgcctcgacaggcgtcggcgagatggtgaagagaagcaagaagagcaagagcaagcgcgtcacgctgcggcagaagcacaaggtgctgcgcaaggtgaaggagcaccaccgcaagaagcgcaaggaggccaagaaggagggcaaggccggccagcggaagaaggtcgagaaggaccccgggatccccaacgagtggcccttcaaggagcaggagctcaaggcgctcgaggcccgacgcgcgcaggcgctccaggagctcgagctcaagaaggaggcgcgcaaggagaggggcagtgagtttgcagcaaaggatgcagcaaaggataaagctcctttaacagtggcaaagagcaatgatcattctgagagatctttctacaaggagcttgttaaagtaatcgaagcttctgatgtgattcttgaggttcttgatgcaagagatccgctgggcacccgttgcattgacatggaaaagatggttaggaaggctgatccaagtaaacggattgtactacttctcaacaagatagatcttgttcctaaggaggcggtagagaagtggcttacatatctgagagaagaaatgccaacagttgcgtttaagtgtaatacccaagagcagcggaccaagctgggatggaaatcttcaaaactagataaaacaaacatcatcccacaaagtagtgattgccttggtgctgagaatctaattagattgctcaagaattattccagaagccacgagctcaaactggcaattacggtgggtattgttggactccctaatgttggcaagagcagtctgatcaacagcctgaagaggtcccgagtggttaatgtcggttccactccaggggttactagatcaatgcaagaagttcaattagacaagaaggtaaagttgttggattgtcctggtgttgttatgctcaaatcttccaacagcggtgtgtctgtagctcttcgaaactgcaaaagagttgagaaaatggaagatccagtcactcctgttaaggagatccttggtatttgcccacatgagaagttgctgtctatgtataaggttccaagcttcagttcagttgatgatttccttcagaaagtatcaactgtacgggggaaattgaaaaagggtggtgtggtggatgttgaagctgctgcgagaattgtgcttcatgactggaatgaaggtaaaataccatattttacactgccacctaaaagagatgctgtggaggactcagatgtagtgattatatcagaagatgggaaagaatttaatattgatgaaatttacaaagctgagtcttcatatattggtggtttgaagtccattgaggagttccatcatattgagattcctcctaatgctccaccggcaattgacgaagagatgctagaggatggcagcaaaccaagtgaacccgctcaggaaaaccgggaggagcaaatgtctgacgcgaacgacccacaaggaagcaagccagccaccgccagcacgcagaacgacaagttgtacaccgccgagggcatactcgaccctcgcaagaggaaagcagagaagaaacggcgcaaggcgaacaggttcagtgtgctgaacgacatggacgcggactacgatttcaaggtggattaccagatggaggacgccgcggatggtgaagacgaagacgctggggatgaagccaaggaggataatgagccgatgactggcgtcgacgattcgtgaaattttggccccttcgtcgtgtatgaggtgatggctaggctcagcgggggttgcaaaattgacccaccaaggttttgtgctcagtttgcttgtttaatgaaaagattatactatgagaaggcttgcgttttacctgttccagtacctacttttacctgcttttgcataagttgcattcattgatcttgatgcgctatcggtcgcatt

SEQ ID NO: 10418 - DNA, 240 bp, Zea Mays
ctgggcactggtggcggcggctatgggcactggcggtggctatggactgggcactgtcagcactcagcactgtcaacaaacaaattaattcactgtcagcactcagcagaagcagaactgggcactggcggcggctatgggcactgggagctgtgggcggaggtaagagggaggagggaggaaggggggccggcgaccggcggcatacctggcggctatggagtctctggacgacggtag

SEQ ID NO: 10419 - DNA, 320 bp, Zea Mays
ttatttcctgcaccatcgagtgagtgttttagacacagcaagcaggccaagcatgcttcaccacagagcttgtattgaattccagtgcaagtgtcaaaccgaaatggtttcacaccacattcttggaaaagaagaatactgcagtgctaattgtgggaagtactaatgttgacaaagttggatggcagaagcacaaagaatatgctaaaaacaattacttggctactgtctgagcaatcaaagtgacccgatcaatgcacacaagataaacttgaaagttgacttatttgggatataattcggttaaaattaaatccaga

SEQ ID NO: 10420 - DNA, 2063 bp, Zea Mays
attcattccaaccaaacggcaaacgcaaccctaggaagcaagcccacaggacctctctgcttctgcggtttcggcattgggatatagtccctaccagacagaatcgattccagtccaggcttccagcgcgagagggatccatctccgttgagtcgaggcggctccaactccggctcgtggcctcgcggaccaacatggccgccccttcgccctcgccggtggaggctaccctaccgcctgaggccgcggccgccgccgaggaagaccagtgggataatgatgtggctgagcctagtgtccccaaagaaaaagatcctgagcctctacaggcaaacgatgagaaaatatatctgggacctcatggagctccaccatctcaagcaaagcagcaggagctgaacaccgttggccgcaagcagcggttccggaacaagctgaaggaagcagataggaaattccccggcaatgctcaggagaacaaggtggagaacctaagggagctgatgggtgctagaggtggtaccagcctgcctaagagctctcctcgtgattggctcgatccgcactgccatgaatctgaattcgacagaaaaccaactagatgaccggcaaacgatgcagcgtgcgtttacctgaaggttgattacgctgtagcactggtgcgaggtgttattcgccaataacagatacttatggttgactaatagatgaagcaaagcaaaagggtttcttgtggtgtaatttatcggagctctactgttctccatgtcgcgtaaatactcttaattctcggttgtgcgcgtgtgtcgttgcatttgctatttacattggaaaaatatatggaaacaagttgctgttgcgtaactagtatgtaatgtctgatgatatgcgatcctgagcacatgcgaaaatttctgctcatatgttttgaatcgattcataaacatgtggttttcgcctttgcacccatgtcatgttaccgtctgaaccttttgttacgctagccgcagattgatcgattcattgacagcattggctacacattaattaatgtacgaatatgccattgttatacaagacccttttttttgggggtgggggggggggggggggtgattgtagcaggacctattgtgaggtctaccaaaaaaccaagttgtggttctggctgttatgattctacaactgcagatggtacaaatcttctcttgtgcgaataactgaagattgataccagggcactgaatcggaacacagcctgaagagtgaagattgaagttgttgcgaaaaggtaaacagtttcgggttacatacaccacgcgatcatgcaattatgctcacacgcaagaactcttgtctctatatatgaaggtacaaagtcgcaggacacacgctggatgagatgcaggctgacgagtcagcatctatgatccaggctggctgatcgcgttacggtcatcgcacagggaccttgatccagccattggcgaaggcgatggcgaggatgacgaagggggtggacatgccgaagatgatgatgtagggcaggggtgtcatcatggggttctccccctccctctcccccgcggtctgccagtacctgcatgcatcccatcaccccacgcatccgagtcactcacaggctgctacgaggagaggtgagattcacactgcttgcttactgttctggctcctcttccttggtgatgaacttccgcttgcctgcaggcttcagctctccgtctcctgcgtgcgtggatcagtttatttgggccaatcttgtcttttgtttcaaaaactgaagaaacatgactggagaagacggaggaaaacccgtaccgagcttcgctgttaccctggtgcgcttgctgacgatggcgcgactgcagaacaaaccggtgccagcggcgcctttcctcgacgatggctgctgcgctgtgatggcagtgcggctgccggcggcgaggagaggaggagctgccttggccatggctgggttggtgtgcatcacagccgcatgcacgtcacatgatatggtagtactactagtacccgtgtgtgac

SEQ ID NO: 10421 - DNA, 1344 bp, Zea Mays
cttttatctgtggaaaaaaaacaggtgtggaggggtcgacgagctggagagcatctatgttatcgacttaggatcagttcatggcacgtttgttgcgaatgagagattaacaaaagacaaccctgttgaactggaagttggacagtcacttcgctttgctgcatcaaccagaatctatatcctgcgaaagaacacagctgctctattcccaactcctagccttccatcagatgtcagtttgccatctcctccagaccccaatgatgaagatgctgttgtggcatacaatacagtacttaaccgctatggtattagtaaatctgacatattatccagttccaaagattcttcagggagtgccagctctggtgcaaatgatgataaacatgcagttgaaaggcccttgaagagaagtaaaaagcgcagagtgtcatttagagatcaggctggaggtgaacttacccaagtggttgggatttcagatggtgcagatgttgaaactgaaccgggccctataggtgtaaaggaaggcagtcttgttgggaagtatgaatctcttgttcaggttactgtcataccgaagggaaaggagcaagcatcacggaaagactttacctctacctcaccaagtggggtaacggataagctacaagaggtgcttaaaagagtaaagagcacgaccaggcctggaatttacgacgacctttatggggattctattgcgacaaaagtgggctcatcttgggcgtacaaatcagatgatctgtcagacaaagcccagcctgttgaggagaagacacttggcatggattcaaacttgaattcagccgatgacagtgatgacttgttcggtgacacgtgattcagaaattgtcagtgaatacaaacaaatgtattcttcagaatttcgtggcatagttgtttcatttgttagaggcttttcttttggcttagttatacatggttgtaccctctgcaaatcaaggtatgttcttttgcttaatgttagcaacttaaggacatgctttctcacagtaatgcctatgatgagtgtggcctcttcggaagcactaagcttttaagaaattggtttatggaaactggagtcgttacaaatgtaccagattgtctcagtttatagagactggatttccagtttcttaaaaaccaagaagttggcctcccagctaaaaccagttttgtctgtttagttacttcatgtctttgttgattttgcagaatttatctatattgccatctctttttaaaatagaggaagagtacgccagtcattatgtgcccccccccccccaaacacccccaccccccccccccaaaaaaaaa

SEQ ID NO: 10422 - DNA, 1441 bp, Zea Mays
tttcctataaacattataaaatagagcttttatgagttaaagcccataattcaaaataagtcattcttcgagctcttaacaaaatttgctgaactctttcgaccttaggccaaggctcaggctcccagcaacaatccgcgttaccagagtcacagacggaggtgagcgtccgacgcgcgccggcggcgcttccagagtctctgcgccgcgccctcctctgacttcacccgtgccttcggtggccctgcgtcatctccctcgtcctcctcccagtcatgcccctccctcaccgagtgggaggcgacagatccgagttctagttcgtgcggcaccgtgcgagtagcgcggccccggtgcttccacgcgtggaaggaacgcgggctccgatggcctgacgcgcgggggcgaggtgctggcaactccggcggcgcggtgtggaaggcgagctcgtctccgggcagaggtcaccgaaaggctgagcgtgcaggagggcagtaatctgcagcggcctgcagagctcttatctcgacacaacccaccccgcctgacgggatagaatcggtgggataagaggaccgatatcctttgcttgtctgcaaaatttaagtacacaagtgcaaatcagctggatttggaggtaaagacgggaaccaaagagctggtggattagagaggtgtggggagatgtaccgtgggggccttgaccgcttcaagaaggcacagacattggagcccttctcagtcaagtctgagtcaggcaccaagaaggcacctgcagctgcaggaacagctaaagcaccaccggctccgttgacactgccacagaattctaattttgtgctgggtcagaataaccaaagtctgcaaggtaccaacacaagggtggctgggcaagatggtgttgccccagggcatgttgggacacaggccggtggagggcaatcgacgtggcaacctccagactgggcgattgagccacgcccggggatctactatcttgacgtggtgaaagatggggaggtcattgacaggatcaatctggacaacaggaggcatctattcgggaggcaggttcctgcttgtgactttgtgttggaccatcagtctgtatcgcgtcagcatgctgccgttgttccacacaggaatggaaggtgattggagcttggagccttggagtcttggaccaaccgctggtgactggagcagtggagcttggagccttggaccagccgccggtgactggagcagtggagcttggagccttggaccagccgccagtgactgaaccgtgacagagggcagtagggctagggcacaccacgtcgaatgtctgaagttggcggctggcagggttttggttaggcaggggtagggtttcgactgacaaaagggcaacttatatgttgctactgtagatgggccgaaaaaagggttgcccaag

SEQ ID NO: 10423 - DNA, 2945 bp, Zea Mays
ggccgccccacctccatcttcccatggtggtggtgtcatcccccttcctcttcctcccctcgtgcaagtgcaaccacccacccgctctcccaccgccctcctcgcctatccctgccgccactgcggccgtcgatgagccccatgcccaccgcgccgtacacctccgcgacctcgctgctgctgggcagccgcaggctcccgcggttccagttccagtccctccgcacccccaccaagccccccttccgccgcccggcctcctcttcgtccacacctctccctcgatgccgcgccagcgcgaccccccgccctctggcccccgtctgcgcttccgccctcgcgctgcccgtgtcggtggcggccgctcccccaccgcaggtggacggtggctgggtgggagggacggcagcagccgtgaggagagtagctgtggcggttgcgtgcggggctctcgcggcggcgtggtgccgccgggcgatggctgtgggggctgccgcggcggcgggagccggggccggggcgccggggacggtggaggctgctgcagggattggatggatggcgctgcgcgggggctggcccagggtgctacagattctgcagctgctcagggagcacggcttgattctggccgcgctgcttagcctctctgcgttcttctccatggcagaaacttctatcacgacgctttggccttggaaggttcgtgaactagctgagaaggaacctgagaatggtgttttcaaaatgctccgaagtgacgtcacccgtttcttgaccaccattctcattggcacaacagtggtcaacattggtgcaacagcaattgttactgaggcagcaacagcaatgttcggtgaagcaggcgttagtgcagcaacaggtgtcatgacagttgccatcttacttcttacagaaatcactcccaaaagtgttgcagtccataatgccaccgaggtcgctaggtttgtggtaagaccggtcgcatggctttcactgatcctctatccagttgggcggattgttacttttctgtcaatggggatgctaaagattctaggcctgaaagggagaagtgaaccatatgttactgaagatgaactgaagttaatgttacgaggagcagagttgagtggtgcaattgcagaagatgaacaggatatgatcgagaatgtcctggaaattaaagatacacatgtgagggaagtaatgacgcctttggtggacgtagtagcaattgatgctatcgcaacacttattgatttcaaaaacttgtgggaaactcatcagtactctagagttcctgtatttgaggagcgcatagataatattgttggaattgcttatgcaatggacatgcttgaatatgttgaagaggttgagaaattgaatgcaatcactgtgaaggaaatcgcacatatgcctacatactttgttccagatttaacattagaagacgtagtggaagaaatagttggtgaaatcttcgatgagaatgattccaaggaggaaatccagaagaaaacaggctatatagtaaggcggggggatggaacatttgatgttgatgcaaacacatcgatagatcacctatctgaagagcttggtatcaaaataccagagggacatcagtatgagacggtgtctggttttgtctgtgcatcttttggctatattccagaagaaggtgggaaaatgcttgtgattcttgaaaagaatttcagagaagaaaacggtgaatatcaggaggaaggtcctgatcgccaagatgatagagaaaaaactcaagcttatgaactcgagatagtggaagctaatgcaaggaaggtgggcaaagttctattcaagccaataagcagtgaatgtgttgatgtcgacaacaagggtgtgaaccgcctcatttccaagaagatcatcaagcggaagaagaaaggctctgatgattcctccaatgatgacgagtgtccagacgtaacagagaatggttgccctgcagagttactctcatactcggatgataacagtgccttgttggaagatgcaagcagttctagtgccaaaagatgacaagaaaggaactgcaagaccatcgtactactggtaataattacagcacaccgtcacccctcctaataccccttgttacaacagaagaagagaacatagtagtaggctaccaaaaaaaaaactgcgagagcaacaccaagtggttaacagaagtttatagggcattggaacatttttttagtagcagtagcagtctagaggtgcagcgaggtgtcgacgtcgacttcaccagagacatgtttgtagttgtaagtcttactgggccacagctccaccgtgatggggtcgttatcgccgtggagctggaagcttttgcattcacaggccgggaataaggaggcggcagcggtgtcccgcagtggcctgcacgggtagagcagctccggatggaagaaccacttcacgggcatctccctcggggaggtggtggccacagggcgcggggcgagcacgtggagtagcctctcctcccgcttctccctgatcctctccagctccctgaacctctgctgcagcagggcgatggaggagaacatcatctggccctcgctgctctgtacccccatgatgaacaaaaactcctcgttttcagttgatgtgtgtgtgtgtgtgtatctcagccagcgtctgtctacttcgctcgctcgctgtgtggggttttgctgcttgaggtggtggtggtcttgggcatgcgcctacttataagctgcaaagttttgtcacggcgcagggcgtcgtcttgtggtcgtcttgcaagttgcgccaattcttccatcttccattatgtgatgctaatgctatggcacaggatgttatgggctgattggaaaccaagaaacactactccacgtctctactgctgctatgagagaggacct

SEQ ID NO: 10424 - DNA, 2700 bp, Zea Mays
ggccgccccacctccatcttcccatggtggtggtgtcatcccccttcctcttcctcccctcgtgcaagtgcaaccacccacccgctctcccaccgccctcctcgcctatccctgccgccactgcggccgtcgatgagccccatgcccaccgcgccgtacacctccgcgacctcgctgctgctgggcagccgcaggctcccgcggttccagttccagtccctccgcacccccaccaagccccccttccgccgcccggcctcctcttcgtccacacctctccctcgatgccgcgccagcgcgaccccccgccctctggcccccgtctgcgcttccgccctcgcgctgcccgtgtcggtggcggccgctcccccaccgcaggtggacggtggctgggtgggagggacggcagcagccgtgaggagagtagctgtggcggttgcgtgcggggctctcgcggcggcgtggtgccgccgggcgatggctgtgggggctgccgcggcggcgggagccggggccggggcgccggggacggtggaggctgctgcagggattggatggatggcgctgcgcgggggctggcccagggtgctacagattctgcagctgctcagggagcacggcttgattctggccgcgctgcttagcctctctgcgttcttctccatggcagaaacttctatcacgacgctttggccttggaaggttcgtgaactagctgagaaggaacctgagaatggtgttttcaaaatgctccgaagtgacgtcacccgtttcttgaccaccattctcattggcacaacagtggtcaacattggtgcaacagcaattgttactgaggcagcaacagcaatgttcggtgaagcaggcgttagtgcagcaacaggtgtcatgacagttgccatcttacttcttacagaaatcactcccaaaagtgttgcagtccataatgccaccgaggtcgctaggtttgtgaccggtcgcatggctttcactgatcctctatccagttgggcggattgttacttttctgtcaatggggatgctaaagattctaggcctgaaagggagaagtgaaccatatgttactgaagatgaactgaagttaatgttacgaggagcagagttgagtggtgcaattgcagaagatgaacaggatatgatcgagaatgtcctggaaattaaagatacacatgtgagggaagtaatgacgcctttggtggacgtagtagcaattgatgctatcgcaacacttattgatttcaaaaacttgtgggaaactcatcagtactctagagttcctgtatttgaggagcgcatagataatattgttggaattgcttatgcaatggacatgcttgaatatgttgaagaggttgagaaattgaatgcaatcactgtgaaggaaatcgcacatatgcctacatactttgttccagatttaacattagaagacgtagtggaagaaatagttggtgaaatcttcgatgagaatgattccaaggaggaaatccagaagaaaacaggctatatagtaaggcggggggatggaacatttgatgttgatgcaaacacatcgatagatcacctatctgaagagcttggtatcaaaataccagagggacatcagtatgagacggtgtctggttttgtctgtgcatcttttggctatattccagaagaaggtgggaaaatgcttgtgattcttgaaaagaatttcagagaagaaaacggtgaatatcaggaggaaggtcctgatcgccaagatgatagagaaaaaactcaagcttatgaactcgagtggaagctaatgcaaggaaggtgggcaaagttctattcaagccaataagcagtgaatgtgttgatgtcgacaacaagggtgtgaaccgcctcatttccaagaagatcatcaagcggaagaagaaaggctctgatgattcctccaatgatgacgagtgtccagacgtaacagagaatggttgccctgcagagttactctcatactcggatgataacagtgccttgttggaagatgcaagcagttctagtgccaaaagatgacaagaaaggaactgcaagaccatcgtactactgctccaccgtgatggggtcgttatcgccgtggagctggaagcttttgcattcacaggccgggaataaggaggcggcagcggtgtcccgcagtggcctgcacgggtagagcagctccggatggaagaaccacttcacgggcatctccctcggggaggtggtggccacagggcgcggggcgagcacgtggagtagcctctcctcccgcttctccctgatcctctccagctccctgaacctctgctgcagcagggcgatggaggagaacatcatctggccctcgctgctctgtacccccatgatgaacaaaaactcctcgttttcagttgatgtgtgtgtgtgtgtgtatctcagccagcgtctgtctacttcgctcgctcgctgtgtggggttttgctgcttgaggtggtggtggtcttgggcatgcgcctacttataagctgcaaagttttgtcacggcgcagggcgtcgtcttgtggtcgtcttgcaagttgcgccaattcttccatcttccattatgtgatgctaatgctatggcacaggatgttatgggctgattggaaaccaagaaacactactccacgtctctactgctgctatgagagaggacct

SEQ ID NO: 10425 - DNA, 3037 bp, Zea Mays
ggccgccccacctccatcttcccatggtggtggtgtcatcccccttcctcttcctcccctcgtgcaagtgcaaccacccacccgctctcccaccgccctcctcgcctatccctgccgccactgcggccgtcgatgagccccatgcccaccgcgccgtacacctccgcgacctcgctgctgctgggcagccgcaggctcccgcggttccagttccagtccctccgcacccccaccaagccccccttccgccgcccggcctcctcttcgtccacacctctccctcgatgccgcgccagcgcgaccccccgccctctggcccccgtctgcgcttccgccctcgcgctgcccgtgtcggtggcggccgctcccccaccgcaggtggacggtggctgggtgggagggacggcagcagccgtgaggagagtagctgtggcggttgcgtgcggggctctcgcggcggcgtggtgccgccgggcgatggctgtgggggctgccgcggcggcgggagccggggccggggcgccggggacggtggaggctgctgcagggattggatggatggcgctgcgcgggggctggcccagggtgctacagattctgcagctgctcagggagcacggcttgattctggccgcgctgcttagcctctctgcgttcttctccatggcagaaacttctatcacgacgctttggccttggaaggttcgtgaactagctgagaaggaacctgagaatggtgttttcaaaatgctccgaagtgacgtcacccgtttcttgaccaccattctcattggcacaacagtggtcaacattggtgcaacagcaattgttactgaggcagcaacagcaatgttcggtgaagcaggcgttagtgcagcaacaggtgtcatgacagttgccatcttacttcttacagaaatcactcccaaaagtgttgcagtccataatgccaccgaggtcgctaggtttgtggtaagaccggtcgcatggctttcactgatcctctatccagttgggcggattgttacttttctgtcaatggggatgctaaagattctaggcctgaaagggagaagtgaaccatatgttactgaagatgaactgaagttaatgttacgaggagcagagttgagtggtgcaattgcagaagatgaacaggatatgatcgagaatgtcctggaaattaaagatacacatgtgagggaagtaatgacgcctttggtggacgtagtagcaattgatgctatcgcaacacttattgatttcaaaaacttgtgggaaactcatcagtactctagagttcctgtatttgaggagcgcatagataatattgttggaattgcttatgcaatggacatgcttgaatatgttgaagaggttgagaaattgaatgcaatcactgtgaaggaaatcgcacatatgcctacatactttgttccagattcaatgtctgtttggaacctattaagagagttccggatcaggcaggttcatatggcagtggtcctcaatgaatatggtggaactattggtatttaacattagaagacgtagtggaagaaatagttggtgaaatcttcgatgagaatgattccaaggaggaaatccagaagaaaacaggctatatagtaaggcggggggatggaacatttgatgttgatgcaaacacatcgatagatcacctatctgaagagcttggtatcaaaataccagagggacatcagtatgagacggtgtctggttttgtctgtgcatcttttggctatattccagaagaaggtgggaaaatgcttgtgattcttgaaaagaatttcagagaagaaaacggtgaatatcaggaggaaggtcctgatcgccaagatgatagagaaaaaactcaagcttatgaactcgagatagtggaagctaatgcaaggaaggtgggcaaagttctattcaagccaataagcagtgaatgtgttgatgtcgacaacaagggtgtgaaccgcctcatttccaagaagatcatcaagcggaagaagaaaggctctgatgattcctccaatgatgacgagtgtccagacgtaacagagaatggttgccctgcagagttactctcatactcggatgataacagtgccttgttggaagatgcaagcagttctagtgccaaaagatgacaagaaaggaactgcaagaccatcgtactactggtaataattacagcacaccgtcacccctcctaataccccttgttacaacagaagaagagaacatagtagtaggctaccaaaaaaaaaactgcgagagcaacaccaagtggttaacagaagtttatagggcattggaacatttttttagtagcagtagcagtctagaggtgcagcgaggtgtcgacgtcgacttcaccagagacatgtttgtagttgtaagtcttactgggccacagctccaccgtgatggggtcgttatcgccgtggagctggaagcttttgcattcacaggccgggaataaggaggcggcagcggtgtcccgcagtggcctgcacgggtagagcagctccggatggaagaaccacttcacgggcatctccctcggggaggtggtggccacagggcgcggggcgagcacgtggagtagcctctcctcccgcttctccctgatcctctccagctccctgaacctctgctgcagcagggcgatggaggagaacatcatctggccctcgctgctctgtacccccatgatgaacaaaaactcctcgttttcagttgatgtgtgtgtgtgtgtgtatctcagccagcgtctgtctacttcgctcgctcgctgtgtggggttttgctgcttgaggtggtggtggtcttgggcatgcgcctacttataagctgcaaagttttgtcacggcgcagggcgtcgtcttgtggtcgtcttgcaagttgcgccaattcttccatcttccattatgtgatgctaatgctatggcacaggatgttatgggctgattggaaaccaagaaacactactccacgtctctactgctgctatgagagaggacct

SEQ ID NO: 10426 - DNA, 2709 bp, Zea Mays
ggccgccccacctccatcttcccatggtggtggtgtcatcccccttcctcttcctcccctcgtgcaagtgcaaccacccacccgctctcccaccgccctcctcgcctatccctgccgccactgcggccgtcgatgagccccatgcccaccgcgccgtacacctccgcgacctcgctgctgctgggcagccgcaggctcccgcggttccagttccagtccctccgcacccccaccaagccccccttccgccgcccggcctcctcttcgtccacacctctccctcgatgccgcgccagcgcgaccccccgccctctggcccccgtctgcgcttccgccctcgcgctgcccgtgtcggtggcggccgctcccccaccgcaggtggacggtggctgggtgggagggacggcagcagccgtgaggagagtagctgtggcggttgcgtgcggggctctcgcggcggcgtggtgccgccgggcgatggctgtgggggctgccgcggcggcgggagccggggccggggcgccggggacggtggaggctgctgcagggattggatggatggcgctgcgcgggggctggcccagggtgctacagattctgcagctgctcagggagcacggcttgattctggccgcgctgcttagcctctctgcgttcttctccatggcagaaacttctatcacgacgctttggccttggaaggttcgtgaactagctgagaaggaacctgagaatggtgttttcaaaatgctccgaagtgacgtcacccgtttcttgaccaccattctcattggcacaacagtggtcaacattggtgcaacagcaattgttactgaggcagcaacagcaatgttcggtgaagcaggcgttagtgcagcaacaggtgtcatgacagttgccatcttacttcttacagaaatcactcccaaaagtgttgcagtccataatgccaccgaggtcgctaggtttgtggtaagaccggtcgcatggctttcactgatcctctatccagttgggcggattgttacttttctgtcaatggggatgctaaagattctaggcctgaaagggagaagtgaaccatatgttactgaagatgaactgaagttaatgttacgaggagcagagttgagtggtgcaattgcagaagatgaacaggatatgatcgagaatgtcctggaaattaaagatacacatgtgagggaagtaatgacgcctttggtggacgtagtagcaattgatgctatcgcaacacttattgatttcaaaaacttgtgggaaactcatcagtactctagagttcctgtatttgaggagcgcatagataatattgttggaattgcttatgcaatggacatgcttgaatatgttgaagaggttgagaaattgaatgcaatcactgtgaaggaaatcgcacatatgcctacatactttgttccagatttaacattagaagacgtagtggaagaaatagttggtgaaatcttcgatgagaatgattccaaggaggaaatccagaagaaaacaggctatatagtaaggcggggggatggaacatttgatgttgatgcaaacacatcgatagatcacctatctgaagagcttggtatcaaaataccagagggacatcagtatgagacggtgtctggttttgtctgtgcatcttttggctatattccagaagaaggtgggaaaatgcttgtgattcttgaaaagaatttcagagaagaaaacggtgaatatcaggaggaaggtcctgatcgccaagatgatagagaaaaaactcaagcttatgaactcgagatagtggaagctaatgcaaggaaggtgggcaaagttctattcaagccaataagcagtgaatgtgttgatgtcgacaacaagggtgtgaaccgcctcatttccaagaagatcatcaagcggaagaagaaaggctctgatgattcctccaatgatgacgagtgtccagacgtaacagagaatggttgccctgcagagttactctcatactcggatgataacagtgccttgttggaagatgcaagcagttctagtgccaaaagatgacaagaaaggaactgcaagaccatcgtactactgctccaccgtgatggggtcgttatcgccgtggagctggaagcttttgcattcacaggccgggaataaggaggcggcagcggtgtcccgcagtggcctgcacgggtagagcagctccggatggaagaaccacttcacgggcatctccctcggggaggtggtggccacagggcgcggggcgagcacgtggagtagcctctcctcccgcttctccctgatcctctccagctccctgaacctctgctgcagcagggcgatggaggagaacatcatctggccctcgctgctctgtacccccatgatgaacaaaaactcctcgttttcagttgatgtgtgtgtgtgtgtgtatctcagccagcgtctgtctacttcgctcgctcgctgtgtggggttttgctgcttgaggtggtggtggtcttgggcatgcgcctacttataagctgcaaagttttgtcacggcgcagggcgtcgtcttgtggtcgtcttgcaagttgcgccaattcttccatcttccattatgtgatgctaatgctatggcacaggatgttatgggctgattggaaaccaagaaacactactccacgtctctactgctgctatgagagaggacct

SEQ ID NO: 10427 - DNA, 2769 bp, Zea Mays
ccgctgctgcccgtgcgcgcaccggccgccccacctccatcttcccatggtggtggtgtcatcccccttcctcttcctcccctcgtgcaagtgcaaccacccacccgctctcccaccgccctcctcgcctatccctgccgccactgcggccgtcgatgagccccatgcccaccgcgccgtacacctccgcgacctcgctgctgctgggcagccgcaggctcccgcggttccagttccagtccctccgcacccccaccaagccccccttccgccgcccggcctcctcttcgtccacacctctccctcgatgccgcgccagcgcgaccccccgccctctggcccccgtctgcgcttccgccctcgcgctgcccgtgtcggtggcggccgctcccccaccgcaggtggacggtggctgggtgggagggacggcagcagccgtgaggagagtagctgtggcggttgcgtgcggggctctcgcggcggcgtggtgccgccgggcgatggctgtgggggctgccgcggcggcgggagccggggccggggcgccggggacggtggaggctgctgcagggattggatggatggcgctgcgcgggggctggcccagggtgctacagattctgcagctgctcagggagcacggcttgattctggccgcgctgcttagcctctctgcgttcttctccatggcagaaacttctatcacgacgctttggccttggaaggttcgtgaactagctgagaaggaacctgagaatggtgttttcaaaatgctccgaagtgacgtcacccgtttcttgaccaccattctcattggcacaacagtggtcaacattggtgcaacagcaattgttactgaggcagcaacagcaatgttcggtgaagcaggcgttagtgcagcaacaggtgtcatgacagttgccatcttacttcttacagaaatcactcccaaaagtgttgcagtccataatgccaccgaggtcgctaggtttgtggtaagaccggtcgcatggctttcactgatcctctatccagttgggcggattgttacttttctgtcaatggggatgctaaagattctaggcctgaaagggagaagtgaaccatatgttactgaagatgaactgaagttaatgttacgaggagcagagttgagtggtgcaattgcagaagatgaacaggatatgatcgagaatgtcctggaaattaaagatacacatgtgagggaagtaatgacgcctttggtggacgtagtagcaattgatgctatcgcaacacttattgatttcaaaaacttgtgggaaactcatcagtactctagagttcctgtatttgaggagcgcatagataatattgttggaattgcttatgcaatggacatgcttgaatatgttgaagaggttgagaaattgaatgcaatcactgtgaaggaaatcgcacatatgcctacatactttgttccagattcaatgtctgtttggaacctattaagagagttccggatcaggcaggttcatatggcagtggtcctcaatgaatatggtggaactattggtatttaacattagaagacgtagtggaagaaatagttggtgaaatcttcgatgagaatgattccaaggaggaaatccagaagaaaacaggctatatagtaaggcggggggatggaacatttgatgttgatgcaaacacatcgatagatcacctatctgaagagcttggtatcaaaataccagagggacatcagtatgagacggtgtctggttttgtctgtgcatcttttggctatattccagaagaaggtgggaaaatgcttgtgattcttgaaaagaatttcagagaagaaaacggtgaatatcaggaggaaggtcctgatcgccaagatgatagagaaaaaactcaagcttatgaactcgagatagtggaagctaatgcaaggaaggtgggcaaagttctattcaagccaataagcagtgaatgtgttgatgtcgacaacaagggtgtgaaccgcctcatttccaagaagatcatcaagcggaagaagaaaggctctgatgattcctccaatgatgacgagtgtccagacgtaacagagaatggttgccctgcagagttactctcatactcggatgataacagtgccttgttggaagatgcaagcagttctagtgccaaaagatgacaagaaaggaactgcaagaccatcgtactactggccgggaataaggaggcggcagcggtgtcccgcagtggcctgcacgggtagagcagctccggatggaagaaccacttcacgggcatctccctcggggaggtggtggccacagggcgcggggcgagcacgtggagtagcctctcctcccgcttctccctgatcctctccagctccctgaacctctgctgcagcagggcgatggaggagaacatcatctggccctcgctgctctgtacccccatgatgaacaaaaactcctcgttttcagttgatgtgtgtgtgtgtgtgtatctcagccagcgtctgtctacttcgctcgctcgctgtgtggggttttgctgcttgaggtggtggtggtcttgggcatgcgcctacttataagctgcaaagttttgtcacggcgcagggcgtcgtcttgtggtcgtcttgcaagttgcgccaattcttccatcttccattatgtgatgctaatgctatggcacaggatgttatgggctgattggaaaccaagaaacactactccacgtctctactgctgctatgagagaggacct

SEQ ID NO: 10428 - DNA, 1694 bp, Zea Mays
gagagttcaaatgaccacatctattcaggtcaattaccaacatcagcatcagacatgctgaacagcaattcaccatagcccgctacatgaagagtctggtacaacgagcatctagcatattattcttccaaaacggtgtcaaccggcaatcgccacatatgaacaaaagcaagacgccataatggcgcccaggggtgacgaaatgcctggtctattctacaatctagagtctacacttacaacctggtaccaaaataaccacgtcaaggttgggtcggtacagcccttacgccttccatcttcccagtcagcagtgaaacaatcaaccacctacacgattgccagagcctttcaggagattgcgctgccttttaggaggcttcacatcaacagcgccagcgccatctttggacttgccgtatcccctcttccgacctctttggcggccgcccttctttctgtgcctatcgccagcagcttcatcgttggacttgcgacatgggcggccacgcttccttttaggcttctcctgttcttcagctccagccttttttttgttcttgagttgggcaaaccaactcttcgacctgatggattcaatcacacggcaagcagtgatcagaatgcctcgaatttccaacgttttctttgcaacttcagatcttccgtagcaaaatttcaacactaggctactgcaagctgctacttaccactccgaggaaggatccaagaaatttactacttggttcagagcatgaagagcaatcttcttgatctggagacaatagtccagccctgtgatcaggtggaagccgcctaaactctccagtcagtttcatgcactcgttgacgctttctggggagacaaagtccatcgcaaccttaatgcaagactgcacaaacagaaaggcttctgtttaagcaacgagatacatttgttgagaaggtgcgataaagaggagcacaaattaaggtctgtatagtcacaccttcaagttcctcacttggtgaggacatccagcaggaatgaaaaccgcttcaccaagcttctgctcaaacgtccagggttcaacacctatagcaaacatgccaccacattagagatggggcaaaatagcacaaggcactgcatttgtaagggaatcagaggagaaatcaaagttttgtcgaagagagatcatttgcttacagagagattttgctcttcaagaagcttagattcagagctgaagagaaagctagggtctcagtagatgctgacattgtcataaaagaagccatgagacgacttgagtctgccgtcaaaggaaagaaggatctcctaggccgtatggatgctctacaatctcaaatagaaaggccagagactaacacaatacatgtttgtgaagagagatcaaagctctgctctactgctctaaagcacatggaagatggcaatgttgaagaagtttgcgtaagtgatacaaatccaataccggtcacagggaacattgctgagttggatgatgagggagtcgatatccctacggtcggggacagtgggataatccccacacttatgaagtgtctgatgtaagggaaataactacagaaggaaacaactacagaacgtgaagataacagcttggacattcctgttgataattgatgtccgatctttttgtgagtattgtttagaaggcttagctggg

SEQ ID NO: 10429 - DNA, 2633 bp, Zea Mays
aattctccttgtctctctcactctctctgtctgtgggaggaagttgagaaggcgaggagccagacaagcgacgcggctccactcccttctcaggcggccccctgctgctcaccgcccagctccaggtacgcgcgagttattagagaaataagggtcggcttggttgcccgaggcctacccagcgcctgcgatggaggagaaggctatggcaaatggagcagcgactgctgatgttgctgctcctgataataaggataacaccaaggaagaggctagcgagagcaaggaaccagcagccaatcaggatgccgatgaccagaacaaaggcttggaaaatggcgccgagggccagtcaggtggagatgtcaatatggcagatgctgaggtcacagaggaaggcgatggtgatcctggtgttgcaaagcaggtggattctgaagatatcaaaacggatgccgatacaaaggaagatggcaatgcaaaggcagaagaagttgaggatgtcaagatgactgaggctgacacgggaagtacagaggtcaaagataaagaagagaagggagatgaagttgtggacacaactgtggataagcaggatgaatcgaaggagcaagaggaaggtgtttcggctgagcaagatgagaagcaaggagaggaagcagaagaaaaaggaaaagaaatggatgccgatgagaagcaagaagaggaagcagaagaaaaaggttctgctgatgagaaagatgaagatgaaggtgaccagaagatggaagagaataaggaggagactccgaagaataagaaagcaaggagtgccagggatagaagccagggaaatgataataaacatgatggatcaaaatctagggaagccaaaagtttgctgaacaccccaagcccatatggtaccgatcgtcctcaacgtgagaggaaaatagtggagaggttggttgaggtgattgagaaagagccaaacaggaatttcgtggttgagaagggacgagggactcctctgaaggatataccaagtgtggcacacagaatatcaaggaagaaaccttctgatcttaaatttcttcacagtattctttttgggaggaaaggcaaggctgtcgattttaaaggacatatactccagttctctggatttgtttggcatgaaagtgatgaaaagcacagagtcaaggcaaaagaaaagcttgacaagtgtgtaaaagaaacgctgttggacctttgttggacccttggcattccaactccaaaagcaaacattagaaaggaagatattgtgtcaaagctgttggactttattgctgaacctcactctgcagctgattctgggctctctgatgaccagggttcaaattctaaaaaacgcaagagaggaggtgaaagtgcacgtaagactcctgatagcacacctagtaggtcaaggaagaaatttatcaatgacagcacttctagtaaaaggcagaaaaaagcgctcgagtatgatactgatgaggatgaatccatgaagtcagacagtgaggaaaacagagatgaagattcagatgaagctggtgacaaacaggaaggtgactatgtatctgggaaagaaaaggcagggaagttctcagaggtaaaagaatcttcaggcaaaaagaaggcaaacacagggagtggccaccaatcaggtcctccaaagaaaattatcagaagtccggtaaaaaaagtatcatccaagattcatgaggaaaaagaaagccccaataatagtgcaaaggttttttctaggaagaagaaacccacagcagaaaaggagatcaaagaaaaaaagtcatcaggcaaaaaggtgacaaagggtaaaggagaatccgttgaagcagttcttcccagcaaggatgatctgaggaagaccattactgaaatcctcaagaaagttgacttcaacacggcaactttcagtgacatccttaagaagcttgacaatcactataaaatggatctggccccaaagaaagaagccatcaaagttatgatccaagacgagttaaccaagttatcagaggaggacgaaggagagggagccggagacaccgagaagaaacagcagcagcctcaggcgaaggagatcgaggcatgaggattcgtggaaccccatagctgtagtagccgctgttaattatcctgtacttaatgtgtttgtttgcgtcgcctgtacaggcatctcgttgattatcgccgcaccaactcgagaacctcacccctgatcgtgtatgttatggggcatgatgtgtaggcagcctccacacctttttagctgactgatcggagagttactcctaggcaactcttgtttctagatttgcaaatggtgtctgaaactctgcgtttgctgcggcagaacgtgtacttaattgttcgtgataggtctgaataacacatggatggtatcagtctgtagcttattttttttacttgatccgtttcttctgtgggttgtgatttgtgaatgaccaaaagatggatgctgtattccagtttctgttctctcagagtaggcatgcaagaataacagctgaaccaaaccgagaaacagaacagtggctatctcctatctttagtagcttccttatttcactctctatttttaa

SEQ ID NO: 10430 - DNA, 2778 bp, Zea Mays
aattctccttgtctctctcactctctctgtctgtgggaggaagttgagaaggcgaggagccagacaagcgacgcggctccactcccttctcaggcggccccctgctgctcaccgcccagctccaggtacgcgcgaggtgatatgcacgaggtcaaaagtgggcgcgggaaataggtgctatgcgctcctgcgagaggattggggaagactttacctcactcaaatttacgggaacagtcaccctcgatgcgtgacgcgaaaaaatgggagaactttgcatgagctgttggagttattagagaaataagggtcggcttggttgcccgaggcctacccagcgcctgcgatggaggagaaggctatggcaaatggagcagcgactgctgatgttgctgctcctgataataaggataacaccaaggaagaggctagcgagagcaaggaaccagcagccaatcaggatgccgatgaccagaacaaaggcttggaaaatggcgccgagggccagtcaggtggagatgtcaatatggcagatgctgaggtcacagaggaaggcgatggtgatcctggtgttgcaaagcaggtggattctgaagatatcaaaacggatgccgatacaaaggaagatggcaatgcaaaggcagaagaagttgaggatgtcaagatgactgaggctgacacgggaagtacagaggtcaaagataaagaagagaagggagatgaagttgtggacacaactgtggataagcaggatgaatcgaaggagcaagaggaaggtgtttcggctgagcaagatgagaagcaaggagaggaagcagaagaaaaaggaaaagaaatggatgccgatgagaagcaagaagaggaagcagaagaaaaaggttctgctgatgagaaagatgaagatgaaggtgaccagaagatggaagagaataaggaggagactccgaagaataagaaagcaaggagtgccagggatagaagccagggaaatgataataaacatgatggatcaaaatctagggaagccaaaagtttgctgaacaccccaagcccatatggtaccgatcgtcctcaacgtgagaggaaaatagtggagaggttggttgaggtgattgagaaagagccaaacaggaatttcgtggttgagaagggacgagggactcctctgaaggatataccaagtgtggcacacagaatatcaaggaagaaaccttctgatcttaaatttcttcacagtattctttttgggaggaaaggcaaggctgtcgattttaaaggacatatactccagttctctggatttgtttggcatgaaagtgatagtcaaggcaaaagaaaagcttgacaagtgtgtaaaagaaacgctgttggacctttgttggacccttggcattccaactccaaaagcaaacattagaaaggaagatattgtgtcaaagctgttggactttattgctgaacctcactctgcagctgattctgggctctctgatgaccagggttcaaattctaaaaaacgcaagagaggaggtgaaagtgcacgtaagactcctgatagcacacctagtaggtcaaggaagaaatttatcaatgacagcacttctagtaaaaggcagaaaaaagcgctcgagtatgatactgatgaggatgaatccatgaagtcagacagtgaggaaaacagagatgaagattcagatgaagctggtgacaaacaggaaggtgactatgtatctgggaaagaaaaggcagggaagttctcagaggtaaaagaatcttcaggcaaaaagaaggcaaacacagggagtggccaccaatcaggtcctccaaagaaaattatcagaagtccggtaaaaaaagtatcatccaagattcatgaggaaaaagaaagccccaataatagtgcaaaggttttttctaggaagaagaaacccacagcagaaaaggagatcaaagaaaaaaagtcatcaggcaaaaaggtgacaaagggtaaaggagaatccgttgaagcagttcttcccagcaaggatgatctgaggaagaccattactgaaatcctcaagaaagttgacttcaacacggcaactttcagtgacatccttaagaagcttgacaatcactataaaatggatctggccccaaagaaagaagccatcaaagttatgatccaagacgagttaaccaagttatcagaggaggacgaaggagagggagccggagacaccgagaagaaacagcagcagcctcaggcgaaggagatcgaggcatgaggattcgtggaaccccatagctgtagtagccgctgttaattatcctgtacttaatgtgtttgtttgcgtcgcctgtacaggcatctcgttgattatcgccgcaccaactcgagaacctcacccctgatcgtgtatgttatggggcatgatgtgtaggcagcctccacacctttttagctgactgatcggagagttactcctaggcaactcttgtttctagatttgcaaatggtgtctgaaactctgcgtttgctgcggcagaacgtgtacttaattgttcgtgataggtctgaataacacatggatggtatcagtctgtagcttattttttttacttgatccgtttcttctgtgggttgtgatttgtgaatgaccaaaagatggatgctgtattccagtttctgttctctcagagtaggcatgcaagaataacagctgaaccaaaccgagaaacagaacagtggctatctcctatctttagtagcttccttatttcactctctatttttaa

SEQ ID NO: 10431 - DNA, 2616 bp, Zea Mays
aattctccttgtctctctcactctctctgtctgtgggaggaagttgagaaggcgaggagccagacaagcgacgcggctccactcccttctcaggcggccccctgctgctcaccgcccagctccagttattagagaaataagggtcggcttggttgcccgaggcctacccagcgcctgcgatggaggagaaggctatggcaaatggagcagcgactgctgatgttgctgctcctgataataaggataacaccaaggaagaggctagcgagagcaaggaaccagcagccaatcaggatgccgatgaccagaacaaaggcttggaaaatggcgccgagggccagtcaggtggagatgtcaatatggcagatgctgaggtcacagaggaaggcgatggtgatcctggtgttgcaaagcaggtggattctgaagatatcaaaacggatgccgatacaaaggaagatggcaatgcaaaggcagaagaagttgaggatgtcaagatgactgaggctgacacgggaagtacagaggtcaaagataaagaagagaagggagatgaagttgtggacacaactgtggataagcaggatgaatcgaaggagcaagaggaaggtgtttcggctgagcaagatgagaagcaaggagaggaagcagaagaaaaaggaaaagaaatggatgccgatgagaagcaagaagaggaagcagaagaaaaaggttctgctgatgagaaagatgaagatgaaggtgaccagaagatggaagagaataaggaggagactccgaagaataagaaagcaaggagtgccagggatagaagccagggaaatgataataaacatgatggatcaaaatctagggaagccaaaagtttgctgaacaccccaagcccatatggtaccgatcgtcctcaacgtgagaggaaaatagtggagaggttggttgaggtgattgagaaagagccaaacaggaatttcgtggttgagaagggacgagggactcctctgaaggatataccaagtgtggcacacagaatatcaaggaagaaaccttctgatcttaaatttcttcacagtattctttttgggaggaaaggcaaggctgtcgattttaaaggacatatactccagttctctggatttgtttggcatgaaagtgatcacagagtcaaggcaaaagaaaagcttgacaagtgtgtaaaagaaacgctgttggacctttgttggacccttggcattccaactccaaaagcaaacattagaaaggaagatattgtgtcaaagctgttggactttattgctgaacctcactctgcagctgattctgggctctctgatgaccagggttcaaattctaaaaaacgcaagagaggaggtgaaagtgcacgtaagactcctgatagcacacctagtaggtcaaggaagaaatttatcaatgacagcacttctagtaaaaggcagaaaaaagcgctcgagtatgatactgatgaggatgaatccatgaagtcagacagtgaggaaaacagagatgaagattcagatgaagctggtgacaaacaggaaggtgactatgtatctgggaaagaaaaggcagggaagttctcagaggtaaaagaatcttcaggcaaaaagaaggcaaacacagggagtggccaccaatcaggtcctccaaagaaaattatcagaagtccggtaaaaaaagtatcatccaagattcatgaggaaaaagaaagccccaataatagtgcaaaggttttttctaggaagaagaaacccacagcagaaaaggagatcaaagaaaaaaagtcatcaggcaaaaaggtgacaaagggtaaaggagaatccgttgaagcagttcttcccagcaaggatgatctgaggaagaccattactgaaatcctcaagaaagttgacttcaacacggcaactttcagtgacatccttaagaagcttgacaatcactataaaatggatctggccccaaagaaagaagccatcaaagttatgatccaagacgagttaaccaagttatcagaggaggacgaaggagagggagccggagacaccgagaagaaacagcagcagcctcaggcgaaggagatcgaggcatgaggattcgtggaaccccatagctgtagtagccgctgttaattatcctgtacttaatgtgtttgtttgcgtcgcctgtacaggcatctcgttgattatcgccgcaccaactcgagaacctcacccctgatcgtgtatgttatggggcatgatgtgtaggcagcctccacacctttttagctgactgatcggagagttactcctaggcaactcttgtttctagatttgcaaatggtgtctgaaactctgcgtttgctgcggcagaacgtgtacttaattgttcgtgataggtctgaataacacatggatggtatcagtctgtagcttattttttttacttgatccgtttcttctgtgggttgtgatttgtgaatgaccaaaagatggatgctgtattccagtttctgttctctcagagtaggcatgcaagaataacagctgaaccaaaccgagaaacagaacagtggctatctcctatctttagtagcttccttatttcactctctatttttaa

SEQ ID NO: 10432 - DNA, 2789 bp, Zea Mays
aattctccttgtctctctcactctctctgtctgtgggaggaagttgagaaggcgaggagccagacaagcgacgcggctccactcccttctcaggcggccccctgctgctcaccgcccagctccaggtacgcgcgaggtgatatgcacgaggtcaaaagtgggcgcgggaaataggtgctatgcgctcctgcgagaggattggggaagactttacctcactcaaatttacgggaacagtcaccctcgatgcgtgacgcgaaaaaatgggagaactttgcatgagctgttggagttattagagaaataagggtcggcttggttgcccgaggcctacccagcgcctgcgatggaggagaaggctatggcaaatggagcagcgactgctgatgttgctgctcctgataataaggataacaccaaggaagaggctagcgagagcaaggaaccagcagccaatcaggatgccgatgaccagaacaaaggcttggaaaatggcgccgagggccagtcaggtggagatgtcaatatggcagatgctgaggtcacagaggaaggcgatggtgatcctggtgttgcaaagcaggtggattctgaagatatcaaaacggatgccgatacaaaggaagatggcaatgcaaaggcagaagaagttgaggatgtcaagatgactgaggctgacacgggaagtacagaggtcaaagataaagaagagaagggagatgaagttgtggacacaactgtggataagcaggatgaatcgaaggagcaagaggaaggtgtttcggctgagcaagatgagaagcaaggagaggaagcagaagaaaaaggaaaagaaatggatgccgatgagaagcaagaagaggaagcagaagaaaaaggttctgctgatgagaaagatgaagatgaaggtgaccagaagatggaagagaataaggaggagactccgaagaataagaaagcaaggagtgccagggatagaagccagggaaatgataataaacatgatggatcaaaatctagggaagccaaaagtttgctgaacaccccaagcccatatggtaccgatcgtcctcaacgtgagaggaaaatagtggagaggttggttgaggtgattgagaaagagccaaacaggaatttcgtggttgagaagggacgagggactcctctgaaggatataccaagtgtggcacacagaatatcaaggaagaaaccttctgatcttaaatttcttcacagtattctttttgggaggaaaggcaaggctgtcgattttaaaggacatatactccagttctctggatttgtttggcatgaaagtgatgaaaagcacagagtcaaggcaaaagaaaagcttgacaagtgtgtaaaagaaacgctgttggacctttgttggacccttggcattccaactccaaaagcaaacattagaaaggaagatattgtgtcaaagctgttggactttattgctgaacctcactctgcagctgattctgggctctctgatgaccagggttcaaattctaaaaaacgcaagagaggaggtgaaagtgcacgtaagactcctgatagcacacctagtaggtcaaggaagaaatttatcaatgacagcacttctagtaaaaggcagaaaaaagcgctcgagtatgatactgatgaggatgaatccatgaagtcagacagtgaggaaaacagagatgaagattcagatgaagctggtgacaaacaggaaggtgactatgtatctgggaaagaaaaggcagggaagttctcagaggtaaaagaatcttcaggcaaaaagaaggcaaacacagggagtggccaccaatcaggtcctccaaagaaaattatcagaagtccggtaaaaaaagtatcatccaagattcatgaggaaaaagaaagccccaataatagtgcaaaggttttttctaggaagaagaaacccacagcagaaaaggagatcaaagaaaaaaagtcatcaggcaaaaaggtgacaaagggtaaaggagaatccgttgaagcagttcttcccagcaaggatgatctgaggaagaccattactgaaatcctcaagaaagttgacttcaacacggcaactttcagtgacatccttaagaagcttgacaatcactataaaatggatctggccccaaagaaagaagccatcaaagttatgatccaagacgagttaaccaagttatcagaggaggacgaaggagagggagccggagacaccgagaagaaacagcagcagcctcaggcgaaggagatcgaggcatgaggattcgtggaaccccatagctgtagtagccgctgttaattatcctgtacttaatgtgtttgtttgcgtcgcctgtacaggcatctcgttgattatcgccgcaccaactcgagaacctcacccctgatcgtgtatgttatggggcatgatgtgtaggcagcctccacacctttttagctgactgatcggagagttactcctaggcaactcttgtttctagatttgcaaatggtgtctgaaactctgcgtttgctgcggcagaacgtgtacttaattgttcgtgataggtctgaataacacatggatggtatcagtctgtagcttattttttttacttgatccgtttcttctgtgggttgtgatttgtgaatgaccaaaagatggatgctgtattccagtttctgttctctcagagtaggcatgcaagaataacagctgaaccaaaccgagaaacagaacagtggctatctcctatctttagtagcttccttatttcactctctatttttaa

SEQ ID NO: 10433 - DNA, 2541 bp, Zea Mays
aattctccttgtctctctcactctctctgtctgtgggaggaagttgagaaggcgaggagccagacaagcgacgcggctccactcccttctcaggcggccccctgctgctcaccgcccagctccagttattagagaaataagggtcggcttggttgcccgaggcctacccagcgcctgcgatggaggagaaggctatggcaaatggagcagcgactgctgatgttgctgctcctgataataaggataacaccaaggaagaggctagcgagagcaaggaaccagcagccaatcaggatgccgatgaccagaacaaaggcttggaaaatggcgccgagggccagtcaggtggagatgtcaatatggcagatgctgaggtcacagaggaaggcgatggtgatcctggtgttgcaaagcaggtggattctgaagatatcaaaacggatgccgatacaaaggaagatggcaatgcaaaggcagaagaagttgaggatgtcaagatgactgaggctgacacgggaagtacagaggtcaaagataaagaagagaagggagatgaagttgtggacacaactgtggataagcaggatgaatcgaaggagcaagaggaaggtgtttcggctgagcaagatgagaagcaaggagaggaagcagaagaaaaaggaaaagaaatggatgccgatgagaagcaagaagaggaagcagaagaaaaaggttctgctgatgagaaagatgaagatgaaggtgaccagaagatggaagagaataaggaggagactccgaagaataagaaagcaaggagtgccagggatagaagccagggaaatgataataaacatgatggatcaaaatctagggaagccaaaagtttgctgaacaccccaagcccatatggtaccgatcgtcctcaacgtgagaggaaaatagtggagaggttggttgaggtgattgagaaagagccaaacaggaatttcgtggttgagaagggacgagggactcctctgaaggatataccaagtgtggcacacagaatatcaaggaagaaaccttctgatcttaaatttcttcacagtattctttttgggaggaaaggcaaggctgtcgattttaaaggacatatactccagttctctggatttgtttggcatgaaagtgatgaaaagcacagagtcaaggcaaaagaaaagcttgacaagtgtgtaaaagaaacgctgttggacctttgttggacccttggcattccaactccaaaagcaaacattagaaaggaagatattgtgtcaaagctgttggactttattgctgaacctcactctgcagctgattctgggctctctgatgaccagaaatttatcaatgacagcacttctagtaaaaggcagaaaaaagcgctcgagtatgatactgatgaggatgaatccatgaagtcagacagtgaggaaaacagagatgaagattcagatgaagctggtgacaaacaggaaggtgactatgtatctgggaaagaaaaggcagggaagttctcagaggtaaaagaatcttcaggcaaaaagaaggcaaacacagggagtggccaccaatcaggtcctccaaagaaaattatcagaagtccggtaaaaaaagtatcatccaagattcatgaggaaaaagaaagccccaataatagtgcaaaggttttttctaggaagaagaaacccacagcagaaaaggagatcaaagaaaaaaagtcatcaggcaaaaaggtgacaaagggtaaaggagaatccgttgaagcagttcttcccagcaaggatgatctgaggaagaccattactgaaatcctcaagaaagttgacttcaacacggcaactttcagtgacatccttaagaagcttgacaatcactataaaatggatctggccccaaagaaagaagccatcaaagttatgatccaagacgagttaaccaagttatcagaggaggacgaaggagagggagccggagacaccgagaagaaacagcagcagcctcaggcgaaggagatcgaggcatgaggattcgtggaaccccatagctgtagtagccgctgttaattatcctgtacttaatgtgtttgtttgcgtcgcctgtacaggcatctcgttgattatcgccgcaccaactcgagaacctcacccctgatcgtgtatgttatggggcatgatgtgtaggcagcctccacacctttttagctgactgatcggagagttactcctaggcaactcttgtttctagatttgcaaatggtgtctgaaactctgcgtttgctgcggcagaacgtgtacttaattgttcgtgataggtctgaataacacatggatggtatcagtctgtagcttattttttttacttgatccgtttcttctgtgggttgtgatttgtgaatgaccaaaagatggatgctgtattccagtttctgttctctcagagtaggcatgcaagaataacagctgaaccaaaccgagaaacagaacagtggctatctcctatctttagtagcttccttatttcactctctatttttaa

SEQ ID NO: 10434 - DNA, 2693 bp, Zea Mays
ggatatttggatcccgacccagcgagtcagcagagctaaattaaccccggaagaaaaaaaaaacacccgaaaattctccttgtctctctcactctctctgtctgtgggaggaagttgagaaggcgaggagccagacaagcgacgcggctccactcccttctcaggcggccccctgctgctcaccgcccagctccagttattagagaaataagggtcggcttggttgcccgaggcctacccagcgcctgcgatggaggagaaggctatggcaaatggagcagcgactgctgatgttgctgctcctgataataaggataacaccaaggaagaggctagcgagagcaaggaaccagcagccaatcaggatgccgatgaccagaacaaaggcttggaaaatggcgccgagggccagtcaggtggagatgtcaatatggcagatgctgaggtcacagaggaaggcgatggtgatcctggtgttgcaaagcaggtggattctgaagatatcaaaacggatgccgatacaaaggaagatggcaatgcaaaggcagaagaagttgaggatgtcaagatgactgaggctgacacgggaagtacagaggtcaaagataaagaagagaagggagatgaagttgtggacacaactgtggataagcaggatgaatcgaaggagcaagaggaaggtgtttcggctgagcaagatgagaagcaaggagaggaagcagaagaaaaaggaaaagaaatggatgccgatgagaagcaagaagaggaagcagaagaaaaaggttctgctgatgagaaagatgaagatgaaggtgaccagaagatggaagagaataaggaggagactccgaagaataagaaagcaaggagtgccagggatagaagccagggaaatgataataaacatgatggatcaaaatctagggaagccaaaagtttgctgaacaccccaagcccatatggtaccgatcgtcctcaacgtgagaggaaaatagtggagaggttggttgaggtgattgagaaagagccaaacaggaatttcgtggttgagaagggacgagggactcctctgaaggatataccaagtgtggcacacagaatatcaaggaagaaaccttctgatcttaaatttcttcacagtattctttttgggaggaaaggcaaggctgtcgattttaaaggacatatactccagttctctggatttgtttggcatgaaagtgatgaaaagcacagagtcaaggcaaaagaaaagcttgacaagtgtgtaaaagaaacgctgttggacctttgttggacccttggcattccaactccaaaagcaaacattagaaaggaagatattgtgtcaaagctgttggactttattgctgaacctcactctgcagctgattctgggctctctgatgaccagggttcaaattctaaaaaacgcaagagaggaggtgaaagtgcacgtaagactcctgatagcacacctagtaggtcaaggaagaaatttatcaatgacagcacttctagtaaaaggcagaaaaaagcgctcgagtatgatactgatgaggatgaatccatgaagtcagacagtgaggaaaacagagatgaagattcagatgaagctggtgacaaacaggaaggtgactatgtatctgggaaagaaaaggcagggaagttctcagaggtaaaagaatcttcaggcaaaaagaaggcaaacacagggagtggccaccaatcaggtcctccaaagaaaattatcagaagtccggtaaaaaaagtatcatccaagattcatgaggaaaaagaaagccccaataatagtgcaaaggttttttctaggaagaagaaacccacagcagaaaaggagatcaaagaaaaaaagtcatcaggcaaaaaggtgacaaagggtaaaggagaatccgttgaagcagttcttcccagcaaggatgatctgaggaagaccattactgaaatcctcaagaaagttgacttcaacacggcaactttcagtgacatccttaagaagcttgacaatcactataaaatggatctggccccaaagaaagaagccatcaaagttatgatccaagacgagttaaccaagttatcagaggaggacgaaggagagggagccggagacaccgagaagaaacagcagcagcctcaggcgaaggagatcgaggcatgaggattcgtggaaccccatagctgtagtagccgctgttaattatcctgtacttaatgtgtttgtttgcgtcgcctgtacaggcatctcgttgattatcgccgcaccaactcgagaacctcacccctgatcgtgtatgttatggggcatgatgtgtaggcagcctccacacctttttagctgactgatcggagagttactcctaggcaactcttgtttctagatttgcaaatggtgtctgaaactctgcgtttgctgcggcagaacgtgtacttaattgttcgtgataggtctgaataacacatggatggtatcagtctgtagcttattttttttacttgatccgtttcttctgtgggttgtgatttgtgaatgaccaaaagatggatgctgtattccagtttctgttctctcagagtaggcatgcaagaataacagctgaaccaaaccgagaaacagaacagtggctatctcctatctttagtagcttccttatttcactctctatttttaa

SEQ ID NO: 10435 - DNA, 2243 bp, Zea Mays
attttgaaaaccttagatcagcgatttcaagttgcaccccctcatgagctcaaaagttttagctgcttgtatgggcttgggcttcaattaaatcctagcacgctttcttgatggcgatggttgctttatcctgatagtaggtctggcggtctccggcttggcggtgagccggtgacgatgatacgacctggttggaggttggaggtggagcaggagagtttgcaggagcagttggcatgggcgctggcactcgtccactcgcgtcagccatccgacgccaccaaggtgtcggctctgacgtggcaccttgcgcttgcgcacggactccgtcgctgattcgtttgtctcttccccagtcgcgcaccgcgggccgcggttcgcctggtggctgcgacgtgagtgggcctatatcagcgcggcactcacggggagcggtggcaacccatatccatcacggcgaagagacctcgggagtgagtgggccgctgggagagcagacaacactgcaacggggtgcgcgcccgcccgtgccgttctccgtcgtcaccgttcgcccgctgccgatccatggggtgggcgctggctctgcacggcggcgccggggacgtgccgcgcacgctgccgcccgagagcagggagccgcgcctcgccacactccgccgctgcctcgacatcggcaccgccgcgctccgggagggccgcaccgcgctcgacgttgtcgagctcgtcgtgagggagctggaggactgcccgcacttcaacgccggccggggctccgtgctcacctccgccggcaccgtcgagatggaggcctgcgtcatggagggagccaccctgcactgcggcgcggtctccggactctccaccgtcgccaacgccgtctccctcgccagactcgtcatggagaagacgccgcacatctacctcgccttcgatggcgccgaggccttcgccagggaacagggggtggagactaaggatccaagccactttatcacggacaacaatatcgagcgtctgaggcaggccaaagaggccaacagggtgcagcgagaaggggctcgcgtagcttcattgttggagaaataatcgattcacacctacaccccctaagtcttgaacagtgaactcgactgtctgcaaataacggacaaaacaataacccatgcatttgtgtttgcaacaagataggcaagtatatgcagattcagtttttatgttgccacttaccactgtataccctatcagttctaaattataagtcgttctactaactcatagcttttgccgtgtttctggatagattactgttactgcctggcatagttcgtcctcaagaatctgtataagatggagatatatgtgaccctcgctatggtttggtcgttggttcacaattcaaggattggttttatgcagctggaattttcttttcttgcttgtcagatcgactacacccagccagcagcaggccaaagccaaaaggcccaggccgtggtggacgacaactgccagacgggcacggtagggtgcgtggccgtggacgcggcgggcaacctcgcgacggcgacgtccacgggcgggctggtgaacaagatgcccggcaggatcggcgacacgcctctggtgggcgccggaacgtacgccaacgcgctgtgcgcggtgtccgccacgggcaagggcgaggagatcatccgccgcacggtggcgcgcgacgtcgcggcgctgatggagcgcggggacgcgctcccgctgcgcgacgccgcggcgcgcgtcgtggcgggggcggcccgcggcgccgtggggctggtggccgtgtcgcgccagggggaggtctgtatggcgcacaacaccaccgccatgttcagggcgtgcgccaccgaggccggccacaccgaagtcggcatctggacggacgccgccgacgcaggcacgggcgcggacggagagactgtcagcgtcgcgctctagctctaggcatttcatccccgtgtggcgtattctatcgttcgcgtcccattattgccacctgtccgatagacaacttgttctcgatccggtaatttcaccgtgcttcagctgcgtgtgtttggaaaaattgattcggtttcgggtattgttaagagatcgatgggagaagtgaaacattgttgggcgttcagtatgcttttgtaataccttttgttttcttaaataaagtcctaaggagtgttgggaaactataaaaaattacaatataaata

SEQ ID NO: 10436 - DNA, 2488 bp, Zea Mays
tcggcttctgctgacatcaactaatgatctgaagcctcaacgaaaatacctaggcccaaagagccaaggagagggaagaggatgaacatcttgtcgacaagttagacagtgattttgcatcattggcccagacacgggcgttattgtccttaactgagtcagctaaggtcaaggtgaacaaaactgattcaagcactggcttgactgggaaggagttttctaacaaggcaaaggcagatacatatgaaaaactagtgaaagaaatggtgatggatcaacgtgctcggccttctgatagaactaaaactccagaggaaatagcacaagaagagaaagaacgtcttgagaagctggaggaggagcgccaaaaaagaatgcttggaactgctgatacgtctgatgaggacgatggcaacgaaaatgataaccacatgaagctaggaaactcaaaacctatatctggtgatgatcttggtgattccttctctttggatgagtcaacagtaaagaaaaagggctgggttgatgaaatttacgaaagggaaggtagaaagattggtgatgatgcagcagcatccgatgatggagaaagcgatgatgaaaatgctggtgatgatgaggctgatgatgaagattcggactccagtgacaatgactttggtaatatgtctgctagagattgggagcaaagtgatgatgatgaagttgatgtaggagacgatgaaatggaggatttcaaagagaaggggcaagagatcaatgacaaagtggtgaataaagatgcacacaatttgaaaggagaatctaatgtgaaacctcaagtaaaggatggcagtattccttttgttattgatgcaccaaatgacctgaaagatctatcttctttgttagatggtcgttcagaagccgaaataattgagattattagtcgaatacgtgcttgcaattcaataaggcttgcagctgaaaaccgaaggaaaatgcaagttttctatggtgttcttctgcagtactttgcagttttagctacccaaagtccagtgaagttcagaataattgacatacttgttaagcctttaattgagatgagtggagaaactccatattttgctgccatctgtgcaagagagcgacttattcatacacgtacccgtctatgcgaagacattaagggaagagcagctggccaaatttgaagacattacttctgctgagattatggtctcttatttttccctgctccgacttccgccatgttgttacaactccattgcttctacttatgtgcgaatatctgatgcggtgccctatacaatctggtcgagatgttgctgttggttctttcttgagttcaatggtgcttgtggttactaaagaatctaaaaagttctgccctgaagcaattggtttcctgcaatctcttttggtaacatcacttaaaggaaaagtggaaactcatctgcacaatcagggctggtgtacttttatctgtggcagaatgtttaagaggttttgttattatacatgaagggctatcttctttcccggaaatcttccttccaatatcctctttgctgcaagaaattttggatagatctgagttgcctggatcgttacaagacattttccatgaagtcattgacttgatcaaaaagagaagtgatgaacactatgcttcaagggagcccctccgaatgcggaagaagaagcccgaaccaattaagcaattgaatccaaaatttgaagagaactacatcaagggtcttgattatgatcctgatcgagaaagggcacaaatgaagaagctgcggaagcgtgtcaagagtgagatgaagggggcgaagcgtgagctgcaaaaggataattatttcctgtctgctgtgaaggagaaagagaggaggaagcgagatgaagagagagctgagatgtatggaaaagccatggcgttccttcaagaacaggaaagtgctttcaaatctggacagctggggaaaggaaagggtaggaaaaggatgcggtgatactctattgcaggggggcagctcggccagtgtaaatatacgggattgtgtttgctcaccctcttcccgcggtactggagggtggatccagctgattactgtatcgtgagctgctcagagtttgtcgtgcctacaagagcagggtgggcctagtcttatggaacatctccacctgcttactcctaaagctttgcctataaaattgtaacgccacaaacactttacaaggcttctccttggtgaactaccacacctgggaaatgctttatttcttttgtaccgtggagtggcttgcatctatgttatatactggtgccatagtaattttcagaagcacagtgaagagtttttattattttcatttttgttgtactctgacatgtgagccctataagtatggcaattttggcacggttttgcagtagaaaaataaatactattactgttctatgctatttccttttttt

SEQ ID NO: 10437 - DNA, 3302 bp, Zea Mays
atcccagagaaacatctaaaccctagcggcggaaccttccccgtcgctctgtcctcctgtccggacatggcgaagacgaagcccatggcggcggcgggcgagaagaagaagagcaaaggaaagaagaaaggcaagaatggcccggccaaggtggccatgaaggctcgtggcgcggcggcggaggagcggaacaacccgttcgaggccatctggtcgcgccgcaagttcgacgtgctcggcaagaagcgcaagggcgaggagcggcgcgtatcgcgctcacgttccgaggccatccgcaagagggagaacacgctgctcaaggagttcgttgagagcgccaagtcgtccgtgttccacgaccggcgtatcggcgagagggacgacacactgcccgagttcgacaaggccatccttcgccagcaacgcgagcgcttggccaagttgaaacgagaaagcaagtacaatctatcagatgatgatgaagacgaaatcaatattcataatgtgctgctatcggaaaatgatgattttgatgaggaagtgcctctcgatgatgggagcgacgaggaaggtaaaatggtcctctcaaagaagcgtttatctctccaaagtgatgaccatccttcaataactgatctaccacaagaaacacaccaggggcagaagagcaagaaggaagttatgacggagatcatttcaaagagtaaattttataaggcccaaagagccaaggagagggaagaggatgaacatcttgtcgacaagttagacagtgattttgcatcattggcccagacacgggcgttattgtccttaactgagtcagctaaggtcaaggtgaacaaaactgattcaagcactggcttgactgggaaggagttttctaacaaggcaaaggcagatacatatgaaaaactagtgaaagaaatggtgatggatcaacgtgctcggccttctgatagaactaaaactccagaggaaatagcacaagaagagaaagaacgtcttgagaagctggaggaggagcgccaaaaaagaatgcttggaactgctgatacgtctgatgaggacgatggcaacgaaaatgataaccacatgaagctaggaaactcaaaacctatatctggtgatgatcttggtgattccttctctttggatgagtcaacagtaaagaaaaagggctgggttgatgaaatttacgaaagggaaggtagaaagattggtgatgatgcagcagcatccgatgatggagaaagcgatgatgaaaatgctggtgatgatgaggctgatgatgaagattcggactccagtgacaatgactttggtaatatgtctgctagagattgggagcaaagtgatgatgatgaagttgatgtaggagacgatgaaatggaggatttcaaagagaaggggcaagagatcaatgacaaagtggtgaataaagatgcacacaatttgaaaggagaatctaatgtgaaacctcaagtaaaggatggcagtattccttttgttattgatgcaccaaatgacctgaaagatctatcttctttgttagatggtcgttcagaagccgaaataattgagattattagtcgaatacgtgcttgcaattcaataaggcttgcagctgaaaaccgaaggaaaatgcaagttttctatggtgttcttctgcagtactttgcagttttagctacccaaagtccagtgaagttcagaataattgacatacttgttaagcctttaattgagatgagtggagaaactccatattttgctgccatctgtgcaagagagcgacttattcatacacgtacccgtctatgcgaagacattaaggttccagggaagagcagctggccaaatttgaagacattacttctgctgagattatggtctcttatttttccctgctccgacttccgccatgttgttacaactccattgcttctacttatgtgcgaatatctgatgcggtgccctatacaatctggtcgagatgttgctgttggttctttcttgagttcaatggtgcttgtggttactaaagaatctaaaaagttctgccctgaagcaattggtttcctgcaatctcttttggtaacatcacttaaaggaaaagtggaaactcatctgcacaatcagattaacgatcaatttatggagctcaagactttaaaactgtggctcagtatccatgaccatgtgcatgaggtgaatccagtgaatatcctagaaatagttggcatggatcctgacgccccttatttctcatctgataactttaaggctggtgtacttttatctgtggcagaatgtttaagaggttttgttattatacatgaagggctatcttctttcccggaaatcttccttccaatatcctctttgctgcaagaaattttggatagatctgagttgcctggatcgttacaagacattttccatgaagtcattgacttgatcaaaaagagaagtgatgaacactatgcttcaagggagcccctccgaatgcggaagaagaagcccgaaccaattaagcaattgaatccaaaatttgaagagaactacatcaagggtcttgattatgatcctgatcgagaaagggcacaaatgaagaagctgcggaagcgtgtcaagagtgagatgaagggggcgaagcgtgagctgcaaaaggataattatttcctgtctgctgtgaaggagaaagagaggaggaagcgagatgaagagagagctgagatgtatggaaaagccatggcgttccttcaagaacaggaaagtgctttcaaatctggacagctggggaaaggaaagggtaggaaaaggatgcggtgatactctattgcaggggggcagctcggccagtgtaaatatacgggattgtgtttgctcaccctcttcccgcggtactggagggtggatccagctgattactgtatcgtgagctgctcagagtttgtcgtgcctacaagagcagggtgggcctagtcttatggaacatctccacctgcttactcctaaagctttgcctataaaattgtaacgccacaaacactttacaaggcttctccttggtgaactaccacacctgggaaatgctttatttcttttgtaccgtggagtggcttgcatctatgttatatactggtgccatagtaattttcagaagcacagtgaagagtttttattattttcatttttgttgtactctgacatgtgagccctataagtatggcaattttggcacggttttgcagtagaaaaataaatactattactgttctatgctatttccttttttt

SEQ ID NO: 10438 - DNA, 3311 bp, Zea Mays
atcccagagaaacatctaaaccctagcggcggaaccttccccgtcgctctgtcctcctgtccggacatggcgaagacgaagcccatggcggcggcgggcgagaagaagaagagcaaaggaaagaagaaaggcaagaatggcccggccaaggtggccatgaaggctcgtggcgcggcggcggaggagcggaacaacccgttcgaggccatctggtcgcgccgcaagttcgacgtgctcggcaagaagcgcaagggcgaggagcggcgcgtatcgcgctcacgttccgaggccatccgcaagagggagaacacgctgctcaaggagttcgttgagagcgccaagtcgtccgtgttccacgaccggcgtatcggcgagagggacgacacactgcccgagttcgacaaggccatccttcgccagcaacgcgagcgcttggccaagttgaaacgagaaagcaagtacaatctatcagatgatgatgaagacgaaatcaatattcataatgtgctgctatcggaaaatgatgattttgatgaggaagtgcctctcgatgatgggagcgacgaggaaggtaaaatggtcctctcaaagaagcgtttatctctccaaagtgatgaccatccttcaataactgatctaccacaagaaacacacgggcagaagagcaagaaggaagttatgacggagatcatttcaaagagtaaattttataaggcccaaagagccaaggagagggaagaggatgaacatcttgtcgacaagttagacagtgattttgcatcattggcccagacacgggcgttattgtccttaactgagtcagctaaggtcaaggtgaacaaaactgattcaagcactggcttgactgggaaggagttttctaacaaggcaaaggcagatacatatgaaaaactagtgaaagaaatggtgatggatcaacgtgctcggccttctgatagaactaaaactccagaggaaatagcacaagaagagaaagaacgtcttgagaagctggaggaggagcgccaaaaaagaatgcttggaactgctgatacgtctgatgaggacgatggcaacgaaaatgataaccacatgaagctaggaaactcaaaacctatatctggtgatgatcttggtgattccttctctttggatgagtcaacagtaaagaaaaagggctgggttgatgaaatttacgaaagggaaggtagaaagattggtgatgatgcagcagcatccgatgatggagaaagcgatgatgaaaatgctggtgatgatgaggctgatgatgaagattcggactccagtgacaatgactttggtaatatgtctgctagagattgggagcaaagtgatgatgatgaagttgatgtaggagacgatgaaatggaggatttcaaagagaaggggcaagagatcaatgacaaagtggtgaataaagatgcacacaatttgaaaggagaatctaatgtgaaacctcaagtaaaggatggcagtattccttttgttattgatgcaccaaatgacctgaaagatctatcttctttgttagatggtcgttcagaagccgaaataattgagattattagtcgaatacgtgcttgcaattcaataaggcttgcagctgaaaaccgaaggaaaatgcaaatcctttggcaggttttctatggtgttcttctgcagtactttgcagttttagctacccaaagtccagtgaagttcagaataattgacatacttgttaagcctttaattgagatgagtggagaaactccatattttgctgccatctgtgcaagagagcgacttattcatacacgtacccgtctatgcgaagacattaaggttccagggaagagcagctggccaaatttgaagacattacttctgctgagattatggtctcttatttttccctgctccgacttccgccatgttgttacaactccattgcttctacttatgtgcgaatatctgatgcggtgccctatacaatctggtcgagatgttgctgttggttctttcttgagttcaatggtgcttgtggttactaaagaatctaaaaagttctgccctgaagcaattggtttcctgcaatctcttttggtaacatcacttaaaggaaaagtggaaactcatctgcacaatcagattaacgatcaatttatggagctcaagactttaaaactgtggctcagtatccatgaccatgtgcatgaggtgaatccagtgaatatcctagaaatagttggcatggatcctgacgccccttatttctcatctgataactttaaggctggtgtacttttatctgtggcagaatgtttaagaggttttgttattatacatgaagggctatcttctttcccggaaatcttccttccaatatcctctttgctgcaagaaattttggatagatctgagttgcctggatcgttacaagacattttccatgaagtcattgacttgatcaaaaagagaagtgatgaacactatgcttcaagggagcccctccgaatgcggaagaagaagcccgaaccaattaagcaattgaatccaaaatttgaagagaactacatcaagggtcttgattatgatcctgatcgagaaagggcacaaatgaagaagctgcggaagcgtgtcaagagtgagatgaagggggcgaagcgtgagctgcaaaaggataattatttcctgtctgctgtgaaggagaaagagaggaggaagcgagatgaagagagagctgagatgtatggaaaagccatggcgttccttcaagaacaggaaagtgctttcaaatctggacagctggggaaaggaaagggtaggaaaaggatgcggtgatactctattgcaggggggcagctcggccagtgtaaatatacgggattgtgtttgctcaccctcttcccgcggtactggagggtggatccagctgattactgtatcgtgagctgctcagagtttgtcgtgcctacaagagcagggtgggcctagtcttatggaacatctccacctgcttactcctaaagctttgcctataaaattgtaacgccacaaacactttacaaggcttctccttggtgaactaccacacctgggaaatgctttatttcttttgtaccgtggagtggcttgcatctatgttatatactggtgccatagtaattttcagaagcacagtgaagagtttttattattttcatttttgttgtactctgacatgtgagccctataagtatggcaattttggcacggttttgcagtagaaaaataaatactattactgttctatgctatttccttttttt

SEQ ID NO: 10439 - DNA, 3161 bp, Zea Mays
cgcaaatcccagagaaacatctaaaccctagcggcggaaccttccccgtcgctctgtcctcctgtccggacatggcgaagacgaagcccatggcggcggcgggcgagaagaagaagagcaaaggaaagaagaaaggcaagaatggcccggccaaggtggccatgaaggctcgtggcgcggcggcggaggagcggaacaacccgttcgaggccatctggtcgcgccgcaagttcgacgtgctcggcaagaagcgcaagggcgaggagcggcgcgtatcgcgctcacgttccgaggccatccgcaagagggagaacacgctgctcaaggagttcgttgagagcgccaagtcgtccgtgttccacgaccggcgtatcggcgagagggacgacacactgcccgagttcgacaaggccatccttcgccagcaacgcgagcgcttggccaagttgaaacgagaaagcaagtacaatctatcagatgatgatgaagacgaaatcaatattcataatgtgctgctatcggaaaatgatgattttgatgaggaagtgcctctcgatgatgggagcgacgaggaaggtaaaatggtcctctcaaagaagcgtttatctctccaaagtgatgaccatccttcaataactgatctaccacaagaaacacacgggcagaagagcaagaaggaagttatgacggagatcatttcaaagagtaaattttataaggcccaaagagccaaggagagggaagaggatgaacatcttgtcgacaagttagacagtgattttgcatcattggcccagacacgggcgttattgtccttaactgagtcagctaaggtcaaggtgaacaaaactgattcaagcactggcttgactgggaaggagttttctaacaaggcaaaggcagatacatatgaaaaactagtgaaagaaatggtgatggatcaacgtgctcggccttctgatagaactaaaactccagaggaaatagcacaagaagagaaagaacgtcttgagaagctggaggaggagcgccaaaaaagaatgcttggaactgctgatacgtctgatgaggacgatggcaacgaaaatgataaccacatgaagctaggaaactcaaaacctatatctggtgatgatcttggtgattccttctctttggatgagtcaacagtaaagaaaaagggctgggttgatgaaatttacgaaagggaaggtagaaagattggtgatgatgcagcagcatccgatgatggagaaagcgatgatgaaaatgctggtgatgatgaggctgatgatgaagattcggactccagtgacaatgactttggtaatatgtctgctagagattgggagcaaagtgatgatgatgaagttgatgtaggagacgatgaaatggaggatttcaaagagaaggggcaagagatcaatgacaaagtggtgaataaagatgcacacaatttgaaaggagaatctaatgtgaaacctcaagtaaaggatggcagtattccttttgttattgatgcaccaaatgacctgaaagatctatcttctttgttagatggtcgttcagaagccgaaataattgagattattagtcgaatacgtgcttgcaattcaataaggcttgcagctgaaaaccgaaggaaaatgcaagttttctatggtgttcttctgcagtactttgcagttttagctacccaaagtccagtgaagttcagaataattgacatacttgttaagcctttaattgagatgagtggagaaactccatattttgctgccatctgtgcaagagagcgacttattcatacacgtacccgtctatgcgaagacattaaggttccagggaagagcagctggccaaatttgaagacattacttctgctgagattatggtctcttatttttccctgctccgacttccgccatgttgttacaactccattgcttctacttatgtgcgaatatctgatgcggtgccctatacaatctggtcgagatgttgctgttggttctttcttgagttcaatggtgcttgtggttactaaagaatctaaaaagttctgccctgaagcaattggtttcctgcaatctcttttggtaacatcacttaaaggaaaagtggaaactcatctgcacaatcagggctggtgtacttttatctgtggcagaatgtttaagaggttttgttattatacatgaagggctatcttctttcccggaaatcttccttccaatatcctctttgctgcaagaaattttggatagatctgagttgcctggatcgttacaagacattttccatgaagtcattgacttgatcaaaaagagaagtgatgaacactatgcttcaagggagcccctccgaatgcggaagaagaagcccgaaccaattaagcaattgaatccaaaatttgaagagaactacatcaagggtcttgattatgatcctgatcgagaaagggcacaaatgaagaagctgcggaagcgtgtcaagagtgagatgaagggggcgaagcgtgagctgcaaaaggataattatttcctgtctgctgtgaaggagaaagagaggaggaagcgagatgaagagagagctgagatgtatggaaaagccatggcgttccttcaagaacaggaaagtgctttcaaatctggacagctggggaaaggaaagggtaggaaaaggatgcggtgatactctattgcaggggggcagctcggccagtgtaaatatacgggattgtgtttgctcaccctcttcccgcggtactggagggtggatccagctgattactgtatcgtgagctgctcagagtttgtcgtgcctacaagagcagggtgggcctagtcttatggaacatctccacctgcttactcctaaagctttgcctataaaattgtaacgccacaaacactttacaaggcttctccttggtgaactaccacacctgggaaatgctttatttcttttgtaccgtggagtggcttgcatctatgttatatactggtgccatagtaattttcagaagcacagtgaagagtttttattattttcatttttgttgtactctgacatgtgagccctataagtatggcaattttggcacggttttgcagtagaaaaataaatactattactgttctatgctatttccttttttt

SEQ ID NO: 10440 - DNA, 3297 bp, Zea Mays
cgcaaatcccagagaaacatctaaaccctagcggcggaaccttccccgtcgctctgtcctcctgtccggacatggcgaagacgaagcccatggcggcggcgggcgagaagaagaagagcaaaggaaagaagaaaggcaagaatggcccggccaaggtggccatgaaggctcgtggcgcggcggcggaggagcggaacaacccgttcgaggccatctggtcgcgccgcaagttcgacgtgctcggcaagaagcgcaagggcgaggagcggcgcgtatcgcgctcacgttccgaggccatccgcaagagggagaacacgctgctcaaggagttcgttgagagcgccaagtcgtccgtgttccacgaccggcgtatcggcgagagggacgacacactgcccgagttcgacaaggccatccttcgccagcaacgcgagcgcttggccaagttgaaacgagaaagcaagtacaatctatcagatgatgatgaagacgaaatcaatattcataatgtgctgctatcggaaaatgatgattttgatgaggaagtgcctctcgatgatgggagcgacgaggaaggtaaaatggtcctctcaaagaagcgtttatctctccaaagtgatgaccatccttcaataactgatctaccacaagaaacacacgggcagaagagcaagaaggaagttatgacggagatcatttcaaagagtaaattttataaggcccaaagagccaaggagagggaagaggatgaacatcttgtcgacaagttagacagtgattttgcatcattggcccagacacgggcgttattgtccttaactgagtcagctaaggtcaaggtgaacaaaactgattcaagcactggcttgactgggaaggagttttctaacaaggcaaaggcagatacatatgaaaaactagtgaaagaaatggtgatggatcaacgtgctcggccttctgatagaactaaaactccagaggaaatagcacaagaagagaaagaacgtcttgagaagctggaggaggagcgccaaaaaagaatgcttggaactgctgatacgtctgatgaggacgatggcaacgaaaatgataaccacatgaagctaggaaactcaaaacctatatctggtgatgatcttggtgattccttctctttggatgagtcaacagtaaagaaaaagggctgggttgatgaaatttacgaaagggaaggtagaaagattggtgatgatgcagcagcatccgatgatggagaaagcgatgatgaaaatgctggtgatgatgaggctgatgatgaagattcggactccagtgacaatgactttggtaatatgtctgctagagattgggagcaaagtgatgatgatgaagttgatgtaggagacgatgaaatggaggatttcaaagagaaggggcaagagatcaatgacaaagtggtgaataaagatgcacacaatttgaaaggagaatctaatgtgaaacctcaagtaaaggatggcagtattccttttgttattgatgcaccaaatgacctgaaagatctatcttctttgttagatggtcgttcagaagccgaaataattgagattattagtcgaatacgtgcttgcaattcaataaggcttgcagctgaaaaccgaaggaaaatgcaagttttctatggtgttcttctgcagtactttgcagttttagctacccaaagtccagtgaagttcagaataattgacatacttgttaagcctttaattgagatgagtggagaaactccatattttgctgccatctgtgcaagagagcgacttattcatacacgtacccgtctatgcgaagacattaagggaagagcagctggccaaatttgaagacattacttctgctgagattatggtctcttatttttccctgctccgacttccgccatgttgttacaactccattgcttctacttatgtgcgaatatctgatgcggtgccctatacaatctggtcgagatgttgctgttggttctttcttgagttcaatggtgcttgtggttactaaagaatctaaaaagttctgccctgaagcaattggtttcctgcaatctcttttggtaacatcacttaaaggaaaagtggaaactcatctgcacaatcagattaacgatcaatttatggagctcaagactttaaaactgtggctcagtatccatgaccatgtgcatgaggtgaatccagtgaatatcctagaaatagttggcatggatcctgacgccccttatttctcatctgataactttaaggctggtgtacttttatctgtggcagaatgtttaagaggttttgttattatacatgaagggctatcttctttcccggaaatcttccttccaatatcctctttgctgcaagaaattttggatagatctgagttgcctggatcgttacaagacattttccatgaagtcattgacttgatcaaaaagagaagtgatgaacactatgcttcaagggagcccctccgaatgcggaagaagaagcccgaaccaattaagcaattgaatccaaaatttgaagagaactacatcaagggtcttgattatgatcctgatcgagaaagggcacaaatgaagaagctgcggaagcgtgtcaagagtgagatgaagggggcgaagcgtgagctgcaaaaggataattatttcctgtctgctgtgaaggagaaagagaggaggaagcgagatgaagagagagctgagatgtatggaaaagccatggcgttccttcaagaacaggaaagtgctttcaaatctggacagctggggaaaggaaagggtaggaaaaggatgcggtgatactctattgcaggggggcagctcggccagtgtaaatatacgggattgtgtttgctcaccctcttcccgcggtactggagggtggatccagctgattactgtatcgtgagctgctcagagtttgtcgtgcctacaagagcagggtgggcctagtcttatggaacatctccacctgcttactcctaaagctttgcctataaaattgtaacgccacaaacactttacaaggcttctccttggtgaactaccacacctgggaaatgctttatttcttttgtaccgtggagtggcttgcatctatgttatatactggtgccatagtaattttcagaagcacagtgaagagtttttattattttcatttttgttgtactctgacatgtgagccctataagtatggcaattttggcacggttttgcagtagaaaaataaatactattactgttctatgctatttccttttttt

SEQ ID NO: 10441 - DNA, 3336 bp, Zea Mays
attcaatctcagagaagcgagctcctctgtccagtaaacgcaaatcccagagaaacatctaaaccctagcggcggaaccttccccgtcgctctgtcctcctgtccggacatggcgaagacgaagcccatggcggcggcgggcgagaagaagaagagcaaaggaaagaagaaaggcaagaatggcccggccaaggtggccatgaaggctcgtggcgcggcggcggaggagcggaacaacccgttcgaggccatctggtcgcgccgcaagttcgacgtgctcggcaagaagcgcaagggcgaggagcggcgcgtatcgcgctcacgttccgaggccatccgcaagagggagaacacgctgctcaaggagttcgttgagagcgccaagtcgtccgtgttccacgaccggcgtatcggcgagagggacgacacactgcccgagttcgacaaggccatccttcgccagcaacgcgagcgcttggccaagttgaaacgagaaagcaagtacaatctatcagatgatgatgaagacgaaatcaatattcataatgtgctgctatcggaaaatgatgattttgatgaggaagtgcctctcgatgatgggagcgacgaggaaggtaaaatggtcctctcaaagaagcgtttatctctccaaagtgatgaccatccttcaataactgatctaccacaagaaacacacaagagcaagaaggaagttatgacggagatcatttcaaagagtaaattttataaggcccaaagagccaaggagagggaagaggatgaacatcttgtcgacaagttagacagtgattttgcatcattggcccagacacgggcgttattgtccttaactgagtcagctaaggtcaaggtgaacaaaactgattcaagcactggcttgactgggaaggagttttctaacaaggcaaaggcagatacatatgaaaaactagtgaaagaaatggtgatggatcaacgtgctcggccttctgatagaactaaaactccagaggaaatagcacaagaagagaaagaacgtcttgagaagctggaggaggagcgccaaaaaagaatgcttggaactgctgatacgtctgatgaggacgatggcaacgaaaatgataaccacatgaagctaggaaactcaaaacctatatctggtgatgatcttggtgattccttctctttggatgagtcaacagtaaagaaaaagggctgggttgatgaaatttacgaaagggaaggtagaaagattggtgatgatgcagcagcatccgatgatggagaaagcgatgatgaaaatgctggtgatgatgaggctgatgatgaagattcggactccagtgacaatgactttggtaatatgtctgctagagattgggagcaaagtgatgatgatgaagttgatgtaggagacgatgaaatggaggatttcaaagagaaggggcaagagatcaatgacaaagtggtgaataaagatgcacacaatttgaaaggagaatctaatgtgaaacctcaagtaaaggatggcagtattccttttgttattgatgcaccaaatgacctgaaagatctatcttctttgttagatggtcgttcagaagccgaaataattgagattattagtcgaatacgtgcttgcaattcaataaggcttgcagctgaaaaccgaaggaaaatgcaagttttctatggtgttcttctgcagtactttgcagttttagctacccaaagtccagtgaagttcagaataattgacatacttgttaagcctttaattgagatgagtggagaaactccatattttgctgccatctgtgcaagagagcgacttattcatacacgtacccgtctatgcgaagacattaaggttccagggaagagcagctggccaaatttgaagacattacttctgctgagattatggtctcttatttttccctgctccgacttccgccatgttgttacaactccattgcttctacttatgtgcgaatatctgatgcggtgccctatacaatctggtcgagatgttgctgttggttctttcttgagttcaatggtgcttgtggttactaaagaatctaaaaagttctgccctgaagcaattggtttcctgcaatctcttttggtaacatcacttaaaggaaaagtggaaactcatctgcacaatcagattaacgatcaatttatggagctcaagactttaaaactgtggctcagtatccatgaccatgtgcatgaggtgaatccagtgaatatcctagaaatagttggcatggatcctgacgccccttatttctcatctgataactttaaggctggtgtacttttatctgtggcagaatgtttaagaggttttgttattatacatgaagggctatcttctttcccggaaatcttccttccaatatcctctttgctgcaagaaattttggatagatctgagttgcctggatcgttacaagacattttccatgaagtcattgacttgatcaaaaagagaagtgatgaacactatgcttcaagggagcccctccgaatgcggaagaagaagcccgaaccaattaagcaattgaatccaaaatttgaagagaactacatcaagggtcttgattatgatcctgatcgagaaagggcacaaatgaagaagctgcggaagcgtgtcaagagtgagatgaagggggcgaagcgtgagctgcaaaaggataattatttcctgtctgctgtgaaggagaaagagaggaggaagcgagatgaagagagagctgagatgtatggaaaagccatggcgttccttcaagaacaggaaagtgctttcaaatctggacagctggggaaaggaaagggtaggaaaaggatgcggtgatactctattgcaggggggcagctcggccagtgtaaatatacgggattgtgtttgctcaccctcttcccgcggtactggagggtggatccagctgattactgtatcgtgagctgctcagagtttgtcgtgcctacaagagcagggtgggcctagtcttatggaacatctccacctgcttactcctaaagctttgcctataaaattgtaacgccacaaacactttacaaggcttctccttggtgaactaccacacctgggaaatgctttatttcttttgtaccgtggagtggcttgcatctatgttatatactggtgccatagtaattttcagaagcacagtgaagagtttttattattttcatttttgttgtactctgacatgtgagccctataagtatggcaattttggcacggttttgcagtagaaaaataaatactattactgttctatgctatttccttttttt

SEQ ID NO: 10442 - DNA, 712 bp, Zea Mays
cttcctgtgaacttgccctatgatatttcgaggactcgggcttgaatatgacatgtcaggattgacagggaacacgatggatagtcataggctcataacacatgctggacaccaaggctatgacaagcaaaatgctcttgttgaagaattgttcctcaattaccattgccaaggaaagtacattggtgacaagcaggttttgctggatgctgcaagaaaggtgggcatagaaggggccgaggaactgcttgaagatcctaccaaaggagtccatgaggttcaggaagagctcaagaagtactcatcggacatctccggggtcccacattttgtgatcaataataaatatcaactcagtgggggccagccaccaaatgaattcatgagggcgtttgagatggctgcaaaagatggagcttaatggcgcttatttgcgagaaaaaactgtggaaccagttgtgtttcgtagttttgatgtggtgatattagtgacgaagatggtgtggatgttcacttttgaatagagttctaggtgattggatatggaacatgggttatgtcctgtaaatagaggccagtctgtatatttgatttgatttcaaccgaaagctgtggttttcagaacctgagatttcagcatgaaaacctattgtaagcacccctgcggacattaacatcaagaaaaaatctataaaaataaattttcgcaatg

SEQ ID NO: 10443 - DNA, 1196 bp, Zea Mays
accaacgcctaccgaccaaattcggcgactgcttctccatccttccacgaattacacgaggaaagaacgctgataaacaaatggcgtaaatctctatcgacgaagctgtggaggaaaacgaaggatctccccgtgcttgtgcatgccagatcgcctgctctacgaaatggtgattgtatcgtactattctggggggaaagcgcaattatttgagggcaagttgattcatcatggaggggtgtgcaaaattcatggcttcagacaccggcaagaagctcattcagatcgatgtgagctcggatacagtgtgcccttggtgcttcgtcggtaaaaagaaccttgagaaagcaatggagcaaagcatgggcaagtttgatttcgaggtccgttggcatccattctttctgaaccccgacgcgcctaaggagggcgtcaagaaatctgacttcttcaagatgaagttcggtcctgtccaatatgagggtgcgatgtctcgcatgactgagatatttcgaggactcgggcttgaatatgacatgtcaggattgacagggaacacgatggatagtcataggctcataacacatgctggacaccaaggctatgacaagcaaaatgctcttgttgaagaattgttcctcaattaccattgccaaggaaagtacattggtgacaagcaggttttgctggatgctgcaagaaaggtgggcatagaaggggccgaggaactgcttgaagatcctaccaaaggagtccatgaggttcaggaagagctcaagaagtactcatcggacatctccggggtcccacattttgtgatcaataataaatatcaactcagtgggggccagccaccaaatgaattcatgagggcgtttgagatggctgcaaaagatggagcttaatggcgcttatttgcgagaaaaaactgtggaaccagttgtgtttcgtagttttgatgtggtgatattagtgacgaagatggtgtggatgttcacttttgaatagagttctaggtgattggatatggaacatgggttatgtcctgtaaatagaggccagtctgtatatttgatttgatttcaaccgaaagctgtggttttcagaacctgagatttcagcatgaaaacctattgtaagcacccctgcggacattaacatcaagaaaaaatctataaaaataaattttcgcaatg

SEQ ID NO: 10444 - DNA, 1306 bp, Zea Mays
accaacgcctaccgaccaaattcggcgactgcttctccatccttccacgaattacacgaggaaagaacgctgataaacaaatggcgtaaatctctatcgacgaagctgtggaggaaaacgaaggatctccccgtgcttgtgcatgccagatcgcctgctctacgtccgcatcccgtccctcgcgaaactcggcactcccagggttcgtttctttgtttcacctactctcgttgtttatgctaatttgttaggcgcctttgcttcaggaaatggtgattgtatcgtactattctggggggaaagcgcaattatttgagggcaagttgattcatcatggagggactgtaggtgtgcaaaattcatggcttcagacaccggcaagaagctcattcagatcgatgtgagctcggatacagtgtgcccttggtgcttcgtcggtaaaaagaaccttgagaaagcaatggagcaaagcatgggcaagtttgatttcgaggtccgttggcatccattctttctgaaccccgacgcgcctaaggagggcgtcaagaaatctgacttcttcaagatgaagttcggtcctgtccaatatgagggtgcgatgtctcgcatgactgagatatttcgaggactcgggcttgaatatgacatgtcaggattgacagggaacacgatggatagtcataggctcataacacatgctggacaccaaggctatgacaagcaaaatgctcttgttgaagaattgttcctcaattaccattgccaaggaaagtacattggtgacaagcaggttttgctggatgctgcaagaaaggtgggcatagaaggggccgaggaactgcttgaagatcctaccaaaggagtccatgaggttcaggaagagctcaagaagtactcatcggacatctccggggtcccacattttgtgatcaataataaatatcaactcagtgggggccagccaccaaatgaattcatgagggcgtttgagatggctgcaaaagatggagcttaatggcgcttatttgcgagaaaaaactgtggaaccagttgtgtttcgtagttttgatgtggtgatattagtgacgaagatggtgtggatgttcacttttgaatagagttctaggtgattggatatggaacatgggttatgtcctgtaaatagaggccagtctgtatatttgatttgatttcaaccgaaagctgtggttttcagaacctgagatttcagcatgaaaacctattgtaagcacccctgcggacattaacatcaagaaaaaatctataaaaataaattttcgcaatg

SEQ ID NO: 10445 - DNA, 1167 bp, Zea Mays
accaacgcctaccgaccaaattcggcgactgcttctccatccttccacgaattacacgaggaaagaacgctgataaacaaatggcgtaaatctctatcgacgaagctgtggaggaaaacgaaggatctccccgtgcttgtgcatgccagatcgcctgctctacgtccgcatcccgtccctcgcgaaactcggcactcccaggactgtaggtgtgcaaaattcatggcttcagacaccggcaagaagctcattcagatcgatgtgagctcggatacagtgtgcccttggtgcttcgtcggtaaaaagaaccttgagaaagcaatggagcaaagcatgggcaagtttgatttcgaggtccgttggcatccattctttctgaaccccgacgcgcctaaggagggcgtcaagaaatctgacttcttcaagatgaagttcggtcctgtccaatatgagggtgcgatgtctcgcatgactgagatatttcgaggactcgggcttgaatatgacatgtcaggattgacagggaacacgatggatagtcataggctcataacacatgctggacaccaaggctatgacaagcaaaatgctcttgttgaagaattgttcctcaattaccattgccaaggaaagtacattggtgacaagcaggttttgctggatgctgcaagaaaggtgggcatagaaggggccgaggaactgcttgaagatcctaccaaaggagtccatgaggttcaggaagagctcaagaagtactcatcggacatctccggggtcccacattttgtgatcaataataaatatcaactcagtgggggccagccaccaaatgaattcatgagggcgtttgagatggctgcaaaagatggagcttaatggcgcttatttgcgagaaaaaactgtggaaccagttgtgtttcgtagttttgatgtggtgatattagtgacgaagatggtgtggatgttcacttttgaatagagttctaggtgattggatatggaacatgggttatgtcctgtaaatagaggccagtctgtatatttgatttgatttcaaccgaaagctgtggttttcagaacctgagatttcagcatgaaaacctattgtaagcacccctgcggacattaacatcaagaaaaaatctataaaaataaattttcgcaatg

SEQ ID NO: 10446 - DNA, 892 bp, Zea Mays
accaacgcctaccgaccaaattcggcgactgcttctccatccttccacgaattacacgaggaaagaacgctgataaacaaatggcgtaaatctctatcgacgaagctgtggaggaaaacgaaggatctccccgtgcttgtgcatgccagatcgcctgctctacgtccgcatcccgtccctcgcgaaactcggcactcccaggatatttcgaggactcgggcttgaatatgacatgtcaggattgacagggaacacgatggatagtcataggctcataacacatgctggacaccaaggctatgacaagcaaaatgctcttgttgaagaattgttcctcaattaccattgccaaggaaagtacattggtgacaagcaggttttgctggatgctgcaagaaaggtgggcatagaaggggccgaggaactgcttgaagatcctaccaaaggagtccatgaggttcaggaagagctcaagaagtactcatcggacatctccggggtcccacattttgtgatcaataataaatatcaactcagtgggggccagccaccaaatgaattcatgagggcgtttgagatggctgcaaaagatggagcttaatggcgcttatttgcgagaaaaaactgtggaaccagttgtgtttcgtagttttgatgtggtgatattagtgacgaagatggtgtggatgttcacttttgaatagagttctaggtgattggatatggaacatgggttatgtcctgtaaatagaggccagtctgtatatttgatttgatttcaaccgaaagctgtggttttcagaacctgagatttcagcatgaaaacctattgtaagcacccctgcggacattaacatcaagaaaaaatctataaaaataaattttcgcaatg

SEQ ID NO: 10447 - DNA, 1302 bp, Zea Mays
accaacgcctaccgaccaaattcggcgactgcttctccatccttccacgaattacacgaggaaagaacgctgataaacaaatggcgtaaatctctatcgacgaagctgtggaggaaaacgaaggatctccccgtgcttgtgcatgccagatcgcctgctctacgtccgcatcccgtccctcgcgaaactcggcactcccagggttcgtttctttgtttcacctactctcgttgtttatgctaatttgttaggcgcctttgcttcaggaaatggtgattgtatcgtactattctggggggaaagcgcaattatttgagggcaagttgattcatcatggagggactgtaggtgtgcaaaattcatggcttcagacaccggcaagaagctcattcagatcgatgtgagctcggatacagtgtgcccttggtgcttcgtcggtaaaaagaaccttgagaaagcaatggagcaaagcatgggcaagtttgatttcgaggtccgttggcatccattctttctgaaccccgacgcgcctaaggagggcgtcaagaaatctgacttcttcaagatgaagttcggtcctgtccaatatgagggtgcgatgtctcgcatgactgagatatttcgaggactcgggcttgaatatgacatgtcaggattgacagggaacacgatggatagtcataggctcataacacatgctggacaccaaggctatgacaagcaaaatgctcttgttgaagaattgttcctcaattaccattgccaaggaaagtacattggtgacaagttttgctggatgctgcaagaaaggtgggcatagaaggggccgaggaactgcttgaagatcctaccaaaggagtccatgaggttcaggaagagctcaagaagtactcatcggacatctccggggtcccacattttgtgatcaataataaatatcaactcagtgggggccagccaccaaatgaattcatgagggcgtttgagatggctgcaaaagatggagcttaatggcgcttatttgcgagaaaaaactgtggaaccagttgtgtttcgtagttttgatgtggtgatattagtgacgaagatggtgtggatgttcacttttgaatagagttctaggtgattggatatggaacatgggttatgtcctgtaaatagaggccagtctgtatatttgatttgatttcaaccgaaagctgtggttttcagaacctgagatttcagcatgaaaacctattgtaagcacccctgcggacattaacatcaagaaaaaatctataaaaataaattttcgcaatg

SEQ ID NO: 10448 - DNA, 3212 bp, Zea Mays
accaacgcctaccgaccaaattcggcgactgcttctccatccttccacgaattacacgaggaaagaacgctgataaacaaatggcgtaaatctctatcgacgaagctgtggaggaaaacgaaggatctccccgtgcttgtgcatgccagatcgcctgctctacgtccgcatcccgtccctcgcgaaactcggcactcccagggttcgtttctttgtttcacctactctcgttgtttatgctaatttgttaggcgcctttgcttcaggaaatggtgattgtatcgtactattctggggggaaagcgcaattatttgagggcaagttgattcatcatggaggggtagggctaccgcattttttatttgtttcggtagaacgacaatttgatcataattaggaaatatattattgttttgtctagtaaaaaaaatcttttctcgataacactggttgaaataagttttggatatggccatcttggccaaatcatgggattaaactgttgagtttaggtggatgaaccatgaaccagcatattagtattatggatgaggtggttatagaatgaaccgattaagatacgcttccattctggaaagggagcatatgcccttgtctcttggttttttttttacgaaggggcgaagccccctatttcattaagaaataggaaagtttgaaacatccacaaccacgcggcacatcatcccaaaagatcgaacacggccagaaccctatctagactctaaacactatcaaactagattagtgaagagcctaagatagcagagaaagtttggcctacgattaactacataagactttcttatttacaacccaatcagacaggcagaagccacaaaaggaactgaacaagccaaccatcaagagacaaacaaacttcatcaccatcttccaagttccagcttccatatcaaccagaaatgcgcctatctaaagggcaccacccaaaggcccggccgaatgcctcacttgccgtctttcggattagcttgcttcctagaaccaccattttttgctccttctttttctgacgagtagcccatgaatccagctagaagcagcaaagaaaaataatgttagaaggatcaagcaaatgtttctttccaaagcaccaatcatttctagtgcgccaaatagcccagaataaagcaccacaaccaaacaaaaccaaattagcagttttgtcttttggtttacttaaccaattgtcataaaggtagctgatactattcggaatcagtctcaaattcaaggcaacttgaatcactctccacatatactttgcaatggggcaatgaaagaacagatgatcgatagattcatcaaccccatagaaacagcaatccaaagaaccaatccagttccttttcttcaagttgtccttagtaagaattttatttcttacaactaaccaaaagaaaacctttattttatgaggcaatttagatttccacaagaacttatatgaaatcaaaatttgatcttccattttctttttgtacatagggttaactgagaagccttttttccccagattccacacaattttatcctcctgatcagacaaagacacctgattacaacttatcatttcatcgaataacatcctcaaattacccacaatccttcttctaaaagtaagagtctcaaaattagatgtgaatacatcattaacggtaacatctttgtcatagaccaagtaaaaaagaacaggaaactgaacagacagaggcaaattaccaatccaaatacttttccagaaactagtcttcagaccattaccaaccgcagatttacagtatttataaaaattgtcacgcaaactcagaatttttttccagaaatgagaatcactttgtttttgtttaactaaaataagggtttttcccttaatgtatttactggcaataattttttgccataagcctctcgaattttcaatattccaaaacccttgtctcttggtgtcaaggaaattcttcttctggagtaatccagatagtttgtttacaatagttgtacacttagctaacaaattagctgacttattagcctcctgtttcaatgagctagagctaatttcatctaaaaaatagctggctaacaattagctctatgctccaaacaggaactaactctcagctacactggctgatgtgcaaagatgactaacaagcatataaatccccatcactgagcaatttgaattttttctgcccaagactgtaggtgtgcaaaattcatggcttcagacaccggcaagaagctcattcagatcgatgtgagctcggatacagtgtgcccttggtgcttcgtcggtaaaaagaaccttgagaaagcaatggagcaaagcatgggcaagtttgatttcgaggtccgttggcatccattctttctgaaccccgacgcgcctaaggagggcgtcaagaaatctgacttcttcaagatgaagttcggtcctgtccaatatgagggtgcgatgtctcgcatgactgagatatttcgaggactcgggcttgaatatgacatgtcaggattgacagggaacacgatggatagtcataggctcataacacatgctggacaccaaggctatgacaagcaaaatgctcttgttgaagaattgttcctcaattaccattgccaaggaaagtacattggtgacaagcaggttttgctggatgctgcaagaaaggtgggcatagaaggggccgaggaactgcttgaagatcctaccaaaggagtccatgaggttcaggaagagctcaagaagtactcatcggacatctccggggtcccacattttgtgatcaataataaatatcaactcagtgggggccagccaccaaatgaattcatgagggcgtttgagatggctgcaaaagatggagcttaatggcgcttatttgcgagaaaaaactgtggaaccagttgtgtttcgtagttttgatgtggtgatattagtgacgaagatggtgtggatgttcacttttgaatagagttctaggtgattggatatggaacatgggttatgtcctgtaaatagaggccagtctgtatatttgatttgatttcaaccgaaagctgtggttttcagaacctgagatttcagcatgaaaacctattgtaagcacccctgcggacattaacatcaagaaaaaatctataaaaataaattttcgcaatg

SEQ ID NO: 10449 - DNA, 1827 bp, Zea Mays
attgtaagcaggaagcaccattttttttcttttcttagaaatccatctctacgccaagcctgcagcctttgtgaggtctgaacaccacagcatctgcagcaagataaatgttaacagttgaaccaaatactgtgaacttatttatcaaatactgtgagctgataccgtcgccgtcgccaaatggatttccaacagggtaatcatgctttagggacacagcagttgacagttgaatcaaacctctaacattctactacctctgtcccaagataaatgttgttatcgttttcaattagtcaactatttttaactttaaccaaatataaaaaaattattaatatcaacagtatataattaatatcattagattgatgactaagacactagtataaaaaaatgtcaggtttgttcttcttgcaacgacagaaattcacacaggtttgttctgcttttggtttagtcattccttgggccattgcaaccaacctgtgagaagttagaaaagcggagacaagaactgagtcagatctgtccactcccttttctcccaccggttccctcgaggcggatataaacttgagcttgctccacttcccagcagacagcaagcagtcttgttatccagatctggttggatctctgttgccgtacaccgtggttaccgtgtctgtaacctggtggcgttgggcgatagagatgacgacggcggcagcggtagccggtaggtgagggcggtggcaggtgacagcgcacaaacgaggacgagagatgcaacctggtggtggcaggtggcagatgtggcgacggcgggggcggtggctaagggcagcgctaggtgagggcgagagagaggcgcggggcatagaaaaccttaccctgtgcaaaccggtggtacacggggtgaaacaaatccgtacacaagcctctaaaacatgttttcagatagcccgtgtgccggccgtcccgtggaaaccgaccggtttatgtgttcccaaacgaggcctaagggttgtaatggaggtcacaatgaaaaaaccatgcctacacaactgtgaagtgagaagtggtgaagaaaccattctcacattttccccaaaaaagattctttgatagtacttctcgcttccaattattcaagcacaacagccatcaagacatggtgttggtaaaaaaaaatagtatatccatgtcaccatgtgtacacagtaatagtatacagacattattgagctcgaagagagccacaaaagatgacccggatttctaaagttcatagtctgatagatgatgtcccttcacccagcttacagtcacagggttattggatcaaattattgttatagaaatgtttgagtacagaaagacctattttgagtgagtctagatctgtgaaacacactatcaacttttatgtacttttctataactaagacatgccaacaatgaacataagcagttgagattgaaactactagctccataaaaaatggaaacaaatgattcttgagatacacatgtgaagtaaatctgaatatgagttagttctatctctgggaaaaaataaaaaaaattaagatccattcaaaccttaccatttggagaggaaatataacaagatgtataagggtttagacttttgtggaggcacccaggtttgcatataaatctgcaaagagagatgtttaatgtatagagaacaaatgctgcatcctcattcgttgaagaataggagaaaaagcacgttgctagtccgcatcaaccttcgtcttcaagaacatcagttgtctgaagatgtagctgcaagcactgataccagtatcctttgtt

SEQ ID NO: 10450 - DNA, 166 bp, Zea Mays
gagagcacaaaaaaagagcataaattccgggtccattctatgacattttagctgaatccattcatcagatttgtgtactcgtacagccagcaaacgtggtgagaattccattccatggcattagcttcactggaatcaatggttgaagttgtaaaacaggattcca

SEQ ID NO: 10451 - DNA, 1840 bp, Zea Mays
cctcaatcgatgagaagggggctgggagcaagtgaactgaggatggagaagaagataagccatcaatggaggcaagtagcaaaaatcccggtagcccctccaatcactgctcagcaacgaggaacagcaaaaccccaggggacaaggaggggaacggagatttggccggagcaaattacactttggcccatagttatgaggataaggggtagaaacgtcataccagaaaaggcgtattccattaattcgctttcttattctgttcgcgtaacctgttgttttcctccccagtcggcgcatggcgcagcgctctcctctgtgcctgcgccgcctcaaatcaaatgaaatcgggcctcctccgcacttccccagtccaatttttttcgctcgggagtaccgagcttgttgggtccttaacaagggcgggcgtgcatttcccgaggcaccattcatctgtggaatcctatgtctttgcaagctcccaagggcaagagattgtcgttgctttagggagcaacgtggatgatacacaatcagtacagcacctgatcaaccactgttcatatattctgttgtaagatggacaaccaagcttggacgacatgattacgatttatgccaaactgatgaagatatagtcccagaccagttgatctggatgtgatattttatgataagcatcaaacgaacggaaatatgagagagcatttttttttctagctccttttgatggatcttctaggatctcttgatccttggatcaatgcaaagttggcattctctcaatatgctgaaatgtgcactttaaactgtggaagaaccttcatggagagcctttgtttgatcataaaagaaggcctaataatagtgttgcctgtgggtcatggcctcatagacataatctgaagccagatatctttagtgacaggtggaaattcttgagtggatgctgtttttctgaggtcaaattgctaacatctgaacatgcagatacagttggcattggcactcgatccacgtgccattttgcaacaaggctctcagaggaggaagagcttcaaaggttgattcctgtgctgggtgcagtcgttaaagatacttgagatagaaagaagcttatccatgaatacaattatatgcagaagtgcaggggatctattcacattgcataggctacaatctgggtttatatagcctctgagcaatactcaagtgtcttacatggaactggcagagaactttttgaacagaacagttggagatctcttctattaacagagaagaataagaacccaaaaaaaactgtacaggaaaaaaggaatcaagcagagctaaacaagaacatcacactaagcttgaagggaagatttaactcaattttatggcttaatggaactggcagagattccttcgttgagaatattgttgacccttctaaatattcttaacagaaccctcagcttctttctggtgtgtcatccatcagaagggagaattgtcaagggagcattattgcttcacatgtactagtatgttacttgaaccatccaggaaaaaggatttcaaggtgggatgtgtgtgagtgtgtcaatcccacatgcaatggtagatttgatgttgatatacaaaggtttgtgatgcattgttgaagcaaataaaagatggggatgtttttttgaaccaaagccttaagcttttgcccttgtttttttctctctttcagagacttttgcacttgtccattagtatgatattgctatttcatttttcaaataaactatctcttgttagtgaataagatggatgtacactctgacttgtgtgcatatgtttgccttgc

SEQ ID NO: 10452 - DNA, 898 bp, Zea Mays
accattttcccgatgcataggcccagagctcaatacgccaccgcctttttactcatctgttgagcacttcgcctgcttccctccttgccgtgcgatccgcctccagagactcctttgactctggattcaatcgtggagcttggagcattcaaggttcactccctccgccatcactggaagatgggaccgcagaaggtcgagacgatgcggcggccgaggcccgagagaggagaacggcggatcgacgccgccattgaccacctcgcccagtacggcttcgcaaagccccaaatccgcaagctgtacgggagagatggatgggtgttcctggaggagggatcatacagtatcgtgcttaaagtcctggaagaacaggcgcagcaggatcagacacaagaagcagctgctgcagaagaggcattaccacaaaacggtatggaagtctcacgagtgaatggtgaggcaccgaatgagcctccatcaacccttgaactgcaagcttcccccagcagttcacctttactgctagtgccaccagccaagggacctccttgtgcaaggactccctgctatggatggattagtgaagagtccgagtctgagagcgaatcagaggatggagaaatgctttccgatgtaactgggcctgtaattttcgccaaaaaagatataccaaatcctgtgggaacattgccttctaggaggaagtgacctagtagatgggatgtgcacaccctagctggtaatgattctgactcaccctcgctcttctctatgtaatttcgtattgctgacacaattgtcgtgagtcgtgacaagtccgtatttcttttaggtgccgttcggttgtttgggattggtgggttctctaatttatataaactttgattagctggaa

SEQ ID NO: 10453 - DNA, 640 bp, Zea Mays
gtcaaagcgtacctcgggtacccgagctccttgctcagggctataagacccagcctccgctcctcgttaccccgacttcgcaatcgtcgtcgtcgccgtgccatagtaacgccaccacgacgttgtctgggtaccggaattgagccagggaggtgtgcgcaactccgtaggactatcccgtgccatcaatcgtgcgcgggagctggtccgccaggcacgggcatcgagctcacagcgtcggagaacttcatctgccgcgggcgattttcgcttgggactcatctgctatggccgtaagcctctgctcaatttgtgccccagccaggatcggctgtcgctcacgtcgtcggcgcggcactccttaagcacgacggcgttcgggcgttcttgtttatcgtctccgcggatccgggtgctacgtcactgcgtctggattactgcgcgaggacacgtgtcatctgaaaaacaagatggtacctggaatctcaagtgccaggcaagttgtgcccttgaccactttgtacccaataatgttctttaatatcacttatccatgcataggttaattttgatgggacccaataggtcaccctagattgtttatctcattaccttgtttacccctggatcacttgggtag

SEQ ID NO: 10454 - DNA, 3380 bp, Zea Mays
gtcataatgcccatgtgtctgtatcaagttcaggatcaagagattttgcaggaggttcacttttgaaatatgtgaataaatcaacattgcacttcaagaaatctaagaatcgaagaagtggttcccctgtcaactggacccctcggaagaagactgaatcatacatgaagagaaaaataaagcatcttcaggaaactgatggaatgaccgcatccctccatgagactctaggaaatgcaaatcctcactatactaggatggcaagggagaagatagcagcgagagaggcagctagaaaggcaacagatgctcgcaaagctgctatggttgaagcttcatggtgccgaattcttcgagcagccaggatccaaaataaaaatgccgaagaagttatggagaaggcagtgctacaagcaactgaagcattcgaggaagctcgggcattgggtgtgatgatgtatgacagacctgactgtccacataagcagtatgaggtggaatcatcgttgcatacaggagcacaatcaacccataaagttatcgcatcgtttcagacagcttttcaggttgatatggaggtttctgctgcagtaaaaaaagcatttgttcaactcgcaaactctccggattcagcaaagagagaagagtttaaggaactattatggaaaatcagccaaaatcctgatttggcagaacatgaagataaacaacaactggttgactgtagcaatgaagatgcaattgtgttgaaactcaataaagaacacctcagcggcagctgtgttgcttctgatttcaataccacaaaagttcaagaatccatagatgttgttagcattatgcttgaacggctaaaagctctccatgaagaagaacttgcctccttagcagtcattgtagctacatctggccttaatgctgaactacaaaatgaaagaagcaaatatcatgaaacaggcgctgtgaataacactagtgctgggtcactcagatcacaagcaaggaggtattccactgcagcgagttttattggtgtccaaggaccaaagaaagaagtcacttctgagttaccgagtctggataagttcttggtgaagcatctttcaaaacttgaaagagaagttcaggaagcaagagaagcaagcagaaaatccacattagtaaagtctgtcacacaaggtgcccacatccaatttacaggcagcaatgcaaagacaccagaatcaacttcagacctcagcagcattctggtgaagcatgtgtctaagcttgagaaggaaatcctggaagcaaagaagatcaaccaaagaattcaccaggtggaaggaaattgtgaggatgtcaaatcaaatgtgcagtcaagaaacaaagaactggaatttaacaagattcagccagaagttgaaagtaactgtgattcaaagggaagctgtgagtccaaggaatcctgtatagacaacaatgacataaaagataatgatgattgtgtacaagaagacaaagagaacaaaaactgctattcacatcagttaccaccatctggtgcaaagggcaaacatggtggcaagaggttaactcgacttgaagctgctaggctggaagcacttaaatccttttgtactatagatggcaatgcattggatgctggcctggataagatcttcgtcaagccaatccatagattggagaaggaaaagagggaagcacgtgaaggacaaatcaatgtgcagaaacatccccagaagcttggtcaaagcgcaactgtgacagagggcttagatgatatcttagtgaagcatgtatcaaggctggaaagagaaaagattgattaccaaaagaggaatgaactgggagtgggagaaagatggagcaatgtgccacatgatcagcggagtaatggtaacaatgtaaaatcatctgatagtttagatcaagttttagtgaagcgtattagtcgactggaaagggagaagttggaatatgaaaagaggaatgcactagaaggaggttccgatgtggaaccaaagagggaaccacactgtaacaatgctgcagcttctgatagtttagatcaaaacttaattaaacatgtctccagacttgacaaggagaagatagagcatgagaagaacggtggtatgataattgtaaagaagggtcagacgcaatgtacaaatggagccgaaggaggcctggctgacgtctttgtgaagcgtccaacgaagctcgagcaggcgaaactggcttctgctgccgaggagaaaccagctagtggctttaaccctgtcgaagagcgtagaagagcaagacagaaggagcttctcgatgcgtggggaggaatgggtttggggaactcgatgaagccccatgtatcaaggattgagagggataaggtcgcttggaggatagccgaggatgaacagaagcagatggctgctgcaagggaggcgtgacttcactgaaacctggacaaattatctgatgcgttgcgctccagcttggaggaaaatgcatcctctgaagtctgatcctccttccttttgacaaccgacagttgttttgggggaggatcagatgtccagggcgtcatgccatgtaccagtgccgcaaacaaagcgtgaaactgtcgacaggttacttggttcgaatcctccttttgtatttgttgttgcctctggtacattctcctttggttgttccttccatgtaattacgtatcgttgtccaattgtctagcatataattgcgagcaagttcaagtgaaattaactcctttggagatgacgaatgaaaaggcccagtgcagtttcctagatgccagttactaactgctggagtgctgtggcttatatagatactgttattttggcttatacagaatcacagatactgagatactgttatttttctttgtcaaaggccggcgtggattctgcgcgcacatgaaacatttctagatgctcataacggatattttcccgaaattggtgcacctgatttaacccaagttgtccttttggtcttctgaggcagctttgtaattcaaagttctgaagatgttctcgattacctccaacgtttggtacccccccaaaacaaaaaacaaaaaaagtgtagcttctttgaaactttgaattgcagctgttacctttccttgagttgacatttttgcatgcatgctctgctctttgcttcttctgtgaaagttaggtgaaaagttggatcatcagaacgagaagcagggggtggacctagctagtactactagtagtagtaaatggtacctggtgccatgtcggcccgagaggttacagagtgagtggagaatgtattacagagagaacttttaccgaacaatgcgcaacccacatattagatag

SEQ ID NO: 10455 - DNA, 2061 bp, Zea Mays
ctgcagcgttggcgtacaggccggactacattagccaacgcgtatcggcagtggcaaaccctcttcgcttctaactccgctgggccaccagctttgaccgccgcctcccttcccctccgctactgctcctccccaccccactcccccgcaggagcggcggcggcggcggcgaggtcgtaccccacatcggcgagcggcggcggcaccgccggaggcaaaggcaagatgttcgggcgcgcgccgaagaagagcgacaacaccaagtactacgagatcctcggggtgcccaagtcggcgtcccaggacgatctcaagaaggcctaccgcaaggctgctatcaagaaccaccccgacaagggcggtgaccccgagaagttcaaggagctcgcacaagcctatgaggttttgagtgatccagagaaacgtgagatttatgatcagtatggtgaagatgcccttaaggaaggaatgggcggtggaggatcccatgttgatccatttgacatcttctcatcattttttggaccctcttttggaggaggtggtggaagcagcaggggaagaaggcaaaggaggggagaagatgtagttcacccacttaaagtttctctggaagatctttacaatggcacctcaaagaagctctctctttcgcgcaatgtcatctgctccaagtgcaagggcaagggctcgaagtctggtgcctcaatgaggtgccctggttgccagggctcaggcatgaaagtcactattcgtcagctgggcccttccatgatacagcagatgcagcagccttgcaatgagtgcaaggggactggagagagcatcaatgagaaggaccgctgtccagggtgcaagggtgagaaggtcattcaagagaagaaggttcttgaggttcatgttgagaaggggatgcaacacaaccagaagatcaccttccctggtgaagctgatgaagcgcctgatactgtcactggagacattgtattcgtcctccagcagaaggatcactccaaattcaaaagaaagggcagcttctcatcaaatcagaccctggtgaagttgttaaacctgaccaattcaaggcgattaatgatgaggggatgccaatttaccagaggcctttcatgaaggggaagctgtacatccatttcacggtggagttccctgactcgttggcaccagagcagtgcaaggctctcgagacagtacttccaccaaggccttcatccaagctgacagacatggagatagatgaatgcgaggagacgactatgcatgatgtgaacaacatcgaggaagagatgcgcaggaagcaagctcacgctgcccaggaggcgtacgaggaggacgacgagatgccgggcggagcccagagagtgcagtgcgcgcaacagtaagcagactatcatcaaggcaattgggaggggtggtgcccttaaagcatgggagtgatctctggttttgctgtcgccgagctgggaaataggaagctgaatcgacctcgcaagcggggaatgtatccttttttgctgcaacataaaaaatgctacccaggcatagctgggtaccttttaacttctgtttgtgggatttgctagagtgatggtttcgatatatagggggacttgaatgtctggaatgctacggtataacgcacatttgggtgcaatgtctgttgcattgctgtctgaatgacatcgttggtacatttattttcatgtaacgcctgtagtttgctaatcaacaagcttggaatggcctgattgatgatgcctgataatttgtcctttacaggttataaaggtgctgctaagaaacaatagtcatttgtggagcgtaacataacggtgagcagtctagccttgttggatcgtgacatggaacttgaggccaagtttgcagtagttgccgacgctgcagacgtagtagcgcacgcctttatagtcgagcgggacgacggcgggcgggacgcggaagttgttgtaggggtcgtcggtggtgcagtcctcgtactccctcctggacacctgcaccacgtcgtagaacccaatctggaac

SEQ ID NO: 10456 - DNA, 2102 bp, Zea Mays
ctgcagcgttggcgtacaggccggactacattagccaacgcgtatcggcagtggcaaaccctcttcgcttctaactccgctgggccaccagctttgaccgccgcctcccttcccctccgctactgctcctccccaccccactcccccgcaggagcggcggcggcggcggcgaggtcgtaccccacatcggcgagcggcggcggcaccgccggaggcaaaggcaagatgttcgggcgcgcgccgaagaagagcgacaacaccaagtactacgagatcctcggggtgcccaagtcggcgtcccaggacgatctcaagaaggcctaccgcaaggctgctatcaagaaccaccccgacaagggcggtgaccccgagaagttcaaggagctcgcacaagcctatgaggttttgagtgatccagagaaacgtgagatttatgatcagtatggtgaagatgcccttaaggaaggaatgggcggtggaggatcccatgttgatccatttgacatcttctcatcattttttggaccctcttttggaggaggtggtggaagcagcaggggaagaaggcaaaggaggggagaagatgtagttcacccacttaaagtttctctggaagatctttacaatggcacctcaaagaagctctctctttcgcgcaatgtcatctgctccaagtgcaagggcaagggctcgaagtctggtgcctcaatgaggtgccctggttgccagggctcaggcatgaaagtcactattcgtcagctgggcccttccatgatacagcagatgcagcagccttgcaatgagtgcaaggggactggagagagcatcaatgagaaggaccgctgtccagggtgcaagggtgagaaggtcattcaagagaagaaggttcttgaggttcatgttgagaaggggatgcaacacaaccagaagatcaccttccctggtgaagctgatgaagcgcctgatactgtcactggagacattgtattcgtcctccagcagaaggatcactccaaattcaaaagaaagggtgaagatctcttctatgagcacaccttgtctctgaccgaagcactatgtgggttccaatttgttcttacacatctggacaacaggcagcttctcatcaaatcagaccctggtgaagttgttaaacctgaggcctttcatgaaggggaagctgtacatccatttcacggtggagttccctgactcgttggcaccagagcagtgcaaggctctcgagacagtacttccaccaaggccttcatccaagctgacagacatggagatagatgaatgcgaggagacgactatgcatgatgtgaacaacatcgaggaagagatgcgcaggaagcaagctcacgctgcccaggaggcgtacgaggaggacgacgagatgccgggcggagcccagagagtgcagtgcgcgcaacagtaagcagactatcatcaaggcaattgggaggggtggtgcccttaaagcatgggagtgatctctggttttgctgtcgccgagctgggaaataggaagctgaatcgacctcgcaagcggggaatgtatccttttttgctgcaacataaaaaatgctacccaggcatagctgggtaccttttaacttctgtttgtgggatttgctagagtgatggtttcgatatatagggggacttgaatgtctggaatgctacggtataacgcacatttgggtgcaatgtctgttgcattgctgtctgaatgacatcgttggtacatttattttcatgtaacgcctgtagtttgctaatcaacaagcttggaatggcctgattgatgatgcctgataatttgtcctttacaggttataaaggtgctgctaagaaacaatagtcatttgtggagcgtaacataacggtgagcagtctagccttgttggatcgtgacatggaacttgaggccaagtttgcagtagttgccgacgctgcagacgtagtagcgcacgcctttatagtcgagcgggacgacggcgggcgggacgcggaagttgttgtaggggtcgtcggtggtgcagtcctcgtactccctcctggacacctgcaccacgtcgtagaacccaatctggaac

SEQ ID NO: 10457 - DNA, 2102 bp, Zea Mays
ctgcagcgttggcgtacaggccggactacattagccaacgcgtatcggcagtggcaaaccctcttcgcttctaactccgctgggccaccagctttgaccgccgcctcccttcccctccgctactgctcctccccaccccactcccccgcaggagcggcggcggcggcggcgaggtcgtaccccacatcggcgagcggcggcggcaccgccggaggcaaaggcaagatgttcgggcgcgcgccgaagaagagcgacaacaccaagtactacgagatcctcggggtgcccaagtcggcgtcccaggacgatctcaagaaggcctaccgcaaggctgctatcaagaaccaccccgacaagggcggtgaccccgagaagttcaaggagctcgcacaagcctatgaggttttgagtgatccagagaaacgtgagatttatgatcagtatggtgaagatgcccttaaggaaggaatgggcggtggaggatcccatgttgatccatttgacatcttctcatcattttttggaccctcttttggaggaggtggtggaagcagcaggggaagaaggcaaaggaggggagaagatgtagttcacccacttaaagtttctctggaagatctttacaatggcacctcaaagaagctctctctttcgcgcaatgtcatctgctccaagtgcaagggcaagggctcgaagtctggtgcctcaatgaggtgccctggttgccagggctcaggcatgaaagtcactattcgtcagctgggcccttccatgatacagcagatgcagcagccttgcaatgagtgcaaggggactggagagagcatcaatgagaaggaccgctgtccagggtgcaagggtgagaaggtcattcaagagaagaaggttcttgaggttcatgttgagaaggggatgcaacacaaccagaagatcaccttccctggtgaagctgatgaagcgcctgatactgtcactggagacattgtattcgtcctccagcagaaggatcactccaaattcaaaagaaagggtgaagatctcttctatgagcacaccttgtctctgaccgaagcactatgtgggttccaatttgttcttacacatctggacaacaggcagcttctcatcaaatcagaccctggtgaagttgttaaaccagaggcctttcatgaaggggaagctgtacatccatttcacggtggagttccctgactcgttggcaccagagcagtgcaaggctctcgagacagtacttccaccaaggccttcatccaagctgacagacatggagatagatgaatgcgaggagacgactatgcatgatgtgaacaacatcgaggaagagatgcgcaggaagcaagctcacgctgcccaggaggcgtacgaggaggacgacgagatgccgggcggagcccagagagtgcagtgcgcgcaacagtaagcagactatcatcaaggcaattgggaggggtggtgcccttaaagcatgggagtgatctctggttttgctgtcgccgagctgggaaataggaagctgaatcgacctcgcaagcggggaatgtatccttttttgctgcaacataaaaaatgctacccaggcatagctgggtaccttttaacttctgtttgtgggatttgctagagtgatggtttcgatatatagggggacttgaatgtctggaatgctacggtataacgcacatttgggtgcaatgtctgttgcattgctgtctgaatgacatcgttggtacatttattttcatgtaacgcctgtagtttgctaatcaacaagcttggaatggcctgattgatgatgcctgataatttgtcctttacaggttataaaggtgctgctaagaaacaatagtcatttgtggagcgtaacataacggtgagcagtctagccttgttggatcgtgacatggaacttgaggccaagtttgcagtagttgccgacgctgcagacgtagtagcgcacgcctttatagtcgagcgggacgacggcgggcgggacgcggaagttgttgtaggggtcgtcggtggtgcagtcctcgtactccctcctggacacctgcaccacgtcgtagaacccaatctggaac

SEQ ID NO: 10458 - DNA, 2143 bp, Zea Mays
ctgcagcgttggcgtacaggccggactacattagccaacgcgtatcggcagtggcaaaccctcttcgcttctaactccgctgggccaccagctttgaccgccgcctcccttcccctccgctactgctcctccccaccccactcccccgcaggagcggcggcggcggcggcgaggtcgtaccccacatcggcgagcggcggcggcaccgccggaggcaaaggcaagatgttcgggcgcgcgccgaagaagagcgacaacaccaagtactacgagatcctcggggtgcccaagtcggcgtcccaggacgatctcaagaaggcctaccgcaaggctgctatcaagaaccaccccgacaagggcggtgaccccgagaagttcaaggagctcgcacaagcctatgaggttttgagtgatccagagaaacgtgagatttatgatcagtatggtgaagatgcccttaaggaaggaatgggcggtggaggatcccatgttgatccatttgacatcttctcatcattttttggaccctcttttggaggtggtggaagcagcaggggaagaaggcaaaggaggggagaagatgtagttcacccacttaaagtttctctggaagatctttacaatggcacctcaaagaagctctctctttcgcgcaatgtcatctgctccaagtgcaagggcaagggctcgaagtctggtgcctcaatgaggtgccctggttgccagggctcaggcatgaaagtcactattcgtcagctgggcccttccatgatacagcagatgcagcagccttgcaatgagtgcaaggggactggagagagcatcaatgagaaggaccgctgtccagggtgcaagggtgagaaggtcattcaagagaagaaggttcttgaggttcatgttgagaaggggatgcaacacaaccagaagatcaccttccctggtgaagctgatgaagcgcctgatactgtcactggagacattgtattcgtcctccagcagaaggatcactccaaattcaaaagaaagggtgaagatctcttctatgagcacaccttgtctctgaccgaagcactatgtgggttccaatttgttcttacacatctggacaacaggcagcttctcatcaaatcagaccctggtgaagttgttaaacctgaccaattcaaggcgattaatgatgaggggatgccaatttaccagaggcctttcatgaaggggaagctgtacatccatttcacggtggagttccctgactcgttggcaccagagcagtgcaaggctctcgagacagtacttccaccaaggccttcatccaagctgacagacatggagatagatgaatgcgaggagacgactatgcatgatgtgaacaacatcgaggaagagatgcgcaggaagcaagctcacgctgcccaggaggcgtacgaggaggacgacgagatgccgggcggagcccagagagtgcagtgcgcgcaacagtaagcagactatcatcaaggcaattgggaggggtggtgcccttaaagcatgggagtgatctctggttttgctgtcgccgagctgggaaataggaagctgaatcgacctcgcaagcggggaatgtatccttttttgctgcaacataaaaaatgctacccaggcatagctgggtaccttttaacttctgtttgtgggatttgctagagtgatggtttcgatatatagggggacttgaatgtctggaatgctacggtataacgcacatttgggtgcaatgtctgttgcattgctgtctgaatgacatcgttggtacatttattttcatgtaacgcctgtagtttgctaatcaacaagcttggaatggcctgattgatgatgcctgataatttgtcctttacaggttataaaggtgctgctaagaaacaatagtcatttgtggagcgtaacataacggtgagcagtctagccttgttggatcgtgacatggaacttgaggccaagtttgcagtagttgccgacgctgcagacgtagtagcgcacgcctttatagtcgagcgggacgacggcgggcgggacgcggaagttgttgtaggggtcgtcggtggtgcagtcctcgtactccctcctggacacctgcaccacgtcgtagaacccaatctggaac

SEQ ID NO: 10459 - DNA, 2016 bp, Zea Mays
ctgcagcgttggcgtacaggccggactacattagccaacgcgtatcggcagtggcaaaccctcttcgcttctaactccgctgggccaccagctttgaccgccgcctcccttcccctccgctactgctcctccccaccccactcccccgcaggagcggcggcggcggcggcgaggtcgtaccccacatcggcgagcggcggcggcaccgccggaggcaaaggcaagatgttcgggcgcgcgccgaagaagagcgacaacaccaagtactacgagatcctcggggtgcccaagtcggcgtcccaggacgatctcaagaaggcctaccgcaaggctgctatcaagaaccaccccgacaagggcggtgaccccgagaagttcaaggagctcgcacaagcctatgaggttttgagtgatccagagaaacgtgagatttatgatcagtatggtgaagatgcccttaaggaaggaatgggcggtggaggatcccatgttgatccatttgacatcttctcatcattttttggaccctcttttggaggaggtggtggaagcagcaggggaagaaggcaaaggaggggagaagatgtagttcacccacttaaagtttctctggaagatctttacaatggcacctcaaagaagctctctctttcgcgcaatgtcatctgctccaagtgcaagggcaagggctcgaagtctggtgcctcaatgaggtgccctggttgccagggctcaggcatgaaagtcactattcgtcagctgggcccttccatgatacagcagatgcagcagccttgcaatgagtgcaaggggactggagagagcatcaatgagaaggaccgctgtccagggtgcaagggtgagaaggtcattcaagagaagaaggttcttgaggttcatgttgagaaggggatgcaacacaaccagaagatcaccttccctggtgaagctgatgaagcgcctgatactgtcactggagacattgtattcgtcctccagcagaaggatcactccaaattcaaaagaaagggtggcagcttctcatcaaatcagaccctggtgaagttgttaaacctgaccaattcaaggcgattaatgatgaggggatgccaatttaccagaggcctttcatgaaggggaagctgtacatccatttcacggtggagttccctgactcgttggcaccagagcagtgcaaggctctcgagacagtacttccaccaaggccttcatccaagctgacagacatcgaggaagagatgcgcaggaagcaagctcacgctgcccaggaggcgtacgaggaggacgacgagatgccgggcggagcccagagagtgcagtgcgcgcaacagtaagcagactatcatcaaggcaattgggaggggtggtgcccttaaagcatgggagtgatctctggttttgctgtcgccgagctgggaaataggaagctgaatcgacctcgcaagcggggaatgtatccttttttgctgcaacataaaaaatgctacccaggcatagctgggtaccttttaacttctgtttgtgggatttgctagagtgatggtttcgatatatagggggacttgaatgtctggaatgctacggtataacgcacatttgggtgcaatgtctgttgcattgctgtctgaatgacatcgttggtacatttattttcatgtaacgcctgtagtttgctaatcaacaagcttggaatggcctgattgatgatgcctgataatttgtcctttacaggttataaaggtgctgctaagaaacaatagtcatttgtggagcgtaacataacggtgagcagtctagccttgttggatcgtgacatggaacttgaggccaagtttgcagtagttgccgacgctgcagacgtagtagcgcacgcctttatagtcgagcgggacgacggcgggcgggacgcggaagttgttgtaggggtcgtcggtggtgcagtcctcgtactccctcctggacacctgcaccacgtcgtagaacccaatctggaac

SEQ ID NO: 10460 - DNA, 1745 bp, Zea Mays
ctgcagcgttggcgtacaggccggactacattagccaacgcgtatcggcagtggcaaaccctcttcgcttctaactccgctgggccaccagctttgaccgccgcctcccttcccctccgctactgctcctccccaccccactcccccgcaggagcggcggcggcggcggcgaggtcgtaccccacatcggcgagcggcggcggcaccgccggaggcaaaggcaagatgttcgggcgcgcgccgaagaagagcgacaacaccaagtactacgagatcctcggggtgcccaagtcggcgtcccaggacgatctcaagaaggcctaccgcaaggctgctatcaagaaccaccccgacaagggcggtgaccccgagaagttcaaggagctcgcacaagcctatgaggttttgagtgatccagagaaacgtgagatttatgatcagtatggtgaagatgcccttaaggaaggaatgggcggtggaggatcccatgttgatccatttgacatcttctcatcattttttggaccctcttttggaggaggtggtggaagcagcaggggaagaaggcaaaggaggggagaagatgtagttcacccacttaaagtttctctggaagatctttacaatggcacctcaaagaagctctctctttcgcgcaatgtcatctgctccaagtgcaagggcaagggctcgaagtctggtgcctcaatgaggtgccctggttgccagggctcaggcatgaaagtcactattcgtcagctgggcccttccatgatacagcagatgcagcagccttgcaatgagtgcaaggggactggagagagcatcaatgagaaggaccgctgtccagggtgcaagggtgagaaggtcattcaagagaagaaggttcttgaggttcatgttgagaaggggatgcaacacaaccagaagatcaccttccctggtgaagctgatgaagcgcctgatactgtcactggagacattgtattcgtcctccagcagaaggatcactccaaattcaaaagaaagggtgaagatctcttctatgagcacaccttgtctctgaccgaagcactatgtgggttccaatttgttcttacacatctggacaacaggcagcttctcatcaaatcagaccctggtgaagttgttaaacctgaccaattcaaggcgattaatgatgaggggatgccaatttaccagaggcctttcatgaaggggaagctgtacatccatttcacggtggagttccctgactcgttggcaccagagcagtgcaaggctctcgagacagtacttccaccaaggccttcatccaagctgacagacatggagatagatgaatgcgaggagacgactatgcatgatgtgaacaacatcgaggaagagatgcgcaggaagcaagctcacgctgcccaggaggcgtacgaggaggacgacgagatgccgggcggagcccagagagtgcagtgcgcgcaacagttataaaggtgctgctaagaaacaatagtcatttgtggagcgtaacataacggtgagcagtctagccttgttggatcgtgacatggaacttgaggccaagtttgcagtagttgccgacgctgcagacgtagtagcgcacgcctttatagtcgagcgggacgacggcgggcgggacgcggaagttgttgtaggggtcgtcggtggtgcagtcctcgtactccctcctggacacctgcaccacgtcgtagaacccaatctggaac

SEQ ID NO: 10461 - DNA, 84 bp, Zea Mays
gaccagcatctacggataaaaagttaaaaacagatagaaacgggatgaaaaaacatctcttttgtttctgttttcatattcttt

SEQ ID NO: 10462 - DNA, 1573 bp, Zea Mays
  misc_feature (1)..(2): n is a, c, g, or t
nnagagatgaggaaaagaagatgggtacacttgtcaaagaggaatttggtcgtccaaatagggaaaatactatgggaatgcgccatggttcatatgataaactagatgatgatggccttgcaccacctggaacaagggtctcgggtgaagatgtcattattgggaagacatctcctattccacaggatgacgctcaagggcaagcttctaggtactcgaagcgtgatcatagtacttctctgcgtcacagtgaaagtggcatggtggatcaggttctgttgacaacaaatgcggatggtctaagatttgtcaaggttaggatgcgatctgttcgaataccacaaattggagacaagtttagcagtaggcatggacaaaaaggaactgttgggatgacttacactcaagaggatatgccatggacaatcgaaggcatcacacctgatattattgtgaatccacatgctattccatcccgtatgactattgggcagctgattgagtgtatcatgggtaaagttgcggctcagatggggaaggaaggagatgccactccattcacggatgtgactactcaagcacatggtggatgacaagatacattccagaggacgtggtcctgttcagatactcacccgacaaccagcagaggggcgatctcgtgatggtggtctccgctttggagaaatggaaagggattgtatgattgcacatggagcagctttcttcctgaaggaaaggctgtttgaccagagtgacgcatacagagtccatgtatgtgagaaatgtggtctcatcgcaattgctaatctaaagaaaaactcgtttgaatgtaggggctgcaagaacaagactgacattgtccaagtacacataccctatgcttgtaagcttctgttccaggagcttatggcaatggccattgctcccagaatgcttacccatgatatgaagacagggaaggatcagaagaagcgctgaacttgtatcacatgagatgtaactggaactttgctccattgctatatttctcgcgtgcacacggtagtacgctgttaaggaacattgtggtcacttgttttccgacttcgactctggtttgtcgtgaacgatggacaggccattatcgtatcttgatgggctatcagcccaatctgtgttagtgctgttagatgatctgtgctagcagatcgttgagttaattttgtacattataggaatgtgctgcaatgtattaatctacgaatacaaagactttggcgcgctaaggtgccttgtagaattaaatgccattacaatttcagttttatttagaactacatggggttatagtgccatgtctccaacccatgacaattctaatggcatggttccagttaatctttcttcttactagtaggaagcacgcaccctcgcgctcgtttgtaaatacaggtcgtgtgatataggtaggtgttttttatttatttatgggttcaaaagtatttaggagtggtacagaaatgtatacgcggttttatataggcattactgatggtgtatgtcatatggatgtctttttgtgctatgtagg

SEQ ID NO: 10463 - DNA, 4296 bp, Zea Mays
  misc_feature (2498)..(2597): n is a, c, g, or t
aaagcccattagcccatccgtcgttcctggctgtcctgaaaaccccaaaccaatcaggcaatcgtgcccagttccgcttcccctcgccatttcgccccgcctcccgcccctactccctacaccttcaccgctgtcgggggaggcggctcgccgtgacatcgacctcaccccacccccagcgtagcatcccgccactccatcgcactgtccatggaggatgacgagtacgaggaggggatggagatgggctacggcgggcatcaccagcacggcggcggccacgcggggtacggcgcggaggaggacgacgaggtggggtacggcggcgggggcggggaagagatggatgaggatgcggacggggacgctgagcagcaggaggatatcactcaggacgacgcctgggccgtcatatccgcctacttcgaggagaagggcctcgtgcgccagcagctcgattccttcgacgagttcatccagaacaccatgcaggagattgttgatgagtccgccgacatcgagatccgccccgagtcgcagcacaaccctggccgccaggccgaatttgccgagactctgcacaggatcagctttggtcaaatctatctcagcaagccaatgatgactgaagccgatggagagacagctactttatttccaaaatcagcaaggctcaggaacttgacatactctgcaccactgtatgttgatgtgtcatacagagtaatgaagaaaggacatgactgtgaggaagttacagagactgcagagtatccaaaagtgtttattgggaaggttccaatcatgttgcgctctagttactgcacactgtatcaacaatctgagaaggatctcactgaacttggggagtgtccttatgaccaaggtggttatttcattatcaatggaagcgaaaaggttcttattgcccaggagaagatgagcactaaccatgtctatgtttttaagaagaggcagcctaataaatttgcatatgtggctgaagtccgttccatggctgagaaccagaacagaccagccagtggcatgtttgtacggatgctttcacgagcaggagcaaaagggggatcatctggtcaatatatccgtgctactctaccttatattcgtgcggacattcccattatcattgtatttcgagcattaggatttgttgctgacaaggatatactggagcatatatgttatgacttttctgatacacaaatgatggaattgctacgcccatccctggaggaagcttttgtcattcaaaatcaacaggttgctctagactacattggaaaacgtggcgcaacagttggtgtcactcgagaaaagagaattaaatatgcaaaagaaatacttcaaaaggaaatgttgcctcatgttggtgttggggaattctgtgaaactaagaaggcatactattttgggtatattattcaccgcctactgatgtgtgctcttagtcgaagagctgaggatgaccgagatcattatggaaacaaaagactagatcttgctggtccactgcttggagggctgtttagaatgcttttcaggaagttaacaagggatgtgagatcttacgtgcaaaagtgtgtagataatggaaaggaagttaatttgcaatttgctatcaaagcaaaaactgttaccagtggcttgaagtactcacttgctactggaaactggggacaggctaaccaagctggaaccagagcaggggtttctcaggtgcttaatcgcctgacctatgcttctaccctttcacatctccggaggctgaactctcccattgggcgtgaaggaaaattggcaaaaccccgccagttgcataattcacattggggaatgatgtgtcctgctgaaacaccagaaggacaagcttgtggcttggtgaaaaatcttgccttgatggtatatatcacggttggttctgctgcaaatccaattttggagtttttggaggagtggggcacagaaaattttgaggagatatcaccagctgtcattccacaagctgctaaaatttttgtcaatggttgttgggttggaattcatagaaaccctgacctgttggttaagactcttaggcgtttaagaagacagattgatgtcaacactgaagttggtgtggttcgtgatatccgtcttaaagaacttcgactttacacggattatggacgctgcagtcgtccattatttattgttgagggccagaggctgctcatcaagaaggcgcacatccgagccttgcaacaaagggagactcctgatgaaggctggcatgaattggtctcaaaaggatatatagagtatatagatactgaagaagaggagactaccatgatctccatgaccataaatgaccttcaaaatgcaaggcacaacccagaagaggcttactctgaaacttacacacattgtgagattcatccttcattgatacttggtgtttgtgcgtcgattattccgtttcctgaccacaaccnnnnnnnnnnnnnnnnnnnnnnnnnnnnnnnnnnnnnnnnnnnnnnnnnnnnnnnnnnnnnnnnnnnnnnnnnnnnnnnnnnnnnnnnnnnnnnnnnnnnagagatgaggaaaagaagatgggtacacttgtcaaagaggaatttggtcgtccaaatagggaaaatactatgggaatgcgccatggttcatatgataaactagatgatgatggccttgcaccacctggaacaagggtctcgggtgaagatgtcattattgggaagacatctcctattccacaggatgacgctcaagggcaagcttctaggtactcgaagcgtgatcatagtacttctctgcgtcacagtgaaagtggcatggtggatcaggttctgttgacaacaaatgcggatggtctaagatttgtcaaggttaggatgcgatctgttcgaataccacaaattggagacaagtttagcagtaggcatggacaaaaaggaactgttgggatgacttacactcaagaggatatgccatggacaatcgaaggcatcacacctgatattattgtgaatccacatgctattccatcccgtatgactattgggcagctgattgagtgtatcatgggtaaagttgcggctcagatggggaaggaaggagatgccactccattcacggatgtgactgtggataacattagcaaagctcttcataaatgtaattatcaaatgcgtggatttgagaccatgtacaatggtcacaccggaagaaaactgacagcaatgattttcctgggacccacgtattaccaaagactcaagcacatggtggatgacaagatacattccagaggacgtggtcctgttcagatactcacccgacaaccagcagaggggcgatctcgtgatggtggtctccgctttggagaaatggaaagggattgtatgattgcacatggagcagctttcttcctgaaggaaaggctgtttgaccagagtgacgcatacagagtccatgtatgtgagaaatgtggtctcatcgcaattgctaatctaaagaaaaactcgtttgaatgtaggggctgcaagaacaagactgacattgtccaagtacacataccctatgcttgtaagcttctgttccaggagcttatggcaatggccattgctcccagaatgcttacccatgatatgaagacagggaaggatcagaagaagcgctgaacttgtatcacatgagatgtaactggaactttgctccattgctatatttctcgcgtgcacacggtagtacgctgttaaggaacattgtggtcacttgttttccgacttcgactctggtttgtcgtgaacgatggacaggccattatcgtatcttgatgggctatcagcccaatctgtgttagtgctgttagatgatctgtgctagcagatcgttgagttaattttgtacattataggaatgtgctgcaatgtattaatctacgaatacaaagactttggcgcgctaaggtgccttgtagaattaaatgccattacaatttcagttttatttagaactacatggggttatagtgccatgtctccaacccatgacaattctaatggcatggttccagttaatctttcttcttactagtaggaagcacgcaccctcgcgctcgtttgtaaatacaggtcgtgtgatataggtaggtgttttttatttatttatgggttcaaaagtatttaggagtggtacagaaatgtatacgcggttttatataggcattactgatggtgtatgtcatatggatgtctttttgtgctatgtagg

SEQ ID NO: 10464 - DNA, 453 bp, Zea Mays
  misc_feature (452)..(453): n is a, c, g, or t
aagaaatcctgccactacttattatccagtcacatatacaagcttgaattatgtgtatgactgattgagattgatgtcaacactgaagttggtgtggttcgtgatatccgtcttaaagaacttcgactttacacggattatggacgctgcagtcgtccattatttattgttgagggccagaggctgctcatcaagaaggcgcacatccgagccttgcaacaaagggagactcctgatgaaggctggcatgaattggtctcaaaaggatatatagagtatatagatactgaagaagaggagactaccatgatctccatgaccataaatgaccttcaaaatgcaaggcacaacccagaagaggcttactctgaaacttacacacattgtgagattcatccttcattgatacttggtgtttgtgcgtcgattattccgtttcctgaccacaaccnn

SEQ ID NO: 10465 - DNA, 2389 bp, Zea Mays
  misc_feature (2388)..(2389): n is a, c, g, or t
caaaccaatcaggcaatcgtgcccagttccgcttcccctcgccatttcgccccgcctcccgcccctactccctacaccttcaccgctgtcgggggaggcggctcgccgtgacatcgacctcaccccacccccagcgtagcatcccgccactccatcgcactgtccatggaggatgacgagtacgaggaggggatggagatgggctacggcgggcatcaccagcacggcggcggccacgcggggtacggcgcggaggaggacgacgaggtggggtacggcggcgggggcggggaagagatggatgaggatgcggacggggacgctgagcagcaggaggatatcactcaggacgacgcctgggccgtcatatccgcctacttcgaggagaagggcctcgtgcgccagcagctcgattccttcgacgagttcatccagaacaccatgcaggagattgttgatgagtccgccgacatcgagatccgccccgagtcgcagcacaaccctggccgccaggccgaatttgccgagactctgcacaggatcagctttggtcaaatctatctcagcaagccaatgatgactgaagccgatggagagacagctactttatttccaaaatcagcaaggctcaggaacttgacatactctgcaccactgtatgttgatgtgtcatacagagtaatgaagaaaggacatgactgtgaggaagttacagagactgcagagtatccaaaagtgtttattgggaaggttccaatcatgttgcgctctagttactgcacactgtatcaacaatctgagaaggatctcactgaacttggggagtgtccttatgaccaaggtggttatttcattatcaatggaagcgaaaaggttcttattgcccaggagaagatgagcactaaccatgtctatgtttttaagaagaggcagcctaataaatttgcatatgtggctgaagtccgttccatggctgagaaccagaacagaccagccagtggcatgtttgtacggatgctttcacgagcaggagcaaaagggggatcatctggtcaatatatccgtgctactctaccttatattcgtgcggacattcccattatcattgtatttcgagcattaggatttgttgctgacaaggatatactggagcatatatgttatgacttttctgatacacaaatgatggaattgctacgcccatccctggaggaagcttttgtcattcaaaatcaacagatatgcaaaagaaatacttcaaaaggaaatgttgcctcatgttggtgttggggaattctgtgaaactaagaaggcatactattttgggtatattattcaccgcctactgatgtgtgctcttagtcgaagagctgaggatgaccgagatcattatggaaacaaaagactagatcttgctggtccactgcttggagggctgtttagaatgcttttcaggaagttaacaagggatgtgagatcttacgtgcaaaagtgtgtagataatggaaaggaagttaatttgcaatttgctatcaaagcaaaaactgttaccagtggcttgaagtactcacttgctactggaaactggggacaggctaaccaagctggaaccagagcaggggtttctcaggtgcttaatcgcctgacctatgcttctaccctttcacatctccggaggctgaactctcccattgggcgtgaaggaaaattggcaaaaccccgccagttgcataattcacattggggaatgatgtgtcctgctgaaacaccagaaggacaagcttgtggcttggtgaaaaatcttgccttgatggtatatatcacggttggttctgctgcaaatccaattttggagtttttggaggagtggggcacagaaaattttgaggagatatcaccagctgtcattccacaagctgctaaaatttttgtcaatggttgttgggttggaattcatagaaaccctgacctgttggttaagactcttaggcgtttaagaagacagattgatgtcaacactgaagttggtgtggttcgtgatatccgtcttaaagaacttcgactttacacggattatggacgctgcagtcgtccattatttattgttgagggccagaggctgctcatcaagaaggcgcacatccgagccttgcaacaaagggagactcctgatgaaggctggcatgaattggtctcaaaaggatatatagagtatatagatactgaagaagaggagactaccatgatctccatgaccataaatgaccttcaaaatgcaaggcacaacccagaagaggcttactctgaaacttacacacattgtgagattcatccttcattgatacttggtgtttgtgcgtcgattattccgtttcctgaccacaaccnn

SEQ ID NO: 10466 - DNA, 2443 bp, Zea Mays
  misc_feature (2442)..(2443): n is a, c, g, or t
caaaccaatcaggcaatcgtgcccagttccgcttcccctcgccatttcgccccgcctcccgcccctactccctacaccttcaccgctgtcgggggaggcggctcgccgtgacatcgacctcaccccacccccagcgtagcatcccgccactccatcgcactgtccatggaggatgacgagtacgaggaggggatggagatgggctacggcgggcatcaccagcacggcggcggccacgcggggtacggcgcggaggaggacgacgaggtggggtacggcggcgggggcggggaagagatggatgaggatgcggacggggacgctgagcagcaggaggatatcactcaggacgacgcctgggccgtcatatccgcctacttcgaggagaagggcctcgtgcgccagcagctcgattccttcgacgagttcatccagaacaccatgcaggagattgttgatgagtccgccgacatcgagatccgccccgagtcgcagcacaaccctggccgccaggccgaatttgccgaggatcagctttggtcaaatctatctcagcaagccaatgatgactgaagccgatggagagacagctactttatttccaaaatcagcaaggctcaggaacttgacatactctgcaccactgtatgttgatgtgtcatacagagtaatgaagaaaggacatgactgtgaggaagttacagagactgcagagtatccaaaagtgtttattgggaaggttccaatcatgttgcgctctagttactgcacactgtatcaacaatctgagaaggatctcactgaacttggggagtgtccttatgaccaaggtggttatttcattatcaatggaagcgaaaaggttcttattgcccaggagaagatgagcactaaccatgtctatgtttttaagaagaggcagcctaataaatttgcatatgtggctgaagtccgttccatggctgagaaccagaacagaccagccagtggcatgtttgtacggatgctttcacgagcaggagcaaaagggggatcatctggtcaatatatccgtgctactctaccttatattcgtgcggacattcccattatcattgtatttcgagcattaggatttgttgctgacaaggatatactggagcatatatgttatgacttttctgatacacaaatgatggaattgctacgcccatccctggaggaagcttttgtcattcaaaatcaacaggttgctctagactacattggaaaacgtggcgcaacagttggtgtcactcgagaaaagagaattaaatatgcaaaagaaatacttcaaaaggaaatgttgcctcatgttggtgttggggaattctgtgaaactaagaaggcatactattttgggtatattattcaccgcctactgatgtgtgctcttagtcgaagagctgaggatgaccgagatcattatggaaacaaaagactagatcttgctggtccactgcttggagggctgtttagaatgcttttcaggaagttaacaagggatgtgagatcttacgtgcaaaagtgtgtagataatggaaaggaagttaatttgcaatttgctatcaaagcaaaaactgttaccagtggcttgaagtactcacttgctactggaaactggggacaggctaaccaagctggaaccagagcaggggtttctcaggtgcttaatcgcctgacctatgcttctaccctttcacatctccggaggctgaactctcccattgggcgtgaaggaaaattggcaaaaccccgccagttgcataattcacattggggaatgatgtgtcctgctgaaacaccagaaggacaagcttgtggcttggtgaaaaatcttgccttgatggtatatatcacggttggttctgctgcaaatccaattttggagtttttggaggagtggggcacagaaaattttgaggagatatcaccagctgtcattccacaagctgctaaaatttttgtcaatggttgttgggttggaattcatagaaaccctgacctgttggttaagactcttaggcgtttaagaagacagattgatgtcaacactgaagttggtgtggttcgtgatatccgtcttaaagaacttcgactttacacggattatggacgctgcagtcgtccattatttattgttgagggccagaggctgctcatcaagaaggcgcacatccgagccttgcaacaaagggagactcctgatgaaggctggcatgaattggtctcaaaaggatatatagagtatatagatactgaagaagaggagactaccatgatctccatgaccataaatgaccttcaaaatgcaaggcacaacccagaagaggcttactctgaaacttacacacattgtgagattcatccttcattgatacttggtgtttgtgcgtcgattattccgtttcctgaccacaaccnn

SEQ ID NO: 10467 - DNA, 2476 bp, Zea Mays
  misc_feature (2475)..(2476): n is a, c, g, or t
aaagcccattagcccatccgtcgttcctggctgtcctgaaaaccccaaaccaatcaggcaatcgtgcccagttccgcttcccctcgccatttcgccccgcctcccgcccctactccctacaccttcaccgctgtcgggggaggcggctcgccgtgacatcgacctcaccccacccccagcgtagcatcccgccactccatcgcactgtccatggaggatgacgagtacgaggaggggatggagatgggctacggcgggcatcaccagcacggcggcggccacgcggggtacggcgcggaggaggacgacgaggtggggtacggcggcgggggcggggaagagatggatgaggatgcggacggggacgctgagcagcaggaggatatcactcaggacgacgcctgggccgtcatatccgcctacttcgaggagaagggcctcgtgcgccagcagctcgattccttcgacgagttcatccagaacaccatgcaggagattgttgatgagtccgccgacatcgagatccgccccgagtcgcagcacaaccctggccgccaggccgaatttgccgagactctgcacaggatcagctttggtcaaatctatctcagcaagccaatgatgactgaagccgatggagagacagctactttatttccaaaatcagcaaggctcaggaacttgacatactctgcaccactgtatgttgatgtgtcatacagagtaatgaagaaaggacatgactgtgaggaagttacagagactgcagagtatccaaaagtgtttattgggaagttactgcacactgtatcaacaatctgagaaggatctcactgaacttggggagtgtccttatgaccaaggtggttatttcattatcaatggaagcgaaaaggttcttattgcccaggagaagatgagcactaaccatgtctatgtttttaagaagaggcagcctaataaatttgcatatgtggctgaagtccgttccatggctgagaaccagaacagaccagccagtggcatgtttgtacggatgctttcacgagcaggagcaaaagggggatcatctggtcaatatatccgtgctactctaccttatattcgtgcggacattcccattatcattgtatttcgagcattaggatttgttgctgacaaggatatactggagcatatatgttatgacttttctgatacacaaatgatggaattgctacgcccatccctggaggaagcttttgtcattcaaaatcaacaggttgctctagactacattggaaaacgtggcgcaacagttggtgtcactcgagaaaagagaattaaatatgcaaaagaaatacttcaaaaggaaatgttgcctcatgttggtgttggggaattctgtgaaactaagaaggcatactattttgggtatattattcaccgcctactgatgtgtgctcttagtcgaagagctgaggatgaccgagatcattatggaaacaaaagactagatcttgctggtccactgcttggagggctgtttagaatgcttttcaggaagttaacaagggatgtgagatcttacgtgcaaaagtgtgtagataatggaaaggaagttaatttgcaatttgctatcaaagcaaaaactgttaccagtggcttgaagtactcacttgctactggaaactggggacaggctaaccaagctggaaccagagcaggggtttctcaggtgcttaatcgcctgacctatgcttctaccctttcacatctccggaggctgaactctcccattgggcgtgaaggaaaattggcaaaaccccgccagttgcataattcacattggggaatgatgtgtcctgctgaaacaccagaaggacaagcttgtggcttggtgaaaaatcttgccttgatggtatatatcacggttggttctgctgcaaatccaattttggagtttttggaggagtggggcacagaaaattttgaggagatatcaccagctgtcattccacaagctgctaaaatttttgtcaatggttgttgggttggaattcatagaaaccctgacctgttggttaagactcttaggcgtttaagaagacagattgatgtcaacactgaagttggtgtggttcgtgatatccgtcttaaagaacttcgactttacacggattatggacgctgcagtcgtccattatttattgttgagggccagaggctgctcatcaagaaggcgcacatccgagccttgcaacaaagggagactcctgatgaaggctggcatgaattggtctcaaaaggatatatagagtatatagatactgaagaagaggagactaccatgatctccatgaccataaatgaccttcaaaatgcaaggcacaacccagaagaggcttactctgaaacttacacacattgtgagattcatccttcattgatacttggtgtttgtgcgtcgattattccgtttcctgaccacaaccnn

SEQ ID NO: 10468 - DNA, 2759 bp, Zea Mays
cttttttcatgtattttcgttattggccaccgtgagtaggccttctaggttcagtactcatccactctggactcttcctttcttcttaatataatgatgtgcagctcttcttcgtaacctagaagattactatagtgagaagcatacatatcttaccattccatagtctgttatgaccatcgacacataatcaggtggggtggcatcatacctattagatgtgcattattatttacaccgagaagaatagtaccagaaggaatgactggtatatagaattcagaaagatacgttaaatttagcaattggagatttgcattgtctgtccagttcttaagatggtcctctgcctttccaggaattttcaaaatgacatctggatcgcctgactcattagcacatatagaatcaagttgcactctctcatgaaacttgtatgcctcacaacaaaccagaactagaactccaaatgcatgtgccaccatggcaaccgatgcagtcccaagttcccaactcgagaataaactgtcccatttgataatattgaagaggcacccaacaagactcgagttacttcatgcatgatgtatgagatggcatttatgtgtgtgtatgtgcagctgatgccctttcccactaagctctgcagcaatccctgtccctcaagctttgggcgagaatctactactacaactcgaaagttcctcccaagttcatgagcataatccaaaatcatttcaacaattgatgatgatccatatgtcagtaagacatcattgtctctgacctttgtgatggcatggctgacaataactttatctgcaagaactatcttctcatttataaaacgatcaatatcagactgaagactagttttggcttcagactctgacaatgcatgtgccagctttgcaatcctgctctttagaaacctaatagcattgcccatgctgattgaaagaggcctacactcaataagaaatgacacataactactgatttttgcagaaagatctctgccgagagttttatttggaggcgtagtgtaatcttttattgcctctctgaatgcaagaagcattgctatgcaacgaccattaccaccagatacttcaccagataaatattggagcccaaccttgtatacagaaggatgcattggttctagttgaaagaattttgattcgaggtcaggaagctgagtgccatgcgattactgaggaagatgcctgaacagttcaactctatttcgagcttctgattggttgactaccgcacgtttttttgctttctccaccttatgcacatcatcaaactgcatgcggggatgaggagcatctaactttctttctctttctggaggacgttcagtagccttcttctcagaaacaactgtacttgcagcttggggcacatctttcttctgaacagtttttactggcttggcttgcttggagattgcagcaccagcagattttcctgatttatctgttattgcaagctaatgtgaaaaatatgattcgaagctctgcttgcattacactcatgcaagatcatcataacaaagttgaacatattcataggaacattttctaccaccaaacctacgccaagaaacaaaaattaaacagtcggacatgctgagactttctgtgattcaagcattgctccacaaaaccctgtcatgaatgataattacctgcctccttcgttgccgctttagcagcacgttgagcctcctgaattgcacgtctctctgcctttgaggttttctgcttttgtggaatggaggctggagcaccatcattctgtatttcagccaaaccaacgcttgttttcttctgtaacaaacttatgtgcacatatataaataaaattgtcaaataattttctcaacaaatttaatagatattaaccattaagccaaaattaacatacaaaaaaacagcaaaactacagctttctggttttcattcatacatccctaaacaatctttatgctataaattttcagctagatagagtcctattaggtatccaactcagatgaaaaattgagtcagcaaattttaaaaaaacaaacatttttcttcacatgctccctcctcaccacacttgagaggcacaagcacaaccgacagcaagttgttgcttcccgcaagcccaagcacctggcagtacgaagattcatggaaaaaagcggtagagaatacaagagaagtaggtatccctcatcgtgtcatcatgaatgtttcttttcatttggctcaatatgtcatagagggcagatccagtgtcgaaggctccctcccacatgagtggtatcaagtagagggtttttaagtctaacatcctttaaggtaacagtggacatggtctaatatactctccatgcacaaacagctccaggtaaaccaacaaaacagaggttatattcaaatttggcagcaacaatgtgagactgtacgggcctatctaaaaaaaacagtccacccccaccatgggttgggttattgggtaagtctcccgaagcatggctgttataccaattatgtgtgtgtaagtcctaaatctcccttcttaattttgttttacaaaagcatttcaggtactaacatttcactaataagactacatctagatattacagattatttatgttcgagtatgttcacactaacagcagtctgttaagagtctaggctgttcccatcatttggtagagtcacaaaattacctagctccacagcagaaggcac

SEQ ID NO: 10469 - DNA, 1687 bp, Zea Mays
ggcccacctgcagtcacaaaggctctgggcagtgacctctgcggccgcctcctctcctctcccagtccgcccctcccgcctcgttctctccgccatcgtcgccgccgcctccattcctccaccagtccaccatcgccacctacgcccaaccaaacccaactccatctcttccgactataaacgcaacccaccaccgctgccgcgaacctctgcgctccgaataccccagacccccgatcctcccaatggccaccgcattttcgctgcgcgctgcggccccggccaccgctccccgcgccgtctcccgatccacctccgcggcgagggtcgtgcccatggcatcggcactggcgggacgcggaaggctggtggcgcgtgcagcagttacaccatgaggtcttgctgtttgaagctcttcgtgaggccttgatggaagagatggaattagatccaacagtgtgtgtgtttggtgaagatgttggccattacggtggttcttacaaggtgacaaaaggtttggctgatacgtttggtgaccttcgagttctggacacccctattgcggagaactcgtttactggcatgggagttggagcgggaatgaaagggctgaggcccgtcgttgaaggcatgaacatgggattcctgctccttgcttacaaccagatctcaaataactgtggcatgcttcattacacttccggcggccagttcaaaatcccacttgtgatccgtggccccggtggtgtgggtcgtcagcttggagcagagcactcgcagcgcctggaatcgtatttccagtccatcccaggcctgcagatggtcgcctgctcgactccttacaacgctaagggcctgatgaaagctgccatcaggagcgagaaccctgtggtgctgtttgagcacgtccttctgtacaacctgaaggagaaaatcccggacgaggagtacgtgctctgcttggaggaggccgagatggtgcggcctggggagcacgtgactatactcacatactcgcgcatgaggtaccacgtgatgcaggcagcgaagacgctggtgaacaaagggtacgatcccgaggtcatcgacatcaggtcgttgaagccgtttgatctgcacactattggcaactccatcaagaagacccaccgcgtgctgatcgtggaggagtgcatgcgcacgggtgggatcggcgccagccttaggtcggccatcgtcgacaatttctgggactaccttgacgcccccatcatgtgcctgtcatctcaggatgtgcctacgccatatgctgcgactctggaggatgcaaccgttgtgcagcctgcccagatcgtggctgcggtggaacaactatgtgcatagattgtggcctgggacgtttgggagactgttgttgccatgaaaaagccttccgtttgttagttttgtgctgtaacaagcattctttggagacttaaggtgtaggcttatagtcgttttgttcttgttttaagaagtataatccagcttcgtagctgcacggactcgatcttcttgttcctaaatctgcgctatgcaatgccgaatttgatggttcgaacatttcattgttgacagaaataatcattgtactccgatgccatgaacctgtagcctccagctgcactggtcagtgaaacacccatgaacaaagtatttgcactaagtg

SEQ ID NO: 10470 - DNA, 1867 bp, Zea Mays
cacacacgctcggcgcacgttctgccgcccgcatcccgcatccgcgtcgcaacccgcaaccgcctgcagccgcggcttccatcttccgccctccttccatcctcctgcaatcgccagcgcgccctccgcgctcctgccatccgaggaaagccttccatccatggcgccgttgctgcaattctccccgcgatccgctctccctccattgccccccgcgatccgcgctccctccattgcccccgcgctcctgccatccatggcgcctccccacggatctctgctgtcaattttacggagaaatcacgcctccctagggtgcccttccatccatggcgtcgttgctgcaagtgccccgcaatcaactccattgccactgtgatccccttccaccgatggcactcaccttccatcgacaaaactgctcttcctccattccaccgatggcactcaccctaaaccctcacctcttagatcccgtgctcatcaccatcctgcccctcgctcgccgccccacctcaccaagagccttagccgtccctagagaagacacggaggtgcagtgcagtgcagtgctttactcaagtgcgccacggattttcggtaccggccagattgggacgaattcgacattcatcggctccaccaaagtttcgtcttctacctttcaccgctgccaacttcgcggtgtattaaacggtaacaaggcgatggcccaattgtattaattcccgctcccacaagagaattggctgttcaaatacaggaagaatctacaaaatttggatcatattcaagaactagaagcacatgtgtctatggtggtgcacctaagggtccacaaatacggggccttagaagaggagttgaaattgtcattgcaactcctggccggttgattgatatgctggaagctggtcacacaaacctacgtagagtgacgtaccttgtgttggatgaggcggaccagatgctagatatggggtttgagccccaaattcaaaatagtatcacaatgataatgtggtggtggtgttttaatcgggagagcactagctcaagaagccacaacaacccaagatcattcctggcgctctccatacatctactactgctaggaatctcaagaagcttgcggcccagagccaaacggatgatgaagatgtttggtgggagtaggctgaggagcattttccatggtatttcagatggattcaaaatagaggggtgacatgcttttggaccaatggatatgatgttgtgtctgctttggattcaaacaactacacaatcatctattttgattcaaacagaggggtgacatctgtaaatccattatattaaagccactatgattgattgtttgatcagagtattttacaagagctgcttcctattttacaagagttgcttcctattttacaagagctgcttcctataatatgcacatggagacatttgtaatgatcataataaaaaggctcaaggatgtcaaccttttcatgtcacaaggaggtctcatcattctagcacaggtaccatgccaacaaaatgcttagcttttacgcaccagcgtgtgacgccatgtgggagcaaagttgggaaaatgggtattggcggcggtggtccagaggtttgtgtctctgtctcacacttaaccctgtgtgctcctaaatggattttttgtgtttggcgtataacctcccattgtgattattcctaatttcagtagttatcagtagccccatgattatattattgaatttgttgtgttcaagtgtactccaaatagtatatcatgatagaaatttaaagcttgtgcagtatgtttcagtcccatgattataatttataatacccaacaaaaaat

SEQ ID NO: 10471 - DNA, 2016 bp, Zea Mays
cggcgcacgttctgccgcccgcatcccgcatccgcgtcgcaacccgcaaccgcctgcagccgcggcttccatcttccgccctccttccatcctcctgcaatcgccagcgcgccctccgcgctcctgccatccgaggaaagccttccatccatggcgccgttgctgcaattctccccgcgatccgctctccctccattgccccccgcgatccgcgctccctccattgcccccgcgctcctgccatccatggcgcctccccacggatctctgctgtcaattttacggagaaatcacgcctccctagggtgcccttccatccatggcgtcgttgctgcaagtgccccgcaatcaactccattgccactgtgatccccttccaccgatggcactcaccttccatcgacaaaactgctcttcctccattccaccgatggcactcaccctaaaccctcacctcttagatcccgtgctcatcaccatcctgcccctcgctcgccgccccacctcaccaagagccttagccgtccctagagaagacacggaggtgcagtgcagtgcagtgctttactcaagtgcgccacggattttcggtaccggccagattgggacgaattcgacattcatcggctccaccaaaggaagaatctacaaaatttggatcatattcaagaactagaagcacatgtgtctatggtggtgcacctaagggtccacaaatacggggccttagaagaggagttgaaattgtcattgcaactcctggccggttgattgatatgctggaagctggtcacacaaacctacgtagagtgacgtaccttgtgttggatgaggcggaccagatgctagatatggggtttgagccccaaattcaaaatagtatcacaagtacattttcgtttagaaatgcatagttatggttttactgatgtatcaaatttccataaaaatggccttgtagttcatgaactttattaattttgtttagtgataatgtggtggtggtgttttaatcgggagagcactagctcaagaagccacaacaacccaagatcattcctggcgctctccatacatctactactgctaggaatctcaagaagcttgcggcccagagccaaacggatgatgaagatgtttggtgggagtaggctgaggagcattttccatggtatttcagatggattcaaaatagaggggtgacatgcttttggaccaatggatatgatgttgtgtctgctttggattcaaacaactacacaatcatctattttgattcaaacagaggggtgacatctgtaaatccattatattaaagccactatgattgattgtttgatcagagtattttacaagagctgcttcctattttacaagagttgcttcctattttacaagagctgcttcctataatatgcacatggagacatttgtaatgatcataataaaaaggctcaaggatgtcaaccttttcatgtcacaaggaggtctcatcattctagcacaggtaccatgccaacaaaatgcttagcttttacgcaccaggtgtgttctctttaggatttgaaactgtcttgtgatttcttttcaatgaacagaattttgatttttcagacttcttttctggatgctaagttgtacatagagtagtttttagtgctcgcatgtgtggttaatcatacaacataggttcttcaagctcatattctggatgcatgctattgttactttgttagtgtgttcacagattttgtgttcagttgtgcaaataaccacctcatagccttatgccatgccacacctgttttagagaacctgaagatagcttgcctcacttcatagacttgtagatgttcataagcgtaatgtttcacccctaagtcgttgtttgtctaaactattgcttagatgttttatgcatgtctattggatatctcagcttttatgactaggataatggaatcacaatcatgtgtgctcgctagaaacattccgtagctgtttaactagatgctg

SEQ ID NO: 10472 - DNA, 2712 bp, Zea Mays
cggcgcacgttctgccgcccgcatcccgcatccgcgtcgcaacccgcaaccgcctgcagccgcggcttccatcttccgccctccttccatcctcctgcaatcgccagcgcgccctccgcgctcctgccatccgaggaaagccttccatccatggcgccgttgctgcaattctccccgcgatccgctctccctccattgccccccgcgatccgcgctccctccattgcccccgcgctcctgccatccatggcgcctccccacggatctctgctgtcaattttacggagaaatcacgcctccctagggtgcccttccatccatggcgtcgttgctgcaagtgccccgcaatcaactccattgccactgtgatccccttccaccgatggcactcaccttccatcgacaaaactgctcttcctccattccaccgatggcactcaccctaaaccctcacctcttagatcccgtgctcatcaccatcctgcccctcgctcgccgccccacctcaccaagagccttagccgtccctagagaagacacggaggtgcagtgcagtgcagtgctttactcaagtgcgccacggattttcggtaccggccagattgggacgaattcgacattcatcggctccaccaaagtttcgtcttctacctttcaccgctgccaacttcgcggtgtattaaacggtgtgagttgattttcacctcttttccacagactcagtaagctcttatctgatctaatggatgggagtcgtatcttgatagtcttccaaacaaaaaaggattgcgataagatcacccgacaacttagaatggatgggtggctagcattatctatacatggtgataaagctcaagttgaacgggactatattcttgtagagtttagagcggcaagagctccataatggctgccacagatgtggcagcacgtggtcttggtatgaacaaggcgatggcccaattgtattaattcccgctcccacaagagaattggctgttcaaatacaggaagaatctacaaaatttggatcatattcaagaactagaagcacatgtgtctatggtggtgcacctaagggtccacaaatacggggccttagaagaggagttgaaattgtcattgcaactcctggccggttgattgatatgctggaagctggtcacacaaacctacgtagagtgacgtaccttgtgttggatgaggcggaccagatgctagatatggggtttgagccccaaattcaaaatagtatcacaagtacattttcgtttagaaatgcatagttatggttttactgatgtatcaaatttccataaaaatggccttgtagttcatgaactttattaattttgtttagtgataatgtggtggtggtgttttaatcgggagagcactagctcaagaagccacaacaacccaagatcattcctggcgctctccatacatctactactgctaggaatctcaagaagcttgcggcccagagccaaacggatgatgaagatgtttggtgggagtaggctgaggagcattttccatggtatttcagatggattcaaaatagaggggtgacatgcttttggaccaatggatatgatgttgtgtctgctttggattcaaacaactacacaatcatctattttgattcaaacagaggggtgacatctgtaaatccattatattaaagccactatgattgattgtttgatcagagtattttacaagagctgcttcctattttacaagagttgcttcctattttacaagagctgcttcctataatatgcacatggagacatttgtaatgatcataataaaaaggctcaaggatgtcaaccttttcatgtcacaaggaggtctcatcattctagcacagacggtggactgttcctgcggcgtcacgttcgacgacggcgagatggtcagctgcgacgagtgcagcgtgtgggtgcacacacggtgcgcacgctatgtccgtggcgtccacacatccttctcctgccacaaatgtcggaggtccaagcgcgtgcattccttcgctgacgaggccgaggttgctgagctccttgccgagctgccaacccaccgcccgcctccgctgtacttcaacgccacttgaaagggaattaggcttacacctagttcctaaataattttggtggttgaattgcccaacacaaataattggactaactagtttgccctagtgtataagttatacaggtataaaaggttcacacttagccaataaaaatatcaaatattggattcaacaaaggagcaaagggacaaccgaaggcacctctggtctggagcaccggactgtccggtgcaccaccggacagtgtccggtgcaccagagaactccaactcaaacttgccacctttgggaatttccagaggcactacgctataattcaccggactgtccggtgtacaccggacagtgttcggtgctccaaggaagagcggcctccggaactcgccagcctcgggaaaacgcagcggctgctccgctataattcaccggacatgtccggtgcacaccgaactgtccggtgaaccagcagagcaacgactacttcgcgccaacggtcacctgcaggcgcatttaatgcgcgccagaagcgcgcagaagtcaggcacgcccatactggcgcaccagacgttaaacagtacatgtccggtgtgcaccggacatccagg

SEQ ID NO: 10473 - DNA, 2752 bp, Zea Mays
cggcgcacgttctgccgcccgcatcccgcatccgcgtcgcaacccgcaaccgcctgcagccgcggcttccatcttccgccctccttccatcctcctgcaatcgccagcgcgccctccgcgctcctgccatccgaggaaagccttccatccatggcgccgttgctgcaattctccccgcgatccgctctccctccattgccccccgcgatccgcgctccctccattgcccccgcgctcctgccatccatggcgcctccccacggatctctgctgtcaattttacggagaaatcacgcctccctagggtgcccttccatccatggcgtcgttgctgcaagtgccccgcaatcaactccattgccactgtgatccccttccaccgatggcactcaccttccatcgacaaaactgctcttcctccattccaccgatggcactcaccctaaaccctcacctcttagatcccgtgctcatcaccatcctgcccctcgctcgccgccccacctcaccaagagccttagccgtccctagagaagacacggaggtgcagtgcagtgcagtgctttactcaagtgcgccacggattttcggtaccggccagattgggacgaattcgacattcatcggctccaccaaagtttcgtcttctacctttcaccgctgccaacttcgcggtgtattaaacggtgtgagttgattttcacctcttttccacagactcagtaagctcttatctgatctaatggatgggagtcgtatcttgatagtcttccaaacaaaaaaggattgcgataagatcacccgacaacttagaatggatgggtggctagcattatctatacatggtgataaagctcaagttgaacgggactatattcttgtagagtttagagcggcaagagctccataatggctgccacagatgtggcagcacgtggtcttggtatgatgatttatttgaatattaggattaggtagtagttccaagtgctcaaggatgataagtcggagggttgttgaactgcgattggttgagtgagctgaacttgtggattggtggtgtataccaaggtgccatcatgtcaaagaacaaggcgatggcccaattgtattaattcccgctcccacaagagaattggctgttcaaatacaggaagaatctacaaaatttggatcatattcaagaactagaagcacatgtgtctatggtggtgcacctaagggtccacaaatacggggccttagaagaggagttgaaattgtcattgcaactcctggccggttgattgatatgctggaagctggtcacacaaacctacgtagagtgacgtaccttgtgttggatgaggcggaccagatgctagatatggggtttgagccccaaattcaaaatagtatcacaatgataatgtggtggtggtgttttaatcgggagagcactagctcaagaagccacaacaacccaagatcattcctggcgctctccatacatctactactgctaggaatctcaagaagcttgcggcccagagccaaacggatgatgaagatgtttggtgggagtaggctgaggagcattttccatggtatttcagatggattcaaaatagaggggtgacatgcttttggaccaatggatatgatgttgtgtctgctttggattcaaacaactacacaatcatctattttgattcaaacagaggggtgacatctgtaaatccattatattaaagccactatgattgattgtttgatcagagtattttacaagagctgcttcctattttacaagagttgcttcctattttacaagagctgcttcctataatatgcacatggagacatttgtaatgatcataataaaaaggctcaaggatgtcaaccttttcatgtcacaaggaggtctcatcattctagcacagacggtggactgttcctgcggcgtcacgttcgacgacggcgagatggtcagctgcgacgagtgcagcgtgtgggtgcacacacggtgcgcacgctatgtccgtggcgtccacacatccttctcctgccacaaatgtcggaggtccaagcgcgtgcattccttcgctgacgaggccgaggttgctgagctccttgccgagctgccaacccaccgcccgcctccgctgtacttcaacgccacttgaaagggaattaggcttacacctagttcctaaataattttggtggttgaattgcccaacacaaataattggactaactagtttgccctagtgtataagttatacaggtataaaaggttcacacttagccaataaaaatatcaaatattggattcaacaaaggagcaaagggacaaccgaaggcacctctggtctggagcaccggactgtccggtgcaccaccggacagtgtccggtgcaccagagaactccaactcaaacttgccacctttgggaatttccagaggcactacgctataattcaccggactgtccggtgtacaccggacagtgttcggtgctccaaggaagagcggcctccggaactcgccagcctcgggaaaacgcagcggctgctccgctataattcaccggacatgtccggtgcacaccgaactgtccggtgaaccagcagagcaacgactacttcgcgccaacggtcacctgcaggcgcatttaatgcgcgccagaagcgcgcagaagtcaggcacgcccatactggcgcaccagacgttaaacagtacatgtccggtgtgcaccggacatccagg

SEQ ID NO: 10474 - DNA, 2673 bp, Zea Mays
cggcgcacgttctgccgcccgcatcccgcatccgcgtcgcaacccgcaaccgcctgcagccgcggcttccatcttccgccctccttccatcctcctgcaatcgccagcgcgccctccgcgctcctgccatccgaggaaagccttccatccatggcgccgttgctgcaattctccccgcgatccgctctccctccattgccccccgcgatccgcgctccctccattgcccccgcgctcctgccatccatggcgcctccccacggatctctgctgtcaattttacggagaaatcacgcctccctagggtgcccttccatccatggcgtcgttgctgcaagtgccccgcaatcaactccattgccactgtgatccccttccaccgatggcactcaccttccatcgacaaaactgctcttcctccattccaccgatggcactcaccctaaaccctcacctcttagatcccgtgctcatcaccatcctgcccctcgctcgccgccccacctcaccaagagccttagccgtccctagagaagacacggaggtgcagtgcagtgcagtgctttactcaagtgcgccacggattttcggtaccggccagattgggacgaattcgacattcatcggctccaccaaagactcagtaagctcttatctgatctaatggatgggagtcgtatcttgatagtcttccaaacaaaaaaggattgcgataagatcacccgacaacttagaatggatgggtggctagcattatctatacatggtgataaagctcaagttgaacgggactatattcttgtagagtttagagcggcaagagctccataatggctgccacagatgtggcagcacgtggtcttggtatgatgatttatttgaatattaggattaggtagtagttccaagtgctcaaggatgataagtcggagggttgttgaactgcgattggttgagtgagctgaacttgtggattggtggtgtataccaaggtgccatcatgtcaaagaacaaggcgatggcccaattgtattaattcccgctcccacaagagaattggctgttcaaatacaggaagaatctacaaaatttggatcatattcaagaactagaagcacatgtgtctatggtggtgcacctaagggtccacaaatacggggccttagaagaggagttgaaattgtcattgcaactcctggccggttgattgatatgctggaagctggtcacacaaacctacgtagagtgacgtaccttgtgttggatgaggcggaccagatgctagatatggggtttgagccccaaattcaaaatagtatcacaatgataatgtggtggtggtgttttaatcgggagagcactagctcaagaagccacaacaacccaagatcattcctggcgctctccatacatctactactgctaggaatctcaagaagcttgcggcccagagccaaacggatgatgaagatgtttggtgggagtaggctgaggagcattttccatggtatttcagatggattcaaaatagaggggtgacatgcttttggaccaatggatatgatgttgtgtctgctttggattcaaacaactacacaatcatctattttgattcaaacagaggggtgacatctgtaaatccattatattaaagccactatgattgattgtttgatcagagtattttacaagagctgcttcctattttacaagagttgcttcctattttacaagagctgcttcctataatatgcacatggagacatttgtaatgatcataataaaaaggctcaaggatgtcaaccttttcatgtcacaaggaggtctcatcattctagcacagacggtggactgttcctgcggcgtcacgttcgacgacggcgagatggtcagctgcgacgagtgcagcgtgtgggtgcacacacggtgcgcacgctatgtccgtggcgtccacacatccttctcctgccacaaatgtcggaggtccaagcgcgtgcattccttcgctgacgaggccgaggttgctgagctccttgccgagctgccaacccaccgcccgcctccgctgtacttcaacgccacttgaaagggaattaggcttacacctagttcctaaataattttggtggttgaattgcccaacacaaataattggactaactagtttgccctagtgtataagttatacaggtataaaaggttcacacttagccaataaaaatatcaaatattggattcaacaaaggagcaaagggacaaccgaaggcacctctggtctggagcaccggactgtccggtgcaccaccggacagtgtccggtgcaccagagaactccaactcaaacttgccacctttgggaatttccagaggcactacgctataattcaccggactgtccggtgtacaccggacagtgttcggtgctccaaggaagagcggcctccggaactcgccagcctcgggaaaacgcagcggctgctccgctataattcaccggacatgtccggtgcacaccgaactgtccggtgaaccagcagagcaacgactacttcgcgccaacggtcacctgcaggcgcatttaatgcgcgccagaagcgcgcagaagtcaggcacgcccatactggcgcaccagacgttaaacagtacatgtccggtgtgcaccggacatccagg

SEQ ID NO: 10475 - DNA, 1287 bp, Zea Mays
cggcgcacgttctgccgcccgcatcccgcatccgcgtcgcaacccgcaaccgcctgcagccgcggcttccatcttccgccctccttccatcctcctgcaatcgccagcgcgccctccgcgctcctgccatccgaggaaagccttccatccatggcgccgttgctgcaattctccccgcgatccgctctccctccattgccccccgcgatccgcgctccctccattgcccccgcgctcctgccatccatggcgcctccccacggatctctgctgtcaattttacggagaaatcacgcctccctagggtgcccttccatccatggcgtcgttgctgcaagtgccccgcaatcaactccattgccactgtgatccccttccaccgatggcactcaccttccatcgacaaaactgctcttcctccattccaccgatggcactcaccctaaaccctcacctcttagatcccgtgctcatcaccatcctgcccctcgctcgccgccccacctcaccaagagccttagccgtccctagagaagacacggaggtgcagtgcagtgcagtgctttactcaagtgcgccacggattttcggtaccggccagattgggacgaattcgacattcatcggctccaccaaagtttcgtcttctacctttcaccgctgccaacttcgcggtgtattaaacggtgtgagttgattttcacctcttttccacagactcagtaagctcttatctgatctaatggatgggagtcgtatcttgatagtcttccaaacaaaaaaggattgcgataagatcacccgacaacttagaatggatgggtggctagcattatctatacatggtgataaagctcaagttgaacgggactatattcttgtagagtttagagcggcaagagctccataatggctgccacagatgtggcagcacgtggtcttgaacaaggcgatggcccaattgtattaattcccgctcccacaagagaattggctgttcaaatacaggaagaatctacaaaatttggatcatattcaagaactagaagcacatgtgtctatggtggtgcacctaagggtccacaaatacggggccttagaagaggagttgaaattgtcattgcaactcctggccggttgattgatatgctggaagctggtcacacaaacctacgtagagtgacgtaccttgtgttggatgaggcggaccagatgctagatatggggaatctcaagaagcttgcggcccagagccaaacggatgatgaagatgtttggtgggagtag

SEQ ID NO: 10476 - DNA, 1263 bp, Zea Mays
cggcgcacgttctgccgcccgcatcccgcatccgcgtcgcaacccgcaaccgcctgcagccgcggcttccatcttccgccctccttccatcctcctgcaatcgccagcgcgccctccgcgctcctgccatccgaggaaagccttccatccatggcgccgttgctgcaattctccccgcgatccgctctccctccattgccccccgcgatccgcgctccctccattgcccccgcgctcctgccatccatggcgcctccccacggatctctgctgtcaattttacggagaaatcacgcctccctagggtgcccttccatccatggcgtcgttgctgcaagtgccccgcaatcaactccattgccactgtgatccccttccaccgatggcactcaccttccatcgacaaaactgctcttcctccattccaccgatggcactcaccctaaaccctcacctcttagatcccgtgctcatcaccatcctgcccctcgctcgccgccccacctcaccaagagccttagccgtccctagagaagacacggaggtgcagtgcagtgcagtgctttactcaagtgcgccacggattttcggtaccggccagattgggacgaattcgacattcatcggctccaccaaagaacaaggcgatggcccaattgtattaattcccgctcccacaagagaattggctgttcaaatacaggaagaatctacaaaatttggatcatattcaagaactagaagcacatgtgtctatggtggtgcacctaagggtccacaaatacggggccttagaagaggagttgaaattgtcattgcaactcctggccggttgattgatatgctggaagctggtcacacaaacctacgtagagtgacgtaccttgtgttggatgaggcggaccagatgctagatatggggtttgagccccaaattcaaaatagtatcacaagtacattttcgtttagaaatgcatagttatggttttactgatgtatcaaatttccataaaaatggccttgtagttcatgaactttattaattttgtttagtgataatgtggtggtggtgttttaatcgggagagcactagctcaagaagccacaacaacccaagatcattcctggcgctctccatacatctactactgctagctctggacgctacatgtactgcaacagatcatagctcgagacataagtaccaagcatcactacctatagagtactctccctgcatcaactggctataaaaacaaacag

SEQ ID NO: 10477 - DNA, 1389 bp, Zea Mays
cggcgcacgttctgccgcccgcatcccgcatccgcgtcgcaacccgcaaccgcctgcagccgcggcttccatcttccgccctccttccatcctcctgcaatcgccagcgcgccctccgcgctcctgccatccgaggaaagccttccatccatggcgccgttgctgcaattctccccgcgatccgctctccctccattgccccccgcgatccgcgctccctccattgcccccgcgctcctgccatccatggcgcctccccacggatctctgctgtcaattttacggagaaatcacgcctccctagggtgcccttccatccatggcgtcgttgctgcaagtgccccgcaatcaactccattgccactgtgatccccttccaccgatggcactcaccttccatcgacaaaactgctcttcctccattccaccgatggcactcaccctaaaccctcacctcttagatcccgtgctcatcaccatcctgcccctcgctcgccgccccacctcaccaagagccttagccgtccctagagaagacacggaggtgcagtgcagtgcagtgctttactcaagtgcgccacggattttcggtaccggccagattgggacgaattcgacattcatcggctccaccaaagactcagtaagctcttatctgatctaatggatgggagtcgtatcttgatagtcttccaaacaaaaaaggattgcgataagatcacccgacaacttagaatggatgggtggctagcattatctatacatggtgataaagctcaagttgaacgggactatattcttgtagagtttagagcggcaagagctccataatggctgccacagatgtggcagcacgtggtcttgaacaaggcgatggcccaattgtattaattcccgctcccacaagagaattggctgttcaaatacaggaagaatctacaaaatttggatcatattcaagaactagaagcacatgtgtctatggtggtgcacctaagggtccacaaatacggggccttagaagaggagttgaaattgtcattgcaactcctggccggttgattgatatgctggaagctggtcacacaaacctacgtagagtgacgtaccttgtgttggatgaggcggaccagatgctagatatggggtttgagccccaaattcaaaatagtatcacaatgataatgtggtggtggtgttttaatcgggagagcactagctcaagaagccacaacaacccaagatcattcctggcgctctccatacatctactactgctagctctggacgctacatgtactgcaacagatcatagctcgagacataagtaccaagcatcactacctatagagtactctccctgcatcaactggctataaaaacaaacag

SEQ ID NO: 10478 - DNA, 1639 bp, Zea Mays
ccttctggaatttgtcccataccatttgggttaacgtattttcactaactactgtattttttgttcatctggtttggattatttcttcatactttgctagctgttgtggactggtggtaaagtaaaccaggaacaatttgatttcaaatatatagttttggtttgattttatggcacttctccttggtgttttgtttcagttaccattaatggttaatgtttttttagtttcacatttttgaatttgatcttcatattcatgttatgcatgtaggtagtaatcccaccagatggctatttgaaaggtgccagagacttgtgttctaaacacaacgttttgatgattgctgatgagatccaaactggcatagctagaactggtaaaatgctggcatgtgactgggaaaacatacggcctgacatggtgattctaggcaaagcactcggtgctggagttgttccagtcagtgcagttcttgcagacaaggatgtcatgctgtgtatcagaccaggggaacatggaagtacattcggtgggaatccgttagctagcgctgtggcagttgcatcactgaaagtggtcagagacgaaggtcttgttgaaagggctgcaaagttaggacaggagtttagggaccagttacagaaggtccagcagaaattccctcaaatcctaagagaagtgcgcgggaggggtttgctgaacgcagtggatctaaacaacgacgcgctatctcctgcttctgcatatgacatctgcatcaagttgaaggagagaggcattttagcgaaacccacacatgacactataatccgacttgctcctcccctcacaatcagtcctgaggagcttgcagaagcatccaaggcgcttagtgacgtgctggagcatgacttgccacagctgcagctgcagaagcagataaaaaagccagaatctgaggcagagaagccagtctgtgacagatgcggccgggacttgtacggatgaatgaagcctccgaacagagataacttcattttcgtaggcacccatctcgccccagaagaaataataacagagcagaggatgccagctgcctagctacttgggttaccgtaatgttatgcgacttgttgcatcgtataccaagtatatgagctattgcaaccttggtgaatatgtcaaataaatggcagcattcacatgctcaaatatgggcagcattcacatgcactgtgacttctttgcaacgttttatcaagtatccgaaagttccaacaggaagttggtcaacaatcgataatcagagcaaagaaaaaaaatggatgatatgttcgatcacggtactgatgacatagtattcccttcaaaaaaacagaaacgataaaaacaagggagtattaatcggtcgagtaatatcgtatatcctctttccttggaaaccgtgatgccttgtttttttttccggttcttttcagaattttgatagggaaccaacaatgaccatattaccctcatgtaaacgaactgttgtaatcttacagttttgggataggatagtctttttatattaattatgaatataacaataacgacccatataaatatcccacaatctatattgttcacggatatgagaaattttattcaataaag

SEQ ID NO: 10479 - DNA, 1839 bp, Zea Mays
ctggaaactatttgctgtcaaaacagaccggatgtcagaaaaggtcattgccatccaaaagtcctgagagctttgatagaacaggcagaaaggcttacgctcagttctagagctttctacaatgataagttcccaatctttgcggaatatctgacaagcatgtttggatatgacatgatgttgccgatgaatactggtgctgaaggagttgaaactgctatcaagctggctaggaaatggggttatgagaagaaacatataccaaagaatgaggctttgcttgtctcttgctgtgggtgtttccatggtcgaactcttggtgtcatttccatgagctgtgacaacgatgcaactcgtggttttggtcctttggttcctggccatcttaaagttgattttggagatattgatgggttaaagaaaatcttcgaagagcttggagatcggatttgtggttttttatttgaacctatccaagtaatcccaccagatggctatttgaaaggtgccagagacttgtgttctaaacacaacgttttgatgattgctgatgagatccaaactggcatagctagaactggtaaaatgctggcatgtgactgggaaaacatacggcctgacatggtgattctaggcaaagcactcggtgctggagttgttccagtcagtgcagttcttgcagacaaggatgtcatgctgtgtatcagaccaggggaacatggaagtacattcggtgggaatccgttagctagcgctgtggcagttgcatcactgaaagtggtcagagacgaaggtcttgttgaaagggctgcaaagttaggacaggagtttagggaccagttacagaaggtccagcagaaattccctcaaatcctaagagaagtgcgcgggaggggtttgctgaacgcagtggatctaaacaacgacgcgctatctcctgcttctgcatatgacatctgcatcaagttgaaggagagaggcattttagcgaaacccacacatgacactataatccgacttgctcctcccctcacaatcagtcctgaggagcttgcagaagcatccaaggcgcttagtgacgtgctggagcatgacttgccacagctgcagctgcagaagcagataaaaaagccagaatctgaggcagagaagccagtctgtgacagatgcggccgggacttgtacggatgaatgaagcctccgaacagagataacttcattttcgtaggcacccatctcgccccagaagaaataataacagagcagaggatgccagctgcctagctacttgggttaccgtaatgttatgcgacttgttgcatcgtataccaagtatatgagctattgcaaccttggtgaatatgtcaaataaatggcagcattcacatgctcaaatatgggcagcattcacatgcactgtgacttctttgcaacgttttatcaagtatccgaaagttccaacaggaagttggtcaacaatcgataatcagagcaaagaaaaaaaatggatgatatgttcgatcacggtactgatgacatagtattcccttcaaaaaaacagaaacgataaaaacaagggagtattaatcggtcgagtaatatcgtatatcctctttccttggaaaccgtgatgccttgtttttttttccggttcttttcagaattttgatagggaaccaacaatgaccatattaccctcatgtaaacgaactgttgtaatcttacagttttgggataggatagtctttttatattaattatgaatataacaataacgacccatataaatatcccacaatctatattgttcacggatatgagaaattttattcaataaag

SEQ ID NO: 10480 - DNA, 2066 bp, Zea Mays
ctcagctctctgtgtttgccctcattccctttactccttgcgcgcccgccgcgtgctcgccgaaacgcctctgtgcctccggcctccggcctccgcccctgacgcgatcatgctcggatcctgccttggggttctttcttgtctttcagttaccatccaatccccatggtgttttccaaaggagaaggttcacacatagtggaccccgaaggcaacaaatacattgattttctctctgcttattctgcagtcaatcagggtcattgccatccaaaagtcctgagagctttgatagaacaggcagaaaggcttacgctcagttctagagctttctacaatgataagttcccaatctttgcggaatatctgacaagcatgtttggatatgacatgatgttgccgatgaatactggtgctgaaggagttgaaactgctatcaagctggctaggaaatggggttatgagaagaaacatataccaaagaatgaggctttgcttgtctcttgctgtgggtgtttccatggtcgaactcttggtgtcatttccatgagctgtgacaacgatgcaactcgtggttttggtcctttggttcctggccatcttaaagttgattttggagatattgatgggttaaagaaaatcttcgaagagcttggagatcggatttgtggttttttatttgaacctatccaaggtgaagctgggtaatcccaccagatggctatttgaaaggtgccagagacttgtgttctaaacacaacgttttgatgattgctgatgagatccaaactggcatagctagaactggtaaaatgctggcatgtgactgggaaaacatacggcctgacatggtgattctaggcaaagcactcggtgctggagttgttccagtcagtgcagttcttgcagacaaggatgtcatgctgtgtatcagaccaggggaacatggaagtacattcggtgggaatccgttagctagcgctgtggcagttgcatcactgaaagtggtcagagacgaaggtcttgttgaaagggctgcaaagttaggacaggagtttagggaccagttacagaaggtccagcagaaattccctcaaatcctaagagaagtgcgcgggaggggtttgctgaacgcagtggatctaaacaacgacgcgctatctcctgcttctgcatatgacatctgcatcaagttgaaggagagaggcattttagcgaaacccacacatgacactataatccgacttgctcctcccctcacaatcagtcctgaggagcttgcagaagcatccaaggcgcttagtgacgtgctggagcatgacttgccacagctgcagctgcagaagcagataaaaaagccagaatctgaggcagagaagccagtctgtgacagatgcggccgggacttgtacggatgaatgaagcctccgaacagagataacttcattttcgtaggcacccatctcgccccagaagaaataataacagagcagaggatgccagctgcctagctacttgggttaccgtaatgttatgcgacttgttgcatcgtataccaagtatatgagctattgcaaccttggtgaatatgtcaaataaatggcagcattcacatgctcaaatatgggcagcattcacatgcactgtgacttctttgcaacgttttatcaagtatccgaaagttccaacaggaagttggtcaacaatcgataatcagagcaaagaaaaaaaatggatgatatgttcgatcacggtactgatgacatagtattcccttcaaaaaaacagaaacgataaaaacaagggagtattaatcggtcgagtaatatcgtatatcctctttccttggaaaccgtgatgccttgtttttttttccggttcttttcagaattttgatagggaaccaacaatgaccatattaccctcatgtaaacgaactgttgtaatcttacagttttgggataggatagtctttttatattaattatgaatataacaataacgacccatataaatatcccacaatctatattgttcacggatatgagaaattttattcaataaag

SEQ ID NO: 10481 - DNA, 2089 bp, Zea Mays
gttcgatctccacgcttatctcagctctctgtgtttgccctcattccctttactccttgcgcgcccgccgcgtgctcgccgaaacgcctctgtgcctccggcctccggcctccgcccctgacgcgatcatgctcggatcctgccttggggttctttcttgtctttcagttaccatccaatccccatggtgttttccaaaggagaaggttcacacatagtggaccccgaaggcaacaaatacattgattttctctctgcttattctgcagtcaatcagggtcattgccatccaaaagtcctgagagctttgatagaacaggcagaaaggcttacgctcagttctagagctttctacaatgataagttcccaatctttgcggaatatctgacaagcatgtttggatatgacatgatgttgccgatgaatactggtgctgaaggagttgaaactgctatcaagctggctaggaaatggggttatgagaagaaacatataccaaagaatgaggctttgcttgtctcttgctgtgggtgtttccatggtcgaactcttggtgtcatttccatgagctgtgacaacgatgcaactcgtggttttggtcctttggttcctggccatcttaaagttgattttggagatattgatgggttaaagaaaatcttcgaagagcttggagatcggatttgtggttttttatttgaacctatccaaggtgaagctggggtagtaatcccaccagatggctatttgaaaggtgccagagacttgtgttctaaacacaacgttttgatgattgctgatgagatccaaactggcatagctagaactggtaaaatgctggcatgtgactgggaaaacatacggcctgacatggtgattctaggcaaagcactcggtgctggagttgttccagtcagtgcagttcttgcagacaaggatgtcatgctgtgtatcagaccaggggaacatggaagtacattcggtgggaatccgttagctagcgctgtggcagttgcatcactgaaagtggtcagagacgaaggtcttgttgaaagggctgcaaagttaggacaggagtttagggaccagttacagaaggtccagcagaaattccctcaaatcctaagagaagtgcgcgggaggggtttgctgaacgcagtggatctaaacaacgacgcgctatctcctgcttctgcatatgacatctgcatcaagttgaaggagagaggcattttagcgaaacccacacatgacactataatccgacttgctcctcccctcacaatcagtcctgaggagcttgcagaagcatccaaggcgcttagtgacgtgctggagcatgacttgccacagctgcagctgcagaagcagataaaaaagccagaatctgaggcagagaagccagtctgtgacagatgcggccgggacttgtacggatgaatgaagcctccgaacagagataacttcattttcgtaggcacccatctcgccccagaagaaataataacagagcagaggatgccagctgcctagctacttgggttaccgtaatgttatgcgacttgttgcatcgtataccaagtatatgagctattgcaaccttggtgaatatgtcaaataaatggcagcattcacatgctcaaatatgggcagcattcacatgcactgtgacttctttgcaacgttttatcaagtatccgaaagttccaacaggaagttggtcaacaatcgataatcagagcaaagaaaaaaaatggatgatatgttcgatcacggtactgatgacatagtattcccttcaaaaaaacagaaacgataaaaacaagggagtattaatcggtcgagtaatatcgtatatcctctttccttggaaaccgtgatgccttgtttttttttccggttcttttcagaattttgatagggaaccaacaatgaccatattaccctcatgtaaacgaactgttgtaatcttacagttttgggataggatagtctttttatattaattatgaatataacaataacgacccatataaatatcccacaatctatattgttcacggatatgagaaattttattcaataaag

SEQ ID NO: 10482 - DNA, 2320 bp, Zea Mays
gttcgtttgtttagaattagaccaagattaatttaactaatcaaaacttacataaattagagatccagaaccgtttcgtggctccaatccgtgaaaaaacgaacgggccgccggctcggacccggaggctgcagcggcaccgggatctgggaatctgcacggcctggagcctccagcgactggccccaccaccatctgcgcgcgcgcgcgagggaccggccggcgaacagaggcgccactgagctctgagcgggtgcggccggcatggcgacggcgctggcgcggcggggcgccgcggccctggcgcggtggcgcgggatgtgctcgagctcggcgtcggcgccgcggagcgccgcggcgctgtcctcagaggagctcatgcggatggaacaagactgcagcgcgcataattaccatccaatccccatggtgttttccaaaggagaaggttcacacatagtggaccccgaaggcaacaaatacattgattttctctctgcttattctgcagtcaatcagggtcattgccatccaaaagtcctgagagctttgatagaacaggcagaaaggcttacgctcagttctagagctttctacaatgataagttcccaatctttgcggaatatctgacaagcatgtttggatatgacatgatgttgccgatgaatactggtgctgaaggagttgaaactgctatcaagctggctaggaaatggggttatgagaagaaacatataccaaagaatgaggctttgcttgtctcttgctgtgggtgtttccatggtcgaactcttggtgtcatttccatgagctgtgacaacgatgcaactcgtggttttggtcctttggttcctggccatcttaaagttgattttggagatattgatgggttaaagaaaatcttcgaagagcttggagatcggatttgtggttttttatttgaacctatccaaggtagtaatcccaccagatggctatttgaaaggtgccagagacttgtgttctaaacacaacgttttgatgattgctgatgagatccaaactggcatagctagaactggtaaaatgctggcatgtgactgggaaaacatacggcctgacatggtgattctaggcaaagcactcggtgctggagttgttccagtcagtgcagttcttgcagacaaggatgtcatgctgtgtatcagaccaggggaacatggaagtacattcggtgggaatccgttagctagcgctgtggcagttgcatcactgaaagtggtcagagacgaaggtcttgttgaaagggctgcaaagttaggacaggagtttagggaccagttacagaaggtccagcagaaattccctcaaatcctaagagaagtgcgcgggaggggtttgctgaacgcagtggatctaaacaacgacgcgctatctcctgcttctgcatatgacatctgcatcaagttgaaggagagaggcattttagcgaaacccacacatgacactataatccgacttgctcctcccctcacaatcagtcctgaggagcttgcagaagcatccaaggcgcttagtgacgtgctggagcatgacttgccacagctgcagctgcagaagcagataaaaaagccagaatctgaggcagagaagccagtctgtgacagatgcggccgggacttgtacggatgaatgaagcctccgaacagagataacttcattttcgtaggcacccatctcgccccagaagaaataataacagagcagaggatgccagctgcctagctacttgggttaccgtaatgttatgcgacttgttgcatcgtataccaagtatatgagctattgcaaccttggtgaatatgtcaaataaatggcagcattcacatgctcaaatatgggcagcattcacatgcactgtgacttctttgcaacgttttatcaagtatccgaaagttccaacaggaagttggtcaacaatcgataatcagagcaaagaaaaaaaatggatgatatgttcgatcacggtactgatgacatagtattcccttcaaaaaaacagaaacgataaaaacaagggagtattaatcggtcgagtaatatcgtatatcctctttccttggaaaccgtgatgccttgtttttttttccggttcttttcagaattttgatagggaaccaacaatgaccatattaccctcatgtaaacgaactgttgtaatcttacagttttgggataggatagtctttttatattaattatgaatataacaataacgacccatataaatatcccacaatctatattgttcacggatatgagaaattttattcaataaag

SEQ ID NO: 10483 - DNA, 507 bp, Zea Mays
tgggcgcgtgggcaccggaccagagtccatggctcgcgtcacagatgatggagcagattcaaatatcatgaaaataatgttctggagaacttcatgtccgagatacaaatggatgttttggacatatgattgcaagagttgttgccaatgatagatatgaaaacgggctgaagaacaaactctacatacgttgctgctccgatatgtgactacgcaaaatatttgtctatgcttaatcacttgcgattttattcagatatgtgactctctgttagctacctggttttcgttcagatatgtgcctatctgaactgtagctgtaaaactgttaccaatgtaacagccctgatgctatttctgaaatttcttaatgaacctgaaaaactgaaattactatccacaacggagagcttgaacatgttcgattgtgttctagcggttgatcagattgtgcgaacatgcatcacagtgtgaacttcctacttggtctgataatgtgaacatgca

SEQ ID NO: 10484 - DNA, 473 bp, Zea Mays
tccagggcagatgatggagcagattcaaatatcatgaaaataatgttctggagaacttcatgtccgagatacaaatggatgttttggacatatgattgcaagagttgttgccaatgatagatatgaaaacgggctgaagaacaaactctacatacgttgctgctccgatatgtgactacgcaaaatatttgtctatgcttaatcacttgcgattttattcagatatgtgactctctgttagctacctggttttcgttcagatatgtgcctatctgaactgtagctgtaaaactgttaccaatgtaacagccctgatgctatttctgaaatttcttaatgaacctgaaaaactgaaattactatccacaacggagagcttgaacatgttcgattgtgttctagcggttgatcagattgtgcgaacatgcatcacagtgtgaacttcctacttggtctgataatgtgaacatgca

SEQ ID NO: 10485 - DNA, 1330 bp, Zea Mays
atgaagacggcggcggctatctgccttcactggagctgtgagaaggctatggtgcaaattgttcagcagataaatcatgatggagaggtcaatcgagctcgctatatgccccaaaattcatttgtaattgctactaagacagttagcgcagaagtatatgttttcgactatagcaagcacccatctaagcctccactagatggtgcatgcaaccctgatttacggctgaagggacataattctgaaggatatggcttatcatggagtatttttaaagagggacatttgttaagtgggtctgacgatgctcaaatttgcttgtgggacattaaagcaaatagtagaaacaaaagtcttgacgccttgcagatttttaagcatcatgatggtgttgttgaagatgttgcttggcacttgaggcatgagtacttatttgggtcagttggtgacgattatcatcttttgatttgggacctgcggtctccagcccctactaaacctgttcagtcagtggtggcgcaccagggtgaactgcctggcttttcacccgttcaacgaatgggttgttgcaactggttctactgacaagactgtcaaattatttgatcttaggaagattgatacttctctgcacacctttgactgtcacaaagaggaagtttttcaagttggatggagtccaaagaatgaaactatacttgcatcctgttgtctgggcagaaggctcatggtctgggatctaagcaggatcggccaagaacaaacaccagaggatgctgaagatggtcctccagagctcatgttcatccacggaggccataccagcaagatctctgatttctcctggaacccctgcgaggactgggtggttgctagcgtcgctgaagacaacatcctccagatatggcagatggctgagaacatctaccatgacgaagatgatctgccaattagcgatgagccggcaaaaacttcttgaagcaacacagcacaaaaggaatcttaacttctatcgactgttgggtgttcctagatcggaaccctgctcgccggagaatcttcatcgagtgagagttggctgtaggttgcttccgtggtcgtaactttatgcttgacgggttcgtcgtttcttcgaccgtctgtatgtgtattcggcgaacctttagcaatatacatatcccgattgactagatctgtacgtcgcagttgtgttttgtagtattgttttgcagccagtaggatcatgttcgtgatgtgatttgtaacgggaacaaaataatattcactccagcgtaggccaagcgatagtcacagctcaggtcgaccgata

SEQ ID NO: 10486 - DNA, 1388 bp, Zea Mays
cgaggggagcatgagcggaagatggggggagagtggaaggtggagcgtgctagatgaagacggcggcggctatctgccttcactggagctgtgagaaggctatggtgcaaattgttcagcagataaatcatgatggagaggtcaatcgagctcgctatatgccccaaaattcatttgtaattgctactaagacagttagcgcagaagtatatgttttcgactatagcaagcacccatctaagcctccactagatggtgcatgcaaccctgatttacggctgaagggacataattctgaaggatatggcttatcatggagtatttttaaagagggacatttgttaagtgggtctgacgatgctcaaatttgcttgtgggacattaaagcaaatagtagaaacaaaagtcttgacgccttgcagatttttaagcatcatgatggtgttgttgaagatgttgcttggcacttgaggcatgagtacttatttgggtcagttggtgacgattatcatcttttgatttgggacctgcggtctccagcccctactaaacctgttcagtcagtggtggcgcaccagggtgaggtgaactgcctggcttttcacccgttcaacgaatgggttgttgcaactggttctactgacaagactgtcaaattatttgatcttaggaagattgatacttctctgcacacctttgactgtcacaaagaggaagtttttcaagttggatggagtccaaagaatgaaactatacttgcatcctgttgtctgggcagaaggctcatggtctgggatctaagcaggatcggccaagaacaaacaccagaggatgctgaagatggtcctccagagctcatgttcatccacggaggccataccagcaagatctctgatttctcctggaacccctgcgaggactgggtggttgctagcgtcgctgaagacaacatcctccagatatggcagatggctgagaacatctaccatgacgaagatgatctgccaattagcgatgagccggcaaaaacttcttgaagcaacacagcacaaaaggaatcttaacttctatcgactgttgggtgttcctagatcggaaccctgctcgccggagaatcttcatcgagtgagagttggctgtaggttgcttccgtggtcgtaactttatgcttgacgggttcgtcgtttcttcgaccgtctgtatgtgtattcggcgaacctttagcaatatacatatcccgattgactagatctgtacgtcgcagttgtgttttgtagtattgttttgcagccagtaggatcatgttcgtgatgtgatttgtaacgggaacaaaataatattcactccagcgtaggccaagcgatagtcacagctcaggtcgaccgata

SEQ ID NO: 10487 - DNA, 1225 bp, Zea Mays
aaaaaaacaaatagggacaatgtttgttgttgctgtggctgattttcttatgggtgcaaattgttcagcagataaatcatgatggagagatggtgcatgcaaccctgatttacggctgaagggacataattctgaaggatatggcttatcatggagtatttttaaagagggacatttgttaagtgggtctgacgatgctcaaatttgcttgtgggacattaaagcaaatagtagaaacaaaagtcttgacgccttgcagatttttaagcatcatgatggtgttgttgaagatgttgcttggcacttgaggcatgagtacttatttgggtcagttggtgacgattatcatcttttgatttgggacctgcggtctccagcccctactaaacctgttcagtcagtggtggcgcaccagggtgaggtgaactgcctggcttttcacccgttcaacgaatgggttgttgcaactggttctactgacaagactgtcaaattatttgatcttaggaagattgatacttctctgcacacctttgactgtcacaaagaggaagtttttcaagttggatggagtccaaagaatgaaactatacttgcatcctgttgtctgggcagaaggctcatggtctgggatctaagcaggatcggccaagaacaaacaccagaggatgctgaagatggtcctccagagctcatgttcatccacggaggccataccagcaagatctctgatttctcctggaacccctgcgaggactgggtggttgctagcgtcgctgaagacaacatcctccagatatggcagatggctgagaacatctaccatgacgaagatgatctgccaattagcgatgagccggcaaaaacttcttgaagcaacacagcacaaaaggaatcttaacttctatcgactgttgggtgttcctagatcggaaccctgctcgccggagaatcttcatcgagtgagagttggctgtaggttgcttccgtggtcgtaactttatgcttgacgggttcgtcgtttcttcgaccgtctgtatgtgtattcggcgaacctttagcaatatacatatcccgattgactagatctgtacgtcgcagttgtgttttgtagtattgttttgcagccagtaggatcatgttcgtgatgtgatttgtaacgggaacaaaataatattcactccagcgtaggccaagcgatagtcacagctcaggtcgaccgata

SEQ ID NO: 10488 - DNA, 2560 bp, Zea Mays
gtaaaaatgtcacagaagtggcaaaattccaattattatttcacctaaaaccctctgctctcaaacctagctcgctcccggcggaccgacgatgccgaaggcagtcggcggggcggcggacgaagaggagttccgcgccgaggtggaggagcgcctcatcaacgaggagtacaagatctggaagaagaacacacccttcctctacgacctcgtcatcacccacgcgctcgaatggccctcccttaccgtgcagtggctccccgaccgcaccgagccgccggggaaggaccactccgtccagaagatgatcctcggcacgcacacctctgacaacgagcccaactacctcatgctcgcgcaggtccagctgcccctcgatgacgccgaggccgacgcccgccactacgacgatgaccacgccgacatcggtgggtttggcgccgcctccggcaaggtgcaaattgttcagcagataaatcatgatggagaggtcaatcgagctcgctatatgccccaaaattcatttgtaattgctactaagacagttagcgcagaagtatatgttttcgactatagcaagcacccatctaagcctccactagatggtgcatgcaaccctgatttacggctgaagggacataattctgaaggatatggcttatcatggagtatttttaaagagggacatttgttaagtgggtctgacgatgctcaaatttgcttgtgggacattaaagcaaatagtagaaacaaaagtcttgacgccttgcagatttttaagcatcatgatggtgttgttgaagatgttgcttggcacttgaggcatgagtacttatttgggtcagttggtgacgattatcatcttttgatttgggacctgcggtctccagcccctactaaacctgttcagtcagtggtggcgcaccagggtgaggaaacgttgcacaacgaagaggagggcgcgagctggaaccacagaggtaaagacacagcagccttcggaggcgggcccgtggaggccgacgttggtgttacctgcagcaactggatctcgtgtagtgcaacccctcatggtctcgcggccaccagtgcgtatagggtggtgtggctggagctgatggtggcgaggccaacagccccccttgtacgaaggagagtagtcgtggtagttgtccggtcgtcgcatatgagggctagcgccggactgagcgttgcagagggacgtaatgtcttgcagcctcttgtacgcggaggtaaacaaccaccacgttgctcggccgcgctggtgcagctacgactctctcgcaatggagcacccccatcatctgcttcactcgtcgacgcgctaggaaatcgtgtgctgcagtctgcaggtggacgatcgctgtcgtctggggcggagcaaccaccctctcctggatgtctctcttggggtcaggggggctggtacaccggtcctggtatggttgcccctagcgtcgtcagccatgcaactggtgatgaagatggccctgagggcgcaacggaactggtaggcatcgccgcccatgaagatgtaggtgttggagcgggcgatgacgaccaagccgctggtgcttgtgtgctgctggagagcgccatgctgattgcgttgagcctcgccaaacagatcttcgaagtatgcctggtcgggaacccaaggacccatgagaggcagaggcgcggccgcgggacgctcgtgctgcgtgacgttggtgtcggggttccagtagtagaggtgaactgcctggcttttcacccgttcaacgaatgggttgttgcaactggttctactgacaagactgtcaaattatttgatcttaggaagattgatacttctctgcacacctttgactgtcacaaagaggaagtttttcaagttggatggagtccaaagaatgaaactatacttgcatcctgttgtctgggcagaaggctcatggtctgggatctaagcaggatcggccaagaacaaacaccagaggatgctgaagatggtcctccagagctcatgttcatccacggaggccataccagcaagatctctgatttctcctggaacccctgcgaggactgggtggttgctagcgtcgctgaagacaacatcctccagatatggcagatggctgagaacatctaccatgacgaagatgatctgccaattagcgatgagccggcaaaaacttcttgaagcaacacagcacaaaaggaatcttaacttctatcgactgttgggtgttcctagatcggaaccctgctcgccggagaatcttcatcgagtgagagttggctgtaggttgcttccgtggtcgtaactttatgcttgacgggttcgtcgtttcttcgaccgtctgtatgtgtattcggcgaacctttagcaatatacatatcccgattgactagatctgtacgtcgcagttgtgttttgtagtattgttttgcagccagtaggatcatgttcgtgatgtgatttgtaacgggaacaaaataatattcactccagcgtaggccaagcgatagtcacagctcaggtcgaccgata

SEQ ID NO: 10489 - DNA, 412 bp, Zea Mays
cttgatatgaatataattacatatacgaaaataatcatagaaaggtggttcgagctatgataccagaaggatccagacatatgagcctactagctttcgggcagtcatcatcaactgaagatgaacaggcgtatgatgaacaataatggtacatgaggttccgaagatggaacacttgtgaaaccgtcaagctctggcttgtgtcccttgcggataacagaaaagatcagagctggaacgattccgggtgcaatccgacggaaatgaacaaggcctaatgttgtacgtgtactgtggcatggcagaaccgtccggtttaacccaatttcgggcacacctgccagctatttatcactaagtgcaccagagattatatcaaatccgatagtctgttaagcccatccaatgaaag

SEQ ID NO: 10490 - DNA, 1664 bp, Zea Mays
ctcctgcgcgttcgagaaaaaaaaagaatccatcgatgtcctcgctcggctagaacaccaagcaatcccactcttgacgcaacttctgttgggtggctctgctcgtgcggttattgctgatgtgtgccacggcgatggcatccttggaggtttccttgttcgtgaggacggcgccatctccggcgggacatcaataaggagggcctccagcgcttcaaaaagttcttgatgccgctatgaatgacataaacaactcttttggaaaaggaagtgttacaagattaggcagtgctggtggtgcttttgttgagacattcccaagtggttgtctaacactagattttgctctgggtggcggtcttccaaaaggaagagtagtggaggtatatggtccagaaagcagtggaaagactaccctagctttgcatgcaattgctgaaatacagaagcttggaggaaatgccatgcttgtcgatgcagagcatgcttttgatccagcttattcaaaagctcttggggtagatattgaaaatctgattgtctgccagcctgacaacggagagatggcactagaaattgcggaccgtatgtgcagatctggagcaatagatcttatctgtattgattcggtgtcagcgctcaccccacgtgcagaaattgaaggtgagataggaatgcagcagatgggtctacaagctcgtctgatgagtcaagcattgagaaaaatgtcaggcaatgcctcaaaggctggctgtactcttatgttcttgaatcaaataagatacaagattggagtgttctatgggaatcctgaagtcactagtggagggatagccttgaaattctttgcatctgtccgtcttgagatacggctcattgggaagataaaatctgccaagggagatgaagatgttggtgtgaaggttcgtgtcagagtgcagaagagtaaagtatctaggccctacaagcaagctgaatttgaaatcatttttggggagggtgttagtaaattggggtgcgttcttgattgtgctgagctgatggatgtagttgcaaagaagggttcgtggtacagctacaaagatataagattgggccaaggcagagagaaggcactgcagtatctccgagagagcccaaccacctgcgatgagatagaaaaggtggttcgagctatgataccagaaggatccagacatatgagcctactagctttcgggcagtcatcatcaactgaagatgaacaggcgtatgatgaacaataatggtacatgaggttccgaagatggaacacttgtgaaaccgtcaagctctggcttgtgtcccttgcggataacagaaaagatcagaggtaaccaaccaatatggcagttgtgtgagcgctggagtggagttgactaagaccttgttcgtttctgccggattggtgggtcctaacgattcctgaccggattgtttctctaatttatataaactttgattagctggaacgattccgggtgcaatccgacggaaatgaacaaggcctaatgttgtacgtgtactgtggcatggcagaaccgtccggtttaacccaatttcgggcacacctgccagctatttatcactaagtgcaccagagattatatcaaatccgatagtctgttaagcccatccaatgaaag

SEQ ID NO: 10491 - DNA, 2070 bp, Zea Mays
cacgaatctcgaggcgagctgttcgatcaccactatctgacgtagcttcttcgctcggctcttcttcaccccacccctctcccactcggccactccccccgcggggacaccgagcgctcgccgccgccttcgagttcggagcggagccacagccacgcatgccaatggccgtctccgctgttaccgcctcccatctcgctctctcttttccagcacgtagtcgccggagacgcgctgcgccccgcgccgcggcaggcggcctaacggctcgcgcacggcggctgcgctgcgagttcgtcgccggtggtgggaacggggcgctctccggagaggacgaccctcgcctcgtcgaccgccaaaaagttcttgatgccgctatgaatgacataaacaactcttttggaaaaggaagtgttacaagattaggcagtgctggtggtgcttttgttgagacattcccaagtggttgtctaacactagattttgctctgggtggcggtcttccaaaaggaagagtagtggaggtatatggtccagaaagcagtggaaagactaccctagctttgcatgcaattgctgaaatacagaagcttggaggaaatgccatgcttgtcgatgcagagcatgcttttgatccagcttattcaaaagctcttggggtagatattgaaaatctgattgtctgccagcctgacaacggagagatggcactagaaagtaatccatttcgcacatatagggttcaatacttctttacctaatattggtcgtccctctactttaatcttactgtgcaacttttatctagtaaaggactcatatagtcatattcatccttttgaatttttgtctcaattcataaacttttccactcaggtttgatgttcttcctttaggatccttgtctaaatttaacacatgagaatcctgccgagatggtttgatagtgcaatatttgtttttttctctctaaataagtctctttctgttgaggtttgcataaactttcttttcgcagatgaccagatgtctgccatggaactttactttgtcattttcagatggtacagaacagttacttacagcctctgccccccaaaatagtgcaattctagttgcggaccgtatgtgcagatctggagcaatagatcttatctgtattgattcggtgtcagcgctcaccccacgtgcagaaattgaaggtgagataggaatgcagcagatgggtctacaagctcgtctgatgagtcaagcattgagaaaaatgtcaggcaatgcctcaaaggctggctgtactcttatgttcttgaatcaaataagatacaagattggagtgttctatgggaatcctgaagtcactagtggagggatagccttgaaattctttgcatctgtccgtcttgagatacggctcattgggaagataaaatctgccaagggagatgaagatgttggtgtgaaggttcgtgtcagagtgcagaagagtaaagtatctaggccctacaagcaagctgaatttgaaatcatttttggggagggtgttagtaaattggggtgcgttcttgattgtgctgagctgatggatgtagttgcaaagaagggttcgtggtacagctacaaagatataagattgggccaaggcagagagaaggcactgcagtatctccgagagagcccaaccacctgcgatgagatagaaaaggtggttcgagctatgataccagaaggatccagacatatgagcctactagctttcgggcagtcatcatcaactgaagatgaacaggcgtatgatgaacaataatggtacatgaggttccgaagatggaacacttgtgaaaccgtcaagctctggcttgtgtcccttgcggataacagaaaagatcagagctggaacgattccgggtgcaatccgacggaaatgaacaaggcctaatgttgtacgtgtactgtggcatggcagaaccgtccggtttaacccaatttcgggcacacctgccagctatttatcactaagtgcaccagagattatatcaaatccgatagtctgttaagcccatccaatgaaag

SEQ ID NO: 10492 - DNA, 1287 bp, Zea Mays
cacgaatctcgaggcgagctgttcgatcaccactatctgacgtagcttcttcgctcggctcttcttcaccccacccctctcccactcggccactccccccgcggggacaccgagcgctcgccgccgccttcgagttcggagcggagccacagccacgcatgccaatggccgtctccgctgttaccgcctcccatctcgctctctcttttccagcacgtagtcgccggagacgcgctgcgccccgcgccgcggcaggcggcctaacggctcgcgcacggcggctgcgctgcgagttcgtcgccggtggtgggaacggggcgctctccggagaggacgaccctcgcctcgtcgaccgccaaaaagttcttgatgccgctatgaatgacataaacaactcttttggaaaaggaagtgttacaagattaggcagtgctggtggtgcttttgtgtattgagacattcccaagtggttgtctaacactagattttgctctgggtggcggtcttccaaaaggaagagtagtggaggtatatggtccagaaagcagtggaaagactaccctagctttgcatgcaattgctgaaatacagaagcttggaggaaatgccatgcttgtcgatgcagagcatgcttttgatccagcttattcaaaagctcttggggtagatattgaaaatctgattgtctgccagcctgacaacggagagatggcactagaaattgcggaccgtatgtgcagatctggagcaatagatcttatctgtattgattcggtgtcagcgctcaccccacgtgcagaaattgaaggtgagataggaatgcagcagatgggtctacaagctcgtctgatgagtcaagcattgagaaaaatgtcaggcaatgcctcaaaggctggctgtactcttatgttcttgaatcaaataagatacaagattggagtgttctatgggaatcctgaagtcactagtggagggatagccttgaaattctttgcatctgccaagggagatgaagatgttggtgtgaaggttcgtgtcagagtgcagaagagtaaagtatctaggccctacaagcaagctgaatttgaaatcatttttggggagggtgttagtaaattggggtgcgttcttgattgtgctgagctgatggatgtagttgcaaagaagggttcgtggtacagctacaaagatataagattgggccaaggcagagagaaggcactgcagtatctccgagagagcccaaccacctgcgatgagatagaaaaggcatgccatggatttttt

SEQ ID NO: 10493 - DNA, 2357 bp, Zea Mays
cctcacttccccgtcgcgctgtctacctctctctctctctcatcacagcacagctccagctctaggctgtagagggtggaagaagcgaggtcgagtcacagaggcctgcagcaaccgtctgcgctgagcatcgaggccgcgctctgcagtctgctgtctgctctccctcgataagccgggttccaagctagctctgcagagtgtgagctctgactgaacacgaagtgattggcggcttctcatcgatcgatggttgtgttgtgctggccatctgagcgatgaaccagttcgtccctgattggagcaacatgggagacacctccaggccgctcggcgaagaagacgacctcatcgagctgctatggtgcaacggccatgtcgtcatgcagagccagagccaccggaaggtgccgccgaggccggagaaggcggcggcagtggcggctccaccagcccccgcgtccgtgccgcaggaagacgagggcggcctgtggttccccttcgcgctggccgactcgctggacaaggacatcttctcggagttcttctgcgaggcaccgacgccggcaccggcggcggcggatgcggcgccggcggcctctggtggtggaaccggcaccgaagccggcggcaagtcgtgcggcggggacgtcccagtcccagcagaggacgacaggcgcggcggcggcggggcgtgcgcggtgtcggcgggggacccgtgcgacctgatgccgcctcccaagtcgacgcccgcgtcctgctccaggcagcagacgacgatgagcctggccaacggcggcgacaatgccggaggggacctgccgggcctcgtccgtgcgggggcggaggccggcgcgtcgtcgatgctgagcgcgatcgggtccagcatctgcgggagcaaccaggtcctggtgcagcgcgcggcgtgcgcgccggggcgcgcgtccgcgtccggctccggaaccgcccgcggcgacgggtccgggtccgccgcgctgccgtcggcggtgggcagcgcgaacgcgaacgccgtgggcggcggcaggggccacgaggcgtcctcgtcggggcggtccaactactgctgcttcggcgccgccaccaccacaaccacaaccaccaccacggagcccgcgagcaccagcaaccggagcagcaagcgcaagcggctcgacaccgaggactcggagagtcccagcgaggacgcggagtcggggtccgccgcgatgttggcgcgcaagccgccgcagaagatgacgacggcgcggaggagccgcgccgccgaagtgcacaacctgtcggagcggaggagacgagacaggataaacgagaagatgagagccctgcaagagctcatacctcactgcaacaagacggacaaggcgtcaatgcttgacgaggcgatcgagtacctcaagtcgctgcagctgcaagtgcagatgatgtggatgggcagcgccggcatcgcggcgccgccggcggtgatgttccccggcgtacaccagtacctgcctcggatgggcgtcgggatgggcgcggcagcggcggcggcgctgccgtccatgccgcggctgccgttcatggccccgcaaccggtggtgcccagcgcgccggtgagcgtgggcccggtgccggcctaccggggccacatgcccgcggtgggcatcacggagccgtacgggcactacatcggcgtcaaccacctgcagccggcgccgccgccaccgcaggtccagcactacgcgcagggcgtgagctactacccgccgccgctgggggcgacggcgaaggccgtgcagcaggctgcagagcttcaccacgtgccggggcccggcggcagcatcatgcccgccggcgccgcacccggagtgctgctcccggagagcgcgcaaggcagagggccagggtgactaacgaccaaaaaggacgtatcacatggctgggccgatgtttaatctgacaagtatggaagaaaagaaaagaaaatggactgcacagaaggcaaagacgatgaaataacagggggagcatttttctttagcagccccatttattagggatgtgcaaagatttagcaagggattgatctcttaacagattgtacttagcaattagcatgaccttttttagttggaaacatgctagctatagtttttaaggaatgtttagatccaccctactaaagttttagtccctgtcacatcgaatgtttgaatgataatttaattacgagtattaattatagtctaggcagctactactattgtccaggtatcacacgcttctcccaacctcagaaaggactccaagcagagctactgagtgtttcttcaaagtacagtcacatggatggtgac

SEQ ID NO: 10494 - DNA, 2504 bp, Zea Mays
cacaccgtagcatcagcccatctcgctcccgctttcccatcgctctcgcgcgtccctgtccgcgggaatccacctcagtccagccacaccgcaatgctgctgcgtctgcctctgcgtgctcaacacctccgctgcataaaagcaaccctcccttctctccctcacttccccgtcgcgctgtctacctctctctctctctcatcacagcacagctccagctctaggctgtagagggtggaagaagcgaggtcgagtcacagaggcctgcagcaaccgtctgcgctgagcatcgaggccgcgctctgcagtctgctgtctgctctccctcgataagccgggttccaagctagctctgcagagtgtgagctctgactgaacacgaagtgattggcggcttctcatcgatcgatggttgtgttgtgctggccatctgagcgatgaaccagttcgtccctgattggagcaacatgggagacacctccaggccgctcggcgaagaagacgacctcatcgagctgctatggtgcaacggccatgtcgtcatgcagagccagagccaccggaaggtgccgccgaggccggagaaggcggcggcagtggcggctccaccagcccccgcgtccgtgccgcaggaagacgagggcggcctgtggttccccttcgcgctggccgactcgctggacaaggacatcttctcggagttcttctgcgaggcaccgacgccggcaccggcggcggcggatgcggcgccggcggcctctggtggtggaaccggcaccgaagccggcggcaagtcgtgcggcggggacgtcccagtcccagcagaggacgacaggcgcggcggcggcggggcgtgcgcggtgtcggcgggggacccgtgcgacctgatgccgcctcccaagtcgacgcccgcgtcctgctccaggcagcagacgacgatgagcctggccaacggcggcgacaatgccggaggggacctgccgggcctcgtccgtgcgggggcggaggccggcgcgtcgtcgatgctgagcgcgatcgggtccagcatctgcgggagcaaccaggtcctggtgcagcgcgcggcgtgcgcgccggggcgcgcgtccgcgtccggctccggaaccgcccgcggcgacgggtccgggtccgccgcgctgccgtcggcggtgggcagcgcgaacgcgaacgccgtgggcggcggcaggggccacgaggcgtcctcgtcggggcggtccaactactgctgcttcggcgccgccaccaccacaaccacaaccaccaccacggagcccgcgagcaccagcaaccggagcagcaagcgcaagcggctcgacaccgaggactcggagagtcccagcgaggacgcggagtcggggtccgccgcgatgttggcgcgcaagccgccgcagaagatgacgacggcgcggaggagccgcgccgccgaagtgcacaacctgtcggagcggaggagacgagacaggataaacgagaagatgagagccctgcaagagctcatacctcactgcaacaagacggacaaggcgtcaatgcttgacgaggcgatcgagtacctcaagtcgctgcagctgcaagtgcagatgatgtggatgggcagcgccggcatcgcggcgccgccggcggtgatgttccccggcgtacaccagtacctgcctcggatgggcgtcgggatgggcgcggcagcggcggcggcgctgccgtccatgccgcggctgccgttcatggccccgcaaccggtggtgcccagcgcgccggtgagcgtgggcccggtgccggcctaccggggccacatgcccgcggtgggcatcacggagccgtacgggcactacatcggcgtcaaccacctgcagccggcgccgccgccaccgcaggtccagggcgtgagctactacccgccgccgctgggggcgacggcgaaggccgtgcagcaggctgcagagcttcaccacgtgccggggcccggcggcagcatcatgcccgccggcgccgcacccggagtgctgctcccggagagcgcgcaaggcagagggccagggtgactaacgaccaaaaaggacgtatcacatggctgggccgatgtttaatctgacaagtatggaagaaaagaaaagaaaatggactgcacagaaggcaaagacgatgaaataacagggggagcatttttctttagcagccccatttattagggatgtgcaaagatttagcaagggattgatctcttaacagattgtacttagcaattagcatgaccttttttagttggaaacatgctagctatagtttttaaggaatgtttagatccaccctactaaagttttagtccctgtcacatcgaatgtttgaatgataatttaattacgagtattaattatagtctaggcagctactactattgtccaggtatcacacgcttctcccaacctcagaaaggactccaagcagagctactgagtgtttcttcaaagtacagtcacatggatggtgac

SEQ ID NO: 10495 - DNA, 2978 bp, Zea Mays
gtcgcgctgtctacctctctctctctctcatcacagcacagctccagctctaggctgtagagggtggaagaagcgaggtcgagtcacagaggcctgcagcaaccgtctgcgctgagcatcgaggccgcgctctgcagtctgctgtctgctctccctcgataagccgggttccaagctagctctgcagagtgtgagctctgactgaacacgaagtgattggcggcttctcatcgatcgatggttgtgttgtgctggccatctgagcgatgaaccagttcgtccctgattggagcaacatgggagacacctccaggccgctcggcgaagaagacgacctcatcgagctgctatggtgcaacggccatgtcgtcatgcagagccagagccaccggaaggtgccgccgaggccggagaaggcggcggcagtggcggctccaccagcccccgcgtccgtgccgcaggaagacgagggcggcctgtggttccccttcgcgctggccgactcgctggacaaggacatcttctcggagttcttctgcgaggcaccgacgccggcaccggcggcggcggatgcggcgccggcggcctctggtggtggaaccggcaccgaagccggcggcaagtcgtgcggcggggacgtcccagtcccagcagaggacgacaggcgcggcggcggcggggcgtgcgcggtgtcggcgggggacccgtgcgacctgatgccgcctcccaagtcgacgcccgcgtcctgctccaggcagcagacgacgatgagcctggccaacggcggcgacaatgccggaggggacctgccgggcctcgtccgtgcgggggcggaggccggcgcgtcgtcgatgctgagcgcgatcgggtccagcatctgcgggagcaaccaggtcctggtgcagcgcgcggcgtgcgcgccggggcgcgcgtccgcgtccggctccggaaccgcccgcggcgacgggtccgggtccgccgcgctgccgtcggcggtgggcagcgcgaacgcgaacgccgtgggcggcggcaggggccacgaggcgtcctcgtcggggcggtccaactactgctgcttcggcgccgccaccaccacaaccacaaccaccaccacggagcccgcgagcaccagcaaccggagcagcaagcgcaagcggctcgacaccgaggactcggagagtcccagcgaggacgcggagtcggggtccgccgcgatgttggcgcgcaagccgccgcagaagatgacgacggcgcggaggagccgcgccgccgaagtgcacaacctgtcggagcggaggagacgagacaggataaacgagaagatgagagccctgcaagagctcatacctcactgcaacaagacggacaaggcgtcaatgcttgacgaggcgatcgagtacctcaagtcgctgcagctgcaagtgcagatgatgtggatgggcagcgccggcatcgcggcgccgccggcggtgatgttccccggcgtacaccagtacctgcctcggatgggcgtcgggatgggcgcggcagcggcggcggcgctgccgtccatgccgcggctgccgttcatggccccgcaaccggtggtgcccagcgcgccggtgagcgtgggcccggtgccggcctaccggggccacatgcccgcggtgggcatcacggagccgtacgggcactacatcggcgtcaaccacctgcagccggcgccgccgccaccgcaggtccagggcgtgagctactacccgccgccgctgggggcgacggcgaaggccgtgcagcaggctgcagagcttcaccacgtgccggggcccggcggcagcatcatgcccgccggcgccgcacccggagtgctgctcccggagagcgcgcaaggcagagggccaggtacggtgccatgcgctccgcccttctcatcctccgcttcagtttttgggctacaaatgggagcactacgatgagatgacaactgcggccctgtacaagaatctactgttcgcttcagtttctacgggtttgcatctcgatcgacgagttcggttcttgccgaataaagttgggtagcgtgtaaagcgaggggacaagtacgatacggtttgactgtttcaagccttccatcacttaccatcggcatctctgctgtcaacgaaatcggaggagttagagctggattacgtgcctcaaggtttgccacatgggccacatttagtgctagatcgttttgggggacccatgcgctagtaaagaatccttttatttttgtgcctcctcacggtctaaacgatcttataaaccaggggaaatattcaaaacttataaatttttatcaataattagtgaaattgttagagcatagaacttatatcaataggtttgtgttaaaaataactctaaaatggtattgattttttatcctctggctttatattataaaataaaataatgattaaaaaatagtttacatgacttttctttctctagtttaatatcattactatttttagatggagggtagatgggagtggctttttgtttgtagctcaagctccttagctctatgatacactaacttttgtgaggaacacatggaaattgataagagtgattatgactggaattgaatagaaagcagtgagaaacatatttttagctcctatatcttccagtttatatggtgaagtacttcttgactaatccacactaacatatatgtgcaattgctgtttggctagccggaaatgatttttaatcgataatccgctccatggagcgctaccaagtggcctctaattcttagctcctgctccttaatctctgatggagtgattctagttagagagagattaataaggtgggacagtacgtgtggaaagcgatttaggtgacatttgtaactggagtagtgaaaaggagttatttctcctaggttctagtgtaaataaagaagtattttattttgtcaattccttgaaaaaatatgtgaa

SEQ ID NO: 10496 - DNA, 3919 bp, Zea Mays
gcaccctaaaaaatctcggtagataattgttggaaatagtagggtagcctataaagcgtagagatttgaatccagcctgaagcatagccgcgttgccgtgcgttagaggcggcggtgagtaggcaagcgatactagctaggagaggagactgcaggcaccggcggcgcgggtgatctctcacggcatcgccggagcagatggacgcttcagatagccccccatccgggcgaccgtcatcctccgccgtcgcgctctacggggactctcctatcttcgatttcgttgatagtctatctcccatagcaccaccgaagcctttaggttcaacacaaagtgtccagctattcaagtcatcaaacttagcacctgtttcttcaattttcacctcgccccaagttaatccacgaaaggaatctaaatccacaatcagctgcattgaactgtctggatccgcagcacttgctccagaaacttgtactccttttgaggatgcaacaaattcaccaagcaaatggcttcagtccaccttatttggtagtgaaactttaggagatgccaataaacaagatattgatggcaaaccaaatcatactgcagatgtggaacatgtaaagccatcaagcacatgctctgatcagaatggctttgaccaaatggactcatcgacttctggaagaaatgttcaggagaatgagctggccaaacaggatagcaatgatctagcaccatgcagtttaaatcacttgatcacacattgtggtactggtaatagtgtcatatcaatatcagatctggccttagaagcacagcaacagagttggaaggtaaaaggtgatagtatcatatctagcacatccttggcagtggatcaagaaaatttggaggattcacgaagagaagattttgttgagcaatttggttcttatatccagagtgctgctgatggcactcatgtttactatgctgatgctgcagcaggtgttacaataaatcatgaccaagaaatgctccctgctattattcgaaaccagttggattcaaatgactatattttggacacatccaaagtttccattgatggcacggccttatcacagcatcaatatggtacgcataggtgcagcctttttaatgacaagtcagggacatctaataagagtatgcaaaatatctcagatattaatcctgcgagtatatgtggcaacaactatctgaatcctgtagatcctgctctgtgtgcattgcctggtattggtttgcatctgaataccgttgccttgaatttatcagacatgccactcacaattaatcatccactgttatctgaacaaactagtccagcaacagtaattcctggcagtgagaccgttctttatggcagtgaggtgttcactcatgttgacaattactcttctcagaaaaccatgcctaatgctgacaagtctggccaacaaattcacaagaagaaaaggcgcaaattacaaaaagatgatggtgaatcttgcagacattgtaactgtagaaggtcaaaatgcttaaaactttattgtccatgtttcgctgcaaaagtctattgttcaagcttgtgctcatgtcaaggctgttccaataatcatgcacatgaggaactagtttcttgtactcgcaagcggactgaatctcataatcctctagcatttgctccaacagtcactcatacatatgggactgttttagaatttggggatgattctaacaaaactcctgcttctgctcgacataaaagaggatgcaattgcaggaagtcttcttgtcttaaaaaatactgcgagtgctttcagagtggtgtagggtgctgcataagttgccgatgcatgagttgtaagaactcttttggaaaaagagagggtgtgctgttgttaactactgaaaaactggagaaagggggcaaagcaaaaggcactcatggggaggaagacaaacttgcgtttggcaaacaccatgtggttagccaatctggtgatattccagcgtatgagaatccactcgtgacacctctgcttgagacttacagatctcccttcctgcttccatctacatgctccaaactgccaccgccaactgctgggtgctcttatggactgcacaaccctcggcctcccatgaaatcggatgttttgttctcacctctcgaagatgttttgcacaaccctgctgagatggttctcgggaatggtttttcagatacccaggaagtgggttcatcttgcaccaccagcgtcaaggttgtttcaccgaacaagaagagggttgcctccctgcagattggtacggcattgtccccaatcggcagcagcagcagaaaactggttttgaagtccttcccttccctaactggtgatgctgatagtgagccccactaaacagagttcatcagcatatgacaactgagtcgacagctgatcccttctggtacccctggaccctggttttgacaaagagttgaaagaacttgtttcagcacctctaccatttagaaatatagttgcgctatcttgacaggccgataacaattctgctaaatgtgtttgacctgtcgccgcctaaggcacatggtttcagaaacatgcttgaatcacattccacatggtttcagaaactgcactcaagacgaggacattattaattctaggggtaaatacaaggatcaagataaacaaagataaggacaactacatctccataatcacgtagaggagggttctcaatgtgttcattggtagctttgatcttctcttcgttcatcattgatgggaaattatatggacgtgaaacccaccgcttgaagcactcgagtggtcgtctttctctgcactagccattgaaaagtaagtaccttgcatccaacttttcaagaccatccatgctctacaaaaaggcacctctcatggtcctaaataggtcgatgacatcaacttatcagtaatttaataacatatatcaagaaaaaactaaataaaataagtaatttaataacatatataaacaaaaactaaataaaataattacttacattaaaacgacgacatatgtagaaccaacaagcgcctatgtctggatgccttgattgagactgaaaggaatgatgacacctaagaagggggctaatttaggtgacctaatttcttctctaaactaatgcctctatttttctcctagtcaaaacctatacaataaacaaactatcttatgtgtaactatgattttgactaagtgttgttatctctactgcagagagttatagaacgtaggttccaatcctattcattagcctataactaagctaggatggtaaagcatacaattaaggtaacataatataatcgtggaagcttaagtgtgatagagataaaaacttacgttgacgtgcatgtatttttactaaggcattgataagcatggaaactcctccctaatgctcgttggagccccatgtaaggaaaacccatgcaagagccaagctcctggccaagtaactctgtgtatagtcctagtctttctccacgcacaagttgtgctttgtttgtgacctctcttgaataccctcgtcgtctccaccattaaattttggtctaaacgacacgagcctcatcccctcacgtacatagtggtgtccataccacaaacttagttagtgtgatctgataagacttatagtccctctcggtacaaccaatataatagtgcgtgcaagcgccaagggataagatgtgtgtttagcctcatttctaattgttaggcctaaacctagagcaagcgctaatcatagtagtctaactaagctaaacactttacaaagcacctacactaatctctaagtgattccttaagcacctgagtgtctacatctattttgtttgagtctcaactcaatgtcta

SEQ ID NO: 10497 - DNA, 2444 bp, Zea Mays
gttagaggcggcggtgagtaggcaagcgatactagctaggagaggagactgcaggcaccggcggcgcgggtgatctctcacggcatcgccggagcagatggacgcttcagatagccccccatccgggcgaccgtcatcctccgccgtcgcgctctacggggactctcctatcttcgatttcgttgatagtctatctcccatagcaccaccgaagcctttaggttcaacacaaagtgtccagctattcaagtcatcaaacttagcacctgtttcttcaattttcacctcgccccaagttaatccacgaaaggaatctaaatccacaatcaggtaaatcttctattattgtttctgatatatgtgtttttgtcatttaaacttaatacagtctttacatgatggggatttctagctgcattgaactgtctggatccgcagcacttgctccagaaacttgtactccttttgaggatgcaacaaattcaccaagcaaatggcttcagtccaccttatttggtagtgaaactttaggagatgccaataaacaagatattgatggcaaaccaaatcatactgcagatgtggaacatgtaaagccatcaagcacatgctctgatcagaatggctttgaccaaatggactcatcgacttctggaagaaatgttcaggagaatgagctggccaaacaggatagcaatgatctagcaccatgcagtttaaatcacttgatcacacattgtggtactggtaatagtgtcatatcaatatcagatctggccttagaagcacagcaacagagttggaaggtaaaaggtgatagtatcatatctagcacatccttggcagtggatcaagaaaatttggaggattcacgaagagaagattttgttgagcaatttggttcttatatccagagtgctgctgatggcactcatgtttactatgctgatgctgcagcaggtgttacaataaatcatgaccaagaaatgctccctgctattattcgaaaccagttggattcaaatgactatattttggacacatccaaagtttccattgatggcacggccttatcacagcatcaatatggtacgcataggtgcagcctttttaatgacaagtcagggacatctaataagagtatgcaaaatatctcagatattaatcctgcgagtatatgtggcaacaactatctgaatcctgtagatcctgctctgtgtgcattgcctggtattggtttgcatctgaataccgttgccttgaatttatcagacatgccactcacaattaatcatccactgttatctgaacaaactagtccagcaacagtaattcctggcagtgagaccgttctttatggcagtgaggtgttcactcatgttgacaattactcttctcagaaaaccatgcctaatgctgacaagtctggccaacaaattcacaagaagaaaaggcgcaaattacaaaaagatgatggtgaatcttgcagacattgtaactgtagaaggtcaaaatgcttaaaactttattgtccatgtttcgctgcaaaagtctattgttcaagcttgtgctcatgtcaaggctgttccaataatcatgcacatgaggaactagtttcttgtactcgcaagcggactgaatctcataatcctctagcatttgctccaacagtcactcatacatatgggactgttttagaatttggggatgattctaacaaaactcctgcttctgctcgacataaaagaggatgcaattgcaggaagtcttcttgtcttaaaaaatactgcgagtgctttcaggtgtgctgttgttaactactgaaaaactggagaaagggggcaaagcaaaaggcactcatggggaggaagacaaacttgcgtttggcaaacaccatgtggttagccaatctggtgatattccagcgtatgagaatccactcgtgacacctctgcttgagacttacagatctcccttcctgcttccatctacatgctccaaactgccaccgccaactgctgggtgctcttatggactgcacaaccctcggcctcccatgaaatcggatgttttgttctcacctctcgaagatgttttgcacaaccctgctgagatggttctcgggaatggtttttcagatacccaggaagtgggttcatcttgcaccaccagcgtcaaggttgtttcaccgaacaagaagagggttgcctccctgcagattggtacggcattgtccccaatcggcagcagcagcagaaaactggttttgaagtccttcccttccctaactggtgatgctgatagtgagccccactaaacagagttcatcagcatatgacaactgagtcgacagctgatcccttctggtacccctggaccctggttttgacaaagagttgaaagaacttgtttcagcacctctaccatttagaaatatagttgcg

SEQ ID NO: 10498 - DNA, 1773 bp, Zea Mays
gttagaggcggcggtgagtaggcaagcgatactagctaggagaggagactgcaggcaccggcggcgcgggtgatctctcacggcatcgccggagcagatggacgcttcagatagccccccatccgggcgaccgtcatcctccgccgtcgcgctctacggggactctcctatcttcgatttcgttgatagtctatctcccatagcaccaccgaagcctttaggttcaacacaaagtgtccagctattcaagtcatcaaacttagcacctgtttcttcaattttcacctcgccccaagttaatccacgaaaggaatctaaatccacaatcagctgcattgaactgtctggatccgcagcacttgctccagaaacttgtactccttttgaggatgcaacaaattcaccaagcaaatggcttcagtccaccttatttggtagtgaaactttaggagatgccaataaacaagatattgatggcaaaccaaatcatactgcagatgtggaacatgtaaagccatcaagcacatgctctgatcagaatggctttgaccaaatggactcatcgacttctggaagaaatgttcaggagaatgagctggccaaacaggatagcaatgatctagcaccatgcagtttaaatcacttgatcacacattgtggtactggtaatagtgtcatatcaatatcagatctggccttagaagcacagcaacagagttggaaggtaaaaggtgatagtatcatatctagcacatccttggcagtggatcaagaaaatttggaggattcacgaagagaagattttgttgagcaatttggttcttatatccagagtgctgctgatggcactcatgtttactatgctgatgctgcagcaggtgttacaataaatcatgaccaagaaatgctccctgctattattcgaaaccagttggattcaaatgactatattttggacacatccaaagtttccattgatggcacggccttatcacagcatcaatatggtacgcataggtgcagcctttttaatgacaagtcagggacatctaataagagtatgcaaaatatctcagatattaatcctgcgagtatatgtggcaacaactatctgaatcctgtagatcctgctctgtgtgcattgcctggtattggtttgcatctgaataccgttgccttgaatttatcagacatgccactcacaattaatcatccactgttatctgaacaaactagtccagcaacagtaattcctggcagtgagaccgttctttatggcagtgaggtgttcactcatgttgacaattactcttctcagaaaaccatgcctaatgctgacaagtctggccaacaaattcacaagaagaaaaggcgcaaattacaaaaagatgatggtgaatcttgcagacattgtaactgtagaaggtcaaaatgcttaaaactttattgtccatgtttcgctgcaaaagtctattgttcaagcttgtgctcatgtcaaggctgttccaataatcatgcacatgaggaactagtttcttgtactcgcaagcggactgaatctcataatcctctagcatttgctccaacagtcactcatacatatgggactgttttagaatttggggatgattctaacaaaactcctgcttctgctcgacataaaagaggatgcaattgcaggaagtcttcttgtcttaaaaaatactgcgagtgctttcagggaacggatgttatgtagctgctactatatgtggatgacattgtccatatggc

SEQ ID NO: 10499 - DNA, 563 bp, Zea Mays
caatttggcactgtttcgtcggtgcagctgctagggcacctgccaaactcagaaggagcgacaagttcttgcacgcagatcgattgcgggaattctcctactggagaataatctctgcggctctgcctggccgagcgatcgatggaccgtctgtctgcgtctgcgtccggcggggccgatgagccgtcgccattgggggcagaccgaccaaccaaccaactcacacgtcttgcccgtccggtgatagatcccctgctgttgctgcgccaccgctctctccggccgcttccacgagctagagtcgatctgcacgcggtcggctccatggcatgggagggtgagtgttgagctgtgcaggtgagagagagcgaggtgtcattcgtcgtgtcatctacgagcagcccagtgggcgcgcgctaggcagtcagccgaaagatgagaccaaatccataaaaaaaatcgcgagaggattgatggatgcaaagatgatattatagaatttcgaggagatgaacttgttgtttcctaagggtaaatccatttatccgtctcttccctagctt

SEQ ID NO: 10500 - DNA, 2495 bp, Zea Mays
ctcctgtccacgccagggagtatctcttttcagggtctccagatcgggccctttggcggccgcccgcgccaacgctgttgccgcttgtccacggcagtcagggcggagcgataggatttgttcgcaattacctgcagctgcatttgtgtcattttctgattttggctttccaatgacatttccttcttttattgttttgttgtcaaccctagccaaaggacagtcaatacataacgttagatgatggccggagactctgcttggagtgtctgcatattgctattatggagaccaatgaatgtcagccactgtacattgatattcaagaattttatgagggtatgaacatgaaagtagagcaacaagctcccttgcttttggttgagcgacaagctttaaatgaagccatggaagcagagaaatctgtgcaccaccttcctgaaacaagaggcctctgcctatctgaggagcagattgtcagaactatattgaaatgaccaattggaccaggcaacaggcaacaggcaacagaatcatagatatgatcacaggaccatacaaactcattaaacggtgtgaagtgactgcaattcttatactgttgattctactaccaatcttgttgccgcttgtccacgacagtcagggcggagcgataggatttgttcacaattacctgactgtggcctcgtccacagctcctgtgaagccatccgtggacaagactgtatattggagatatatcctcgccagtccaaagggtgttccttttctgaatttattacgccacgaccttatcaggcacaatctgtggcattgataggcacgccagctgttcgagggcaagtaccaaggcaacatccacgtcgattggttcagtttgacgataaaagaacattcattggacaaactttgctccacatattcaaacttctatagcataattaggaaacatcaactaatttcatatatctctagttctctattggtttgttccagtttgtctttgagatagctgaacattctccgttactatgatgattctctttttgtattttttggcctggtacctagccatttacactattgtgatattgacaatcccacgtatttttttgtcttgtttccataacacaattcgggttttcaattattcctactcagtacgtcaccgtctcaatatgtgaaaaaagaaaggaagactttttacacgatcattttcgttttggtatttttccccatttgaggctgctgcatagtacatattaggagactctttacacacgttgtcacttgggcacatctgtacatgtctcttttttacaaagggaagatgtgttttttataaattgcaattttgataggtagacaaccgaatctgtggcgtaatggtagcgcgtctgactctagatcagaaggttgagtgtatgattcacgtcgggttcaaaacgctgatcctaatccggcatacttttgtcttgagattttttatattattgtttaatagaaccatgtatttttagaaagttctccatataataaagtaagtaattctcttgttggttgcagttggaccaacgtctctagctctcggcatcagaagcaaaaatccagattttctcatctagctagaagctaatgtgtgtgatttttcaagtgctttaaccaaccttttcttatggtgacatataaaccaagagttagtggtcattaataattcatggtctattgtgctggaatgttctaaatcttagaatctgagtgatcccaacaagcttgttacccccaatactcctgctccatatatttgattactcaaaacatgatatgctcatctgaagtagaaagggaaatgctgactatgctcttgctgaatattttataggacacttttctagtttggcagatgcgagtggaggatttgatgagatgcttgcctctacacagaggtactatgtctttggaggcaaaggtggtggggaaacaagcatggcgccgtcggtgaagtttgccaaccatgatgaactaacacttcttgcttccacagaaccatcttggtcactacgacatgagtgatggcaaaactgtatgtcgctggatttgactctctttttgcaattgaggatgctgacgagctttcagaccaccttaacaaaaaagttctggcatcaccatctaagaaaacacatacatgatcaaagctagcatgcttcaaaaacatcaagcaggttctacagacccgaaaagcgatgacaggcacatgggcgtcattctcctgaagataactgctttgtgtatctacgacgatcatcgtcacttttgaaacgcaatgtacatgtaaccaaactgatgaaactactctaggttagtatctgtttatgcgatcattggctctgctttgcgtacctctgacgaccatcgtcacttttgcgcacatgcttttgtgtatatataactaagctgatgaaatcttaccagtttagcatctgtttatt

SEQ ID NO: 10501 - DNA, 2468 bp, Zea Mays
ctcctgtccacgccagggagtatctcttttcagggtctccagatcgggccctttggcggccgcccgcgccaacgctgttgccgcttgtccacggcagtcagggcggagcgataggatttgttcgcaattacctgcagctgcatttgtgtcattttctgattttggctttccaatgacatttccttcttttattgttttgttgtcaaccctagccaaaggacagtcaatacataacgttagatgatggccggagactctgcttggagtgtctgcatattgctattatggagaccaatgaatgtcagccactgtacattgatattcaagaattttatgagggtatgaacatgaaagtagagcaacaagctcccttgcttttggttgagcgacaagctttaaatgaagccatggaagcagagaaatctgtgcaccaccttcctgaaacaagaggcctctgcctatctgaggagcagattgtcagaactatattgaaatgaccaattggaccaggcaacaggcaacaggcaacagaatcatagatatgatcacaggaccatacaaactcattaaacggtgtgaagtgactgcaattcttatactgtacgggctgccaagtcagggcggagcgataggatttgttcacaattacctgactgtggcctcgtccacagctcctgtgaagccatccgtggacaagactgtatattggagatatatcctcgccagtccaaagggtgttccttttctgaatttattacgccacgaccttatcaggcacaatctgtggcattgataggcacgccagctgttcgagggcaagtaccaaggcaacatccacgtcgattggttcagtttgacgataaaagaacattcattggacaaactttgctccacatattcaaacttctatagcataattaggaaacatcaactaatttcatatatctctagttctctattggtttgttccagtttgtctttgagatagctgaacattctccgttactatgatgattctctttttgtattttttggcctggtacctagccatttacactattgtgatattgacaatcccacgtatttttttgtcttgtttccataacacaattcgggttttcaattattcctactcagtacgtcaccgtctcaatatgtgaaaaaagaaaggaagactttttacacgatcattttcgttttggtatttttccccatttgaggctgctgcatagtacatattaggagactctttacacacgttgtcacttgggcacatctgtacatgtctcttttttacaaagggaagatgtgttttttataaattgcaattttgataggtagacaaccgaatctgtggcgtaatggtagcgcgtctgactctagatcagaaggttgagtgtatgattcacgtcgggttcaaaacgctgatcctaatccggcatacttttgtcttgagattttttatattattgtttaatagaaccatgtatttttagaaagttctccatataataaagtaagtaattctcttgttggttgcagttggaccaacgtctctagctctcggcatcagaagcaaaaatccagattttctcatctagctagaagctaatgtgtgtgatttttcaagtgctttaaccaaccttttcttatggtgacatataaaccaagagttagtggtcattaataattcatggtctattgtgctggaatgttctaaatcttagaatctgagtgatcccaacaagcttgttacccccaatactcctgctccatatatttgattactcaaaacatgatatgctcatctgaagtagaaagggaaatgctgactatgctcttgctgaatattttataggacacttttctagtttggcagatgcgagtggaggatttgatgagatgcttgcctctacacagaggtactatgtctttggaggcaaaggtggtggggaaacaagcatggcgccgtcggtgaagtttgccaaccatgatgaactaacacttcttgcttccacagaaccatcttggtcactacgacatgagtgatggcaaaactgtatgtcgctggatttgactctctttttgcaattgaggatgctgacgagctttcagaccaccttaacaaaaaagttctggcatcaccatctaagaaaacacatacatgatcaaagctagcatgcttcaaaaacatcaagcaggttctacagacccgaaaagcgatgacaggcacatgggcgtcattctcctgaagataactgctttgtgtatctacgacgatcatcgtcacttttgaaacgcaatgtacatgtaaccaaactgatgaaactactctaggttagtatctgtttatgcgatcattggctctgctttgcgtacctctgacgaccatcgtcacttttgcgcacatgcttttgtgtatatataactaagctgatgaaatcttaccagtttagcatctgtttatt

SEQ ID NO: 10502 - DNA, 1591 bp, Zea Mays
attgtctcgcgaagacacacttgaccaaaagtgatgttgatggcactaccctggcttgtattgcattttcctgcccaagtttaagaactctcgagattaccatggctgctgatgctgtcaacaggatgactggggaggatctaagtcgttttgtttcggagaagtcttctctctcagccctcaaaattggtggttgctctaatttggatattcttaatctgtgctcttcaagcctttcaattctttggttgtcagatctttgttccctttcgaaatcggttatgaactgtcctaatatgagcgagctatcactgtgcttcacagaacatagtagtgattgtaccaatctgattactttgatggatggcctaggtcgtacatgtcctaacttggaaaaaatgcacatatcatcaaaacaattatctaatgaagctgtatgtgctctagagaatgctaatctcaggggactgttcatgctatccctgattctaggttcaaaaataactgatgcagctgttgcatctattgttcggtcatgtgcaagcttggagttacttgatttaagtggatctagcattagtgacaatggtgttgggatgatatgtaaagcataccctcgtactttatcaaggctgctccttgctctttgcccaaatgtgaccacacgtgggatccagctagccacagcacagttgccatgtcttcaactcatggactgtggaatgagcctatgtgctaatgtgaagaatgaaaaagagggtccatattttggtgaaatcaatggaggtattagaattattcgaaaactgtccatcttaaagaggcaacctattcaccaaaagcttattataaagcatgggaatttgaagaagctcagcctgtggggctgttctgcattagatgctctatatctaaattgtccagagttaaatgatctcaatcttaactcttgcacaaatctacatccagaacgtctgcttcttcagtgcccaaatttaaagaatgtctatgcatccggatgccaagatatgttgattggagcaatcagaaatcagttgaaccatctcttccatgcaagcggctagcggatggctccaaacgggttcaactccctcagttcctaaagcagcagccgtcgaaggacaacaaattaattgaattgagccagacccagtgcactgtgcatcttggttcataataacaccaccagagccagttaacggagcattgtacacaccgaattatgtgaatcatgcaccacataacattatcaattcgttgtatacttctgtattgcatcagaacctgtagtgattgttgtataagctgctaattgctgcatggacatgtctgaatccatcatggatttcttgcgaccgttagtctgttctaggaaacattatataggaataattcgtaaccatgacccgtattctctagggaaaaaaaataatgatcctaggtcactcattttggttggtgttattctgttattcttccgcatgagctatctatggactttggttcttcaatctctacttttaaataggccccgtttggatcatttgaagatcatttgaatcgaattcca

SEQ ID NO: 10503 - DNA, 1588 bp, Zea Mays
tatttcattaaaaggagaagagaaacaatgatgttgatggcactaccctggcttgtattgcattttcctgcccaagtttaagaactctcgagattaccatggctgctgatgctgtcaacaggatgactggggaggatctaagtcgttttgtttcggagaagtcttctctctcagccctcaaaattggtggttgctctaatttggatattcttaatctgtgctcttcaagcctttcaattctttggttgtcagatctttgttccctttcgaaatcggttatgaactgtcctaatatgagcgagctatcactgtgcttcacagaacatagtagtgattgtaccaatctgattactttgatggatggcctaggtcgtacatgtcctaacttggaaaaaatgcacatatcatcaaaacaattatctaatgaagctgtatgtgctctagagaatgctaatctcaggggactgttcatgctatccctgattctaggttcaaaaataactgatgcagctgttgcatctattgttcggtcatgtgcaagcttggagttacttgatttaagtggatctagcattagtgacaatggtgttgggatgatatgtaaagcataccctcgtactttatcaaggctgctccttgctctttgcccaaatgtgaccacacgtgggatccagctagccacagcacagttgccatgtcttcaactcatggactgtggaatgagcctatgtgctaatgtgaagaatgaaaaagagggtccatattttggtgaaatcaatggaggtattagaattattcgaaaactgtccatcttaaagaggcaacctattcaccaaaagcttattataaagcatgggaatttgaagaagctcagcctgtggggctgttctgcattagatgctctatatctaaattgtccagagttaaatgatctcaatcttaactcttgcacaaatctacatccagaacgtctgcttcttcagtgcccaaatttaaagaatgtctatgcatccggatgccaagatatgttgattggagcaatcagaaatcagttgaaccatctcttccatgcaagcggctagcggatggctccaaacgggttcaactccctcagttcctaaagcagcagccgtcgaaggacaacaaattaattgaattgagccagacccagtgcactgtgcatcttggttcataataacaccaccagagccagttaacggagcattgtacacaccgaattatgtgaatcatgcaccacataacattatcaattcgttgtatacttctgtattgcatcagaacctgtagtgattgttgtataagctgctaattgctgcatggacatgtctgaatccatcatggatttcttgcgaccgttagtctgttctaggaaacattatataggaataattcgtaaccatgacccgtattctctagggaaaaaaaataatgatcctaggtcactcattttggttggtgttattctgttattcttccgcatgagctatctatggactttggttcttcaatctctacttttaaataggccccgtttggatcatttgaagatcatttgaatcgaattcca

SEQ ID NO: 10504 - DNA, 1723 bp, Zea Mays
caatgctgcagttttgagaaccgcaatcagtactcacaatcaagttggtcagctctcatcaatggccactgattactatccatgatttaggtcatgtgacattatttaattgcagattgcagcgcagagttacatgtggaaaatattaaggagagactttctgtgatgttgatggcactaccctggcttgtattgcattttcctgcccaagtttaagaactctcgagattaccatggctgctgatgctgtcaacaggatgactggggaggatctaagtcgttttgtttcggagaagtcttctctctcagccctcaaaattggtggttgctctaatttggatattcttaatctgtgctcttcaagcctttcaattctttggttgtcagatctttgttccctttcgaaatcggttatgaactgtcctaatatgagcgagctatcactgtgcttcacagaacatagtagtgattgtaccaatctgattactttgatggatggcctaggtcgtacatgtcctaacttggaaaaaatgcacatatcatcaaaacaattatctaatgaagctgtatgtgctctagagaatgctaatctcaggggactgttcatgctatccctgattctaggttcaaaaataactgatgcagctgttgcatctattgttcggtcatgtgcaagcttggagttacttgatttaagtggatctagcattagtgacaatggtgttgggatgatatgtaaagcataccctcgtactttatcaaggctgctccttgctctttgcccaaatgtgaccacacgtgggatccagctagccacagcacagttgccatgtcttcaactcatggactgtggaatgagcctatgtgctaatgtgaagaatgaaaaagagggtccatattttggtgaaatcaatggaggtattagaattattcgaaaactgtccatcttaaagaggcaacctattcaccaaaagcttattataaagcatgggaatttgaagaagctcagcctgtggggctgttctgcattagatgctctatatctaaattgtccagagttaaatgatctcaatcttaactcttgcacaaatctacatccagaacgtctgcttcttcagtgcccaaatttaaagaatgtctatgcatccggatgccaagatatgttgattggagcaatcagaaatcagttgaaccatctcttccatgcaagcggctagcggatggctccaaacgggttcaactccctcagttcctaaagcagcagccgtcgaaggacaacaaattaattgaattgagccagacccagtgcactgtgcatcttggttcataataacaccaccagagccagttaacggagcattgtacacaccgaattatgtgaatcatgcaccacataacattatcaattcgttgtatacttctgtattgcatcagaacctgtagtgattgttgtataagctgctaattgctgcatggacatgtctgaatccatcatggatttcttgcgaccgttagtctgttctaggaaacattatataggaataattcgtaaccatgacccgtattctctagggaaaaaaaataatgatcctaggtcactcattttggttggtgttattctgttattcttccgcatgagctatctatggactttggttcttcaatctctacttttaaataggccccgtttggatcatttgaagatcatttgaatcgaattcca

SEQ ID NO: 10505 - DNA, 2262 bp, Zea Mays
atccatccatcctcctcgcggctcgcgccccgaaaaatggcgccaacccctccccagtctcccgcgcggcgctgccccagctatttccccctcccctgaattgaccccagccgcgcctcccaaaccctaacctaacccccgccccctgggccccggccatggcgtcactgcccaagccgccgccgccgccacgccccaagacgcggggcaactacaactgcggccgctgcggccagcccaagaagggccacgtctgcgtcggccccggccccggccccggcggcgctgcgtcgccctcctcctcgtccggggccggaggggagcacgggctgcgccgcgccctctccttcgacgaggccggcacgccgtcctcgccggagaagaagcccaaggtggaggacgtcgacgaggcggagctggacgaggaggccacggtggacgtgggcgcccgcgcggtgtccagggaggtcatggcggaggttctgcaccgcctcggtccccgcggggtcatggccgccgccggggtcagccgaggctggcgggactgcgcgggccgggtctggcgcgcggccgaggagctccgccttcgcgtcctcgcctcctctggcgccggcctcctcgccgcgctgctcccccgctgccccgcgctctcccgcctccacctccggatggaaagtgatgttgatggcactaccctggcttgtattgcattttcctgcccaagtttaagaactctcgagattaccatggctgctgatgctgtcaacaggatgactggggaggatctaagtcgttttgtttcggagaagtcttctctctcagccctcaaaattggtggttgctctaatttggatattcttaatctgtgctcttcaagcctttcaattctttggttgtcagatctttgttccctttcgaaatcggttatgaactgtcctaatatgagcgagctatcactgtgcttcacagaacatagtagtgattgtaccaatctgattactttgatggatggcctaggtcgtacatgtcctaacttggaaaaaatgcacatatcatcaaaacaattatctaatgaagctgtatgtgctctagagaatgctaatctcaggggactgttcatgctatccctgattctaggttcaaaaataactgatgcagctgttgcatctattgttcggtcatgtgcaagcttggagttacttgatttaagtggatctagcattagtgacaatggtgttgggatgatatgtaaagcataccctcgtactttatcaaggctgctccttgctctttgcccaaatgtgaccacacgtgggatccagctagccacagcacagttgccatgtcttcaactcatggactgtggaatgagcctatgtgctaatgtgaagaatgaaaaagagggtccatattttggtgaaatcaatggaggtattagaattattcgaaaactgtccatcttaaagaggcaacctattcaccaaaagcttattataaagcatgggaatttgaagaagctcagcctgtggggctgttctgcattagatgctctatatctaaattgtccagagttaaatgatctcaatcttaactcttgcacaaatctacatccagaacgtctgcttcttcagtgcccaaatttaaagaatgtctatgcatccggatgccaagatatgttgattggagcaatcagaaatcagccaggttctgaatgagttcgctgcagttgaaccatctcttccatgcaagcggctagcggatggctccaaacgggttcaactccctcagttcctaaagcagcagccgtcgaaggacaacaaattaattgaattgagccagacccagtgcactgtgcatcttggttcataataacaccaccagagccagttaacggagcattgtacacaccgaattatgtgaatcatgcaccacataacattatcaattcgttgtatacttctgtattgcatcagaacctgtagtgattgttgtataagctgctaattgctgcatggacatgtctgaatccatcatggatttcttgcgaccgttagtctgttctaggaaacattatataggaataattcgtaaccatgacccgtattctctagggaaaaaaaataatgatcctaggtcactcattttggttggtgttattctgttattcttccgcatgagctatctatggactttggttcttcaatctctacttttaaataggccccgtttggatcatttgaagatcatttgaatcgaattcca

SEQ ID NO: 10506 - DNA, 2219 bp, Zea Mays
atccatccatcctcctcgcggctcgcgccccgaaaaatggcgccaacccctccccagtctcccgcgcggcgctgccccagctatttccccctcccctgaattgaccccagccgcgcctcccaaaccctaacctaacccccgccccctgggccccggccatggcgtcactgcccaagccgccgccgccgccacgccccaagacgcggggcaactacaactgcggccgctgcggccagcccaagaagggccacgtctgcgtcggccccggccccggccccggcggcgctgcgtcgccctcctcctcgtccggggccggaggggagcacgggctgcgccgcgccctctccttcgacgaggccggcacgccgtcctcgccggagaagaagcccaaggtggaggacgtcgacgaggcggagctggacgaggaggccacggtggacgtgggcgcccgcgcggtgtccagggaggtcatggcggaggttctgcaccgcctcggtccccgcggggtcatggccgccgccggggtcagccgaggctggcgggactgcgcgggccgggtctggcgcgcggccgaggagctccgccttcgcgtcctcgcctcctctggcgccggcctcctcgccgcgctgctcccccgctgccccgcgctctcccgcctccacctccggatggaaagtgatgttgatggcactaccctggcttgtattgcattttcctgcccaagtttaagaactctcgagattaccatggctgctgatgctgtcaacaggatgactggggaggatctaagtcgttttgtttcggagaagtcttctctctcagccctcaaaattggtggttgctctaatttggatattcttaatctgtgctcttcaagcctttcaattctttggttgtcagatctttgttccctttcgaaatcggttatgaactgtcctaatatgagcgagctatcactgtgcttcacagaacatagtagtgattgtaccaatctgattactttgatggatggcctaggtcgtacatgtcctaacttggaaaaaatgcacatatcatcaaaacaattatctaatgaagctgtatgtgctctagagaatgctaatctcaggggactgttcatgctatccctgattctaggttcaaaaataactgatgcagctgttgcatctattgttcggtcatgtgcaagcttggagttacttgatttaagtggatctagcattagtgacaatggtgttgggatgatatgtaaagcataccctcgtactttatcaaggctgctccttgctctttgcccaaatgtgaccacacgtgggatccagctagccacagcacagttgccatgtcttcaactcatggactgtggaatgagcctatgtgctaatgtgaagaatgaaaaagagggtccatattttggtgaaatcaatggaggtattagaattattcgaaaactgtccatcttaaagaggcaacctattcaccaaaagcttattataaagcatgggaatttgaagaagctcagcctgtggggctgttctgcattagatgctctatatctaaattgtccagagttaaatgatctcaatcttaactcttgcacaaatctacatccagtgcccaaatttaaagaatgtctatgcatccggatgccaagatatgttgattggagcaatcagaaatcagttgaaccatctcttccatgcaagcggctagcggatggctccaaacgggttcaactccctcagttcctaaagcagcagccgtcgaaggacaacaaattaattgaattgagccagacccagtgcactgtgcatcttggttcataataacaccaccagagccagttaacggagcattgtacacaccgaattatgtgaatcatgcaccacataacattatcaattcgttgtatacttctgtattgcatcagaacctgtagtgattgttgtataagctgctaattgctgcatggacatgtctgaatccatcatggatttcttgcgaccgttagtctgttctaggaaacattatataggaataattcgtaaccatgacccgtattctctagggaaaaaaaataatgatcctaggtcactcattttggttggtgttattctgttattcttccgcatgagctatctatggactttggttcttcaatctctacttttaaataggccccgtttggatcatttgaagatcatttgaatcgaattcca

SEQ ID NO: 10507 - DNA, 2268 bp, Zea Mays
ggctgtggtgtcaagtgtgatacagagagagagagagaggcaggcagctgcgtctgcgtcgtggccggcgcggcgctgcgctgcgcggaaaccaaatcctcagctccggtgttctctccaatctccatccatccatcctcctcgcggctcgcgccccgaaaaatggcgccaacccctccccagtctcccgcgcggcgctgccccagctatttccccctcccctgaattgaccccagccgcgcctcccaaaccctaacctaacccccgccccctgggccccggccatggcgtcactgcccaagccgccgccgccgccacgccccaagacgcggggcaactacaactgcggccgctgcggccagcccaagaagggccacgtctgcgtcggccccggccccggccccggcggcgctgcgtcgccctcctcctcgtccggggccggaggggagcacgggctgcgccgcgccctctccttcgacgaggccggcacgccgtcctcgccggagaagaagcccaaggtggaggacgtcgacgaggcggagctggacgaggaggccacggtggacgtgggcgcccgcgcggtgtccagggaggtcatggcggaggttctgcaccgcctcggtccccgcggggtcatggccgccgccggggtcagccgaggctggcgggactgcgcgggccgggtctggcgcgcggccgaggagctccgccttcgcgtcctcgcctcctctggcgccggcctcctcgccgcgctgctcccccgctgccccgcgctctcccgcctccacctccggatggaaagtgatgttgatggcactaccctggcttgtattgcattttcctgcccaagtttaagaactctcgagattaccatggctgctgatgctgtcaacaggatgactggggaggatctaagtcgttttgtttcggagaagtcttctctctcagccctcaaaattggtggttgctctaatttggatattcttaatctgtgctcttcaagcctttcaattctttggttgtcagatctttgttccctttcgaaatcggtcgtacatgtcctaacttggaaaaaatgcacatatcatcaaaacaattatctaatgaagctgtatgtgctctagagaatgctaatctcaggggactgttcatgctatccctgattctaggttcaaaaataactgatgcagctgttgcatctattgttcggtcatgtgcaagcttggagttacttgatttaagtggatctagcattagtgacaatggtgttgggatgatatgtaaagcataccctcgtactttatcaaggctgctccttgctctttgcccaaatgtgaccacacgtgggatccagctagccacagcacagttgccatgtcttcaactcatggactgtggaatgagcctatgtgctaatgtgaagaatgaaaaagagggtccatattttggtgaaatcaatggaggtattagaattattcgaaaactgtccatcttaaagaggcaacctattcaccaaaagcttattataaagcatgggaatttgaagaagctcagcctgtggggctgttctgcattagatgctctatatctaaattgtccagagttaaatgatctcaatcttaactcttgcacaaatctacatccagaacgtctgcttcttcagtgcccaaatttaaagaatgtctatgcatccggatgccaagatatgttgattggagcaatcagaaatcagttgaaccatctcttccatgcaagcggctagcggatggctccaaacgggttcaactccctcagttcctaaagcagcagccgtcgaaggacaacaaattaattgaattgagccagacccagtgcactgtgcatcttggttcataataacaccaccagagccagttaacggagcattgtacacaccgaattatgtgaatcatgcaccacataacattatcaattcgttgtatacttctgtattgcatcagaacctgtagtgattgttgtataagctgctaattgctgcatggacatgtctgaatccatcatggatttcttgcgaccgttagtctgttctaggaaacattatataggaataattcgtaaccatgacccgtattctctagggaaaaaaaataatgatcctaggtcactcattttggttggtgttattctgttattcttccgcatgagctatctatggactttggttcttcaatctctacttttaaataggccccgtttggatcatttgaagatcatttgaatcgaattcca
